United States Patent Application Publication US 2007/0067865 A1 - sequence listing, part 41

SEQ ID NO: 258855 - DNA, 1235 bp, Zea mays
caactcgccgacccagccgatcccaacgcacactgcacccagtgcggcggccgccggcaatggaggccgtggcgcgcggcggcgactacctgcggcggttcgtggcggagacagagtggtacaacgaggttgtcctcagcgccgtggcgccaggcgactggtggcgcggcctgccgcacccggtgcagtcatggatgcgcaactgcgtcggcggttacctcctctatttcatctctggtttcctctggtgcttcgtcatctactactggaagcgccacgcctacatccccaaagatgccatccccacaaatgaagctatgaagaagcaaatagttgtagcatcgaaggctatgcctttttactgcgctcttccaactttatctgaatatatgattgagagcggatggactcggtgctactttaatatcagcgaaatgggtttttctgcgtacctttgttatatggctatgtatctcatctttgtggagtttggaatttactggatgcacagagagttgcatgacataaaaccattatacaaatatctgcatgcaacccaccatatttacaacaaggagaataccttgtctccatttgctggacttgcgtttcacccactggatggtattctgcaagcaataccgcatgtgcttgcgctcttcctcttcccaacgcacttcaggacacacatcgctctcgtgttcttggagggcgtgtggacgacaaacatccacgactgcattcacggcaaggtatggccagtcatgggcgctgggtatcacaccatccaccatacgacttaccgccacaactatggccactacaccgtctggatggactggatgtttggtacgctccgtgagccagatgatatcctcaagaaggcctgagttcgtcgtagctgtggttttcctacggtgctggatgtgcttggtctgttctgtccccagtgcctctaatccgctgagcctgttcagcgctctgtttctgtaggctttggtgtgctatttagtttgctaggttttatatgttgtgcttattctgtaatttagtgatgtttgtctgatgacgcaacggagttcaggacgaataaaaagaaagatttgctagacaaaaaaaaaaaaaaaaaaagggcgccgctcgcgatctagcggacgcgtgggcggacgcgtgggcggacgcgtgggtctagatcgcgagggccgccgctcgcgatctagaaccggacgaaaggg

SEQ ID NO: 258856 - DNA, 622 bp, Zea mays
cgtagtaactcggaatcggtcgaatgatcttgttctagaggctgtgtggacaacaaacatccacgactgcattcatggcaagatatggccagtcatgggtgctggatatcacaccattcaccatacgacttaccgccacaactatggccactacaccatctggatggactggatgtttggtacgctcaatgagccagaagatatcctcaagaaggcttgagtttctcggagctgtggtattcctatggtgctggtgctggaactgctcgatctgttcccagtgtttctaatccgttgagcctgttcagcactgtctgtttatgtaggcatcagtgtgttaattagtttgctaggttcatatggctttgtgcttattctgtaatttagtgatgtttgtctcatgacgcaacggagttcaggacgaataaaactttgctagacacattctggattccagctgcttgtacaatgttgcaactcaactgtcaatataggatgtaaaacggattccttctagtcttgtacctgatgagttatttgtggtttctgtgcatgcattgctcagcctatgaatgttgcttatgttttgtggtcaagccaagaaaaaaaaagaaaaaaaaca

SEQ ID NO: 258857 - DNA, 474 bp, Zea mays
tgaccgaggaaatgtcagaaaaatttctcggtttgcctggagtacctttcattttaggtcgcttcgtcttagctgtggttttcctaccgtgctggatgtgcttggtctgttctgtccccagtgcctctaatccgctgagcctgttcagcgctctgtttctctagcccttcgtgtcctatttagttcgctacgttttatatggtgtgcctattctgtaatttagtgatgtttgtctcatgacgcaacggagttcaggacgaataaaaagaaagatttgctagacacattctggattccagctgcctgtacaatgttgcacctcagctgtcagtgtaggatgtaaaatggattggcttctacctggtgagttcacgcgttgctcggtctatgaatgttgcttatattgtgtaaaacagtggtggccttgcttcctttccagcattctgaaaggtaaacatttaaggcactcaggcg

SEQ ID NO: 258858 - DNA, 410 bp, Zea mays
gaattcggctcgagttcctcgctggggccaactccatctttgccggcgagaaacttctcacaaccgcaaacaacgactttgatgcggaccaggcgatgttcaagatccttggcctgatccccaaggctccaagctttggcgaggaagaggtgtctgcggcggctcccgcagaatccgagaggtctgagcaagctgcttcgatgtagaatatatacatatcattaccgattatccgtatcacggttggggcgaaactagaactaccgttgtagctagagcattggattgtagaaaccacaacatttcattattttgtaattgcttgagactgaatgggggatacccatgtcgggctagatcaatggataacttccacacaaccaaaaaaaaaaaaaaagggcggccgccga

SEQ ID NO: 258859 - DNA, 1221 bp, Zea mays
tttctacgcgtccgcttcgagttcctcgacaccgatctcaagaagtacctcgacgtctaccgcagggggcccagcgccaggccgctccccgcgacactcatcaagaatgaattcggctcgagatgcaaaggagttgcacactgccatagccatggtgtccttcaccgggatttaaagccacaaaacctgctggtggacaaggagaagggtatactgaagattgctgatctgggactcggtagggctttcactgtgcccatgaaaagctacacccatgagattgtgaccctttggtacagagctcctgaagttttgcttggagcaacacattactcaactggcgttgatatgtggtctgttggatgcatctttgctgaaatggcccgacggcaggctctctttcctggtgactcggagttgcaacagttgcttcacatcttcaggttgctgggaacacctactgaggaacagtggcctggagtgagtgatttaagggactggcatgagtttccacagtggaagccccagggtttggcacgtgtcgtcccaacactggaacctgaaggagttgaccttctatcgaaaatgcttcagcttgatccttcaaacaggatatcagctttagctgcgatggagcatccctactttaacagccttgacaagtcccagttctagccgttgtactatgtggttcagaaggcgctaccctcgtacagagagatttccaatggtgttatgaatctcaattgccatctaggcaactggttcatgattttaccaatctgttagtgagtgaaaatcgtgcgagggtcatatgtgttccccttgtcttaaaaatctggtgtggtgtagaacaagagttacctgtgggaggcctgtgataatgccctttatgtctcaacatccattttcgtgcattccatgttcttcaatacggacttgaaacaggaattctgattttcttaaaaaaaaaaaaaaagggcggccgcaatactataaaacaaactaacatacatatactaaaaaataaactaatcttccttcgatctagacaaccctaccttacgaccacgtccttatgcacaacaatatatctttttcatacccactattatatttgcattcaccacttgcacaaactttgttgcttactaatacctttttttgcctacttactaaatttttactctaaattgttatctttcaaattttcaatttgtt

SEQ ID NO: 258860 - DNA, 485 bp, Zea mays
gaattcggctcgagcctatggataattatggaatactgtggtggtggaagtgttgctgacttgataggcatcacagaggagcctcttgatgaatcccaaatagcttacatttgtagagaagcactaaaggttctaacaccacatttgtggggcaattaaatgtcttcgaatatttaacttttgtgtgcttattttcttctccagggccttgcttacctgcactccatttttaaagttcacagagatattaaggggggcaacatccttctaactgagcaaggcgaggtgaagttgggtgattttggtgtagctgcccagctgacaagaaccatgtcaaagcgcaacacggtattcttaacagtgtttcttttgctacttcaaattccaaagttcaagaaacttcacatcgatgtgacaaacaaaatgaagtgcagatgaaacttgtcaatgccagtttactaaaaaaaaaaaaaaagggcggccgc

SEQ ID NO: 258861 - DNA, 426 bp, Zea mays
cccacgcgtccgatggataattatggaatactgtggtggtggaagtgttgctgacttgataggcatcacagaggagcctcttgatgaatcccaaatagcttacatttgtagagaagcactaaagggccttgcttacctgcactccatttttaaagttcacagagatattaaggggggcaacatccttctaactgagcaaggcgaggtgaagttgggtgattttggtgtagctgcccagctgacaagaaccatgtcaaagcgcaacacgttcattggtactccacattggatggcaccagaggtcattcaagaaagtcgttatgatggaaaggtagacgtttgggcattacgtgtatctgcaatcgagatggcagagggcatggccacaagatccactgtgcatccaatgagagttatcttcatgat

SEQ ID NO: 258862 - DNA, 622 bp, Zea mays
ggtcgacgacgcgtgcgccgacgcgtgtgccgacgcgtaggttcgactttcactttcaagacggaagccagcctggacgtgttcaccttgatatgaccggtcagaacgtgaccgaatgcaccggcgggtcaagcaacgtcaccttcgacaacctgagagaccgctaccacacgcaatgcgaccccaggctgaacgcgtcccagtccctggagctcgccttcatactcgccgagaagcttaggaagcggaggatgcggcggtcgtcggtggcgtctgggctcggcggcagcatcttgcccttgccgccctttggcttttgatgtcttgcacgctggctgtgtgcatgcagggtgcagtgcaggggtgtggtaggagaatcttacgttgtcgtttgccttgctatgtagtatgtaatgctttaatttactgcattctacgtcgttttttcccttcttcttctatttgtttctttttgtacgtagctgcagctcataagagattgaataatactattgctgccacatatatagacggagttggctttgtgaattaataaagtccattgctgctgtcgtcaaaaaaaaaaaaaaaaaaaaaaaaaaaaaaaaaagggcggccgccg

SEQ ID NO: 258863 - DNA, 256 bp, Zea mays
gctagctcgaccgcctctctctggtctctagcgctgtggagctccttcctacgtgcgctagccgccaggtcgtcttcaacctccatccgtggagctcgctccctagccgagtttttccatggtgccctggatgccagccccttgactcgatgcccctgctaggttcctggcatgttcgcccagatcgatcctagctcccatggccgccctggatctccatggttgagttttctccctgcaggatccccccaaatag

SEQ ID NO: 258864 - DNA, 341 bp, Zea mays
  unsure (1)..(341): unsure at all n locations
gtgatctccttggctcttgtagcctatgtttcnccggagttaatcccctcccaatatcttggtccatctgtccagagcttggtgtaccagtccctaggtggtgaccatcgtcggcagttagtccacctcgccgtgaccagaattcccagaagaagaagatgaaattcaagaagtggtttctgaagaggagtctgcttcagtgcctgctcatcaagtgatgggagccatctaactggggtttaacaaaggagaagttttattcccttatttttgggttagttacttcatgtggaggacttgaagcttagaatgttgttatatatctcttatagaaaggcttc

SEQ ID NO: 258865 - DNA, 412 bp, Zea mays
atttgataagctttaccttgattcccgacaaaccagcatacccttgaaagtcttttctttagtcgggtaagtcttgttgagtaattgcgtactcagggttttattcccattgttgctgcaggttacgattcgctttgattgtgattgaggttaagtgccggtgggcagtgggctcggccttctcatataagtacatcccatctatagcttctttattgaggattgtcacttaaggtagcatgtattttaaaacttgtaaatgttttatacattcaaattgtaatatttttgaatcaatttttttttgtaataaactccgatgatatatattgtaatcttgttataacttgtaaatgttttaacttgtaaccattttgtaataaagaatttccgctgaaaatgttagtatgtg

SEQ ID NO: 258866 - DNA, 414 bp, Zea mays
tttttaaggatccattattagtaagcatttctgcaaacaaagtctttgattcttgataaaccataccttgattcccaacagctagcatatccttgagagtctttttccttagacaggtaagacttgcgaaagtacacttcgtactcagggttttcgaacccatgttgttgtaggtactagttttgtgctactgtggatggtgttaagcgccggtgggcacgaccttcttataagtctaagtacttcttctatacttcttatgaggatggtcacctaagctagcatatatttcaaaactataaataatttataacagttcaaagttatttctttgaatcactttgtaatcactccgattatgtacaatgtaaacttgatgtaacttgtaaaatttggtaataagatttccgctgc

SEQ ID NO: 258867 - DNA, 526 bp, Zea mays
agtcatggatggaatcataatgagcaaaaatcatgttgtatggattaatgtgatgatgaaattagactatatgcaaacaaggtctattaatacttaatctagcattaaaatgttgaaagtaaggatacactcatagtaagcttttctacaaacagagtccttgattcttgataagcctttccttgaatccttttaaaaccagcatacccttgagagtcttttcttcagtcgggtaagtcttgctgagtacttgcgtacttagggttttacccattgttgctgcaggttacgagtcacttgattgtgattggtgttaagcgccggtgggcacggccttctataagtctaagtacttcttctatacttcttattgaggatggtcacttaagctagcatatatttcaaacttataaacaatttataacaattcaaagttatttctttgaatcacttttgtaatcactccgatcatgtacattgtaaacttgatgtaacttgtaaaatttagtaaacagatttccgctgc

SEQ ID NO: 258868 - DNA, 302 bp, Zea mays
acaggccacgtatgattggtccatgcgttgctggcacccttggagtctctcttcctcatgctgtggttgagctcggtgacacctgctccttattcaatgatataaaacttgattcagtgaggatgctccctgtccttaagtctggtccgtgtttatcaccagagtgacacagctcttgagttcaagtcgatatacatcctctccccagccaatagctcggtctgcccttgtgcttagcgctccaacatcagtctggtgaccacgctcacccaactgctcacctcaccgtggccgagacgctt

SEQ ID NO: 258869 - DNA, 425 bp, Zea mays
gtcttatacttcagctcgagttaattatggtacgataattaatcgcgtgatgcggaagatgagccaagccaaccccaagcgcgagctaatccgcaagatgaagttgatgaatcaacctgaagatggttaaatcaagcaagtgctcggtcgaagaatactcgttaagcggacgtcacctaacaacactaaactagtgttactcaggtctaaccttgtgctgctgtgatggtgttaagtgccggtgggctcggccttcttataagtctaagtaattcttctatactacttattgaggatggtcactggagctagcatatatttcaacttatacttttgtaatcactccgataaaataatgtaaaatttttgtaacctataaaatttggtaataagatttccgctgcaaaatatatacctctttaatc

SEQ ID NO: 258870 - DNA, 434 bp, Zea mays
  unsure (1)..(434): unsure at all n locations
ggatccttgggcatctctgggaaaggtgtggtccaggcctgagtcaatctccttagcctccgcgtcggttttgttcagttcatcaagtgccattccattgtctggtactctggtgccacagcaaccatccttccacctcgccgtggtcagagcatctcgagaagtttgttacccagaacggagttgcgccaccgcagaccggagccgtgaacagcctctgtgttgaccgaacaactcacgctttctccggtcgattccttgtgagcaccaaagtttagaactcctaccagaaggagtgaagattcaagctgaagtggtgactgaagaggagtctactccagtggctgctgatcaagtggaggagccatctaactggggtttaatagagggatcgagtacctcttcactgcaacanaggtgatgaggagtattct

SEQ ID NO: 258871 - DNA, 374 bp, Zea mays
acgtaacgagtgggtttcttcccaaggtgatactgggtgatcaagctgaagatggataatctgatgaatgccaggacaaaggatggtcatcatgtgatcaacgtctaacaacactaacctagtgttactcaggtactagaattgtgctgctatggatggtgttaagcgccggtgggcacgaccttcttataagtctaagtacttattctatacttcttattgaggatggtcacttaagctagcatatatttcaaacttataagtaatttataacatttcacaatttactctttgaacaacttttgtaaccactctgataaatataatgtaaacttgatgtaacttgtagaatttggtaataagaattctgctgc

SEQ ID NO: 258872 - DNA, 271 bp, Zea mays
tttggtgagtttatgccacattattccccccaacttgttgagcgatgaacatgtgtgagctcacccttgttgtctcaccaccccccccaggagaagaacaggtggtccaagaggagccgcttatcgaggagtttaatctgatctaggtggagtttctcagttgatattggcgccgacgatccttagttcgttttatatttatcttttattttgtaataagacttccgctatgtaataaatactctgattttactgtgacatttatctctat

SEQ ID NO: 258873 - DNA, 509 bp, Zea mays
tttccctttcgtccgaatatatctagttgttacacttaaaagttgtgatgttttgctttaattctgtatcctccttagtataacttatctatcttgtgctatttatgctcctactcactcatatgcattatgcatatcatttaggtacgttaattgatcacgtgatgtgaaaggcaaggtttggattgatctcaagataatgctgatggacgaagctaaagtgggtgaatcaaacaaatgccaggatgagagatgctcaccaagtggtcttcatctaacaacactaacttagtgttatcccaggcaagccccggtgtatttgccacctacttgctgtttttaaacttttatcacttatatgatgcattaggtggtaggagttgaatgattaaacctttgcataacttccttgaactattgattaccatccttgatacctgttttaaaaagctcgatgtgcttagtatgctcatagactaagaacaaaatgttttgatctatgaatcatg

SEQ ID NO: 258874 - DNA, 582 bp, Zea mays
tgttgcttaagaaggtttaagttttggattaagtctaacatggattagttccctggagatttgtaagtgaagatgtcttgaagtgcccttgaaaatcctcttgtgttttggctagtttcgtgcactttgtagaaaagtgtactcatgatgtgttgtttgttaccttctttttgaaatgcattttcataccatagcaagcattcatctacatgtaattgacttgtagaacacctagaagaagtgatgtttgaagaaagagttcacttcagtgcctgttgatccagtggtgggagtttcatctaactacttaccatagtagaataatttttgggatcttctcctacaataaggcaagccccggtgcatttgccaccttccttgtgcttacaaaatttttatcacttatatgctgcattaggttcaagaagttgattgattaaactcttgatgcattaacatccttgaaaggtttgattaccacaccttgtcacctgttttataaaaactagagatgcttaatcatgctgatagactaagaaaatattttttgatctgtgactcatctttttacaaaaaggaaat

SEQ ID NO: 258875 - DNA, 352 bp, Zea mays
gactaattaggaaagctagtggaagactactttacccgaaaggggcaagggcagtagggaagttgcatgcaaggaggttctcgggttgatttagctgcgatggcggtcagacgggagattcttgcaagtgctcttcccataaactgtagcgggttttcggaagctagtggaactttgtaaaggcctcgtagtgttgccctgccgcgcttcctaggtagaggtgtatgggagtcgttaccccttggcagatgggtaacatgacttgtgggtaaagggtacaacctctgcagagtgtaaaactggtatactagccgagctcacggtcatgagcagctcaggactctctgatgat

SEQ ID NO: 258876 - DNA, 286 bp, Zea mays
gacgtcgcttcgagtttagtcatggtacgttaattgatcacgtgctatggaagacgagtggaattgatctccaagtgatgctgatggacaaagctaaagtggatgaatcaaacaagcaccaggatgagagatgctcaccaagtggtcatcatctaaccacactaacctagtgttatcccaggcataccccggtgcatttgccacccccttgttgttataaaacttttatcacttatatgttgcattaggtgataggagttgtgtgaaatgcattaccattccttgg

SEQ ID NO: 258877 - DNA, 461 bp, Zea mays
tttattagtcgcgataattgttattaatttagtatacacatattgtgatgtttgatttagataaataggtaaatcaagtaattaaaatacatagtttcaagagttaataaaaagctaggaataaaaatagatattctagtgttattatgtcaatttgattaatggatgtagttgatgccctgctgtgatatccatgatgcttaatgcttggttttaagtgttttatcctttttagtgtagattatctatattatactcgttatacttgtgctacatgtgcatcgtgcatctgataaggtacgataaataatcgcgtgatgtggaagacgaaccaagtcgacttcaagcgcgggctaatctgcaagatgaagctgatggacaaacctgaaggtggataatggagcgtgtaccagaataaaggttgatcgtgaaagagacatcgtctaacaaacactaaccta

SEQ ID NO: 258878 - DNA, 428 bp, Zea mays
  unsure (1)..(428): unsure at all n locations
aattaatcgcgcgatgcggaagaagagccaagtcgatctcaagcgcgggctaatccgcaggatgatgctgatggacgaaccggaagatggataatctgaacaatgccaaaacaaaaggctgatcgtcaagtggtcgtcgtctaacaacactaacctagtgttacccaggttctaactttgtgctgttgttgatggtgttaagtgccggtgggctcggccttcttataagtctaagtaactcttctatacttcttattgagaatgttcacttgagctagcatatatttcaaaactataaaataattattataagttaaaggtaatcctttgaaccacttctgtaaccactccgataaatctaatgtaaaacttgatgtaacttgtaaaatttggtaaaaagatttccgctgcaaaatgttngtgtgtga

SEQ ID NO: 258879 - DNA, 381 bp, Zea mays
  unsure (1)..(381): unsure at all n locations
accgggccggaattcccgggtcggccggacgcgtacgcccacgcgtccgcccacgcgtgcgcccacgcgtgcggccacgcgtncgcccacgcgtgcgtggtagatgattatgcgagcgtggggacatggatcanagtgaaccatcaaatggtattggtggattaatcttgtggatgcatcaagccagcaccagaatgagagatactatcatctaacaaccctaacatagtgtttatcccaggcaagctccggtgcatttgccacctccttgttattttaaaacttttatcacttatatgttgcattangtgatagaggttgagtgatgaaacaattgatgcattaccattccttgaaatttaattatcttcattgatacct

SEQ ID NO: 258880 - DNA, 577 bp, Zea mays
ctatctcaaaatctctacaaagaaaattcagccgccgttggcttcttctgtagtgtgcatcgccttcacgtcacttcctccccatcacgtttttcctctacccaggtcgagctcgccctactgtgcttgcctgtgctcgtcggccatatccctggtggccgacctcgcccctgccccagacacagcttccccttcagccctgctgctgcaagcactcagcctctcctatggcacacggtgctcgtccagcccctttctactggtgtttgcgtcatctccctggtgctcgacgaaatgaccatgaggagttttgtgttgcgtgcagccccacctgcgacaccgtcgacccccgaagcgaggtccgtgcgacgtttgccaagtgttcgatggaaggtccgaaccgggaacctcgcctttctcgcggatcttcgggtcggtttgtgaattggtgagcctattcgctactctatttagttaatttgatcgttgtattgattagagtcgtggtcgatgattttcttgtttgcagcgcaagtatatggagtgttcacttccagattcatcgttgtccacatgt

SEQ ID NO: 258881 - DNA, 472 bp, Zea mays
  unsure (1)..(472): unsure at all n locations
tttgtttctgtcccaatttggacagcagagcttttctcatgttttctgacatttatatacattgaatcacattgagatgtttataaataaattgtagacaattctattagctttctaaaaagtctaggatcacctgatttggatttctgaaactccagttataaatttttgaaataaagagccgaattctgtccaaatctggacagaattaaagtttagcactgtttgaccttttaaactgtcgaatcaggttgtgatgataatataagagttatagaggactctctaagctttccagaaagtcctagtttactatttttggatgcatattttgtgagttatgaataaaacaattgactactgtgctgctgtccaaattcagcaaatatttaaatgactatctggagttttcttttgtgtggatacctagatttgctaagtcttggcttaattaataaagnctatagtagca

SEQ ID NO: 258882 - DNA, 692 bp, Zea mays
cctctcgtccgcccacgcgtccgcccacgcgtccgcggactcttgggggtttttgaaaagaatttaccaaagaatttgcaaaaacaaaacttgtggtgcaaatgtggtccaaaattttaaataagaagaaaacaatccatgcatatctattgaaataattatattggtttcattccaagcaacctttgcacttaccttatgcaaactagttcaattctgcacttataaatttgctttggtttgtgttggcatcaatcaccaaaaagggggagattgaaagggaaatagggtcaaaccttttcctaaatgattttggtggttgaattgctcaacacaaacaattggactaactagtttgctctagagtatatgttccacaggtgccaaaggttcacaacaaaccaatacaaagttaaaagaaagggttcaaaacaaaggagcaaaggaaaccaaagtgtgtcctggtctggcgcaccggactgtctggtgcaccaccggacagtgtccggtgcaccagggagaatcgactgtaattcacactcttcaacttcgggtttcccaggcatagctccgctataattcaccggactgtccgatgtgccactggactgtccggtgcatcagcggagcaacggctatctgcgcgcaacggtcgactcttcaagtgaacagtgtaattcagatgtcagagc

SEQ ID NO: 258883 - DNA, 512 bp, Zea mays
ctccatctctgcgcgctgatgtgggaaatcgtgttgccgcgtgttgatccctgctgggtctgccattccggcctcggcgactagacaaagaggatgtggagcgcatgaggaagtcgattggtagaagcatcgggcacaagagcaatcagtgcaccgataatttgccatcggtgttgtggtaccacgacggagtcgcctagcaccgtggctagccccttcggacctcatagcagcgcgaggacgtgtgtcatctgaaaagcaagttggtacctggattctcaagtgccagcgcgaggacgtgtgtcatctgaaaagcaagttggtacctggattcttaagtgccaggagaagaacaggtggtcgaagaggagctcgctaacactgaggagttcgatctgatctaggtgggcgttctcagtcgacattggcgccgacgatccttagttcgttttatatttatctttattttgtaataagacttccgctatgtaataaatactctgatgtattat

SEQ ID NO: 258884 - DNA, 361 bp, Zea mays
cggaagacgacccaagtcgaccccaagcacgggctactccacaggatgatgctgatggacaaacctgaagatgatcgtcaagcggacgtcgtctaaccaacactaacatagtgtttattccaggttgttccaattgcaatcagtgctcaggaggggatgaaggcaacatggaggattttgaagagtttcaagactacgatgagttctagtcgtgtttagtggcaacccccagtcagctgcctatgaaggccttatcctctatgtttcgtattccacactttgattatgttaatgactatgttatgttaatgactctgtggatgtcttggacatcttgatgtaataaagtactatttccgct

SEQ ID NO: 258885 - DNA, 543 bp, Zea mays
gagaaacttccggtgttggagggcgaagagctcgaagttctaaaggtaacgcccgccgggtgcttggtggaacgtctcaaccggaggttgttgtcgatctctcggattcgagtcgatttagttgtggtacgttaattgatcacgtgatgtggaagacaatagttggattaatctcaaagtgatgctgatgaataaaccagagaagtggatgatttgatcatgtaccaggatgggagatgctcaccaagtgatcgtcatctaacaacactgacttagtgttatcccaggttgtaatttttgttctgttgtggatggtgctaagtgtcggtgggctcggccttcttatataagtatatcccttctatagtttctttaatgaggattgtcacttaagctagcatgtatttcaaatttacaaatattctataacattttaaagtgtaattcttttgaaacactttcttttgtaatcactccgatgaggtataataaaatcttgataaacttgtaatcattttgtaataaagagtttatttccgctgc

SEQ ID NO: 258886 - DNA, 663 bp, Zea mays
gctctaagttgtgctggcgccctgagaatccttaatctccaagtcttggctaagctccaagatccctgccccctgcccttttatctgcctgcttgaaagaaaggctgcagtgaagttcttctccctgtctgtgtgttctagctggttgctctagtatctctgcagtttgtgttgcaagtctgagttccctccccagccacctagttgatcggctccagtgccctatggtgctctcccttgtttggtgaccacgtccacccaaaaaccccacctcactatgactaggattcctcgatggatttcttccgtgtggtatttgttccatgctcaaataagaacacctaaaagaagtggtgtttgaaggagtctacttcagtgcctgctcatcaagtggatggagctatctaactaaaggttgggtagaaggatctagaacctcctctctgcaacaaaggtgatgaggagtactctaggtgttcctgtggctggagggtgtttcctgttctgaaggaggattagttaggcttgtgtataagctttggagggttcctaccttcctgctattgtaataggttatgcactttgagtatatcaggacttataataaatgtaactcttcctatgtaataaccttcagttttagaaatgaaaagaatgttttgt

SEQ ID NO: 258887 - DNA, 508 bp, Zea mays
tttgttttgcgtccgcccacgcgtccggatcattaattttaattggaacatggagcttaacttgagaaacatgtgccagcacaagggtgggatgggacgcccttagctgactaattaggaaagctagtggaagattaccttacccgaaaggggcaagagcagtagggggagtaggcatgcagggaggttctcgggttgattttgctgcgatggcggtcagatgagggattcttacaattgctcttcctagaactgtagcgggttttcggaagctagtggaactttgtaaatgcctcgtagtgttaccctgcctcgcttccttggtagaggtgtatgacattcatgaccccttggcagatgggttacatgacttatgggtacagggtacaacctatgcagagtgtaaaactggtatactagccgagctcacggtcatgagcagctcatgactgtcgcatgattaatttatggaactaaattcaatttggcatttgatttgatgggatta

SEQ ID NO: 258888 - DNA, 467 bp, Zea mays
  unsure (1)..(467): unsure at all n locations
tcctttcgtccggtttagattgaaagggaagggggctttaaaccttttcctgggtgattttggtgattgaatgtccaacacaaacaattggactaattagtttgctctagattatatgttctacaggtgccaaagattcaacataaaaccaataaaaagaacaagacaagagtcaagataaaggagcaaaggggcaaccgaaggcacccctggtctggcgcaccggactgtccggtgtgccaccggacagtgaacagtacctgtccggtgcaccagggaactcagactcaaactcgccaccttcgggaaagttcggggccggcgcgctataattcactggactgtccggtgtacaccggacagtgtccggtgctccaacggaacgcagcctcaggaacttggcagcctcggggatttacgaagactgctccgctaaaattcaccgactgtccngtgtgcacccgact

SEQ ID NO: 258889 - DNA, 751 bp, Zea mays
tgcgcgttcagctcctcctctcagctcatgcacgccaacttccaggcctttcaccactgccaatcaaatctctcgctcgacgctggtcacacgcccgcccagccgagctcctgcttccctctcccgcggtgcctggcttcctccaagctcgcccccaaccacaaccacgccctggtccgcgctccggccctcccctttctgcagcaagtgggtgcccccagcccctcctttgttcccatggccggccacctctgctgcttccatggtgatctctaaatccctttgttgttttactagttcttgttaatacccctgctgatgtgaggctttatgtgtgttgatgtgtgcgatatggagtaaaatccttggagaattaggtggagaagaaggttaagttcaacactcattaggtgttcgatgatatgctcgaactggtggccgtcttcgttcttgctgaaatcgagtcggagcatgatgtggttcgttacacgtgatgcgaaggacaagagccgagctgatcccaaaatgatgctagtgaacgaacctaaggatggatgatctgatagagtgccagaatgggagatgctcaccaagtggtcgttaattaacaacactaacttagtgttattccaggttcgctacacgtgatgcgaaggacaagagccgagttgatcccaaaatgatgctagtgaacgaacctaagatggatgatctgatagagtgccagaatgggagatgctcaccaagtggt

SEQ ID NO: 258890 - DNA, 558 bp, Zea mays
gccttgctagcttctcgcggcacagctgcagcattgagtgaaggctggttgcacgcacgcaaaaatagtaaatagaccaaccttcagtctgtctccaacgtacttggttgatatccccagtgaagcccggagcatcgggaacaggtttataactcagatttgggctaagggtgggcgagagttgcctggtgacgaagcccgaaacttgcttaagccggtatagaacttatacctgttgcttgctttatgtcttgtaatttttcttttttaccttacaccgtttgtttatctgcaggatggcggtgccgaagattgatagtccgaagcacgttccgaaggctgttgaagcttctcttaggcctgcctgtgtagagcttagtaacatttgtattaactttgtagaaaaaactgtaatcaaggattgaacaatgttatgtataactgtccataccttggaatatatttttaccttttcatccatgtacaagttgctttgctgtggacgaaacttgtattttttgagccgaaggccgaaaacacattcccttctttttggac

SEQ ID NO: 258891 - DNA, 575 bp, Zea mays
gcacccttccgggcacccttggggaaaatcccggtggttggttgaaagccaaccaaggtccgggtgacggtggctaggcatccgatggaaggcccgaaccaaaaatcatcgtcaatctcatggtgtctagtggggattgactatggtacgctagatgattatgcgagctgaaggacatggatcagagcgaaccataagatggtattggtggattatatcttgtggatgcatcaagccagcaacagaatggaagatgctcaccaagtggtcgtcaattaacaacactaacgtagtgtttatcccaggcaagccccggtgcatttgccacctccttgttgttttaaaacttttatcacttatatgttgcattaggtgataggagttgagtgatgaaacagttgatgcattgccattccttggaatttgattatcctccttgatacctgttttacaaaaagaactaatgaggcttagccctgcctagagaattaaaacttgtttctttttaaaagaatgatgtgtgacactgggtatgggtttgtttttatgaaaaaagacttgtaatggtgagcgca

SEQ ID NO: 258892 - DNA, 586 bp, Zea mays
gtcgagtgtccaatatcagagaaccaggactgatttgtggccaccgccgtgcgtcttcacgatcgagggggaccgtgatcgggtcaaagttgcgcgcaataccttggggacttgctcctgggggtaatcatgagcgtggagccggggatcccacacaatttgtcgccggagttggagcaaactcgcgacaccggggaacaccgtgggcagcatcgatttttccacagccgtagacgagcaagcaaccgatgaccccgatactcagcaggtggataatactgagcaggagctcgttgaagcccccccattcccataccctcttggacgatcccatacgatctacttctttctcaagcacttgcagccacacatcataccctagcccccccatctactgctcccaaggtgccattcgttgccgctcggatctctgtcgcgtggtgcaaatcttcaacggtttccggtggagggaggaaaggaggaaaggaggaagaaaagggggagaacccaaagtgggggacttccggatcgtacttagggatttgcccgaacttcccggaaaggtacttgatacatgttgggaatg

SEQ ID NO: 258893 - DNA, 319 bp, Zea mays
gtgcccttcgcttgggttcagtaaagcttccccttgccctcaggttttagctcgagaccactgcgtaagtgctggaattcctgtgttcacactagtactcacctctccccagtcaccaaacttcgcccctcacagaaacttgcacgccatcttcctgccagtggtgaccacgcccacccgttcttaacctcaccatggccagggttcgtggagattgtctcggccgtgttgtgctcgttccttgttcctcacagagtgccaagaaggagattatgaagaggagtctactccagtgtctgctgatctagtgatggagcta

SEQ ID NO: 258894 - DNA, 522 bp, Zea mays
agccccagcaccccatttccctctccctctccctcacacgcgcccacacctccgctgccaccgccgttcacgccgtgctgcatctgcagccgcgccatcgcccatcacctggtgccccgccgctctgagctcgcatcgtcgtccgccgaggagcctgcgtggagccgttgccgagatcgcgatttgtttccgcgctccgaggaatcgacgatcaagcgtcggcgaccaaatgatcaagctctctgagttttatgaggttgaagatcctgagcatctgtttggtgaagacgagcaagctgcagaggatcctgaggttcaacaagtagagatagctgagcaggagctcattgaaggagaagaacaggtggtcgaagaggagccgactaacactgaggcattcgacttgatctacgtggtgtttctcaatcgacattggcgccgacaatccttagttcgttttacatttattattttactttgtaataagtctttcgctatgtaataaacactctgatgatttat

SEQ ID NO: 258895 - DNA, 433 bp, Zea mays
agcgagagtgcatcgtgtgagtgttgtggttcatgttcacgtcggtgtttactctccccggccatcagtgtctcattgggaacgccgcggtgccgccggtgaacgccgctgggaatgatctcgccgtggcagaccttgtttggggccggttgcgtgcgtgatctatggttggtctgctctatgagctcccaaaataaagagtgaagatttaagataaagtggttgctgaagaggagtctactccagtgcttgttcatcaagtggatggagccatctaactgatcatcgtgttagaagtatctagaacctcttctctgcaacaaaggagaagttttattcctttatcttttggttagttacttcatgtggaggccttgaagcttagaatgtttatgtatacatcttatggaaaggcttcacccttccaattatt

SEQ ID NO: 258896 - DNA, 341 bp, Zea mays
cccacgcgtccgctaggaggactccgcgcgtcgctcaacctcaccggcaaccgcgcaccgcttaacggccaccggtttccacggagcatatgcccagtgcataaatacccagatcgctgggaccatgtactttgcgccatcaccgaggggagagaagggtgttgccgccgccacggatgaggctagccggagagtcctcctgctgcacgccgaagcggaacaacgcctggcaacaccgtgatcttggcgcgaggacttgtgtcatctgaaaagcaagttggtacctggattctcaagtgccaggtcaagaacaggtaccacaggatgaggcgcatgaagga

SEQ ID NO: 258897 - DNA, 633 bp, Zea mays
aattcccgggctttttgttgagtacatacatatatggtatgttgatttgatatagtgatggacacatgctttgaccatgaatatgtcaaatcagttgtacttgcacgaagcaaaacataatataagtttaggagtaaacttataactgtgtccaaacatgctcacacaaattcataccacattataattttttggtaaatattccacacatgtattttttacaagaaactaaattttgcacacaaatgtagcattgtagacatgtataattctatgaacccgtgaacttaacaacaccaaggtcattaaatcaactggaccctatgagtaacaatttcgatatggcaaacaccaaattattgaacttattggctgaaaattatgaccaacgtaaagtttaaattattatacgataaatatatcaaagaattttttttgagggacgtaaaaattgcatggaatcggctgctgttgggggccttcgtcctccgaaggtcctcaaaaacatgatttgacaatgttttccgagtggattatgtgaacaggtattttcggatccagaattatgaatatggagcacggccaggacgaagcctgaaccagacgaaagtcgagtgtagccgaagctgtgcg

SEQ ID NO: 258898 - DNA, 410 bp, Zea mays
atcctgaggacggatgatttctacctgcaagaatatttttattgggagcatggtgggatcttactgcaaagttccttataatgctctttgaaagggaattaggcttacacctagttcctaaataattttggtggttgaattgcccaacacaaatctttggactaactagtttgctctagtgtataagttatacaggtgcaaaaggttcacacttagccaataaaaagaccaagtattgagttcaaacaaaggagcaagggacaaccgaaggcacctctggtctggtgcaccagactgtccggtgtgccaccggacatgtccggtgtaccagaggcacctccagccgaactcttcaccttcgggagattccagaggcgactccgctataattcaccagactgtacggtgta

SEQ ID NO: 258899 - DNA, 414 bp, Zea mays
cgtgtatctcatgaggtacgataaataatctcgtggtaaggaagacgaaccaagtcgaccccaagcacgggctaatccacacggtgatgttgaaggacgaacctgcctgatcaagtgctaggacaaggatgatcgtcaagggacgtcgcctaacaaacactaacctagtgttattcaggttatgagtcactttgattgtgattggtgttaagcgccggtgggcacgaccttcttataagtctaagtacttcttctatacttcttattgaggactgtcactgagccagcatatatttcaaacttataaataatttataacagttcaaagtttattctttgaaccacttttgtaaccactccgataaatataatgtaaatttgttgtaacttgtaaaatttggtaataagattaac

SEQ ID NO: 258900 - DNA, 543 bp, Zea mays
  unsure (1)..(543): unsure at all n locations
cccacgcgtccggcgcaacgtgtgtggaagatggcacggtaaaccaggaaccgatggccggttcgaccgccattgccgatcggaggatgaacaccagcacctaagaagatgtgagagaccgagggagagagaataagaacgccctgtgcggatctccctcaaacgcgagacgctgggatggatgacctcggggccgcgccgctcgcaaattttggcccgcgccttgggaatttctcgccatcgaagttaaatccgccgtagatccgttttcgccgtggccagaggattccgcgccgctaagcttgcgtgaggttacgagtcacctgaagatcatcctggtatctggaatctcaagtcccaggtcaagaacaggtaccgcaggatgaggcgcatggaggatgctgcgacgagttcgtgagaggtctaggtcgtcgtctcccagtcaacttttggttgctggaccgttgtctccttataatgtaattatttattttgtacaaaactcttattatatagtaaagatgtgacattcgaaaaanaaaa

SEQ ID NO: 258901 - DNA, 350 bp, Zea mays
agcagaatcccaagtgtttgggtggagaagaagaaatgaactccagtgcagcaaacacctcgtgctcaatgaaatgtttgaatcggaatcatcagcatatctgcagtttggtttagctatgttgtttttcaggttataattttgttctgttgtggatggtgctacgtgacggtgggctcggccttctcatatgtataagtatatcccatctatatcttctttgaggattcacttaagctagcacatatttcaaacttataaatatgttatacattcagattataatcattttgaatcgctcttctgtaagcaactctgatgatatacattgtaatcctgttataacttgt

SEQ ID NO: 258902 - DNA, 327 bp, Zea mays
atgcatctcatgaggtacgataattaatcaagtaagacgaagaaaaagagttaagtcgacaccaagcgcgagctaatccgcaggatgatgccgatgaacgaactggaagatagataatctgaacgagtgccaagccaatggatgctcgtcaagtggtcgcctaacaaacactaacctagtgttacccaggttatagttttgtgctgctgttgatggtgttaagtgccggtgggctcggccttcttatataagtataccccatctttatcttcttattgaggatggtcatttgagctagcatatatttcaaacttataaacaatttat

SEQ ID NO: 258903 - DNA, 266 bp, Zea mays
ccgcacgtcgctcaacctcaccggcaatcgcgcaccgcttaacggccaccgaattccacggagcatatgcccagtgcataaatacccagaccgcctccacctctactaccacgagatcgagctggggaccgccgcaccaggatcttgtccatgccgttttttttcagcacctgtttaaggacgccacagttcccctcgaatccataggtcgagcggtctccggtcgcgggattccacaccgagagcaccaccatgaaatccaaagt

SEQ ID NO: 258904 - DNA, 368 bp, Zea mays
cttgggataatgaaggcatcaagacgttgataaattcattgtccaggcatggcccctctgtcaggcgccaaagttttgaaatagtttaaaatgggacctgacgttgagcaggaacggtcgcccgtctttgtcgattaaggaccgtaccgattgttggcctgatgatctaggaccttttaactggccacatacctcgtcatgggtaagcctgaacccggctattccatacgtgaaaagacaaccgcgcactgggcgtgggagatggtgggagtagcagttaccctcctggcaagaggctgaatggtagggtaatgtgctcccgggtagcgcggaccagttcatgtagtggaggatccgtgggaatggtt

SEQ ID NO: 258905 - DNA, 346 bp, Zea mays
cgcagatcatcaaagaggacaagacaggttggatgacagatgaggagtttggacgggagattctcgccggcgtgaaccccatgctcgtcaagcgtctcacggtgagggaacacgatcagtcctcgacctcaggtcagctgtgcactggagttcctgcccgtgtttttcaggagttccctccgagaagcagtcttgacccgagcaagtacggcgaccacaccagcaccatcgaggaagccgacctcgaggacaagctcgaggggctgatcgtgcagcaggcgctgcacggcaaccggctctacatcctggaccaccacgacaacttcatgccgttcctggtcagggt

SEQ ID NO: 258906 - DNA, 287 bp, Zea mays
ggtagccatgaccaccccctgaagatgccccttccaaatatcatcagatcagatgtgttgaaaaaggctccagagtttaagtttggctggaggaccgacgaagagtttgcgagggagacgcttgcaggcgtgaacccagtgctcatcaaacgtctgacggagttcccagctaaaagtaccctggacccaagtcaatacggagaccatacgagcaagatcaccgaagctcacatccagcataacatggaaggcctgtcagtgcagaatgcactgaagaagaacaggct

SEQ ID NO: 258907 - DNA, 525 bp, Zea mays
ctcatctcccttaccgccactcccagccctgaggctgacaccctctcccatggagccttgagcgccagaaacagccctgtcatggtgccgcgccgcagcatgggcaacgctgctgacgccaccgggagcggccggacggaggaagctttcgtcgttcggttggggcgttatcccggcgccataaccgtgcccctctgctcgactctttcttccccgcgctcttctctcccaacttcggtcgcgggtgtcggggtccagactgtgcactgcacgcgcgaggtttcgaggatctgaagaatcaccctggtatctggaatctcaagtgccaggagaagtataggtggttcaaaaggagccatgcaacgaggagttcgattcgatctaggtggcgtctcccagttgactttctggcgccaaggatgatccttagttcgttttatatttataatttattttgtaagtcttccgctatgtaataaaaactctgattatattgtgacatttatctctatacactctgttatt

SEQ ID NO: 258908 - DNA, 445 bp, Zea mays
ccggggccaaccaagccttcgaaaaaaaggtaataaattaacaaggctaaaataagaagatcgaattaaattaatccattaatcaagttattaagatacaaaatttaaagagtttataaaaagctaaggattaaaataaaatttccaatggaaaaagtcaaattgggtaaagggagtaatccaaggcccggcaagaaaaccaagggggctaaagcctgggttttaaatggttcaacccttttaatggtaaataaccaaaaaaaaacccgtaaacccgtgcaaaatgtgaaccatgcacctcataaggtacgataaataatcgcgtgatgcggaagaagagccaagttgaccccaagcgcgggctaacccgcaggatgatgcagatggataacccgatcaagtaccaagacaaaggctgctcgtcaagcgaacgtcgtctaacaac

SEQ ID NO: 258909 - DNA, 407 bp, Zea mays
aagacgacccaagtcgaccccaagcacgggctaatccccagtatgaagctgatggaccaacctgaagatggttaaatcaagtgaatgttcggtcgagggatactcgtcaagcggacatcccctaacaaaccctaacctagtgtttattccaggatataactttgtgctgctgtgatggtgttaagtgccggtgggctcggccttcttatataagtatacccagtctttatcttcttactgaggatggtcatttgagctagcatatatttcaaacttatacttttgtaacccctccgataaaataaaataaattttttgtaacctgtaaaatttggtagtaagatttccgctgcaacaaaaattacgaactttaattttgctggtcaaacagaagaaaaaaagggggg

SEQ ID NO: 258910 - DNA, 293 bp, Zea mays
acatacctcgtcatgggaaagcctgaacccggctactccatatgtgaaaagacaatcgcgcactgggagtggagagatggcgggagtggcgtgtacccacctggcatgtggctggatggtggagtaccgtactctcgggtggcgcggaccggttcacgtagtggaggacccgtgggaatggtagacatatgcaagggttaagtgctacatatgtcgtgtggctggagatccccagctgggtattaatcgattcggatcgccgttacttctcggatatgaagactggatcgctg

SEQ ID NO: 258911 - DNA, 469 bp, Zea mays
gttgcagcgtgtgtgtgggtggttaatcttctgtccacaccagtgttcacctctcccctgcccaagtttgcccagtccctaggtggtgaccatcgttggcaattagtccacctcgccgtaaccagaattcccagaagaagatgaaattcaagaagtagtttctgaagaggagtctgctccagtgcctgctcatcaagtggatggagctatctaactaaaggttgggtagaaggatctagaacctcctcactgcaacaaaggtgatgagaagtactctaagtgttcctgtggctggagggcgtttccagttctgggggagaattagttaggcttgtgtataagctttggagggttcctaccttcctgctattgtaataagttatgcactttgagtatatcaggacttgtaataaatgtaactcttcctatgtaataagcttcagttttagaaataaaaagaatgttttgt

SEQ ID NO: 258912 - DNA, 292 bp, Zea mays
ctcgcataccactgcatgggtgttggggatcttgtatccctgctagtgatgaccctctcccacagccaccaagtctgctctgtccagagaatcaagtgccagtggtgaccatgctcacaattctttacccaccatagccagaacattctagggagttgctggcctatatgaagcttgttccataatcatctcaggtgaggaagcgacaaatttttgttgcttttgctccaaggtggtatcaaatgaagaaaaacaagagtgaagatgcgggaggacgtggtctgccatatag

SEQ ID NO: 258913 - DNA, 262 bp, Zea mays
ctccttcaaggacatcctgcagctgtacgagggcggtatcaagctgcccgacatccccgccctcgaggagttccgcaagcagttcccgctacagatggtcaaggacctcatgcccgccggcggcgactacgtcctcaagctccccatgcccaaaatcatcaaagaggacaagaaagcttggatgagtgacgaggagttcgcaagggagaccctcgccggcgtgaaccccttgatcatcaggcgtctcacggagttccctccg

SEQ ID NO: 258914 - DNA, 594 bp, Zea mays
cgtcgttccacacgtcagcaagaaatcccaagaatcgggtgaagacgaagctagcagcgcgatattccacaagcgctcgacaaattgtctggatcggaaaatcgctaccgatctcgtggattcgtgtgagctgtggaaacggtacattaattaatcgcgtgatgcggaagacaagccaagtcgaccccaagcgcgggctactccgcatgatgatgctgatggacaagcctgaagatggtcgccaagtggacgtcgtctaacaaacactaacctagtgttatccagatgaagagccttcgcagctttgcaacttttgtgcaaaggtggttcccaagcaggagtaagaaccgaaaatagaagtgtgttgttgtgaatggtactaaacaccggtgggctcggccttcttataagtctaagtacctcttctatacttcttattgaggatggtcacttaacctagcaaatctttcaaacgtataaataattaataattgttcaaagtcatttcttttaatcacttttgtaatcactccgatcatgtacattgtaaaacttgatgtaacttgtaaaatttggtaataaaatttccgctgc

SEQ ID NO: 258915 - DNA, 415 bp, Zea mays
tttcacgcgtccgcgacgtgttcgatgaaatactggagcgagctccaactcgatctgcacagcccctgcgcgacgtcacaaactccgctcgttgtcgatgtcgtgcttcgggcatcgcgtgttcgacgaaaatcccaagtccatggacagcacatgcacaactcaaatccgatcggccagattgtttgatgtgtattttacttatttgatttagttgataatgtgtttgtatgtgtggggtgatgagaaaaataaaggagatgcgtcgttcggtagtaaggattaagttaaaatgaagtttatggtgtgaagagtgcgtcgataaatatgtatgccattgagtggttaaatgttgcattgatcggctagaggtcctatacaagtgtcgtcgctgtccaaaaatttatttggaagc

SEQ ID NO: 258916 - DNA, 464 bp, Zea mays
ttcatacatgtgcattgtgcatcccatgaggttcgttaattaatcacgtgatccggaggaccaaagctgagtcgaccacaagaggctggaaagcgtgagccactcacaaggtgatgctgttggatccacctgaagatggataggctgaacaagtgccaacacaaaaggctgttcaccaagtggtagccacctaacaaacactaacctagtgttattccaggtactagatttgtgctgctgtggatggtgttaagcgccggtgggcacgaccttcttataggttaaagtagctcttctatacttattattgaggattgtcactgagctagcatatatttcaaacttataaataaattataacattttaaagtttatttctttgaatcacttctgtaatcactgcgataaacataatgtgaattggttataactcggaactttttgtgataaggaaattcaactac

SEQ ID NO: 258917 - DNA, 424 bp, Zea mays
tctctttccaccgcatcttctatcttcggttccttgctctgcaccgcctcctgctcatccatctcccatggtgcccagccgagcagcccgtggaggcttgctccccacgcccagccctctctactgatggccgtcgtccctgctccatcctatggcgcctgccctcagtccagctcgccagcagctctctgccctcctccctcaagccctagccgagtttttccatggtgccctggatgccagcccctttactcgatgcccctgctaggttccatggccgtcgctgcccccagccatctccttggtggccgacctcgcccctgccccagccacagcttccccttcggccctgctgctgcaagcactcagcctctcctatggcacacgccccacctacgacaccttcgacccccggtgaggtttt

SEQ ID NO: 258918 - DNA, 409 bp, Zea mays
gtacaatatgtgaacaggtaccctcagactaaaatcggcattgcagcagaccggaataatatgaagcttgatacaaagccgaaggtgttgagcaggaaagcttcggcgtaacagcagagagtggaaccgacttaaagatgaaaaggctattcagacctcaatagattactataaagttattgtcagatgtaaagggcatgaatgtaattttgtaagggctgtgtcccgtgtctataaataggtgaacagtatccccgtactgttcacgctgacttggcattcgctttttgcgtcacgcttgtacaatcatttccttccgattgaaggtacccttgttggcccataatttttttggccacgctcccttaaaaaaaaaacaaaaaaaaaaaaaaaaaaaaaaaaaaataaa

SEQ ID NO: 258919 - DNA, 591 bp, Zea mays
tgtgcggctctttggagataatctcctcaccggctgtcgcttccaatcttcagctcatcgactcaccgtcgtgtttcttgttttccctcgtcggtcggcctcgccgtggctaagtatgtccgccgtgttatgtgcttcggtctttggtcgctgcctcttgctcaccatcccctattcgatctcgtcgtcaagcttcgcctcagccttagctcgttggtcacgctcgtcagatgtgcgaccgaggacttcagctgaaggccgtcgtcaggcaactaccaagtcgagttgtgatgtggtgagccgattcactatttttattatcggttttatgatcgtaaaataagacatttcgtatacatatacgattaagttagaaatactagtaatgcgaggtgtgcacttggtaattatggctagattcgtttttatgtcgttagggtgtgtgatattagggagtcgatgatagaagtgaaattctagctattgggtgatgacgggaaggacgttgttcatcgcgtgcttaatgtttgatggatagtatgaactgaaatcatcgccgttctcacgaattttatatcgactagtaatagt

SEQ ID NO: 258920 - DNA, 574 bp, Zea mays
tcttttacgcgtgggattttgattaatatggttgccttcttgtaacactgggtgagccatgaaacttgaattaaaattattcatttggattaatctattctaagcactaaataatttccgaaattcatatcttggtaagcgcaactccgaatttagtggttcttgtttctacgatctacgtgactatagcgtagattattattgcgtagtttattcttatgtttggtgtaatgttaattttcatctataccatgtctgttgcattgctactactagcgtgaggttgcgagtcatttgaagatcatcctggtacctggaatctcaagtctcaggcaagttgtgcccttgatcacttcttttacccactcatgttctaattaatcataatgatcatgcataggttaattttgatgggacccaataggtaaccctagattgttcatctcattaccttggttacccctgaatcactttgggtagtgtgctattgctttacatggatttgggataattatctatcatatctatgttccagttattttgtattctattatgtccatgcaagatcataatg

SEQ ID NO: 258921 - DNA, 432 bp, Zea mays
caactcgacagttctaccgccgcgagtagggaggatgagggagccgtcaccagtaaccttcgtctgtgccccgctcgcctgccaggaaggtgaagacgaattgctgccactggggaggagcaccagcgcgagggcctgtgcctcatcgcggaaagccggggacggagtcatgcagggacggcgcacgtagacttatcggaagcagcgacggctgggcaactcttcgcgaggttacgagtcacctgatgatcatcctggtacctggaatctcaagtcccaggtcaagatcaggtaccgcaggatgaggcgcgtggaggatgctgtgatgagttcgtgagtggtctaggccgtcgtctcccagtcaactttgggttgctggaccgttgtctccttataatgtaactatttatttattttgtatagaactcatat

SEQ ID NO: 258922 - DNA, 475 bp, Zea mays
cctacgcgtccgcggacgcgtgggtttagccaaagtagctgcttgtgcgttgtagttcctgtctccacgacagttttagctcccctcctcagccactagatcgatctgcccttgttcatcacaaccaactcctgtgtctggtgaccacaacagcaatccttcaacctcatcatggccagggttcgtggagattgtctcggccgtgttgtgctcattccttgttcctcacagaattcccataagaagaagatgaaattcaaaaaggggtttctgaagaggagtccgcttcagtgcctgctcatcaagtgatgggagccatctaactaatcatcgtgttagaagtatctagaacctcttctctgcaacaaagaaatcttggtaagcaactggttattttcctccaagagacgctcggttgcactgtcgacaacttgagctgcttcagaatgcaaccacatgagtattattagaaaac

SEQ ID NO: 258923 - DNA, 703 bp, Zea mays
tgattacatcagatgtgttgcggtccatccaactctaccatatgtgctgtcaacatctgatgacatgctaataaaactgttggactgggatatagggtaggtgtacactcaaatatttgagggacattcacactatgtgattcagggtactttcaatccaaaggatattaacacctttgcaagtgcatcccttgaccgcactacaaagactatggagtttaggttctccagatccaaacttcacacttgatggacatcaaaagggtgtcaattgtgttgactacttcactggtggtgacaggccctatttgattactggttctgatgactccactgcaaaggtctgggattaccagacgaaaagctgtgttcagacacttgaagggcatacacataacatttctgctgtttggtttcaatcctgagctccctataatcattactggatccgaagatggtacagttcgtatatggcattcaacaacttacagacttgagaacacactaaactatggccttgagagagtctgggctgttggatacatgaagggatcaagaaggtattttcggatccagaattatgaatatggagcacggccaggacgaagcctgaaccagacgaaggtcgagtgtagccgaagctgtgcgcagggaagcttcggcgcgatggcagaagggggaaccgacttaaagatgaaaagac

SEQ ID NO: 258924 - DNA, 564 bp, Zea mays
cttgcctcaggccctagccttggctcactgcttatgtatagtgatccttgagtttgcaagcctatgtaaccttctccccaaccatcagttgacgctgttcagaacttgtgcgccaactcactaggaatgccatggtgaccatgctcaccctcaccatgggcaagattcctcggaggttgtctcggccgtgtggtgcccgttccctactcctcgcagaactcctaccagaaggagtgaagattcaagctaaagtggtgactgaagaggaatctactccagtagctgctgatcaagtggaggagccatctaactggggtttaatagagagatcgagtacctcttctctgcaacaaaggtgatgaggagtactctaagtgttcctgtggctggagggcatttccagttctggaggaagattagctaggcttgtgtataagcgtcggagggttcctaccttcttgctattgtaataatttatgcactttgagtatatcaggacttgtaataaatgtaactcttcttatgtaataaacttcagttttagaaatgaaaagaatgttttat

SEQ ID NO: 258925 - DNA, 563 bp, Zea mays
gtcgtctcggacatcgcatcgccttggtgcatcagcaggacgtcagagcagcacctatgtccttgcctcgccggtccgcccttcaccaccgtcgggtgttcttcctcggccgctcgtgtgtgccgcaacaagtcgtactctcattcacatggtcgtcgtcgtcgtcagcacgtctccctgccaacgagtttgccaggctgcgcgccgctgggccacagccgcccctgctcggccttcctctatgcgagcgcgcagagtatatttttgagagtctttttccttagacgggtaagacttgtgaaagtacactctgtactcagggttttcgaacccatgttattgcaggtactagatttgtgctactgtggatggtgttaagcgccggtgggcacagccttcttataggttacaatagctcctcaataagaagtatagaagagccaagatgcagacggtgccggagctcgtgaaggcctgcaccaccatcatctggatcgcgtcggcgctacacgccgccgtcaacttcgggcagtacccgtactgcgggtaccacccgaaccggc

SEQ ID NO: 258926 - DNA, 489 bp, Zea mays
ttccacgcgtccgcccacgcgtccggtctatgttctggtcgaggccctagatacgtgattgaagatcctttgtggtgatgaaggtgaaatcagcatagcactcgccaagcattctacagaagagctcccaaaataaagagtgaagatttaagatgaagtggttgttgaagaggagtttactccagtgcctgttcatcaagtggatggagccatctaactgatcatcgtgttagaagtatctagaacctcttctctgcaacaaaggtttatgcatccgggggctcaagttggatactcgacagcgggtgcacaaaccacatgaccggggagaaaaggatgttctcctcatatgagaaaaaccaagatccccaacgagctatcacattcggggatggaaatcaaggtttggtcaaaggacttggtaaaattgctatatctgctgaccattctatttcaaatgtttttcttgttgattccttagattacaac

SEQ ID NO: 258927 - DNA, 602 bp, Zea mays
ccctgccttcagtccagctcgccagcagccctcgccctcatcctctggccgcgcctctgctcgttcttgctgctccccagtgctcggccagggagctcgcgcccgacttactcgccatggctggcctcgccgtatcccgcgcgctcctgcgtcgtagcgccgtccctatgcttcctccgcgccagcgcgccactggctctgctcgagctcctccctcgccgtagctcacaggtcgccaccccatggctgctgctcctctctccctcatctctgcaactcggcaccacctatgctcgcccctcctcaggtccgagctcgccctcaactccctgtgcatggctgcctcctctgcctccgatccgcatgcgccgtggtgggctcgcccagcaccgcgcgccgtcgtcccctgcttggcgtctggtctcagtagctcgccctccctgtccagcagcaagcagctcctttcccctcgccatgaacgccgtcgatcccctgttgtagttcctccacgtggtctggtcgtcgaccgcgcgcgtcacctgctcgtggttatgggaaaccagcgagcctctcctcacggcttagtttcctcgcgtcatcgt

SEQ ID NO: 258928 - DNA, 659 bp, Zea mays
tttgtgatctccttggctcttgtagcctatgggggggcgtagttaatcccctgccagtgtcttagtccatctgcccagagcttggtgtaccagtccctaggtggtgaccatcgttgacagttagtccacctcgccgtgaccagattagctgaaaactggattgcagcagattgctcagtttggagctctcctatgaccagttcatgaggttttgggttaccagttgtatagaaaagtcaaagaccagatgaaggtgaacaagcttcatcagaggagtggggcttactactgtgtaaaatatggagaaatatgtgctgcaattttctatgtcaggtgttgtgttcaggtctttttcagttagctgaaatttagcctttgcgtttccacctcaagtttggtgctctgtaacttgagatctgtttagggttagctagtagctcttgtaacaaagatggagagagattatagaggaaccattcatagtaaggaaatacattgagccctcatatggaattgcgagaaaatagtgttacaaaaccctctgtcagacttggagtgggctgtttcagctaactgaaaaccggttcagggtgttgtttagtcaactttggagctctgtggtaattaataaaaccagaattgggttaagagttttatag

SEQ ID NO: 258929 - DNA, 549 bp, Zea mays
  unsure (1)..(549): unsure at all n locations
ttgtttactgcatctagcaaccatagtgagcagcgcacaattagtaagtactgcatctttccaaaccatacccgggatgtgcctagtttcgctgatcaagctgccaagcatattcggtgaccaccccggcaacacctcagcttcacgtggccaggcgattgtgaactcctaccagaaagagtgaagattcaagatgaagcgttgactgaagaggaggctactccagtgtctgctcatcaagtggatggagctaactaactgatgattgggtagaaggatctaggcctcttcactgcaataaggtcatagcttgtnggctgctgatgatggtgttaagtgccggtgggctcgaccttcttatacatctaaacaacgagcagtccgtagttcctgagtgtgttgtcggagacttccctgagcagcaacatggtgaaggttgttccaattgcaatcagtgctcaggaggggatgaaggcaacatggaggattttgaagagtttcaagactacgatgagttctagtcgtgtttagtggcaacccccagtcagc

SEQ ID NO: 258930 - DNA, 384 bp, Zea mays
tggtggccaggcacctctgctgctcccatggtgatctctaaatccctttgttgttttactagttcttattaataccctgctgatgtgaggttttatgtgtgttgatgtgtgcgatatggagtaaaatccttggagaattaggtggagaagaaggttaagttcaacgctccttaggtgttcgatgatatgctcgaactggtggtcgtcttcgttcttgctgaaatcaagtcggagcatgatgtgattaggttcgagtaagttggagaacatgatcgttgtgttggggtatataaacttccaaacttgcaaccacggccataaagacaaaatgctcaacctcaagacgaacaagcgattgctgatttgcagacggtgggagatttt

SEQ ID NO: 258931 - DNA, 399 bp, Zea mays
tgttacccgtgagagagagctcgtgccgattgccgctgtgaggctcgccggtggagtagcgcttgccgggggaagggtcgtccgcatctggcgtctccggcggccatcattccagtcatcacttggatctccgaagagcacgtgactgaggatcctggtgagcagcaggttgaagtagctgagcaggagctcattgaaggagaagagcaggtggttcaggaggagccacaaggcgaggagtatgatctgatctaggtggcgtttccccagttgacttttgcgccaaggatgatctttagttcgttttatatttatcttatattttgtaataagacttcctctatgtgataaatactttgatgatattgtgacatttatctctatacactctgttattat

SEQ ID NO: 258932 - DNA, 713 bp, Zea mays
ccttttcctagtcgcccatggcacgctccctgatttctccagctcgctccagagccgtggagcttccccgccgtcccagctcgacctccatctctggcgcgagctcttccccggtgccgcgcgccgcttctcctgctcggcgcctcccagccgtgcagctcgtccgcgtcgtccgccgcggtgcttgccccagcctcgacctccgtccgggcctgcctgtcgcgctgctatggtgctcaggtccggcgctgccctctgcgtccagcagtctggcgctgaagtccccaacctcctctctgctgaagccctccgctcgccgagctccgtacacgcgcgccccatctctgctggcgccctgatcttcagtcatcccccttggccggcgtcctccccatttttttacaggttcgttaattgatcacgtgatgcagaggacaagagttgagttgatcccaacatgaagatgatgaatgaacctgaagcttggatgatctggtcaagcaccagaatggaagatcctcatcaagtggtcgtcaattaacaacactaacatagtgtttatcccaggcaagccccggtgcatttgccacctccttgctgtttttaaacttttatcacttatacgatgcattaggtggtaggagttgaatgattaaacctttgttgcataacttccttgaactattgattaccaccttgatacctgttttaaa

SEQ ID NO: 258933 - DNA, 699 bp, Zea mays
gttgtgtaaaccgggtataggtttgttttatgaaaaaaggacttgtaatggtgagagcatcatctgcagtgctgaattcatcattcaagtatggtacctctgtcaggtacatggttttgggaaggaaataataatatgagaccagacgttgagcaggaaaggtcgcctgtctgtgtcgattaaggaccgtaccgaaagtaggcttgctgatctaggaccctttaactggccacatgcctcgtcatgggtaagcttagcctcggtcggaccaataccagaacagctcgcacgcactgggagtggagagatggcgagagtagcttgtaccctccgtggcaagagactggaaggtggggtgctgtactctcggaaacatggcgggcaccatggcgagagtaacgtgtaccaaccaggccaatggctggacggtggagtgctgtgctctcgggtcgcgtgaacccattctggtcttgagaaaaccggtggcgagttgacatatgcaagggttaagtgctacatatgtcgtgtggttggagatcctcagctgagtattaatcgattcggttcggcgatacttctcggatatgaagactggatcactgccctgcatcgtagataacaagtgaaactaaagctgctaaaatgaagctagtataggacaagtgaatgctctagattaggcaaatctagattcaggaa

SEQ ID NO: 258934 - DNA, 688 bp, Zea mays
cccacgcgtccgcccacgcgtccgcccacgcgtccggtgcgatatggagtaaaatccgtggagaattaggtggagaagaaggttaagttcaacgctccttaggtgttcgatggtacgctagttgaaaatcgtgcgaagcgaagggtgtggatcaaaacaactcacaagacgatgtcggccgatgatcctgaagctagatgaactaagcgggtgtcagaataaaagttgatcgtcaagtggccatcatctaacaacactaacgtagtgtttatcccaggttataagtttgtcctgttgtggatggtgctaagtgccgatgggctcgaccttcttatataaactgcgatccatttccgagcttcgaggaatcaacagtcaagcttcggcgaccaagagatcgaactcttcgagttccacaaagttgaagaccctgagcatctgtttggtggaggagggaggtcacgagaatctgaagatcatcctggtacctggaatctcgagtcctaggtcaaggacaggtaccgtaggatgaggtgcatgaaggatgatgtgatgagttcgtgagtggtctaggtcgttgtctcccagtcaactttgggttgctggattgttgtctccttatgatgtgattatttatttattttgtacagaactcctattatatagtaaagatgtgacattcgtttct

SEQ ID NO: 258935 - DNA, 544 bp, Zea mays
cccacgcgtccgggcatgtctatgatctggtcgaggccctagatacgtgattgaagagccggtgtgatgatgaaggtgaaatcagcatagcactcgccaagcattctacacaagagctcccaaaataaagagtgaagatttaagatgaagtggttgctgaagaggagtctactccagtgcctgttcatcaagtggatggagccatctaactaatcatcgtgttagaagtatctagaacctcttctctgcaacaaaggagaagttttattcccttatcttttggttagttacttcatgtggaggccttgaagcttagaatgtttatgtgtatctcttatggaaaggcttcacccttccaattattgtaataagttatgcactttgggtactatcaggacttgtaataaatacatctctttctaccttgtaaaacttgagttctggtatgtaaagtgtactttgtaaaagtcttccgctctatctccaatatgtgtgtatcaaatgtgattactgtaatatacctgttatgtgggagatccttggg

SEQ ID NO: 258936 - DNA, 783 bp, Zea mays
tgttacgcgtgggtggatttttaaggatccactggtagtaagcatttctgcaaagcagagtctttgattattgagaagccttaccttgactcccttacaaccagcatacccttgagagtcttttctttagtcgggtaagtcttgttgagtaattccgtactcagggttttattccctgttgttttttcaggttctaactttgtgctgttgttgatggtgttaagtgccggtgggctcggccttcttataagtctaaggatcctctttgattagaagaactttggatacttttatgatgatggtaaacaatgatgttataaatctaatctctggtatttactctcttgagggagtacttttgggtaataactgggtttattactaaaacttggctctactaataacaataaatgtttgaccaactataagcaacttcttgacctcaactccatatacagctactccactttagccaaacgggacatttgctgagtacgttgatgtgtactcacccttgctttacaaaccagcccaccctaggttgtccccactgtactcagtgctcaggaggtgatgctggcaacatggaggactttgaggagttccaggactacgatgagttctagtttttcttagtggcaaacccccagtcggctgcctgtgaaggccttatcttctacgtttcgtattccgcactttgatattaatgttaaagacaatggttatgtattagactctgtggatgtcttggacatcttgatgtaattaaattacttttctgct

SEQ ID NO: 258937 - DNA, 447 bp, Zea mays
gtgcgatatggagtaaaaatccctggagaattaagtggagaagaaggttaagttcaacgcttcttgggtgttcgatgatataccccaaccagggatcatcgctgtgtctatgggtgccgaatcaaaattttcgttatggtacgttaattgatcgcacgatgtggaggaaaagtgttggattaatctcaaagtgatgctgacaaataaaccagaggaatggatgatctgatcaagtgccaggatggaagatgctcaccaagtggtcatcatctaaccacactaacctagtgttatctcgggcaagccccagtgcatttgccacctccttgctgttttaaaaacttttatcacttatatgctgcattaggtgatacgagttgtgtgaattaacagttgatgcattaccattctttggaatttgattactattccttgattcatgtttat

SEQ ID NO: 258938 - DNA, 665 bp, Zea mays
ggctcgaggctgggtcctgggtgcctcaacattgttcgtggagaacttccagtgccaccgtcgcactgggctgctccccgccgtgaaactcgcaggtcgccgtgggctccttcttccccgccccactccgaaccgtgtcccatcgactgcgtagggtaatcgaatcgtggcaccatggcgggcatagctgggactgcacaccgaagaagaatgccgccgccgtggattcacgacctggatgtcgctccggtctcggcttgcggttgggaaccttcgtcagggtgctctggtgctcgtggtttcctcggcgggcgcgattggtgtccagatccctgcgaatttctcgccagagtccaactccgcagtggagccgcagctcaccgtggacagctcccctggcgccatctctgtcttggcgcgtggacacgtgtcatctgaagaatcaccctggtaactggaatctcaagtgccaggagaagaacaggtggttcaggaggagccccaaggcgaggagtttgatctgatctaggtggcgtttctcagtcgacattggcgccaacgatccttagttcgtgttatatttatcttttatttttgtaagtcttccgctatgtaataaatactctgattattgtgacgtttatctctatacactctgttattat

SEQ ID NO: 258939 - DNA, 549 bp, Zea mays
ggagttgtgcgctaaacaattgatgcatttccttccttggaaaattgattaccatcccttgaaaccattttataaaaaggatttttatgatgcttagtcttgctttagaaaaacaaaatgttttgttttaaaaacaaaaggtgatgcttcatagtggatgggaatttttacaaaagaaaatacttatgatggtgaatccgtcaaaggccttgatgggttcaacatcagaaaagattacctctgccaggtaccaaactttgagttttaaatgataaagctgagaccgggtggttgacttgcacgagaagggagtctcggtgtagtgtctccgtttgagtcgattaaggaccatgtcgatgtaggcttgatgattgaggaccttttaactggtcacatgcctcatcatggataagctttgcctcgggcagactaataccagaaagggcaacacacaatgggagtggagagatggcgagagtagcgtgtaccctccatggtaagaggctggacggtggtgtatctgtgctctcggttggcgtgaacccggtc

SEQ ID NO: 258940 - DNA, 607 bp, Zea mays
ctagaaaacggaacaccgggggtccgccattgtcgggatgcgccacgatgccatctgccgcctcgggtgctcgcctcttatcgcatccgcgtcctcccccaccctgtcgccgcggacaacgatgacgtgggacccctgcgcggcctcttcgtgctatcccgcgaccccggagcgcaagaatcagtcgtcgccccgggtgcgtgttggggggttccatggggagccaccgctgtcgccgttcctcgcctctgtcgacggccggaatccatggaattgatgcggagcttcgactggacacggggaagctatcccgaccgccaatttgatgaacggccagtcggaactcgggcaatggctcaccggaggagtggcgtccgtcgcgggccgcgttccatcgtgggcgttcgtctccgtgcccgaatccgtggtcaagaacatgtaccacatgatgagacgcatggaagatgttgcgatgtgttcgtgagaggtctaggccgtcgtctcccagtcaacttcgggttgctggatcgttgtctcctttcaatgtaattatttatttatcttgttcaaaactcctattgcataataaagttgtgacattcgtttt

SEQ ID NO: 258941 - DNA, 519 bp, Zea mays
cccacgcgtccggcggcctccccatggttaggtcgggattctgggcgccgccgcgtggggcattgtcgatgactgccactctggctgctcctacggtcaggttgggtcgggcggtcgcggcctgggtcgtgcgctggtgggcactgggtgcgaaggcatcggccagatttggggaaattcctcaccgaagatcaacagtgccgccgatccgctgctcacgatgaccgtctctaccactacttcgaccgccattgagcgcgaggacacgtgtcatccgaaaagcaagttggtacctggaatctcaagtgccaggagaagaacaggtggtcgaagaggagccgcctaacactgaggcattcgacttgatctaggtggcgtttctcagttgacattggcgccgacgatccttagttcgttttatggttattcctttattttgtaataagacttccgctatgtaataaatactctgatgttttaccccatttatctctaaaaaaaaaaaaaaaaaaaataaaa

SEQ ID NO: 258942 - DNA, 711 bp, Zea mays
gatgcatctccccatggctccacctcccattgctgtccctcacagtcgcgccaccctccacccgtcttcctcgcgcccagctccatgttctccacttcccagccatggccccgcgggcaggctccctgctgctgctcgtccgtggtctggaagctccgattggtgggcgccatcgtctcctacctccgtctgaaacaccacatcgagctcccatcgtcgcgcccctccttgctcctctgctggccatcgctgctccctggtgctcggactcgccagtcatcgccccagccgagatcccttctcagtatcgctcgcccaatccgaggggcactggacatgtttgttacatgggaggttcaggcagcgatgggttcgttaattgatcacgtgatgcggaggacaagagccgagttgatctcaaaatgatgttggtgaacgaacctaaggctagatgatctgattgagtgccagaatgggagatgctcaccaagtggtcgtcatctaacaacactaacttagtgttattccaggcaagccccggtgcatttgccacccccttgttgttataaaacttttatcacttatatgttgcattaggtgataggagttgtgtgaataaacagttgatgcattaccattccttggaatttgaatactattccttgattactgtttataaaaagagaactaaagatgcttagtcctgcttaa

SEQ ID NO: 258943 - DNA, 501 bp, Zea mays
cccacgcgtccgctcgtcgcggtactgcccggcactgggaacgcggtggggaagaaggttgacgccgtcgtccacactctcagctaaccagtgcctgggccgcggttggccacggtgggcgaccctggtggttcaccggtgcactgcgaatctaggcgggtcttcctggggctcgatctgggtctcatggttggctaatttctcaccggagcatttgggggacgggccgtgcgcctccaatttctcgccgtcgacgtgttctccgccgcgggactacagcgtgccatgggcgggactcctgggagcttaatccgcgcgcgaggtcacgagtcacctgaagatcatcctggtacctggaatctcaagtcccaggtcaagagcaggtaccacaggatgaggcgcgtggaggatgctgtgatgagttcgtgagtggtctaggtcgtcgtctcccagtcaacttttgggttgctggacgttgtctccttataatgtaaatactta

SEQ ID NO: 258944 - DNA, 684 bp, Zea mays
gtccgtggacgcgtgggcggacgcgtgggcatgggtgttggggttcttgtatccctgctagtgatgaccctctcccacagccaccaagtctgctctgtccagagaatcaagtgccagtggtgaccatgctcacaattctttaccccaccatagccagaacattctagggagttgctggcctatatgaagcttgttccataatcatctcagaaaacggagaagagggtgaagtgactgaagaaaagacatcaccacctttggaatctcaggcagagacttggctctacttcgacatctgcgagtccgagcctgactcacctactaacaaagaaaacggagaagagggtgaagtgactgaagaaaagacatcaccacctttggaatctcaggcagagacttggctctacttcgacatctgcgagtccgagcctgactcacctactaacaaaggtgaggaagtagcagacttttgctgcttctgtgctaaggtggtatcaaatgaagaaaaacaagagtgaagatgcgggaggacgtggtcctccatataggactttttgtttaaagctatcgggaggtgttttgcctcccttgatatgtgtactactcagcactcgtttatagctctggtctgtaataaacaaattgatcttacttttaaataataaatgtaagtttatgtaaaaa

SEQ ID NO: 258945 - DNA, 521 bp, Zea mays
ggaaaacacatcccctctgcatgtttgccaagttcagggaacacctatcccatttcaggtatttaaagggcagggagcagtgaaaatctcctctctacctcgagctctactcacagaccactgcatgggtgttgaggttcttgtattcctgctagtgatgaccctctaccacagccaccaagtctgctctgtccagagcatcaagtgccagtggtgaccacgctcacaattcttcaccccaccatagccagaacattctagggagttgctggcctatatgaagcttgttccgtaatcatctcaggcttgagcacctataagtatcggcgcggactccgcttggatcaacacgcatgtgaagagataaatcaaagcctctagaactgcaaggtgaagatatccaagatgactatatccaaatggccataaacagtgccaaagaaccggatgccattgatgaggaaggtcactcagaccaaggaagggatgattcagctatagcttgtaatgtttaatagata

SEQ ID NO: 258946 - DNA, 707 bp, Zea mays
cttgggcatctctgtgaaggtgtgtacaagcctgagttcatctccttagcctccgcgtcggctttgttcagttcatcaagtgccattccattgtctggtactctggtgccacagcaaccatccttccacctcgccatggtcagagtatctcgagaagtttgttacccaggtgaaccttgttcggtaatctccctagattagtgaaactcaccgaactgggtttcctaattctagagtcttgtgctgctcagaacggagttgtgccaccgcagaccggagccgagagcagtctctacgtcgaccgaacaactcacgctttctccggccgagtcctcgcaagcaccgagaactagaacacctagatgaggtggtacttgaagaagtctactccagtgcctgctcatcaagtggatggagctatctaactaaaggttaggtataaggatctagaatctcttctctgcaacaaaggtgatgaggagtactctaagtgttcctgtggctggagggcgtttccagttctggaggaagactagttaggctagtgtataagctttggagggttcctaccgtcctgcttttgtaataagttatgcattttgagtatatcaggacttgtaataaatgtaactcttactatgtgtcaaacgatttttgtttgatttcaaactttaccagagtatgttcaaggtaatttggcaccaaaa

SEQ ID NO: 258947 - DNA, 562 bp, Zea mays
cttcgcagcctcctgcaagagcccgtgatcaaagaggacagcttgaaagacaggatggaggaccagcgcaaggggaactacgtgataacgagcgaggagctggaggacgtcatggaagaagcgatgcacatcctgtgggagttcatcaaggccgacagggtggagacgactacgacggcggcgtcggtgctcaagggcctgtcgagcgctcacgtcgagctccaggacccttcggaccatgatctcatggcgcacatccactccacgctacagaagaaggagaagaggctcaaggacctcctcaggaccggcaactgcatcgtgaagaagttcaagaagcccaaggaggacaggtcgaaccagaacctcttcttctcgcaggtggacatgaagctggtggcgagggtgctgaggatgccgaggatcaccagcgagcagcttcagtggtgcaaggccaagctcgacaagatcgtcctggtagataggaagatccacagggaggcttcatttttgttgttcccctgttgagagagtacgtatatatacttatttttcttttcga

SEQ ID NO: 258948 - DNA, 564 bp, Zea mays
agggacgtttgtgggggcaaccgtgcatccattccctaccggcgattgggcgtggaaggcggtgtggcgtgggcaattcttcgtcgaagatcgcgcttcgtcgtgaagccgctcacatccgcggtcggcgtccggtgctgcctaaattttggtatcttcggattcatggtaaaagcagatacaatgaggagcttgatcgtgacaagggttgtcgtcgctccgaagctgtgcgaaagggagcttcggctaaatcgcagaaaagggaaccgacttaaaagggaaaaggctgttcagtcctcatagatttttctataagccaatagtaaatgtaaagggcataattgtaatttctcataggctgtgtcctgtgcctataaatagatgaacaatacccccgtactgttcacgctgacttgtacctgtctgtgcgtcacgcttgtacttttaccttcttccttcagaactttttctgcagcttcggttaacagcttggtaacagcttcatccccaatagcttcggccatattaataatttctattattttcttaaaaaaaatataaaaa

SEQ ID NO: 258949 - DNA, 474 bp, Zea mays
acacaaacccggaccgaccacgccatggcgctgtggatttcgatcttcggtgagcggtgcccaagctcctttccatcggtgctcgcccgcactgctgccaccgagatcctgtcggcacccgcctccgcgcgctcccgctgccgcacgggaccaacctgttcgcctgttcatccactcagcgacattcacgcccgcatctcgccgtgggcagcaccgcactcaccaccgccgtcgcagtgaggtcacgagtcagctgaagagcaagttggtacctggaatctcaagtcccaggtcaagaacaggtaccgcaggatgaggcgcatggaggatgctgtggcgagttcgtgagaggtctaggccatcgtctcccagtcaactttgggttgctggaccgttgtctccttataatgaaattatttatttattttgtatagaactcctgttatatagtaaagatgtgacattcgatccaaa

SEQ ID NO: 258950 - DNA, 545 bp, Zea mays
ctctactcgcataccactgcatgggtgttggggttcttgtatccctgctagtgggggccctctcccacagccaccaagtctgctctgtccagagaatcaagtgccagtggtgaccatgctcacaattctttacccaccatagccagaacattctagggagttgctggcctatatgaagcttgttccataatcatctcagaacacgaagaagaagtggaagtccctgaagagaagacaacaccacctttggagtctcaggcagggtctcgtctctactttagcatctgcgggcctgagactaactcatctataaacaaaggtgaggaagcgacaaatttttgttgcttttgctccaaggtggtatcaaatgaagaaaaacaagagtgaagatgcgggaggacgtggtcctccatataggacttttgtttaaagctatcgggaggagtttttgcctcccttgaaatgtgtactacgcaacactcgtttatagctctggtctgtaataagtaacttgatcttaccttctaaataaatgtaactttatg

SEQ ID NO: 258951 - DNA, 630 bp, Zea mays
acctcgcgtccgcggacgcgtggggtgttccacgactgagttcataaaagcttttctcccttgttctcgagctgtagtcccagtccactacaaaggtgttggagtcctggtattcttgctggtgtgcatcctctctttcagccaccaagtttgttttactctagagctgaatgccaacctcttgcctgtggtgaccaaacccaaccgtttttcacctccccgtggacaaggtttcccacaagtattcttggccgtctactacttgttccatgctcggcaaagaactcctaccagaaggagtgaatattcaagctgaagtggtgactgaagaggaatctactccagtggctgctgatcaagtggaggagccatctaactgaggtttaatagagggatagagtacctcttcactgcaataaggtgatgaggagtactctaggtgttcctgaggctggagggtgtttccagttctggaggaagattagttaggcttatgtataagctttggagggtttctaccttcctgcttttgtaataaggtatgcactttgagtatatcaggacttgtaatacatattactctttcgaaacatgtaaaacttgagttttgaccaggtaaagaatgtttat

SEQ ID NO: 258952 - DNA, 882 bp, Zea mays
  unsure (1)..(882): unsure at all n locations
cttatacaaagaacatgttaacacttgctgtttggactgcaggtatcattttagttacgtaggtaattgagtgaagtaaaccatgttttatgtaaacgtgttatatagaaaagttatagataactactttatcttgctggtgctaaaatttcatgaccataggtctagtagtttaaaagatatgattttcttaagtccagtttcagaatctgtctaaattctgtacatgtttcaaaaattggattgtttggctaagttaaattgagaatcagtcattagtaattataggagaattgtagtactttccttaacctttccaacaaattttggatcaccctttttggtgatctataaattaagttacaactgtttgagttaggatctctgaatctgtcccaatttggacagcagagcctttctcatgttttttgaccttgatatatattaaattaacctgggatgttcataaatgaattttagagaattctattagctttctaaaaagtctaggatcacctgatttggatgtctgaaactccagttatgattttttgaagtaagtagtcgaattctgtccaaatctggacagaatttttgtttagcattgtttgaccattctaagtgtcaagtctcactgtgatgataatacaaaagttgtagaggacttcttaagctttctagaaagtcttagttcacgatttttggatgaatattttgtaagttatgagcaaaaccgctgactgctgtactgctgtccaaaatcagcaagtataaaatggttgttagagaagtcggtgctttgctcttgtatcgngttctatttgagtgatcggttaaatcccgtagatgatatcgatcgttagattaataatctgatagcta

SEQ ID NO: 258953 - DNA, 555 bp, Zea mays
cttatcagttgcactagggcttggttatgtgaagtttttccctaccctcaacctctagccaaagtagctgcgtgtgcgttgtagttcctgtgtccacgatagttttagctcccctcctcagccactagatcgatctgcccttgttcatcacagccaactcctgtgtctggtgaccacaacagcaatccttcaacctcaccatggccagggttcgtggagattgtcttggccgtgttgtgcccgttctttgttcctcacagaacacctagaagaagtggtgtttgaaggagtctactccagtgcctgctcatcaagtggatggagctatctaactaaaggttgggtagaaggatctagaacctattctctgcaacaaaggtgatgaggagtactcaaattgttcttgtggcacgagggcgtttccagttctggaggaggactagctaggtatttgtatgaactttaaaaggtttctaccttcctgcttttgtcataagttatgcactttgagtatatcaggacttgtaataaatgtaaatcatcctatgtataacc

SEQ ID NO: 258954 - DNA, 556 bp, Zea mays
ctgctcggttccgtttgccgcgcccctgcacttgtcgcggtgctcctgctcggattcagtcctgcgcgcagcgcttttcatctctctgctcgctcgcgcacagctcgcagaacttttcctcgtcggccccagctcagtcagatattagaacggtacgataattaatcgcgtgatgcgaaagatgacccaagttgaccccaagcgcgggctactccgcatggtgatgctgatgaacgaacctgcctgatcaagtgctaggacaaggatgatcgtcaagtggacatcgtctaacaaacactaacctagtgttacccaggttatagttttgtgctgctgatgatggtgttaagtgccggtgggcacaaccttctataagtctatgtacttcttctatacttcttattgaggatggtcacttaagctagcatatatttcaaacttataaataatttataacagtttaaagttatttctttgaatcacctttgtaatcacttcgatcatacaaagtaaaatttttgtaacttgtaaaatttggtaataagatttccgctgc

SEQ ID NO: 258955 - DNA, 247 bp, Zea mays
gaattcggctcgagcccatgctggcgtggccgctgttcgccgaccagaggcagaacgcggtgctgctgtgcgacggggtaggggccgcgctacgagtgcccggggccaaggggagggaagacatcgccgcggtggtgcgggagctgatgaccgcggagggcaagggcgccgcggtgcgggccaaggtggaggagctgcagaaggccgcggccgagggccttcgcgacggcggcgccaccgcggccgc

SEQ ID NO: 258956 - DNA, 746 bp, Zea mays
ctaatctaatctaatccaaaacccttctgtctttgctgcggctgcccaaatgccctgctccatttgcagctagcttagctttggtttcctctgcttctcattctcccgtgcacttccagttcctgcccagctgcagggctgctccaatggccaccttgtccgccatctctgccaacgtcggctactgcaaggcaccaaccctgagctggaagggaagcggagtaccaggccggattgtggtctccatgtccaccacccgaagaggcctcgtctccctaagacgacgatcccctcggtttcgcgtctacgcggcgaaggcggagacggtgagcaaggtgatggacatcgtgaagcagcagctggcgctggcggcggacgtggggctgacggcggagaccaagttcacggacctcggcgccgactcgctggacacggtggagatcgtcatgacgctggaggaggagttcaagatcaccgtcgaggaggacaatgcccagagcatcgccaccatccaggacgccgccgacctcatcgacaagctcgtcgaccagaagccacgagacagcgactgattgtcgacgcgacgacacccaaatccaatccatcgatcaccgctcgtacgtgcatgtgaatgctccgttattgtactgtaattgagttttttttatctctagctagagatatttatgaacacagatggaagagaagagttgatgataaaaaaaaaaaaaaaagggcggccgccg

SEQ ID NO: 258957 - DNA, 708 bp, Zea mays
gaattcggctcgagtttgagattctaaacaccctccatccgagtccagctgtttgtggcttgcccactgaagaggcacgccaattcatacgggattgtggtatgcccaaatttgattattctgttcgaacatagcctttctgaaattagacacatactaactaggtttttggatattctgacagaaatttttgaccgtggaatgtatgccggtcctgttggctggtttggaggagctgagtgcgagttcgctgtcgggattagatcagcgttacttggaaaaggtcacagcactctggtgtacgccggtgcggggatcgttgaaggtacaaacccatcttttgaatgggatgagcttgatctcaaagcatctcagtttgcaaagctgttgcggtaccaagaacgacctattcgctaccaagaggctgaaaatctgggaacggtgatctgaatagagaagtacagaagaaactaaagtcatcacaaagttcggcattcatttagcgagttatttatacaattgtttgtttgatatagtaagctagaagggggattcagttggatttgtgtaattatggaatccagaacagcggcagtgctgaaaaatacattgattgaacctgaatgggaaattgttcaatgtaacaaaaatatgtttacaccataaactatttgattgaatcaaaaaaaaaaaaaagggggggccgcc

SEQ ID NO: 258958 - DNA, 652 bp, Zea mays
ctcgtcggcccgcgacacgttcctgcaggaactggcacgccatggcgggcttctgcactcctgctgccactgcagctgcccatgccgccctaacccctctgacgagctcaaggaagcacatcgccatgtgcctgtcccccaggccaagcggcggcggcggcatcggcggcggccagagggcgcggcttgcgagtacaggcgcagctcctcaggttcgcgcgctggcgccggcgaccgcggcagaagaagcagcgggtccctcccccgcccctctcaacgtggagtacctggccgccgagttcgccggccacggcgtcagcttcgagcccgtgggcgtcagctgcgccgtcaagatgtcgctgcgcaacggcagcgtggcgcacgtgctgctccccagcgggctcgtcacgtcctacaagcccgccatgtggcacggcacggtcacggaggttctccacacgaacgtcgccgaggtcccaggcgggcgggccgtcatccgcggcggcatgttcgtggacctccgttgcgatggctgcgacggcgtatggttgccgagcgcgagcggggcgtggtcgctccgcgacgtccggggaagcccagccacctccatagaggtcgagctcgcgtcagcggcgccggggaacgcggccgc

SEQ ID NO: 258959 - DNA, 663 bp, Zea mays
gaattcggctcgaggcaccaacggcttcgacgacaagatgaagctggggcagggcgggtacggcgtggtgtaccgcgccaccgtgcccggggacaacggccgcagcatggaggtggccgtcaagcagttctccggcgccaacaccaaggggcaggaggacttcctcgccgagctcggcatcatcaaccgcctccgccaccggaatctcgtcaagctcatcggctggtgccaccaggacggcgtgctgctgctggtgtacgactacatgccacacggcagcctggacaggcacctgttcggcggcagggaggcgtcggcggcggcgacgacgacgacgacgctggactggaagcagcgctacaacgtggtcgccggcgtggcgtcggcgctgaactacctgcaccacgagttcgagcagacggtgatccaccgcgacatcaagccgtccaacatcatgctggactcgtcgttccacgcgcggctgggcgacttcggcctggcgcgcgcgctcgagtccgacaagacctcgtacacggacaagctgggcgtgccgggcacgctggggtacatcgcgcccgagtgcttccacacggggcgggccacgcgcgagtcggacgtgttcggcttcggcgccgtggtcctggagaccgtctgcggccgccg

SEQ ID NO: 258960 - DNA, 541 bp, Zea mays
gaattcggctcgagcgggcccttcgacaggcaacagagtatgacctgcgccgtcaaggcactgtccccagctccaaaggtgtcttgtcgagatcatagcatcgcagtttggacgaacgcatatcttccactgcagcgcacatcaatgagaggaaaacctgcagagtagacagcttggtttttgctgctcacgttgggagcctgcgttagcctctgaacattgctaatgggataatcaagaaccatctagcaactagcaagcaccacttattatctgccttgtgacagtggcatagcgcgtctgctcgctactgcaactctattatctgctcgctggagttacaggatatctgaagattgaaggtctagacatgctgtgagcctgtgactttgtaagctacaccggtcaggaataatgctgcgtctggatcatccgcagaaacataggggtatgtaaattgtttggacattgaagggaatgcattgatctttgcgcgttcaaaaaaaaaaaaaaaaaaaaaaaaaaaaaagggcggccgccg

SEQ ID NO: 258961 - DNA, 1409 bp, Zea mays
aggcgtgaggcccacacaaacgtgccctgcgccagaaggcttcaggcgcaccttgcgttcaaaaactcaatggcatggggaattctgcatttaacaccaggtttggaatttggctacggtcttcatcaatgcgagagccgagacggccgtggccgcgctcctgttcctgctcaactggatggagaagttccccgagtccaagggccgcgacttgtacctcgccggcgagagctacgccggccactacgtcccgcagctggcccacgccatcctccgccacgccgccgccgccgccggcaagccgtcgtggccgcccatcaacctcagaggcatcatgatcgggaacgcggtgatcaacgactggacggacaccaagggcatgtacgacttcttctggacgcacgcgctcatctccgacgcgacggccgacgccatcggcaggcactgcaacttcagcgccgccgccgccggggctccaacgacaagtgcgacgaggcgacgtcggaggccgacgaggccctggaggacatcgacatctacaacatctacgcgcccaactgccagtccgccgacctcgtctcgccgcccatcaccccctcgatggacaactttgacccgtgctcggattattacgtggacgcgtacctcaacgacccggacgtgcagagggcgctccacgccaacgtcacccgcctcgaccacccctggtccgcctgcagcgatgtcttgagacgctggactgacagcgccgcgaccgtcctgccgattctcgcggagctcctcaagaacgacctcagggtgtgggtgtacagtggagacaccgacgggagagtgccggtgacttccagcaggtactccgtcaaccagctccagctccccgtggctgcaaaatggagggcatggttcagcagcactcagggggccggggaggtgggtggctacgtggtgcagtacaagggcaaggagaagggcagcctcagcctggtcaccgtgaggggagccggccacgaggtgcccagctaccagccgaagcgagcgctcgtgcttgtccagggcttcctcgcgggcaaggcgctccccgactgcgaaacctgcgagtcgggttaagcgtagctagctgctagcgtttggaagcagcacgcagcacacaagagaagagagcgctgcaacagcatgtaccccctatccatttgatccactacgacagacatagtcagagatagaaacatacgcacgcacccaccgtaccttgcagaaatcatgcaaaaatgcagtcatacacagagcaatctgtacacgaatgaagatggaatcacacggatctttaagcaaatctttacagtgatgaaatgaatgagctatcactaaagaaatgtgctaaaaacaaaaaaaaaaaaagggcggcacga

SEQ ID NO: 258962 - DNA, 253 bp, Zea mays
ggttcagcagcactcagggcgccggataggtgggcggctacgtcgtgcagtacaagggcaaggagaagggcagcctcagcctggtcaccgtcagaggtgccgggcacgaggtgcccagctaccagccaaggcgagcgctcgtgcttgtccagggtttccttgcaggcaaaacgcttcctgactgcaaaacgtgcgagtcagcttagcggttggcagcactacagcaacatgtatctgagagagagagggagag

SEQ ID NO: 258963 - DNA, 843 bp, Zea mays
gtgttcgggcgtgggttccgggagcttggcttcagcatcgtctctacgtctggaacagccaaagtgctccagctcgagggcgtcccggtggagccggtactaaaaatccatgaggggcggccgaatgccagaggctcgagcaagaatggtcagatacagatcatggtgataacaagctctggcgatgctcttgactccaaagacggcctccagcttcgtaggcttgccctcgcctacaaggtgccaattatcacaaccgtcgacggcgcacgtgcctccatagatgccatcaagagcttgaaggacaagtcgattgagatcctcgccttgcaagattacttccagactgccgatgcttcggcagatttacaagcagcggcacagaccaccccttagtgctgtcttccttttccatgtactgtgatcctagctcgagccaaaacaacatcccatatgaattattttgtttacggttgcacctgcagcatgcatggcgcaaggacaggcatccagatcgtatcggtgacaagcatagctagacagaattggtattgggcgaatgtagttgtactctgtaatgttagttagggtgatgagcatccacaataaggcttcccaactgcgattttgatgactatcatattctttgtggagatttacattgtatcattgtcgcatacgaaactgtgcgacatacatgtaccgtatgcatgttatcagattcttagatgaccacacattggcacacccgtctctcgtctcgtgttctttcactgtgtgctctacaattgtacaaacaaacgattgtgtcaaggattaattaatgggtagcactgtacaaca

SEQ ID NO: 258964 - DNA, 644 bp, Zea mays
gaattcggctcgagaaaatggacatgttcaagtagttcaattggtataaagggaacaattggatatattcctccagaatacggagtaggtggccatgcatcaacatgtggggatgtttatagttttgggattgtgttgttggagattttgacgagtaaaaggccaacagaccctatgttcgaagatggcttaaacatcatcaactttgtggagaacaactttccgaatcaaatatttcaagtcattgacgctcacctcctggaagaatgcaggaactcaactcaaggaaataatttggtacaagaaaatgaaatctatcagtgcttggttgatctgctgcaattagcactttcatgcatttgcccattaccatctgaacgattgaacatgaagcaagtagccagcagaatgcatgaaataaaaaaacatcacatattaggtggaagcacaagtaataatagcaagggcgacagatccagaatataaatcttcctatggtgaagctcccaaaatttgaattaaggccctatgtgggagggttatacttcaaaaaatgtagtttcggttttccagcttcaccatgaaacaacttaatagattagtaaggcgtggttcaagtgaaaaaaaaaaaaaaagggcggccg

SEQ ID NO: 258965 - DNA, 1621 bp, Zea mays
ccttcgctatcggtgctgggcctatcgccggaggaggggggggaggtttggtggttcttgcacttggctaccgccgcttctttgtgatctgcaagcgcaggaggagtgccgggaattcggctcgagggcatgagtgatggacattctggttggctgcccctgtctctttatggcaattcacacacttccagttcggccaagtcacacactactggtagctatgcttcatctttgccatccaacctgtgccgccatttctcttttgctgagatcaaggctgcaacaaacaactttgatgagtccctcatcctcggtgtgggtggatttggcaaagtttaccgtggtgaggttgatgggggaacgactaaggtggctatcaagcgtggcaatcccttgtctgagcagggtgtgcatgagttccagactgagattgaaatgctgtccaagctccgccaccgtcatctggtgtcactgattgggtactgcgaggagaagaatgaaatgatcctggtctacgattacatggcccatggtactctccgtgagcacctgtacaagacccagaagccacctcttacctggaggcagcgtttggatatctgcattggtgcagctcgtgggcttcactaccttcacactggtgcaaagcacaccatcatccaccgggatgtgaagacaacaaacatccttctggatgagaaatgggttgccaaggtttcagattttggtctgtccaagactggcccatctatggaccatactcatgtgagcacagttgtcaaaggcagtttcggataccttgatcctgaatactttcgcaggcagcagctcacagagaagtctgatgtatactcttttggtgttgtgctgtttgaggtcctctgtgcacggcctgccttgaaccctactcttccaaaagaggaagttagcttggcggagtgggcgttgcactgccagaagaagggcgttcttgatcagattgttgacccctacctgaagggaaagatagctccacaatgcttcaagaagtttgctgagacagccgagaagtgtgtttctgatcagagtattgaccgcccttcgatgggcgatgtgctctggaacttggagtttgcccttcagatgcaggagagcgcggaagagagcggaagcctcggttgtgggatgtcggacgagggcactccccttgtgatggtcgggaagaaggatccaaatgacccgtcgatcgaatcgagcaccaccaccacaaccaccacttctttgagcatgggcgatcagagcgtcgcgagtatggactcggatgggctgacgcctagcgccgtcttctcacagatcatgaaccccaaggggcggtgaggtaaagctggtcccattcgttaccttgcattcattcagcatgtttttttcacgagttcgtgctgttaaggttctctctaattaaggaccggaagtccgagaattgtttcatactagatattctgccttgccctatacttcttccccagtattgcaacgactgtacatctgttggcttgtattgtaccgctgctattgacccaactagtattttactttatgagaaagtgatgtgcacgaaaaaaaaaaaaaaaaagggcggccg

SEQ ID NO: 258966 - DNA, 699 bp, Zea mays
gaagtagctagtttggcggagagggcgccgcactggcaggagatgtttaaacttgaccagattgtctacccctacctgaagggaaagatagccccacagtgcttcaagaagttcgccgagacagccgagaagtgtgtacatgatcagggaatcgacctgccttcgacggctgaggccctaccacaactggcattcgcccttcagatgcaggaaggcgcataacagagcggaagccttggctgcgggatgtcagacgacgccgccccattgatggtcgggaagaaggacccgaacgacccatcgatcgagtcaagcaccaccaccacaaccaccacttctataagcatgggcgaccaaagcgtcgcgagtatagactcggatgggctgacgcctagcgccgtcttctcgcagatcatgaaccccaaggggcggtgaggtaaagctggccccattcgttaccttgcaggcgtaatttattcattcagaataaatttttttcttcaatgttctctcaagttaaggcttaagaaccagaagtgtgaggattgtttcgtactagatattctgccttgccttgtactacttccttctccgagtattgtaatgactatacaatctgttggcttgtattgtaccgctgctattgacccagccagtattttactgcaaaaaaaatgaaagatatgaatagtaaagggg

SEQ ID NO: 258967 - DNA, 264 bp, Zea mays
aattgattcattcagaatatattacgcctgcacgggaacgaatggggccagctttaccttgcaggcctaatttattcattcagaatatattgtcgcttaaatgttctctcaagttaaggcttaagaaccagaagtgtgacgattgtttcgtattagatattctgccttgccttgtactacttccttctccgaggatcggaatgactatacaatctgctggcttggatcgtaccgctgctattgacccagccagtattttactgc

SEQ ID NO: 258968 - DNA, 1644 bp, Zea mays
ttttatgctcgtggcttggcagtgtcgatcgctgatcccaccggctgatagagttggcggccgggggagtgagtcgtcagggatggcgtcggagccggtggcgcgggcggtggcggaggaggtgggccgctggggcagcatgaagcagacgggggtgaccctgcggtacatgatggagttcggctcccgccccacccagcgcaacctgctcctctccgcgcagttcctgcacaaggagctccccatccgcttcgcgcgccgcgcgctcgagctcgactcgctgcccttcggcctctccaacaagcccgccatcctcaaggtgcgggactggtacttggactcattccgggacatcagatacttccctgaagtgaggagccggaacgacgagctcgctttcacgcagatgatcaatatggtcaaggtgcggcataacaatgtggttccaaccatggccttgggagtgcagcagctgaagaaggagctgggccgctcaaggaaggttccattcgagttcgatgagatcgacgagttccttgaccggttctacatgtcaaggattggcatccgcatgctgatagggcagcatgtggctttgcatgaccctaaaccggagcctggtgttataggcctcatcaatacaagattatccccaatccaggtggctcaagctgcttgtgaagatgcccgttctgtctgtttaagggaatatggatcagctcctgatattaacatttatggcgatccaaattttacgtttccatacgtcacattacacctacacctgatgttatttgaattggtgaagaactctctccgcgcggtgcaagaacggtatatgaactctgataaagatgttcccccggttagaattatagttgctgatggagaagaggatgttactatcaaggttagcgatgaaggtggcgggataccaagaagcggcctcccgagaattttcacgtatctgtacagcaccgcaaagaatcctcctgagctagatagacctaatactgaaggggtaactatggctgggtatggtttcgggctcccgatcagccgactctacgctcggtattttggcggcgacctgcaaatcatctcgatggaaggatacggtaccgatgcttacctccacttgtcgcggctgggagattcagaggagcccttgccttgacgacatatttttgtggacctccagtaccactcttctcctgtaactatgtggctcgatcttcttgtaatccagtgctggcctcgacctatatatatatagctatagttggcctcgaccttatttcactgcctgctctgctgcattgtgaacacagcactgctacgtcctgcttacttccgccatgtactatgatctctctgccggccttcaacaggaaaaaagaaaggacgagggaaatcatggggagcagctaggcggatgagcgcattctcggtagctgctaatctcattttcatagctgcgtctcttgtgttgtacattacatagtctggatttgagcttttgctatggcaagtatcacatgttacctgggtaattgagaaatataagtaaaaaaaacagtacgatgtctctctttagaaaaaaaaaaaaaaaaaaaaaaaaaaaaaaaaaaaaagggcggccgc

SEQ ID NO: 258969 - DNA, 2093 bp, Zea mays
  unsure (1)..(2093): unsure at all n locations
tcgcgtgtcgcgtgggcccacgcgtccgcccccaagcttgtgcacgcgcgcaccgtccctcaccgccggcctctgctcctcttccgccgccgcaggatctcgtatcgccggagaccatgtaccgcgccgccgggagccacctccgctccctcaagcatcatggtgcttctaggcttgccagtacaagtgttgcgaagcagtcctcaggtggtctgttcagctggcttcttggtggaaaatcaagcgaactccctccccttgatgttccactcccaggcattagcattccctcacctctaccagattttgtagagccatctaagacaaaagtcactactcttccaaatggcgtcaagatcgcctcggagacatcatcgagcccagcagcatctgtgggtctgtacattgactgtggttccatttacgaaacacctgcttcatctggagtatcacatctgttggagagaatggccttcaagagcacagtgaatcggactcacttacggttagttcgtgaggtagaagccattggaggaaatgtctctgcatcagcttcccgtgaacaaatgagctatacctatgatgcattgaagagctatacaccagaaatggttgaagttctcattgacagtgtgaggaatccagcattcctcgattgggaggtcaaagagcagctccagaacataaaatctgaaatagctgatgcgtctgctaatcctcaaggtctacttctggaggcccttcattcggttggatattccggggcactggcaaaacctttgatggcttcagaatctgctgtaaaccggttggatgttagcagcttggaggaatttgttgctgaacattacactgctcccaggatggttcttgcagcatcaggagttgatcatgatgcgctgatttcagttgtagaaccacttctgtctgaccttccgtgcgtgaaacgtcctgaagagccaaaatctgtgtacgtgggaggagactatcgctgccaagcagattctccaaacacacacatcgcacttgcttttgaggtgccaggtggttggaatcaagagaaaactgcaatggttgtgacagtgcttcagatgctcatgggaggaggagggtccttctctgctggtgggcctggaaagggaatgcattctcgattgtatctccgtgtcttgaccaacttccaacagattgaatcattctctgctttcaatagcgtctataacaattcgggcctttttggaatttatgcagtcactagcccagacttttcatcgaaggctgtggatttggcagcaggggaactcctggagattgcgacacctggaaaagttacacaagaacaacttgatcgtgctaaagaggcaaccaaatctgcagttctgatgaacttggaatcaaggtctatagcatctgaagatattggaagacaggttcttacttatggggaaaggaagcccatcgagtatttcctgaaaacagttgaggagatcactttgaatgacattttgtcaaccgcaaaggagatgatgtctacaccactcacaatggcatcgtggggcgacgttattcatgttcctagctacgagtctgttagccgcaagtttcactcgaagtgagaggatccagcatcggacttgcatgacctgttccaacaactgatgtgaagcctgcaacggccctcagctgggacagttactcccccacagaataaaaaagcatgtggtttctagcgccccccctaattactccctctgcatgtatacgccaaacatgttttttttttgtggtaagaatcatcaagccccttggcgactcgtttctgagtttcgcagcggcgctagattttattttatgtggacaagcgagctttcggggtgcgctcgtgcagaaatattttgccaacgtattttgcagtttagaccagaagcagaaaggaccagcgtatcacttttcctgttgttggatgcatgagttcatgacgtccacatttttgcaattttggctgttaccgtttccatcgattctggtgtgcgcgcgcgctcgcgcacttgttattattgttgtgataaggctggctattctctcnanaaaaa

SEQ ID NO: 258970 - DNA, 536 bp, Zea mays
cccacgcgtccgaagagcagacccatgatagattagcttgtattgttgagatggagagaatgcaagtttgaatggctctgtgccacgtgatgtacatgagagattggtatctgaccgagaacaattatttcgtgatgattggggtaattgggctgcccggtgtaggcaagtcaaccatcatgaacgagctttattaatatgatgcaagctacctgtgacaaaaacgattccaagaaaccacttcttgtcttcctccactggctgtctgtcatcttgctctaaaacaatcgcagtcctgcaagttgttgctgctgctcctacccctgcctctgcaattgggtttgagggatatgagaagcgcctcgagatcagcttctatgaggcacctgtcttcgctgaccccaacggaaggggattgtgtgcactcttgcgtccctagatttactctatttctgaccatgcacggtgcaccgttgtctctgagctatcaaacgaggactttgactcttatgtcttatctgagtcaagcctgtttg

SEQ ID NO: 258971 - DNA, 596 bp, Zea mays
  unsure (1)..(596): unsure at all n locations
atcagttagaattacagttgctgatggagaagtggatgtcactatcaaggttagcgatgaacgtagcgggataccaagaagcagcctcccaagaatttttcacgtatctgtacagcactgcaaagaatcctcctgagctagatagacctaatactgaaggggtaactatggagtatcacatctgttggagagaatggccttcaagagcacagtgaatcggacccacttacggttagttcgtgaggtagaagcaattggaggaaatgtctctgcatcagcttcccgtgaacaaatgagctatacctatgatgcattgaagagctatacaccagaaatggttgaagttctcattgacaatgtgaggaatccagcattccttgattgggtagtcanagagcagacccatgatagattagcttgtattgttgagatggagagaatgcaagtttgaatggctctgtgccacttgatgtacatgagagattggataagaagctttgtgcatatggccaacgacgccttcggcaggagagtcgccaaacttcttggcgatgtctttcatgtgttgcttttagttcttttagagactcctctga

SEQ ID NO: 258972 - DNA, 1352 bp, Zea mays
gtggtcaactcgtcttcgaagctcctcaagtacagcggctctggcgggaccccgcgttcgcgggtcggtgacatggagtccggcagcatcgaggacccgcctacgcacctcttcacctacgaggagctcgaggaggcgaccagctgcttcgacgaaaacagagagctcggtgacggtggcttcggcaccgtctacaaagggtacctcagggacgggcgcgtggtggcggtgaagcggctgtacaacaacggctaccggcgcgtggagcagttccagaacgaggcggccatcctgtcggggctgcgccaccccaacctcgtcatgttctacggctgcacgtccagccacagccgcgagctccttctggtgtacgagttcgtggccaacggcacggtcgccgaccacctgcacgggcagcgggcccccgagcgcgccctctcgtggccgctccgcctcagcgtcgccgtggagtccgccgcggcgctcacctacctgcacgccatcgagccgcccgtcgtgcaccgcgacgtcaagaccaccaacatcctcctggacgccgactaccacgtcaaggtcgccgacttcggcctctcccgcctcttccccctcgacgtcacgcacgtctccaccgctccgcagggcacgccagggtatgttgatccagagtaccaccagtgctaccagctgacggacaagagcgacgtgtacagcttcggggtggtcctggtggagctcatctcgtccaagccggccgtcgacatcacccggcaccgcagcgagatcaacctggccagcatggccatcagcaagatccagaagtgccagctggaggagctcgtcgacctcggcctgggctacgacaccgacccggccaccaggaagatgatgacgatggtcgcggagctggccttccgctgcctgcagcagaacggcgagatgcgcccgccgatcaaggaggtgctcgaggtgctcaggaacatccagggcgagtgtctgacgtcggggaaggatggggacaagagcaaggacgggcccttctctcccaccacggttcacgctccgtgggacagcaggtccacgacgcccaacaccagcagggactaggatagttagtgcttgaggactgagaccggccgaggtttaattcgtgtctgtattgctgctgtgtgactgctaggcatgccatctgttttcaggcttcgtagttagttcctggtgatgtaaatatttgttttgttggtgctgtcaggacagagggaatgcacatacatgtgtaagagtggcgaatggtattatacatatatatacacgggtacttactgaataaaaaaaaaaaaaaaaagggcggccgc

SEQ ID NO: 258973 - DNA, 661 bp, Zea mays
cggcggccgccctgctaccagtaccagcgccgctgctcttgccgccgctcgccggccgcaccgcgaagaagtatttctccccctcgctcctcgtatcaggggcagagacggcgacgacgtcccaggggtcgcggctgtagaggtcgcggaagacggggatgacggcggcggggagcggcacgccgatggccttgcgccggaggtactgcaccacgagctcctcgtccgtgtggcggaaccggaaccccggcgggagctgccgcagctcctccacgccgccagcatgcctcaccagcaccggggctccctccgccgccatgtccaaaaaaagttgcttttaccaccggatcggctactgaagctggctactgcttctgctgcgacaccactagtacgcagctataacgatcgagctagcagcctagctgccgctacgcactacggctcagctagctgctagctacgtccaatctaatttggtggcacgggagcggcaagcaactactctgatctcgcagcttctccggtcacttggcgcgcgcaggactcttccagctgctcggagcgtccatggcgagcgagcgagcagggagaaggagagagctgggggcgtgcgtgagtgactgcgcgcgtgcccacgcgtccgctacgtcgtgggtcg

SEQ ID NO: 258974 - DNA, 1178 bp, Zea mays
gtcacgcgtccgcgcatccctccgcgtctccggctaatggcggcatcagcgtctcggcccctcgcgctcctcgcgtgcacctcggcatctcacggcgctgggcggcgggcgtgggctcgcttggctgtctcttcctattcggcgaggtcggcgctccccaggctccgcgggcgtcggtcgttcgccgcctccgcagggggcgccgtgatggggaacccaggccccggcgccgttgacgccgacgtcgggatggacgccgtccagcggcggctcatgtttgaggacgagtgcattttagtggatgaacaagacaatgtcatcggccacgagtccaagtataactgccatctcatggagaagatagaagctggaaatgtcctgcacagagctttcagtgttttccttttcaactccaaatatgaattgctactacagcaaaggtctgcaacaaaagtgacatttccacttgtctggacaaacacctgctgtagccatcctctctaccgcgagtcagagttgattgaggaaaattgtgcaggggtgagaaatgcagcccagcgcaaactatttgatgaactgggaatagttgctgacgaattacctgttgaccagttcatcctccttgggaggatgctttacatggctccttcagatggaaaatggggcgaacacgagttggattacctcctgttcatggttcgtgacgtgaagctcaacccgaatcctgaagaggtggccgacgtcaagtacgtgaaccgcgatcagctgaaggagctgctcaggaaagctgatgctggggaagatggcgttaagatgtccccttggttcaggctggtggtggacaacttcctcatgggttggtgggatcatgtcgagcaagggactctgcagggggcagcggacatgaaaaccatccataaattgtaagcctgtagtcttgtagatccgcgaagcacgtgctgtgctccgttgagaaataagcgtttctgcaggtgtttgcgctgcctttgttttagccatcattctgatggaaatagtcgataaagtcataatagagtgctcttaaatagggaacataactatttatattgaaacccgtctatgatgtgtaaatttctaccggaatgaatggatttatggaaatcatagtaaaaaaaaaaaaagaaaaaaaaaagaag

SEQ ID NO: 258975 - DNA, 933 bp, Zea mays
caccgaacagcacgaccagaccagttgcccggctcaccaaatccaggcgtggccgtgcgacgcatccctcccctcatggcgtcatcggcggcgcgatccctcgcgctcgtcgcgtctgcctcggcatcgctcggcgtcgggcagcggtcgtgggctcgcttggctgtctcttcctcttcggctgggtcggccctccccaagctccgcgggctccgctcgttcgccgcctccgcagggggcgccgtgatggggaagccaggccccggggtcgttgacgccgacgccgggatggacgccgtccagcggcggctcatgtttgaggacgagtgcattttagtggatgaacaagacaatgtcatcggccacgagtccaagtataactgccatctcatggagaagatagaagctggaaatgccctgcacagagctttcagtggtttccttttcaactccaaatatgagttgctactgcaggtattcacacaatactaactatggttgtcttgctttgagatgtaatgtaagttccacttcatgttccttgaatcattggctgcagttctgagttcactttgttcgttttccaattaagtaggatatacaacctttttgctattttgcttggagtaggctctgtgtgtgatttacaaaaaaaaaaagattcgctgtgtattcaaaatgggttagctacttaacgtagttcatgatttcgggttgggatgcctcataaatcaatccatctcaatggtggtggcagaggtgcttgtcttagatgggtcatgatcaaactagagtttgggtgtcttggcacatatgagcgtgatgtttggcatgtgcatttattcaagcatgatattatggataggttcaattgaaaattgcaaagggtctttagttgagttgttaggtggcttgagtagcactcctacgttc

SEQ ID NO: 258976 - DNA, 810 bp, Zea mays
  unsure (1)..(810): unsure at all n locations
gcagcccagcgcaaactatttgatgagctgggaatagtggctgacgaattacctgtcgaccagttcattccgcttgggaggatgctttacaaggctccttcagatggaaaatggggcgaacacgagttggattacctcttgttcatggttcgtgacgtgaagctcgacccgaatcctgaagaggtggccgatgtcaagtacatgaaccggcatcagctgaaggagctgctcaggaaagccgatgccggggaagatggcgttaagctctccccttggttcaggctggtggtggacaactttctcatgggctggtgggatcatgtcgagcaagggactctgcagggggcagcagacatgaaaaccatccataaattgtaaatcttctagatcgcttaagcacgagtcttgccctgttgaggaataagcgcttgtcctgctgtttggtgctggaggaataatcgataaaattataacagagtgatcttaattctggaccgtaccttttaaaaaaaaaaaaaaaatcccccttnttctacttcttaacattactaatattatctcttttcttttcctttttatttatcatttctctccccttctttataatacattcattctaaaaggggcgccctcaaaaaaaacaaataatcccccccggtggggggggagattttttttttttttggggaaaaaaaaaataaatggggggggttttataacagggggagagaaaaaaccctctcacatatatttattctccccctccccccctccccgggggggagagggggagggcccccccccccccct

SEQ ID NO: 258977 - DNA, 974 bp, Zea mays
tcgtcaggatgaagattgctctaggtgccgcgaggggacgaattcggctcgagggaggtcccaaacctgttatttacagggattttaagacatcgaatgttcttcttgatgtggagtacaacgcaaaactatctgatttcggtttagcaaaagctggtcctcagggtgataaaactcatgtatctactcgggttgttggcacctatggttatgctgcaccagagtatgtaatgacagggcacttgacatctaagagtgatgtttatagcttcggagttgtgctactcgagatgttgactgggagaagatcaatggacaagaagcggcctacgggggagcagaacctggttgcatgggcaaggccttacctaaatgatcggcgaaggctctatcagcttgtagatcctcgcttggggctgaactactctgtcaaaggggtgcaaaaggtcgctcagatctgccactactgccttacccgtgacagtaagtctcgcccatcgatggatgaagttgtcaagcaactcacaccattacaagatctaaacgacatggcatctgcttcgccaaggcctcgctcaactcagcgcggaaaggtgcatcgatgacaacccggttctgttgtaagaagagcagtgtggtcctggttgcttgatgcttgtttggtttaattgtatagcaaaattaggtgttgcctgccgatacctggagatgtgactccgcctgatgtgtcgctcaggtcagtcacactgctctgctgtttggctggttgccaaagcaagataacgatgtatctggttgcatcatgtaataattattataattaccatttaacttctggcgggggtacatcatgtaatggttggtgtacacccaggttagtaatcttaatagtgtttggctgacaaaaaaaaaaaaaaaaagggcggccgccggggcttttttctcaaaaaacgcacaggtgttaaattgtgatt

SEQ ID NO: 258978 - DNA, 445 bp, Zea mays
aacaccttgttaagctgattggatattgtattgaggatgatcaaaggttacttgtataggaattcatggcacggggaagtcttgaaaatcatcttttcagaagatgaagattgctctacgtgccgcgaaaggactagccttcctccatggaggtcccaaacctgttatttacagggattttaagacatcgaatgttcttcttgatgtggagtacaacgcaaaactatctgatttcggtttagcaaaagctggtcctcagggtgataaaactcatgtatctactcgggttgttggcacctatggttatgctgcaccagagtatgtaatgacagcttcggagttgtgctactcgagatgttgactgggagaagatcaatggacaagaagcggcctacggtggagcagaacctggttgcatgggcaaggccttacctaaatgatcggc

SEQ ID NO: 258979 - DNA, 511 bp, Zea mays
gaattcggctcgaggacttgttatggatttaaaccgactcaatctcacttaatccacatggattgagagcgaaccgaacaaaccgtaatatgtgtgttcttggggtggaattttggatggtaatgtacaaggacgagtggattaatttacagtgatgtcggaggaccgacaagggttgcagtagctccacgcgaaacgcgactgttgagttcgtccatcgaacagctacacaccgttattcatgctacacgtagctcgcgttcagaatttcagatcaaaagagaacaaaacggagctcaagttcagagtggacagagctggcaaaaacctaaggaaagaagtcgtcgtcgccgggcagccgactctctcctcaacacaaggacgggacgacgccgtccgacgacgccgacgccgaccccgcgggcgagaagcacgccgcttcctcgtgctccagcgcgtcgtcgtcctccgagcaccgcttggcgaagcggcccttgacgcgcggccgccg

SEQ ID NO: 258980 - DNA, 754 bp, Zea mays
aaggacctcgccttcgacgaggccgcctgctccgggcattgccacgcctacgccgcggcgggcgcgtctaaggtgaagaaggtggactcgatccggcagtcgctgcgcatgcgcgggttccggtgcaacctcgtgtacacgcgcgcgtgcacgcgcctcaacgtcatcccgctctcggcgtcgcggccacgtgcgctaaggtacctgtcgatacaatggggcatcgacctgtccaaggtgtccgtgctcgtgggcgacaagggcgacaccgaccgcgaacggctgctccctggcctgcacagaacgctggtcctgccggagctagtttgccacggcagcgaggaattgtgccgcgaccaagacgggtttctggcagaggacgttgtctccatggactccccgaatatcctcaccctcgccgagtaccaggcggcggtcgacatcctcaaggctatttgagagtccgggattatgatacatgatctgctccgacattccagctgttggttccacactctgctggggttattttggacggacagttaaaatttcacagcgaatgactgcaaactttatataaaaaagatacatgtttttgttttcggttacttttatttttttggaaggggcttatggtataagtgtacatgaatcttttggtgcacatagtatacatattaaattatatttcctctatttcaaaataatagtcgttttagttttaaaaaaaaaaaaaaaaaaagggcggccgccg

SEQ ID NO: 258981 - DNA, 760 bp, Zea mays
gaattcggctcgagtgggggcaatgatctccaacctggcattcgtcgtccggaccatcttctccaagaaggggatgaagggcaagtccgtgagcgggatgaactactacgcctgcctctccatcatgtcgctggtgatcctcctgcccttcgccgtcgccatggaggggcccaaggtgtgggcagcgggctggcagacagcagtcgccgagatcggtcccaacttcgtctggtgggtggcggcgcagagcgtgttctaccacctgtacaaccaggtgtcctacatgtccctggacgagatctcgccgctcaccttctccatcggcaacaccatgaagcggatctccgtcatcgtcgcgtccatcatcatcttccagacgcccgtccagcccatcaacgcgctcggggccgccatcgccatcctcggaaccttcatctactcccaggccaagcagtagccgcccttggcgcgcgcgtctggctctcaggcctcagttcagttcaccgccgaatcagctcggcgctcgaagatataacagattatataacttttgaggatatctacctagcttgtataatagtattattactagatcctctcttctttttttccgtattttctttttcctaggactagcttattactagatcatttcgtcgtcgtgttttcactatgactatgatggcgtagagagagagagatggatccatctaaataaaaaaaaaggtaccagaaaaaaaaaaaaaaagggcggccgccg

SEQ ID NO: 258982 - DNA, 919 bp, Zea mays
  unsure (1)..(919): unsure at all n locations
tttgtttttnnngngttgttttttttgaaaagaatcaaataaatcatctcattgataaccagaaaacgcagcagggtagcacgaccaccatccatcgccatggctggccccaccaccacgctcctcctcctgctgctgtgctccgctgggctcgcgtccggcgccacggcggctgacgacagcgggttcactaccttcaaggtatacttccacgacatcgtggcggggacgagcccgacggccatccgcatcgcgcagggggcggcgtccaacacctcgtccaccagcttcggcgcgatggtggccatcgacgacccgctgacgacgggccccacgcgcgccgcgggcaccgaggtgggccgcgcccagggcacctacacgttcgcggaccagcagacgttcggcctcctcatggtgatggacttcgtgttcacggccggggagcacaagggcagcacgctctccatcctcggccgcaacgaggtgctcagcgacgtccgcgagatgagcatcgtcggcggcagcggaaagttccgcatggcgcgtgggtacgtccaggcgcacaccatcgactccggcttcaaatccggcgagaccgtcgtccagtacaccgtcaacgtcagggcctagctacccgctcgatctaccttgcttgctcctccggcccatggccgactgcccgcccggcttcttgtgcgtcgatccatctccggatgctttgtacacaccttgtcgttcttcgatgttactacatgacatgtatttagtagactgcgatttcagacatcgagtctatcttcatttgctattgagcgggatctggatctgcagacccgagtctacttctacgcggttctgccgaggtacggcgggtcgatcgaaatgtgcgaagaacacgtcagagcctaattctagtagt

SEQ ID NO: 258983 - DNA, 736 bp, Zea mays
ccagcaaccactcccaccccgacccaccgttacatgtctccatctcacccgcgcgcccacgcgcctccaccacgcccgccgccgccgccgccgccgccaccgcgctcctcctcctcctgtgcgccgcgtctctcgcgtccgcagccgccgacgacgggttgacgaccttcaaggtgtacttccacgacgtcgtggcggggacgaacccgacggcggtgcgcatcgcgcaggcggcgtcctccaacacgtcgtccaccaacttcggcgcggtggtggccatcgacgacccgctgacgacgggtcccacgcgcgccgcgggcacggaggtgggccgcgcccagggcacctacacgttcgcggaccagcagacgttcggcctcctcatggtcatgaacttcgtgttcacggccggcgagcacaacggcagcacgctctccatccttggccgcaacgaggtgctcagcgacgtccgcgagatgagcatcgtcggcggcagcggcaagttccgcatggcgcgcgggtacgtgcaggcgcacaccatcgactccggcgccacctccgggaccaccgtcgtccagtacaccgtcaacgtcaaggcctagctacctattacgtacccttgcttgcgactccgggccgtggcttctcgtacgtccatccatctccggctgctttgtacacaccttgtctgtcgtctttgagcgggattcggatttgcagagccgaatttactact

SEQ ID NO: 258984 - DNA, 482 bp, Zea mays
atcaatatagaaaaacaattaatgatagatgtaacttttcttttctttggttcttaacaaactctgaatcagatcacatgtttatgtcaaatgcgagaaaatttgaagtagatacaacttttgaacactaacaaacattatttcttattatggaaacaaactggttgagtaatttatgattgattgtgatccttggcctgttggtccttactctcaccttgccatgcccaaacaatgtctttaagcgctggtttcatgtcctgcttaaacaaattttcatattctagtgtatccccattatttttcttaatctctacaagatggaaagcaggagtaacttcaaagatctcagcatcaatagatagtacacctttccttccttcatttgcaccttccatttttagcacaccaccttcttttttctttattgtcatctttgaacaggtggcagcatcttctagttttgatctcgagccgaattc

SEQ ID NO: 258985 - DNA, 1367 bp, Zea mays
gttcgtcgggcgtagcggcagcgatgatattttagtcgtactcgtacagaagccacagccctctgctagctagctagctcctgctagaatggaaagtgcaggaggggaagctcggccggtgctgccgcagccgccgccgccgccgccggtgcaagagctcgccggcgctgcgaacgacgtgccagctcggtacgtcgcgcgcgcaggcaacgagcccaaggtcacggtaaccgcgccggtccccgtcatcgacctcgcccgcctgtgccagccgggcggcggcgccgacgaggcctcgaagctccggctggcgctcgagtcctgcggtctcttcctggtgaccaaccacggcatcgaggccactctcatggacgccatgatggacgcgtcgagggagttcttcaggcagccgctccaggagaagcagaagcacagcaacatgatcgacggcaagcacttccagctccaagggtacgggaacgaccgggtggcgtcggaggaccaggtcctggactggtgcgaccgcctttacctcttggtggagcctcaggaggacaggagccttgacctatggcccgcatgtctaagggacgttctgcacgatttcaccacagagtgcacgagagtgaaggactgcctgcttcgagaaatggcgaaggcgctagatgagctcggcgacgacgacgactacttcatcgaccagttcggcgacagggccgacacccatgccaggttcagctactaccctccgtgcgcgcggccggacctcgtcttcggcctgaggcctcactccgacggcacgttcctctcgcttctcatgctagacgacagcgtcggcgggcttcaggttttccgggacggagtctggtacgacgtgcgcaccagacctcacaccctgctcgtcaatctaggagaccaaatagagataataagcaatgggatcttcaagagcccagtacatcgggttgtaacaaacgcggagaaagagaggctatcagtggttctgttctattctatagatcctgagagagaaatccggcccgctgacaaactgatagacgagaaccatccaacactatacaagaaggtgaaagtcaaagaatatactgctggactctacgaacatttctctcgagggaaattggttaaagagactgcaaagatatagcttgttcgctttggattaaatccagctatttggactaatccttagagacaaaaacactgtataagtagtaaaagtcggtacgaattaaagctcaagctagtcgtatctatgtaatgaataagggtgaaacctttgcgatcctagataataaatgaaattaatttttaataaaataaagtgtatatagtagggcggccgc

SEQ ID NO: 258986 - DNA, 1893 bp, Zea mays
ttttaacgacggagaaaaggacacaacccagcccgccctaaaaccctcccaccatcatgtcgctctccacacacagccacccggccgccgccgccgccgggagcggaaaatccctttttccggctggcccagcggcgcagtccgtacatttccccaaggcacggccccctgtccccgccgccgtctccgccgcgactgcggctgttcacgcggaggatagggtttcgtcgctgactcaagtctccggcgtgctggggtcgcagtggggcgacgagggaaagggcaagctcgtcgacgtgctcgccccccgcttcgacatagtcgcgcgttgccaggggggagcgaacgctggacataccatctacaactcagaaggcaagaagtttgctctgcatcttgttccatctggtattctccatgaagggacactgtgtgttgttggcaatggagcagtcatccatgttccagggttctttggagaaattgatggtcttgagtccaatggagtccgctgcggtggaaggatactggtatccgaccgggcacatctgctgtttgatctgcaccaggctgtggatggacttagggaagcagagcttgaaaattcatttatagggacaactaagagaggcattggtccttgttactccagcaaggtaactcgaaatggactgcgggtttgtgatttacgacacatggacacttttggggataagcttgacatcttattcaaagacgctgcttcgagatttcaaggctttcagtacagcaaaagcttgctcaaggaagaggttgagagatacaagaagtttgctgatcgcttggagcccttcattgctgataccgtgcatgtgctaaatgaatctatcaagcagaagaagaaaatcctggtcgaaggcggccaagcaactatgctggatattgattttggcacttatccatttgtgacttcttctagcccttcagctggcgggatatgcacaggcctagggattgctccaagggcaattggcgacctgattggagtggtcaaagcttacacatctagagtcggctctggccctttcccaactgaactatttggagaggaaggtgatcgccttaggaaagctggaatggaatttggcacaacaacaggtcgcccaaggcgttgcggctggcttgacattgttgcgcttaagcacagctgccaaatcaatgggttctcatcacttaatctgaccaaactggatgttctgtccgggttgtcagaaattaaggtgggtgtttcttatacccagactgatggacagaagctgcaatccttccctggggatcttgatacccttgagcaagtacaggtcaactatgaggttctgcctgggtggcaaagtgacatttcttctgttcgaagatacgatgaacttccccaagctgcccgcctttatgtggagaggatagaagaacttgttggtgttcccgtgcactacattggtgttggacctggcagagatgctctcatatacaagtaaaagcaactttatttggtccttggttgggcggaaaccaggctgggactcgggagcatttgcattttcttggcgtggtaacttttgatacggtgaagtcactgactcgtggagtgatgttgctcaataatcattaatcagaaccttgtcctaatacagccgctgagacatcagctaaggcgaataagggaaggatgagtcatttgcaccatgtttgaccaccaattgttaggtggtccatatattttgtactaattgtgagactttgtgctatggatctcaactgtataccttgctggtgcatggctttgggtttacatggttgaaaataagattggtgtactaattttaaaaaaaaaaaaaaaaaaaaaaaaagggcggccgc

SEQ ID NO: 258987 - DNA, 566 bp, Zea mays
gaattcggctcgagcggaccccggcgtgctcaccgtgctcgcgcaggacggcgtcgggggcctgcaggtgaagcaccaggatgaggacggcaaaatctcctgggtggatgtgaagcccgtgcccggagcgctcgtcatcaacgtcggggacctcttgcagataatgtctaatgacgagtacacgagcgtcgagcatcgggtggtcatgaacacgcgtgaagaacccagggtttccatcggcatcttcttcagtcctgggaagagaggggactcggtgttctatgggccgctgccagagctggtctcttcagcgaacccgcccaagtacaggaacttcaccatgtccgagttttacgggaccttcttctcacgagaccttgccagcaaggctctactcgataacttcaagctgtcaccttaaagtgtcgactccagctcgaagagtttagatagactcgtgtatactatagtcatgcgtgaattgtgattgccggctggcaatgtatagaaaaatagaaattgttctgtcaaaaaaaaaaaaaaaaaaaaaaaaaaagggcggccgc

SEQ ID NO: 258988 - DNA, 461 bp, Zea mays
tctgtactacggaggttcatgctatggcatcggggagaaaggcaatgtttcatatgctttcaacagctactatcagcagcagaagcaggacccaaagagttgtgattttggtgggcttgggatgataacataccttgacccatctatgggcgaatgccgctttcttgttggtgttgatgatagcaagagctctgcagtcgcctcttgtggcggtggatgctgcggggtctgctgtggactctgggttttagctttgtgggtgctcacgtaccttagaatgatgggttccgcttgattctcaaattgatatacctttgtgccaatgtttagaaagattgtacaattgacttctaggtctaggaaggaatggactgcactgtcgccacatgagattaggaaaccaggatttatatatataatttaatttattgttgaaaaaaaaaaaaaaaaagggcggccgc

SEQ ID NO: 258989 - DNA, 1349 bp, Zea mays
gacgaggtatggttttacttccaacagttaatcaatgcagtggattattgtcatagcaagggtgtgtaccaccgggatttaaaacctgaaaatttgctggttgattcatatggttacctgaaggtctctgactttgggctcagcgcgctattttagcaaatcaaggatgatggactgctgcacacaacttgtgggactccaaactatgttgcaccagaggtccttgaagatcaaggctacgatggagcaatggctgatctgtggtcatgtggagttatcctgtttgttctgctagcagggtatttgccgtttgaggattctaatctcatgactttgtataagaaaatatcaaatgcagaatttacatttccaccatggacatcttttcctgccaagaggttgttaacaagaatccttgatccaaatccaatgacgagaataacaatcccagaaatattagaggatgagtggttcaaaaagggctacaagcgcccagaatttgatgaacaatatgacaccacattggatgatgtggatgccgtcttcaatgattcagaagagcaccatgtgacagagaagaaagaagaagaacccgtagctctcaacgcatttgaactgatttcgatgtcagcgggcctaaaccttggaaacttatttgactcagagcaggagttcaaaagagaaacaaggtttacatcaaaatgtccccccaaagaaatcattcgcaagattgaggaagctgcaaaacctctaggatttgatgttcagaagaaaaattacaagttgaggctcgaaaaggtaaaggcagggaggaagggaaacctcaacgttgctactgagatactgcaagttgcaccctctctccacatggtagaagtccgaaaagcaaagggtgacactctggaatttcataagttctacaagaacctttccaagaccttgaaggacgtcgtctggaaatccgacgatcttcaaacgcaacatgcttcttagcagaacctcagagaggaggaatggcaaactattttgtgcaccatcctttcaagcaaactattctgcatgtaacggtgggtgcccaggaaattgcgctggtgctccaccatcgttgtatatgctgcgtcttgagttgcttgctgtagctgaagggaagttcattcagtaggttttgagtatgagttttgtatatccgtatatgcctatgactatgagccgtgctggaacactatgatcagaaactgcgaaatggagcccagaatgttcttgccatcttgctccagttctcagcaccgggcttaacttgccttgcattttttgaagaagaaaaatggactacttgattgggaactcgt

SEQ ID NO: 258990 - DNA, 657 bp, Zea mays
  unsure (1)..(657): unsure at all n locations
gaaaacattcgcctgatctaccaagcngcaaaacctntaggatttggtgtccagaagaaaaactacaagttgaggctagagaaagtaaaagcagggaggaagggaaacctgaatgttgctacggaggttgcgccctcccttcatatgggacaagtccggaaagcaaaaggcgacactctggagttccaaaagttctacaagaacctttccaagaccttaaaggacgttgcctggaaacctgaagacctgcaaatgcgagctgcttcttagcatccactagatggcgagatgttcgtacgtgtcagattccattcccgtagcatgatgtgtcgtcagccgtttctgttcactgcactctgcatggtccggtgggcgcgtggcttggcattttcagagaccgcgttgctcgttgcagcccgggatgaaggcgatgcagtaggttttgtggatgtggtgagctctgtatatgcctattgatgagtcatgttgcaagctgtaacgacactatgatccgtgaagtgtagaagcagccaagtatgttctttctatgctgccccatttcccggcagtttccatgcattttgaagaaaaaaatagtggctaactcattgatatttgtatttggtcatcattaataaatcgcccccccctctgtgc

SEQ ID NO: 258991 - DNA, 451 bp, Zea mays
  unsure (1)..(451): unsure at all n locations
attttctcattttcatgatccaatttctagcaaggtagatttcatgtatcaattgactagaatagagaaagaagctaattgggtaattctaaccggcctggtggtggctanaccaactgataacaagggcctatggtgtaattaagtagctaaaaattcatactaacttggtcgaacaaagcagaagaaaattcgtgtgacttcagaataacaatccctgaaatactggaggatgagtggttcaaaaagggctacaagcgcccggagtttgacgagaaatatgacacgccattggatgatgtggatgctgtcttcaatgactcagaagagcaccacgtgacagagaagaaagaagaagaacccgtagctctcaatgcatttgaactgatttcaaggtcagcaggcctaaatcttgggaacctatttgactcggagcaggaattcaaaagag

SEQ ID NO: 258992 - DNA, 959 bp, Zea mays
cccacggaattcggctcgagcaagcttcaacctttgcatgcagagacctagtggaatagagcgaggggaatggagcaaggagacgaggcgtcgtcggtgaccaaggagagcccggagcagcagcttacccgggaccgggagcagcagcacgacgccggcgtggcgtggctgaacctcacgcttcgcgcgggcgagtcgccctcgccggacgcggctgcgagctgctccgccgagtccgggtccgggtccgggtccgggtccgggcccgagcccaccgccaatccgtccgccgccccgcacaaggtgttctcctgcaacttctgcctgcgcaagttcttcagctcgcaggcgctgggcgggcaccagaacgcgcacaagcgggagcgcagcgccgccaagcgctcctaccacgcgcaccgcatgatcgtgggcctgccgctgcacgcgcacgccgcgctcatgcactcgctctgggtcagcccggcctcgtcgccgatccacaaggcggcgggcccggccagagcggcggcaaggttcctcgagggcggcggcgccgccgccgccgctgccgcctgggggacgacggtcgccgcctgcgaggaggcgcccggttcggcggcgtggcctgggagcttcaggctgagagcgcagcactcggagcacgaacgagcgttcgagactgaacagagcaagatcgacttggacctcaggctctaatggggggtatgtgcccgtgcatggtcagctcatctgctgaataaatctggtctggagatgtgatcaggttcagctcactgtcaggtgaaaccccatagagttttggacatattgagtcgcttagaattgttttgatggtactgcaattatgcatttctgtagctggaaactgtactttagatctattgacagacatcagttttcttgcatgtcttcaaaaaaaaaaaaaaaagggcggccgc

SEQ ID NO: 258993 - DNA, 480 bp, Zea mays
ccgacgcgtccgcccacgcgtccgtccacgcgttcgcccacgcgtccgcggacgcgtgggcttctgcctgcgcaagttcttcagctcgcaggcactgggcgggcaccagaacgcgcacaagcgggagcgcagcgccgccaagcgctcctcgtaccacgcgcaccgcgtggtcgtgggcggcctgccgctgcacgcgcacgccgccctcatgcgctccctccgggccagcccggtcttttcgccggcgccggaggtcaggacggcggcgaggttcctcgagggcggcgtggcggcggcctgtgcaacggtcccgtgcgaggaggcgctgtgcggtcaccagaacgcgcacaagcgggagcgcagcgccgacaagcgatcctcgtaccacgcgcagcgggtggtcgtgggcggtctgtcgttgcacgcgcacgccgaccttatgcgcttcctccgagccaacccggtgccggcgccggcggt

SEQ ID NO: 258994 - DNA, 1328 bp, Zea mays
gccaccatacctaggcggcggggacttccagaatggtgcaaactttgcggtcggcggggcaactgccctcaatggctcgttcttccgtgaacgcggcgtggagcctacatggacacctcactcccttgatgagcagatgcaatggttcaagaagcttctcacatccattgcaccgttggagacagagcaaaacaaaataatttccaagtcacttttctttgtgggagaggtcggtggaaatgattacaaccatttaatcgttagggataaatctgttgatgagctacatgaagttgttcctaatgttgttggtgccataagctcggccatcacggatcttataaatcttggagcaaagaagttagttgttccagggaacttcccaatagggtgcgtcccattatatcttgcaatctttcagagccaaaaagaggattactatgaggaacaaacaggctgcattaagtggctcaatgattttgctgagtaccataataggatgcttcaggaggagttggagaaactcaggaatcttcaccctgatgtaaccatcatttatgctgattattacggtgctgcattgaacatattccgtgccccactcaagtttggcttcacagtcccactgaatgcgtgctgcggaagtgacgctccgtacaactgttccccttcaatactgtgcgggcgtcctggatctacagtgtgccctgacccatcaaaatacatctcatgggatggtctacacttcaccgaggcgagttacaaagttgtcatccaaggagtactaggggggtacgccaaacctcctctttcagaagcctgcaagggtgcggagttcaaagtttctcaacttcaccaatgtacagataatccaacaaacaccgtatcatacgatgccttgagctcttttatttgatctgatgagctcaagtacttttagatttgtgctggtaaaaaaagtgcagtttagagttacagtgggcagtgtagatgctgcaggaccgggtatcttggacacttctcagagcggagaagagatccatcgatctagagtcatgtagttctacaatcaacttggctgctgggaggaggtaaaaaaaggtggggattttgtagtgtggaaatttgcaatcaccgaagggatacaggtggtcatactgctatataggaacctagatctatgattctgcttctgagggcaatgtatgcagatatgggctcagttgccttttaacagatacatgcatatatacagtgtaaatttgttgattcacattaaccaggataataaccgttgtcgaaaaaaaaaaaaaaaaaagggcggccgc

SEQ ID NO: 258995 - DNA, 760 bp, Zea mays
atgcttttcctgttcaacattatttacactagagtctgtagcaacagtagctacatggataggtgtaccacagccttgctccagactctagtgtaaataatgcttttcctgttcaacatttcagtccgaggcatacacaagccatgccagactttgctcgtgtatacaacttcctgggaagcatatttgatccagagacaaatgggcatttgcagaagttgaaggaaatggatcccattgatgctgatacggtactgttgctgatgaaaaatctgtcaatcaacctaactagtccaaactttgaggagcataggaggctgctctcttcggatgcctcaagcatggatcaagagtcgggctcttcccgcgttcatctcccgttcatgataacgagcaagtgagagaagcagctggctggcctgaaggcaaggagggcgtttggagtcgtcacactcaggagcaaggcgatgcgtatgtacatatatcttaataagcagctttaggatagcttggtttcctcgacccccatgttgcaagtttatgcgcctttttctttattctccgcccctccagttttgcccgttgtagtatggaacttataacatgcgtgttttatgccgcatcttacatttttttgtcccatcacaaggatgaacgggtggggcatgtgtgtgtgtttttttcccgtgtgtatgtatacagcatgcggctgtatgtgtagatcagatcaggctatatatataacagactgtgctgttct

SEQ ID NO: 258996 - DNA, 462 bp, Zea mays
tgaaatgcaatatgttgttcgttggattctgacccctactgggcgccgctttctactgcagaggaggttgctctcttcggatgcctcaagcatggatcaaaagtcgggctcttcccgggttcatctcccgttcatgcttcacagtcccactgaatgcgtgctgcggaagtgacgctccgtacaactgttccccttcaatactgtgcgggcgtcctggatctacagtttgccctgacccatcaaatacatctcatgggatggtctgcacttcaccgaggcgggttacaaagttgtcatccaaggagtgccaaacctcctctttcagaaacctgcaagggtgcggagttcaaagtttctcaacttcacccatgtacagataatccaataaacaccttatcatacaatgccttgagctcttttatttgatctgatgaactcaagtacgtttatatttgtgctggt

SEQ ID NO: 258997 - DNA, 677 bp, Zea mays
cctggatctacagtgtgccctgacccatcaaaatacatctcatgggatggcctacacttcactgaggcgagttacaaagttgtcattcaaggagtactaggggggtatgccaagcctcccctttcagaaacctgcaagggtgcggaattcaaagtttctcagcttcaccaatgtacagataatccaacaaacactgtatcatacgatgctttgagctcttttatttgatctgctcgtaaaagaagtgcatttagagttacagtgggcagcatagatgatgttgcaggaccgaacatcttggacactttctcaaagccgagaagagatccatcgatgtagggtcattcagttctacaatctacaatccacttcgctgctgggaggaggagaaaaaatgggaggggagtttgtagtgcagaaatttgcgattgcttagtgcactactttgctctgctatgtttttcttagcagcttactgctgcaggctgtagaagggacaacgaaagttgacagtctctgcaggtggtcatactactatataggaacctagatcttttaaatcagctcctgagggaaatgtatgcagtacttgatatggtctcaattgccttttaacggatacaagcatatatacattgtagcttcattgattccaaaaaaataaaaaaaaaaaacac

SEQ ID NO: 258998 - DNA, 499 bp, Zea mays
gaattcggctcgagctactacatccatgatgaaaagtctacgtacaaccacgcgttgaagcgcccgtggggtaccatctagggctggacgaaatactcgtggctcgctggctcgctcggttcgtggtcagctcggctcggatcggatcggctcgtttaaattttttcacgagctgagctaacatcctagctcggttcgttaatgagccagctcggttcgttaacgagccagctcgcgagctaaacgagctaccatattccagcaaaatgaaactatatgcatatcatttacaaaataattgatgaacatgttatatatatgtgaggtgtttatggcttatgaattaaactaatgattaatgaactatgtctatgtgttaatttggtttatacaaatataattatgggttaaaccgatgagcatgtatgtgaattgtgaattaatgagtgatgaattgtgctaaaaaaaaaaaaaaaaaaaaaaaaaaaagggcggccgc

SEQ ID NO: 258999 - DNA, 800 bp, Zea mays
tttctttcctgccaccatctatttgtctctggtcagaaacccctctcaaccataaggattacacatgtttgaggtgcggcgacacgggcttgggccagcgatgcgcaggggcctctcaggctcaaggtgctgtgggggccacctacatggatccatcctgcacctatgcaaacgccatggcggccatgtctagggctggacaaaatactcgcggctcgtcggctcgttcggttcgtggccagctcggctcggctcggatcggctcgtttgaattttttcacgagctgagctggcatcctagctcggttcgttaacgagccagctcagtttgttaatgagccagctcgcgagctaaacgagctatcacatttcagcaaaataaatctatatacatatcatatatgtaacaattgatgaatatgttatatgtatgtgtggtgtctataacctataagtcaaactattgattgatgaattatgtctatgtgtgaaactggtctatgcgaatataagtgtgggttaaactgctgaatatgtgtgtgaatagtgaattgatgagtgatgagttgtgttaatttggtgttatattgatatggtctgtgaaactatgagtataaaaaaaaaaaaaaaaaaaaaaaaaaaacaaaaaataaaaaaagataataaaaagctaagataataaaaaaaaaaaaaaaaagatacaaatgttatactacataacatgggggcgctccattttagagacccaagtttgattccccatatttgcacaaagttactctttcatttgggaacccaaa

SEQ ID NO: 259000 - DNA, 777 bp, Zea mays
gcggccgcccttttttttttttttttctcaatctcattttttattaatataatcgtcagctccctgcttggtttgttttatatatttatataaaaaataaaggccagctacaagtatagtaaaaacatatgattccataggctgtgggaaatgagtaaatggcattcacaaaccctgctagcttaatcgatcagcgtggagggagctccccttcgaggaatgacgagaataatgccaatgccctgcgaggctggtagtatggcaccatgtgcccagctcctctgaccgtcacgaagaccagccctttatacccaatgacgtagccagcaacctcattgtcgacgcgccatggacgccaagctgcttctataggaagcccaagattgtccagcacatattgtgttgaaatgaatgagcacactgcatccatatcaccactgtacagccatattctcgtgccacttgaaatgagtttctttattgatggcagcattgtctctggtgaatctttccaattatcaatatttcctttttcttgggtggctaagtccatggcattttggcagtcttcagtgtatgtcccattaaagccgcacttatccttgacggctttataagcttttcccgaaatcatacatgcatccaatagtagtcatatgatgctcttagagtcaaattatcatccaagtctgcatttccaatcgcaacacctttaagcttgatactagttacattggtggctctattcttagagagaatcagatttgcaagttctgg

SEQ ID NO: 259001 - DNA, 740 bp, Zea mays
cggcggccgccctttttttttttttttttttttttttttttttttttttttctcaatctcattttttattaatataatcgtcagctccctgcttggtttgttttatatatttatataaaaaataaaggccagctacaagtatagtaaaaacactaggcctcatgtaccgcctatgattccataggctgtggaaaatgagtaaatggcattcacaaaccctgctagcttaatcgatcagcgtggagggagctccccttcgaggaatgacgagaataatgccaatgccctgcgaggctggtagtatggcaccatgtgcccagctcctctgaccgtcgcgaagaccagccctttatacccaatgacgtagccagcaacctcattgtcgacgtgccatggacgccaagctgcttctataggaagcccaagattgtccagcacatattgtgttgaaatgaatgagcacactgcatccatatcaccactgtacagccatattctcgtgccacttgaaatgagtttctttattgatggtagcattgtcactggtgaatctttccaattatcaaatacatgctgactacagtccatccatggatagcctaaccctgttgtgtttgcatggagtgccctttggacctcaggattgtttaggtaagaggagacatagtggtttgtgcatggatcaccaaacagtaacgagtcacttgatttagaagcatttgaggcatcatggcataaag

SEQ ID NO: 259002 - DNA, 295 bp, Zea mays
gaattcggctcgaggagagcaaccgcagggacacttgcaggggcgactccggcggtcctctggtgtgcggggatgcggtcgaagctgtggttacgtggggatctcgagtctgtggcaaccggagaaagccaggtgtctttacccgcgtggcaacctacgtgccgtggattgaaaacgttctgagtggtaacgtgagtgttaacgtgacggcctgaggggacaccggagaccgtgactcacaataaatgcatgcatcttgccaaaaaaaaaaaaaaaaaaaaaagggcggccgccg

SEQ ID NO: 259003 - DNA, 828 bp, Zea mays
cacacttcctcgcgctcgcgctctcgagtcccgactcacctgcttctagccatggaggcgcctccatcttctcccttcctagtgttgctcctgctgttcttcccttcgagcggccttgccgcccccatggattttaaccatgaagtgcaagtccttatggtgatcaagagcctcctcaaggacccctatggcgcgctgagaaactgggacaggaactccgtcgatccctgtacctggtccttcatctcctgctcgccggagaatctcgtcactgcactggaagctccaagcaagaacctttccggccggctctccccgagcatagggaacctgacaaaacttgagaagcttcagctgcagaacaacaacataattgggccaatcccagcagagatcggcaagttagcaaagctcaggacgctggttctgtccagtaacaaattacatggcacagtcccaaattctttaggccgactcagaaggctccagtacatagacttgtcgtacaataacttgagtggcccgataccaaaaacgtctgcaagaacgctcaacatagccgggaatcctctcatctgtgctgcagaacaggattgtgacagtaccaagctgaaaccgatgctggattcctatatcgctggtgaacagtaggagccccaagttgggagtcggttaccttgctaaggagtatgtacctaacgaacctcgggtgccgtttggtttcacaaaatgtaatgtaaatgataataattaacactcgtgtgacaacaataataagtttgagtaagttggtatcaaaaaaaaaaaaaaaaaaagggcggccgctct

SEQ ID NO: 259004 - DNA, 833 bp, Zea mays
gaattcggctcgagggatcgcgcagggctccgcgagggggctggcgtacctgcacatgtcctgcgacccccacatactgcaccgcgacatcaagtccagcaacatcctcctggacgacaacttcgaggctcacctggccgacttcggcttggccaggctcatctgcgcgtacgagacgcacgtcaccaccgacgtcgtcgggaccctgggctacatccctcccgagtacggccagtcgccagtggcgacctacaagggcgacgtatacagcttcggcatcgtcctgctcgagctgctcaccggccggaggcccgtcgacatgtgccggcccaaggggaccagggacgtcgtgtcgtgggtgcttcggatgaaggaggagggcagggaggctgaggtcttccatccgagcatacaccacgaggacaaccaaggccagctggtgaggatcctcgacattgcgtgcctttgtgtcaccgctgctcctaaatcgagaccgacgtcgcagcagctagtcgcgtggctggacgacatcgcggagggatgaggcttcattctttgctgcagtcctagttcttcccagtgccttcagtttgatagttccttaagaatgattattagctgtgtacataatatttacagagtgatatgccgagagttctcttcttgtctttctctttatctgtctagtgatgctgatgacatcaacatcttcatttaaaagaaaaaaaaaaaaaaaaaaaaccggagagtgtaaaagtgctttgtaggcttaccctcagttccataaaatagcccccacatgagcagctttcctacaaaaaaagtgataaaaa

SEQ ID NO: 259005 - DNA, 1391 bp, Zea mays
cataaacctagaattctatcccttattggtgtcccctatctctcaactacttggtggacttttaaagaacctgttggcattgggggtgaaggcatctttactgctcaggggatattagagcacttaaacgtgacaaaagacatctctgactaccttgcatgtgctcccatgggtgaacatttctgaagaggatgttttatattggaattccaaaggttttcttccatcactaaccatagatcaaatccgcgatgtagcacgtgtatttgtaaatgggaagcttgcaggtagtaaagttggtcattgggtctcactgaatcaaccgcttcaattagttcaaggacttaatgaggggacattgttatcggagattgttggcttgcagaactatggtgctttcttggagaaggatggtgctggatttagaggtcaagtaaaactcactggcttgtcgaatggggatatcgaccttactaattctctttggacatatcagattggtttgaaaggtgagttttcaaggatctattctcctgagtatcaaggatctgctgagtggagtagcatgcagaatgatgacacagtttcacccttcacatggttcaagactatgtttgatgctccagaaggtaatggccctgttaccattgatcttgggagcatgggaaagggccaggcttgggtgaatgggcatctcattgggcgctattggtcactagttgcgccagagtccggggggcccccgtctcgcatctccctggaggttcattacaccaagacaatctgctcaaaaatatctgagacttactatcctcccctttctgcctggtcacgtgccgccaacggtcgcccctcagtaaatacggtagcaccagagcttcgcttgcagtgcgatgacgggcatgtgatctcgaagattacatttgcgagttacgggacccctacaggaggttgccagaacttctctgtagggaattgccatgcatcgactactctagacttggtggtagaggcctgcgaaggcaagaacagatgcgcgatcagtgttaccaacgaagtattcggagatccatgccgcaaagtcgtcaaggatttggcagttgaagccgagtgctccccgccatcggttaaccaagaacctcgatacgatatatgatcacggtactgtattgtggtgctcaggtcttggtggacgttgccgcagctttgcagggccgtgcacaatggtcctgcatcgttgtctcctatacctctgcacccatattatatgtaaacagtgacctacatgtaaatctaaagaagaggagggattgaaaagaaatgagatggaaaaggaataaagttgcttttattacaaaaaaaaaaaaaaaaaaaaaaaaaagggcggccgc

SEQ ID NO: 259006 - DNA, 965 bp, Zea mays
gccgactggcgcgacacgtctctctgcaaaattgcgccggatccggcgccgcgggagctcgtgccggagcctctccggaacgtgaatgatggaatacggcgaggaactgacgaagctggcgcggtccatgttcgagctgctgtcggagtccctcggcatgcccagcgaccacctgcacaagatggagtgcatgcagcagctccacatcgtgtgccagtactacccgccatgcccggagccgcacctcaccatgggcgtcaggaagcactcggacaccggtttcttcaccatcctcctgcaggacggcatgggcggcctgcaggtgctagtcgatcgcggaggcggccgccagacatgggtggacgtcactccccgacctggggcactcatggtcaacatgggcagctttcttcagcttgtgacgaatgaccggtacaagagcgtggatcaccgggtgccggctaacaagagcagtgacacggcgagggtctcggtagctgccttcttcaaccccgacgagaagagaaccgagaggctgtatggccccattccagaccccagcaagcctccgctgtacaggagcgtcacgttcccggacttcatcgccaagttcaacagcatcggactggacggtcgcgtgctcgaccacttccggttggaggacgacggccctactcgtcttgctgctcctgcacaccacgtctagtcttgttttcgttcgatcgaacaaacagttctcgtcgtcgtctcttttatttttcctgcaatctgaatttcgagttctccaaataaataagggtatccattcccttcatccgcagagcgcgcggatgccttcactagcagctctagttttgctatgtatatagctgtgtgtgtggtacctttgtgactcatatattatgcaataaagtatgctttctcctcgtacctttgtgcctcactttttttattaaaggtatgtt

SEQ ID NO: 259007 - DNA, 928 bp, Zea mays
cccacgcgtccgcccacgcgtccgcccacgcgtccgcccacgcgctacccggcgctcgcgcggctttctttcccaactccgacgaaggctagctacaccacctggtgcgggctcgtctccatcgcccgccacccgctccgtcgtcgtcgtccccgccgcgccgatcccgaatcgaatggggagcctggcgtccgagaggaaggtggtcgggtgggccgccagggacgccaccggacacctctccccctactcctacaccctcaggaacacaggccctgaagatgtggtggtgaaggtgctctactgcgggatctgccacacggacatccaccaggccaagaaccacctcggggcttcaaagtatcctatggtccctgggcacgaggtggtcggcgaggtggtggaggtcgggcccgaggtggccaagtacggcgtcggcgacgtggtaggcgtcggggtgatcgttgggtgctgccgcgagtgcagcccctgcaaggccaacgttgagcagtactgcaacaagaagatctggtcatacaacgacgtctacactgatggacggcccacgcagggtggattcgcctccaccatggtcgtcgaccagaagtttgtggtgaagatcccggcgggtctggctccggagcaagcggcgccgctgctgtgcgctggcgtgacggtgtacagcccgctgaagcactttgggctgacgaccccgggcctccgtggcggcatcctgggcctcggcggcgtgggccacatgggcgtgaaggtagccaaggccatgggccaccacgtgacggtgatcagctcgtcgtccaagaagcgcgcggaggcaatggaccacctcggcgcggacgcgtacctagtgagctcggacgccgcggccatggcggcggccgccgactcgctggactacatcatcgacacg

SEQ ID NO: 259008 - DNA, 515 bp, Zea mays
  unsure (1)..(515): unsure at all n locations
gaattcggctcgaggtgtacagcccgctgaagcactttgggctgacgaccccgggcctccgtggcggcatcctggagcgcaacgacgtccgctaccgcttcgtcgtcgacgtcgccggtagcaacgtcgaggcggaggcggcggcggcggatgcggccagcaactgatggcaccgcgtcgtcgagtcgaaccacgtctgtgcgccgcgtgcaacgttcgttcgggtcgagtctgcgtgcaacgttctgcttcctttactagttgttgtctttccgccttcttgccgttctgttctgggctttgagatgagacgatggatggtcagtttttaatgtcagactgaataactacgtatagtactgtagtaaaaaaaaaaaaaaaaaaaaaaaaaaaaaaaaaaaaaaaaaaaaaaaaaaaaaaaaaaaaaaaaaaaaaaaaaaaaaaaaaaaaaaaaaaaaaaaaaaaaaaaaaaaaaaaaaaaaaaaaaaaaaaaaangggggggggcccttttaaa

SEQ ID NO: 259009 - DNA, 814 bp, Zea mays
atcatcgacacggtgcccgtgcgcgacccgctggagccgtacctggcgctgctgaagctggacggcaagctcgtgctgctgggcgtcatcggcgagcccctgagcttcgtgtcgcccatggtgatgctggggcggaaggccatcacggggagcttcatcggcagcatcgacgagaccgctgaggtgcttcagttctgcgtcgacaaggggctcacctcccagatcgaggtggtcaagatggggtacgtgaacgaggcgctggagcggctggagcgcaacgacgtccgctaccgcttcgtcgtcgacgtcgccggtagcaacgtcgaggcggaggcggcggcggcggatgcggccagcaactgatggcaccgcgtcgtcgagtcgaaccacgtctgtgcgccgcgtgcaacgttcgttcgggtcgagtctgcgtgcaacgttctgcttcctttactagttgttgtctttccgccttcttgccgttctgttctgggctttgagatgagacgatggatggtcagtttttaatgtctgtctgaataactacgtatagtactgtagtggtactcggagtacgccagaatgtggtgtggtgtcagtctcaccagcaatctggatttgccaagtgtttctattttttcttcggtttgcccgagtgtttgtgattgttaagaactactttattactgatcgtcaaatccgttcccttctgtctcgtctatagtttagacgcgagataatattaaagacacgttttccattccatattcatttatttttattttttatttctattttaataggttgtttcttt

SEQ ID NO: 259010 - DNA, 716 bp, Zea mays
ggcggccgccttttttttttttttttttaaagaacaaagcatgacatgcaccaaattaacaacacgaaacggcaattccgagtattacacggctatctatcatattataagggcacaatctgcaagactgcaatccatacttcacaggtacaatctgagtacgaagtccacaaggcctgatacccttcgcgacagaccatgtagagcaggtgcgcgagcaaaagaggccagggcgaaactgacacggcaaaatcagacctcgtcctcgtggagcatcatgttggggatgcccttgttgatggggaagcagcggctggtgtcggggcagacgagggagccctcctggacatgaacctcgaggagcgcgtggtggatgcggcggatggcgcttccctcgacgtcggcggcgccctcggcgaagatctcctcctcggggggctgctcctcggggaggagctcggggaggccgatcgcgcgggtggcggcgacgagcgcgcgccagtcgatcttggggaggagaccgcggatgaagtcggagttgagctccacctccttggtgcaccagttggtcgcctccagcgtcagcgggtagccggtggttgcgccccggacgttcgacgccagcatgttgtgcgtcaggagcctcatctctctcgcgtggctcgcctcgcgggtctcgcgctgctccggcggcgcggtgtggctgcggagtaaaa

SEQ ID NO: 259011 - DNA, 1326 bp, Zea mays
caatgccaacatggatacagaagcttacacagaagttcctcaacagtcctgttgcagtggaccttgttggtgaggatgaccagaagctggctgaaggaattagtctgctctctgtctcttcggaaaaccgtgaaaaaccagctgttcttggggaattgattaaggaacatgccaaaggtggtaagtgcattgtttttacacaaacaaaaagggatgcagatagattgtcacacaatatgagtcgaagtttccagtgtgaggctcttcatggggatatctctcaatcccaaagagagagaacactggcaggatttcgagatgggaggtttaatatattgattgctactgatgtcgctgctcgaggattggatatcccaaatgtagatctggtgatacattttgaattgccaaactcgtcagagttgtttgttcacagatctggccgaactggccgtgctgggaagaagggcactgcaattgtgatgtacaactatgaccaaagtagagctgtacgggtcattgaacgtgacgttggatgcaagtttacagagctgccaaaaattactgttgatggatccgacttgctgggtggtggatttgactccttcgggggtggaggtggtgggtatggtggctcaaactatgggcgctcaccagggggctttggtggacgtggcggtggtggtggttttggccgatcaggcggtggaggatttggcaattctgggtttggccgctcaagtggtggatttggtgactcgggatttggccgctccgggggtggagggtttggtgactcaggatttggcaggtcaggtggtggcggaggattcagtgactcaggatttggccggtctggtggcagcggtggaggattcagtgattctggttcaggtcgtttcggtggcggttttggtagttctcgctcaggtagttttggtggctttggcgacaaggactcacgatagacctataactaataacagctatagaattatggacatcctgagccagattcagcttggtcatgcggtatatcacaaaggagatcgagattgttgcagaccctatccatgaacacctcggagagggcataaggctgggtgaggcgggtccttcgataggcaaaaataatcacgtgccttgtttattattgttcttttctgttcgttttttcatttgcttctgcaagttctagctctagatcatacctgtaaaatatgcagaggtcttttgcggatgatattcttatatcgtttttggtagtcgcgctgtactgtaccgtgtgatgattatggagctgctttgtaggccgtttttaacctg

SEQ ID NO: 259012 - DNA, 940 bp, Zea mays
cagaaagtagagctgtacgggtcattgaacgtgacgttggatgcaagtttacagagctgcgacaaattactgttgatgatctgacttgctgagtggtggatttgactccttcggtggcgggtatagcggttcaaactatgggcgctcaggtggattcggtggacgtggtggttttggccgatcaggcggtggcggcggatatggcaattctggatttggtcactcaagcggtggatatggacgttctggtggtggaggattcggtgactcagggtttggtggtcggtcaggtggcggtggaggattcggtgactctggattcggtggccaatcaggcggcggtggaggattcggcgactcagggtttggccgcacaagcggtggtgggtcaggttttggtcgttctggtggtttcggcgattctggttccggccggttcggtggcggtttcggcggttctggctcgggtggtttcggtggctttggcgacaagaactcacggtagactcttgcaagtaatagcaggtataaaattatggacgtcctgagccaggttcagcattggtaatgcacatcactctctgaccccctatccatgaccccctcagaaagtgcagaaatctgtgttttgcggtagcaagaacatctggagagacgatccgccggatctcagaaggcagaaggaaataatcacgtgcctttgcttattagtgttcttctctgtttgcattttgatcgttcaagctctagctctagaccatacctgtaaaatattccgtggctcctctatctactgtatgattattgtggcgctgtcttttcttgtaggctgttttaacctgaatgacggcctctatataagcatgtcataaatcgactttattcgtcaaaaaaaaaaaaaaaaaaaaaaaaagggcggccgctcgcgatctagaaacga

SEQ ID NO: 259013 - DNA, 1709 bp, Zea mays
gcggccgcccttttttttttttttttgtgaatttgaattcgatctgggaagaacaatccataggaccagtacaggctataggcaaggaatctgagatatgcgaggatctgaccaaaaaatcctagatgtcgtgtgctgcgcagcccgcaacaatccaacagggtggggaatgcaaggcgcatagattcttttgtactcgtcgcgatacgatagggaggggcgcaacctatttattaatcagctatatatatatatacacacacacaagagcctgtacacagaaatgctaatccgccaggaattgcttttcgactgcttgcttatgcgcttattgatggtcgtcgaattattgtctccaacgcgttggagaagatccaagaaagaatactatcctacacactcctgcctaactggaggggataggagctgtgttgcttcgctcctctgtcaagacagcaacagcagtttcctccctcgacggaacttttagccagaccttcattgagtcgtaaacagtaaatcctatggctactgatggcaccacctttaaatagttgatagataatcctgagaaaagttgtcgccagccttgctgtttcgctatcataaccaggctttcaaatgttcctctacccacaaggctggatgacgaaagggcttgaacctgcatttgtcgcctaacaacatctagggggtatgttattgtctgacctagcaaacctgcaactgatccgcaaccgagctttgctatgataccttttctgtgctcttcaggaacgtggctcttcatcttctcgtagaagtagaactcgagccgaattcaagggaagattccatatagtgaaggagccatgccacggtatatgcctttcaatccattttgtctgtatattgttttcacacaatccatgattcctttgtaaacctgttcagagggcttagattctctgaaacccacactgactgcacctttcacctgataagccaactttgtgcggactagatcaagagggtatgtgcatatgacagctgtccctccagctatagagccagccgcgagatcaagaacaggcccttgctcaacattaggaaagccaagaatgatccaccggcggtattcttcataggccatataatgcaaagctgcatacgggacaattcgagcaacactagctccatttcccctgtaaaaccctaaaagaccttctgtccgatagattgttcggaaggatccaatcaatccagaaccatggaactccgctcttcttgtctggaacaggatcttgacgcgctcgagcggcgcgacagcggtcttggcgactcccccggcgacccctccggcgaggagctcccgcacggcgagcggcagcccagggccgctggtctctgcagcctccctggcccgcgcgtccatgccgcgcgccccccgccggcttcctcccctccctttccctcctctcgcgcgcgcggcgggaggagagcgagaggcgtaggcgacacgaattgaggtggaagagaagggagaccgcgcggcggaattgaaggcggaagggaatcagcccactcagacagcgcggggcccacgtgtaatgaaaccggtatgggcccacgtgtacacgccgtgtggccgccgaaagccaaaagaaacccccggtccaccgttgttgaatcccccgttggctcggacgcgtgggcggacgcgtgggcga

SEQ ID NO: 259014 - DNA, 1470 bp, Zea mays
tcatggatgtattagaggttgctaccttttttagctagatggcggccgccctttttttttttttttttcggcacaattttgtacttataaaagatagagcattcggcacaattttgtacttataaaagatagagcctgctagtttggctttaatccgtaacggcttctactatttatactatgttgtctctatgaattgtaactgcagcaatgcgaacatcgttaataaatgatattggtacaccatgcataaacagaactattaacagtagaatcagttaatttggatggaccatacagctgctgacacctcccttgttctcgggtcagcgtcttccaatgaaacaccacggcagtcttctcgaacaggaagtggcagaacgccaacagagctccaagcatgtgctacagcattacttgcatcccccaaaacaactgagaacactgcatcgaagccaccagctcccggaactccagccagtaaaacaccctccatattcatagtggcatctagtagccgtgtttgtgaatctggctcaattggaacaccagctgctatgcccatctctcgcatgtgaagccttatctcaaggcaagcatcccttgcagccaacaatgatttaataattaattcttgatgttggttagtagccacctctgcccacttcccatatgtgagacgactacaggacctcaccatggactcatatgcttcatggtgattttcagaaagtccttttaagatcctcagttggttctccagcgttgaattggcaatggccagtttactccatgtatctctggatttctcagggtcagacttcagccaccgtttcacagatccaaccattgatggagtagatgatcctccggtcccaggttccccaaggagaagggtcatcagaggaggtaatgaaaactgtttattctcatgatcccacctttgtgttagaacatctgatactacatctggcaagacagtcccacctatagcctgagccgaggagagtatttctggagaaaaccttacatagcgttgactcccatagacagcagcactaacatcaaaaccactgccaattttcccttgtgctaaacaatgtgcactttgggcaatagcgttcgagccgaattcaagttctcgtctagttgtattatcaccagaagattgtcctggacatgagaggctaacgacaccaagatagtgaagaagagctgcaacaactgatgtggtcatggcagctgatgacccaagtccagttttggctacttcaggtttacatttctctccagtcattgttccattagcaacctctgagttaaatgtgattgaagagaatggaggcaatgaaagcagtgcctctggagtaagagggagaccgcgtgcttcaatctgctttctataagaatagaaatcattgcatccaagaattgtaatgttcagaccggacgcgtgggcggaagagaagg

SEQ ID NO: 259015 - DNA, 436 bp, Zea mays
cagcataaggaatggcctaatgtctatagcctataagcatcatagcattgcagtgtctagtaaaggaactgtaaatcctataccagtagtagcagaccagtagttatggtggctggtgactaccagtaaaatgatttgattgccattttggaaacaacaatatggacattgaggcttggcgacttacaagggtcatcagaggaggtaatgaaaactgtttattctcatgatcccacctttgtgttagaacatctgatactacatctggcaagacagtcccacctatagcctgagccgaggagagtatttctggagaaaaccttacatagcgttgactcccatagacagcagcactaacatcaaaaccactgcccattttcccttgtgctaagcaatgtgcactaagggcaatagtgtgaaccaaatcaagttctcg

SEQ ID NO: 259016 - DNA, 450 bp, Zea mays
aaacattaacacatgccgaattatcatacaaaccgcaaaagttacaaatacaaggtttacagtatgagtttgttggataccttgacattttctcacgtacattccatagctacaactacaagcactaattccatggaaatccattgaattccttattttctacactcatgaacagtcattgtaaacaacgtgctaacttgctgcaagtgcagcacttattttaaccacgtacctcctagcattcggcacaattcataaatagaatattaacagtagaatcaattaatctgaatggacgatacagctgccgatacctcccttgttcttgggtcagcatcttccaatgagacaccacggcagtcttctcgaacgagaagtggcagaacgccagcagagctccaagcatttgctacagcattacttgcatcccccaaagtcactgagaatact

SEQ ID NO: 259017 - DNA, 843 bp, Zea mays
gcggccgcccctttttttttttttttttttgagcaacaaaaccatttacgtaaagaatggcgatgtcaaacattcacaaacatcggctaaacctacaccagagcccagaggcaattgcagcccttttacctacaagtttacacaaatctacgtaataaccaggaagaaaaccctttgcccaatgaagaacaccccaaagaatacaaaaccacagagcaatgctgcccaccaaccctacggactacagctactaaactacatcctaaacaagcccacgtaattccattctggaaccagtagtgtagatcatgaagatcaacacgtgagtacgtgacctgagcattggcctcaacgagaaacaccccattatatcaatactagaatcagatggctggtggagacgaagattcaaatgaagctcgcagtggtctgttaacaaatgggtgctccagaagttgtgacgcagaaggccggctctcaggatcaactcttacgcactggccaataaaatcttgtgcctccttagacaggtagttgggaatagtaggctgttcccctcttccaatcatgaagaaagcatttgtccactcgacattaggaaatggtatttgccgggttagcatttccaacacggtgcagccaaggctccatatatcagctgaaggcccatacatctttttaggattaataacctcaggtgccatccagtaaacacttcctttgcatgaccttagcatattaatttttgacatctgaaatttgaacaagaaaactacaaccataagacaatgacactgagaacatggaaataatgagcagaaagacgaagctcgagccgaattc

SEQ ID NO: 259018 - DNA, 621 bp, Zea mays
gcggccgcccttttttttttttttttttttatacaactcactgttatttcaaccaaacaattttcaagatgaaggtgtccatagggtaagatctacaaagcgatagatttctattattaaaagtactccgtccattatgtgtttatgttgattatagatgatttttacgatcgatttttatagaagctaactgaaaaactgagcgtttaatagtccgcagcagcttttggtgttttggtggtaagaagctgaaaatccgaaggcacctagccgaagccgacgtaggccaaccaccatcgccccgcgccaattgagcaaatgcgccgcacgcagcaaagccgcgtgagaagagcacgcagtgcccagggcgtccaggactgtcccgcgacatgaagggcgtcggcgtaactcacttaccactggtacttggccttgacgagcacgtcctcatacagcacggcggcgtggtcccagctgaggtcctgcgccatgccgcgcgcctccaggccgcgccagctctccttgtagttccggaacgtgttgaggcagtgcgagagcgcgtcgatcatccgattcgcctccgcgcggtcgaacgtccaccccagccctcgagccgaattc

SEQ ID NO: 259019 - DNA, 718 bp, Zea mays
  unsure (1)..(718): unsure at all n locations
gttcttggagtggaaaactggacggcttcaatataaatactaacaggagtggcgatattaaagtagcatacaactccccatttatcagtgggaaaatgccatgcgcctcatctccatcgccgtcggtttcatatcatactaccccgcgcccggtgcccagtggcatcatcgtgcccgcccaaattcccagggcacgcagccgacgtaggcggtaggccaaccaccgtcgcccgtccgcccggcgcaaatgcgacgcacgcatcaaagccgccagggagaagagccttctaaataacgtccaggtcctgcgacaggagcggcgtcggcgtcgccaattaattcgctcaccactggtatttcgccttgacgagcacgtcctcatacagcacgncggcgtggtcccagctgaggtcctgcgccatgccgcgcgcctgcaggccgcgccagctctccttgtagttccggtacgtggtgaggcagtgcgagagcgcgtcgatcatccggttcgcctccgcgcggtcgaacgtccacccgagcccggtgtcgttgaacgggtcgaacggcgccaccgtgtcccggagcccccccacggcgtgcaccacgggcacggtcccgtacgccatcgcgtagagctggttcagcccgcacggctcgaaccgcgacggcatcagcaggatgtccgcgcccgccgtgatccggtgcgcccccgggaattccg

SEQ ID NO: 259020 - DNA, 682 bp, Zea mays
gaattcggctcgaggcagaagtggcacgtctactatgccaccactgagcacccctaaggagcttgttgttactcttgagatgtgcatgactaggctggacaagaagagagcttatgtcttcttcaagacctctatttgatggttacacatcttgtgctaaggatatgaccaagccttcagtggcatcgtcaaggagtgcgtcgtgaccagtggtgctagcagcaaggccatggcactcagggtccatgggtcgtgggtgtggcttgttcagcgcctactattcgcgggagtcggcgaggtgcctgctgaacttggtggaagtggagtacaattatgatgctgacatcgacctcgtgttcatcgacctgcccgtgctagagcaggagcggtaccggtggacactggagattgtggtgtaggccatgacgcgtgggcgtcgacgtcagcgcttgtcttcgcgtctgagccactctgagttggagaccattgccatttgtgatgtgcatgagagatgtattgtggcgtcttgttgtataattggtatggagagagtatgttttgctatgtccgtatttgcatactctacatgctctgaatgttgtataacactggacaataaatgatgatgtcccttcaataggaatctcatctctaaacaattaataggaatctaatcttcttt

SEQ ID NO: 259021 - DNA, 1187 bp, Zea mays
gcggccgcccttttttttttttttttttttttttttttttttttgacactgacacctcattctcattgcttgtagacgcaaacattacaaatcggccttgaataagtgagaacatagctcagttacatgttcaagatatataattcaaagggaaaagggaagtaactctgcagggctctagcacaatacatactacaagtatataggatgaactatatgatgaatatgtatagagcataactatactagttgcccacatatatatagcatggactagaaacatatatatagcacatcgatcagacgatatctactccagttgtactttccgttttcatctgccacctggatgcatgagctgcgagaagacgctgctcggggtcagctcgtccgactccacgctggcgaggctccgtcccatcatgctcaaagtcgtcgtcgacgacgcggtggtggtcgtggtcgtactgtccgtgggcggctcgtccgagtgaagcctggagacgataagcggcgacgacctgttcgaggacgacgccgtcgttccgtcggtgacgacgacgacgctgccgctgtcctccgcgctcccctgcagctgcagcgcgaactcgaggttccagagcacgtcggccatggacggcctgtcgacgctgcggtccgccacgcacttctccgcggtctccgcgaacttgaggaagcactgcggggagacctgcccctgcaggtgcgggtcgatgatctgcccgagcacgcccttcctctggcagtgcagcgcccagtcggccaggctcacctgctccttggggagcgaggggctcagggcgggccgcgcgcacaggacctccaacagcacgaccccgaacgagtagacgtccgacttctccgtcagctgctgccgccggaagtactccgggtcgaggtacccgaagctgcccttcacgaccgtgctcacgtgggtgttgtcgacgttgttgggacccgtcttggacagcccgaagtcggaaaccttggcgaccctcgagccgaattccaggatgttggtggtcttcacgtccctgtgtatgatggtgtgttcgcgcctgtgtgcaggtagtgcagcccccgcgccgcgccgatgcatatctccagccgcttcttccaggacagcgccgccctcttggtgttgtacaggtgctccctcacagtcc

SEQ ID NO: 259022 - DNA, 1431 bp, Zea mays
attttacgtgcccacatttccgccaccgccaccgccaccggctaccacctgccgcctgcgccctgccctccctctgtttttctagacccccggatcgctcagagattgagtcgtagtcgtacccgactagtcgccgcgtcctcctttccccgcgcagcagcagagcaccacccggtgaccgagcaatggaggcggggggcgtgggcctggcgctgcagacgcgggcggcggccttcggctccggccagcgccggggcggcctacagtcgcccatcgggaggctgagagtcgctgaaccggcgggagctgcggttgccgtgcgggttcgcgggtccaagcccgtcgtaccgctccgtgcgaagaaatcatccggaggtcatgaaaacttgcataactccgttgacgaagctctcctgttgaagagaaaatcagaagaagttctgttctacttaaacgggaggtgtatttacttagtgggaatgatgggttctggaaaaagtactgtggggaagatcatgtctgaagtcttgggttattcgttctttgatagtgacaaattagtggagcaagctgttggaatgccttcagttgctcaaatattcaaagttcacagtgaagccttctttcgggataatgagagtagcgtcttgagggatctgtcctccatgcgacgattagttgttgccaccggaggtggtgctgttatccgaccaattaactggagatatatgaagaggggcctatccgtttggttagatgtgcccttggatgctcttgctaggcgtattgctaaagtgggaactgcctctcgtcctcttctggaccaaccatccggtgatccgtacgcaatggccttttctaagctcagcatgcttgcagagcaaaggggtgatgcttatgcaaatgcggatgtaagggtttctctggaagagattgcatctaaacaaggtcatggcgatgtctctaagctgatgccgactgatatcgcaattgagtcacttcataagatcgagagtttcgtcatcgagcacgctgctgataatccagctagcgactcgcaagctgagtcacagatccaaaggatacagaccttgtaatatcttaatccttctgttttgtaccgaagcgtaccccctagagcatcgttggtttatttgttcgttgaagtgtcacgagggagagaaaaaaaaaaccctgaagtatttcttcttgtaagttgtaaaggaatggaataaaggagctaataatccgaagtgtaccgttggctgaaacatcagtttgatactttggtgaatacctatgctggttgctggacatctcatctcagcaaaacgtaaacaacgtggacttgttgaaccggcgtgggctggctggaaccgtgtaacacccactttgtaataatagagaaacaatttctccttatgtcagttt

SEQ ID NO: 259023 - DNA, 557 bp, Zea mays
cggttgcgtttgcggacgcctgggcggacgcgtgggttgagctataggcgtagccgactggtcgccgcgtcccctctcggctccacccggcgagcgaacaatggaggcggggggcgtcggcctggcgctgcaggcgcgggcggcgggcttcggctccagccggcaccggggcggcctacaggcgcccaccgggagcctgagagtcgctgacccggcgggacctgcggtcgctgtgcgggctcgcgggtccaagcccgtcgcaccgctccgactccgtgcgaagaaatcgtccggaggtcatgaaaactcgcacaactccgttgacgaagctctcctgttgaagagaaaatcagaagaagttctgttctacttgaacgggaggtgtatttacctagtaggaatgatgggttctggaaaaagtactgtggggaagattatgtctgaagtcttgggttattccgttctttgatagtgacaagttagtggagcaagctgttggaatgccatcagttgcccaaatattcaaggtccatagtgaagccttctttcgggataat

SEQ ID NO: 259024 - DNA, 456 bp, Zea mays
cccacgcgtccggatcgagagcttcgtcatcgagcacactgctgatagttcagctagcgacgcgcaagctgagtcgcagatccagaggatacagaccttgtagaaccttaatccctttgtttgccacatagagcatcgttgagttatttgtaaaggaatggaagaagggagctaataatccgaagtgtgccgttggctgaaacatcgcctgtcttcactcctggctctgcttctgttcgcttctcatcgtggtttgataccttggtggacatctatgctgacacctcatctcaccaaacatacttgcataccgtcgtcgcccgctcgaacgaagaaacaaagtgccgtttggttcatatatttgtaatgtaatgggtaactgataatgttaaatcatatttgttttagtccaaccgtaatcagataccatactagatatcagtctatatgtaatga

SEQ ID NO: 259025 - DNA, 527 bp, Zea mays
cccacgcgtccgcccacgcgtccgtataggcgtagccgactggtcgccgcgtcccctctcggctccacccggcgagcgaacaatggaggcggggggcgtcggcctggcgctgcaggcccggccggcgggcttcggctccagccggcaccggggcggcctacaggcgcccaccgggagcctgagagtcgctgacccggcgggacctgcggtcgctgtgcgggctcgcgggtccaagcccgtcgcaccgctccgactccgtgcgaagaaatcgtccggaggtcatgaaaactcgcacaactccgttgacgaagctctcctgttgaagagaaaatcagaagaagttctgttctacttgaacgggaggtgtatttacctagtaggtccgtcctcatcctcctatgtgacgattgctatagagaattccgacttttagatgaaactaccatatttgaatatgtgattgatgagtgagagtgagcgtgtgcaagaatgatgggttctggaaaaagtactgtggggaagattat

SEQ ID NO: 259026 - DNA, 400 bp, Zea mays
tacgcaatggccttttttaagctcagcatgcttgcacagcaaaggggtgatgcttatgcaaatgcagatgtaagggtttctctggaagagattgcatgtaaacaaggtcatgatgatgtctctaagctgacacctactgatattgcaattgagtcacttcataagatcgagagcttcgtcatcgagcacactgctgatagttcagctagcgacgcgcaagctgagtcgcagatccagaggatacagaccttgtagaaccttaatccctttgtttgccacatagagcgtcgttgagttatttgtaaaggaatggaagaagggagctaataatccgaagtgtgccgttggctgaaccatcgcctgtcttcaaaaaaaaaaaaaaaaaaaaaaaaaaaaagga

SEQ ID NO: 259027 - DNA, 1114 bp, Zea mays
gcggccgcccttttttttttttttgcggccgccctttttttttttttaaatttgcttactacacactcgaaacacatactagatggtacagtacagagtacacacatatttaaacgacacaggagctcaacggcccagccccaccgatgtgctgtaaaagtaggccacatcagcaccgacactgggcccactaacccgacacgggatcggcacacagacacattatttattcgaccacaacacaaaacgacgctcctacctttactatgcggggcccgccgcgccacgtaggacacgacgtgaacccgaagtcccgaacacaaaagcaggtttttcctagcgacctatgccggcgccatgccgtgctgttgccgtggcagtggcaccagagcggcgcacgccaggtgacaggctgacgcagcgagctagatcggccgccgtccggcgctggctggactcactcgacggacttctcgacggcagcgacggcggcctcgggagcaggggccgccgcttcctcctcggtcgctgcgacctcaggagtggcagcaaccgcaggcgatgcctccccctcctcctcgttagcctccacagccgccgcctccttggtctcggcggctatctccggctcagcagcctcgaccggggcagcagcagcctccgtctctgctgccggcgcggcggcctcgggctctgcttccttgggctctgcctcggtcggctcagcctcagctacggcctcggcctcgacctcgacctccttggactcagtctcggcctcggccgacaccggctccttagcggcgacgacctcggtctccgccgccggagcagcggtctcctcgttcggggtctcgacggcggccagctgggcagcctccactcccgctgcagcagcagcagcagcctcctcgacgggagcggcagtcgggacctggacctcgacggcggccattggtgcagtgcagctggacgtgtgtgtggaactgtggactgtggagctaacagctaacaacgaaggcactgaagctcggagctaagcagagtgcagactgcagagctcaccagtgtgacgatggctgggcgtggccggacgcgtgggcggacgcgtggg

SEQ ID NO: 259028 - DNA, 1155 bp, Zea mays
  unsure (1)..(1155): unsure at all n locations
ggcgaaaatgctaaaatcttttataatttagaatagggcgagcagctcgtaacagagttcacgcttcaagagcttaacaaaaagaaagtttcgaaagatggatgggacacaaatatacttactacacactcgaaacacatactagatgggtacaccgtacacatattaaacgacacaggagctcaacggcccagtcccaccgatgtgctgtaaaggtaggccacatcagcaccgacactgggcccactaacccgacacggaatcagcacacagacacattatttattcgaccacaacacaaaacgacgctcctacgctcctttactaggcggggcccgccgcgccacgtaggacacgacgtgaacccgaacacaaaagcaggtttttcctagcgacctatgccggcgccatgccgtgctgttgccgtggcagtggcaccagcgcggcgcacgccaggctgacaggctgacgcagcgagctagatcggccgccgtccggcgctggctggactcactcgacggcggcctcgggagcaggggccgccgcttcctcctcggtcgctgcgacctcaggagtggcagcaacagcaggcgctgcctcctcctcctcctcgttagcctccacagccgccacctctttggtctcggcggctatctccggctcagcagcctcgaccggggcagcagcagcctccgtctctgctgccggcgcggcggcctccgtctctgcttccttgacctccgtctctgctgccggcgcggcggcctccggctctgcttccttgggctctgcctcggtcggctcagcaacggcctcggcctccttggtctcagtctcagtctcggcctccaccggctccggctccttagcgacgacgacctcggtctccaccgccggagcagcggtctcctcgttcggggtctcgacggcggaggcggcggccagctgggcagcctcctcgacgggagcggcagtcgggacctggacctcgacggcggccattggtgcagtgcagctagctggacgtgtgtgtgtgtggactgtggagcaaacaacgaaggcactgaagctcggagctaagcagagtgcagagctcaccagtgtgacgatggctggctggcgtgtgttgtgacccacgcgtccgnaacacgtccg

SEQ ID NO: 259029 - DNA, 694 bp, Zea mays
tgtttagatcgcgagcggccgcccttttttgggttttttttttttttgggacacaaatatgcttactacacactcgaaacacatactagttggtacagtacagagtacacatatatttaaacgacacaggagctctacggcccagccccaccgatgtgctgtaaaggcaggccacatcagcaccgacagtgggcccactaacccgacacgggatcggcacacagacacattatttattcgaccacaacacaaaacgacgctcctacgctcctttactaggcggggcccgccgcgccacgttggacacgacgtgaacccgaacacaaaagcaggtttttcctagcgacctatgccggcgccatgccgtgctgttgccgtgggagtggcaccagcgcggcgcacgccaggtgacaggctgacgcagcgagctagatcggccgccgtccggcgctgagtgcactcgacggacttctcgacggcagcgacggcggcctcgggagcagggaccgccgcttcctcctcggtcgctgcgacctcaggagtggcagcaaccgcaggcgatgcctccccctcctcctcgttagcctccacagccgccgcctccttggtctcggcggctatctccggctcagctaacaacgaaggcactgaagctcggagctaagcagagtgcagactgcagagctcaccagtg

SEQ ID NO: 259030 - DNA, 410 bp, Zea mays
ctctgctgccggcaagacgacctcgggatctgcctcggtcggctcagcctcagctacggcctcggcctcggcctcagcctcgacctcgacctccttggactcagtctcggcctcggccggcaccggctccttagcgacgacgacctcggtctccaccgccggagcagcggtctcctcgttcgggatctcgacggcggaggcggcggccagctgggcaacctcctcgacgggagcggcagtcgggacctggacctcgacggcggccattggtgcagtgcagctggacgtactggtgtgtgtgtgtggactgcgtggaccaaacaacgaaggcactgaagctcggagctaagcagagtgcagagctcaccagtgtgaagtgtgacgatggctggctggcgcggacgcgtgcg

SEQ ID NO: 259031 - DNA, 577 bp, Zea mays
tcgcgggctatctccgggtcagcagcctcgaccggggcagcagcagcctcggtctcttctgccggcaaggcggcctccggttctgcttccttggcctccgtatctgctgccggcacgacggcctcaggctatgcttccttggcctccgtctctgctgccggtgcggcggcctcgggctctgcctcggtcggctcagcctcagctacggcctcggcctcgacctcgacctccttggactcagtctcggcctcggcctcggccgacaccggctccttagcggcgacgacctcggtctccgccgccggagcagcggtctcctcgttcggggtctcgacggcggccagctgggcagcctccactcccgctgcagcagcagcagcagcctcctcgacgggagcggcagtcgggacctggacctcgacggcggccattggtgcagtgcagctggacgtgtgtgtggaactgtggactgtggagctaacagctaacaacgaaggcactgaagctcggagctaagcacagtgccgactgcagagctcaccagtgtgacgatggctggctggcgcggacgcgtggg

SEQ ID NO: 259032 - DNA, 512 bp, Zea mays
cgctgcctcctcttcttcctcgttagcctccacagccgccacctctttggtctcggcggctatctccggctcagcagcctcgaccggggcagcagcagcctccgtctctgctgccggcaaggcggcctccggctctgcttccttggcctccgtctctgctgccggcaaggcggcctcgggctctgcctcggtcggctcagcctcagctacggcctcggcctcggcctcagccttgacctcgacctccttggactcagtctagtctcggccccccccggctccggctccttagcgacgacgacctcggtctccaccgccggagcagcggtctcctcgttcggggtctcgacggcggaggcggcggccagctgggcagcctcctcgacgggagcggcagtcgggacctggacctgcacgtacgtacgaacacatgcgtgggacttggggcacaaatacaatggtggctggtgcgtgcagatggacgaagagaatggggtctcggaagcagctct

SEQ ID NO: 259033 - DNA, 346 bp, Zea mays
ttaattttattattattttatttttttttttttttttttttttcgaaagatggatgggacacaaatatgcttactacacactcgacactacatactagttggtccagttcaccgtactcatatatttaatcgacacaggagctctgcggcccagccccaccgatgtgctgtaaaggcaggccacatcagcaccgacactgggcccactaacccgacacgggatcggcacacagacgcattatttattcgaccacaacacaagccgacgctcgtatgatccttcaccagactgggcgcgccgcgccacgtaggacaactaaaactagatcgcgatctagaactagtc

SEQ ID NO: 259034 - DNA, 1329 bp, Zea mays
tcctctcggacgcgttcccaagccagccattggttggtagcaagccaagctaatcaagttagctttagatacccgctcccgctcttcttccctccgacgaaggcagctgacgacacagcaggctagcttcggagttcggagcactcagccatggccattgccggcgctctcctcctcctgctcggactcctcgcgcgggaggccgctgccggcgggtggcagagcgcgcacgccacgttctacggcggcggggacgcgtccggcacaatgggcggcgcttgcgggtacggcaacctgtacagcacggggtacggcacgagcacggcggcgctgagcacggcgctgttcaacgacggcgcggcgtgcgggtcctgctacgagctgcggtgcgacaacgacgggcggtggtgcctgccgggcaccatcaccgtcacggccaccaacttctgcccgcccaactacggcctccccagcgacgacggcggctggtgcaacccgccgcgcccgcacttcgacatggcccagccggccttcctccgcatcgcgcagtaccgcgccggcatcgtgcccgtcgcctacaggagggtgccgtgcgtgaagaagggcgggatcaggttcaccatcaacggccactcctacttcaacctggtgctggtgaccaacgtggccggcgccggggacgtgcagtccgtgtccatcaagggctccagcaccgggtggcagcccatgtcccgcaactggggccagaactggcagagcaactcgctcctcgacggccagagcctgtccttccaggtcaccgccagcgacggccgcaccgtcaccagcaacggcgtcgctccggcgggctggcagttcggccagaccttcgagggcgcccagttctagctactactactccatcgacgagtgtgactgtgagcaagagagaaggagaaaccttcttcgctgtagtaaagaagaggctcccgccattccgaggctgcttattattagcacccgcttaggcatttccttctcttattattaccataggattgagctgtttattttctgcaccagtgattgtagcaatgggttaagcaaaacaaaaacctgcaaggctatttattgtagggctgcaggggagtggtgtcgtgcaacttattgtgttgttacgctgtactagtagcaacccccgaatctggccacatggtggtgggagatgtttgtggggattgcaccttttgggaccgtgaacatcaatgcttgtttatggtctattacatgcagtatatatgatatatatatatgctcgtggtttgaaaaaaaaaaaaaaagggcggccgc

SEQ ID NO: 259035 - DNA, 1134 bp, Zea mays
  unsure (1)..(1134): unsure at all n locations
aggagcgagttgctctgccagttctggccccagttgcgggacatgggctgccacccggtgctggagcccttgatggacacggactgcacgtccccggcgccggccacgttggtcaccagcaccaggttgaagtaggagtggccgttgatggtgaacctgatcccgcccttcttcacgcacggcaccctcctgtaggcgacgggcacgatgccggcgcggtactgcgcgatctggaggaaggccggctgggccatgtcgaagtgcgggcgcggcgggttgcaccagccgccgtcgtcgctggggaggccgtagttgggcgggcagaagttggtggccgtgacggtgatggtgcccggcaggcacgactgcccgttgttgtcgcagcgcagctcgtagcacggacgcgtgggcggacgcgtgggcggacgcgtgggcggacgcgtccgctcgagtcgattcctaagcagctagccagtgactcgatcttagcgtgctacaatggcggcagctgctagtgccctgctcctcctgctctgctcagccttctgctcccttgcccaccgggcggccggcgtcgactacggctcgtggcagagcgcccacgccacgttctacggcggcggcgacgcgtctggcacgatgggcggcgcgtgcggctacgggaacatgtacagcacggggtacggcaccaacacggcggcgctgagcacggcgctgttcaacgacggcgccgcgtgcgggtcctgctacgagctgcgctgcgacaacaacgggcagtcgtgcctgccgggcaccatcaccgtcacggccaccaacttctgcccgcccaactacggcctccccagcgacgacggcggctggtgcaacccgccgcgcccgcacttcgacatggccgagccggccttcctccgcatcgcgcagtaccgcgccggcatcgtgcccgtcgcgttcaggaggtacttcagttgctcttcacatgctgtgctgtgctgcctgcgacttcggcggtggtcacgcacactgcactgcacgcgtgacacatgcacgccggcccccagctgctacgacggctcgcaccaccaccacctacgtnctggctcgatccatacgcgtcggacgtcggttcgaaggttg

SEQ ID NO: 259036 - DNA, 676 bp, Zea mays
gtcgcagcccgtgttccagcgcatcgcgctctacagggctggcattgtccccgtctcctacggcagggtggcgtgcaacaagaagggcggcatccggttcaccatcaacggccactcctacttcaacctggtgctggtgaccaacgtgggcggcgccggcgacgtgcacgcggtggccgtgaagggcgaccgttccgcggggtggcaggccctgtcgcgcaactggggccagaactggcagagcaacacgctcctggacgggcaggccctctccttccgcgtcaccaccagcgacggccgctccgtggtctccagcaacgctgccccgcgcggctggggcttcggccagaccttcagcggggcccagttcaactgaacaccctccatcgttcccgcagcgtcgtctcgtccgtcgtcgacgcggtgccacaagtagtagttttccgttggtcgtggtagagtcgtccaccctcactcggagcttgccgagaggcgccatggttttatgaatggtgcatctcgctttggatctggggaattaccagtagtttaggcctagtattagcgcgggttttgtcgtgctggtgttagcctggttggtgtggtagcgttttgcttggttgttttgcaaaaaaaaaaaaaaaaaaaaaaaaaagggcggccgctcgcgatctag

SEQ ID NO: 259037 - DNA, 493 bp, Zea mays
gcggggcccagttcaactgaacaccctccatggttcccgcagcgtcggcgcgtccgtcgtcggcgcggtgccacaagtagtagttttccgttggtcgtggtagagtcgtccaccctcactcggagcttgccgagaggcgccatggttttatgaatggtgcatctcgctttggatctggggaattaccagtagtttgggcctagtattagcgcgggttttgtcgtgctggtgttagcctggttggtgtggtagcgttttgcttggttgttttggaattggaagtggtggtaaggctggcttgcagattaacggaggtaggccgccttttatcacccgccaattaagcatttgtggggtctcatggtgatggcctctttcagatgagatgttttgcgtgttacccaagtgtgttggttgtaatgaaccctattaagtttgtgctggaacttcagtatgcatagaaaaaaaaaaagggcggccgctcgcgatctag

SEQ ID NO: 259038 - DNA, 403 bp, Zea mays
gctagctattggataattagttccggaaccgccgatttgtttgatttttttttttttttttgcgcgtgatgatcgagtgcatccaaaagaaagagccgccgaggagaccgccgaagccgaagacgaagcctctccccgggtatattgaaggaaggagaaggctttgcgcgcgctatgctgaggctgctaatctagcccccccctagacgtttccctttttttttctcctctggtggattacggactggatcggacgaccaaagatcgatccagcccctgggcctaataatatagttggccttgagaaaaatgaaataattgtttttttttgtttgaaaacatttcgatttaaaaaaaaaaaaaaaaaaaaaaaaaaaaaaaggaagggcggtcgataggaagg

SEQ ID NO: 259039 - DNA, 1541 bp, Zea mays
tcgcggacgcctgggctctctcgagtcgattcctaagcagcttgccaatgaattgaggttaagcttccaacatggggggaagttgttattgccctgttcctcctgctttgttaagccttctgttcctttgccaaccggccggccggcgtcaactacggttcgtggcaaagcgcccacgccacgttctacggcggcggcgacgcgtctggcacgatgggcggcgcgtgcggctacgggaacatgtacagcacggggtacggcaccaacacggcggcgctgatcacggcgctcttcaacgacggcgccgcgtgcgggtcctgctacgagctgcgctgcgacaacgacgggcagtcgtgcctgccgggcttcgtcgtggtgacggccaccaacttctgcccgcccaacaacgcgctcccgtccgacgacggcggctggtgcaacccgccgcgcgcccacttcgacatgtcgcagcccgtgttccagcgcatcgcgctctacagggctggcattgtccccgtctcctaccgcaggtccgtgctccgtggttgtttattttgcccgtgtatagcaaaacaagaagggaaaggaactcgagcagatctgagagccgcgcttgtttgtttgtttgtttgtttgtttgtttgtttcctatcctacgtgctgtgcagggtcgcgtgcaacaagaagggcggcatccggttcaccatcaacggccactcctacttcaacctggtgctggtgaccaacgtggccggcgccggcgacgtgcgcgccgtctccatccggggctcccgcacggggtggcagcccatgtcccggaactggggccagaactggcagagcaactcgtacctggacaggcaggcgctctcgttccaggtcaccgccagcgacggccgcaccgtcaccagcaacggcgccgtccccgctggctggcagttcagccagaccttcgagggcggccagttctgaggatgaacagctagcgcgcgcgcggctagctattggataattaattacggtactgtcgatttggtttttttgccttgttttttttttgcgcgacgacgacgaagaggaggatgaagacgaagatgaagacgaggcctctctccgggtatattgaaggaaggagaaggcttttgcgcgcgctatgctgaggctgctaatctagcacccgcctagacgtttcccttttctctggtggattacggactggatcggaccaaagatcgatccagctcctagtactaataatatagttgtacttgagaaaaatgaataattgtaatttattgtttttttggggacctttgatattattgtactcgcgcgcgccggccttgcgtggaaattgaagttcgcaataaggccggccgccggcttttattcagcgtgccctctcgtcccttcagtagcttctggtgtgtagcagcgcggtggtgacttttggtgtttgctagggtgtaagtaacgccaccacgtacgtatcttcgcacatgggtggggcaagcatgtcctgtaaactgacttgaattacc

SEQ ID NO: 259040 - DNA, 301 bp, Zea mays
gcgcgtgatgatcgagtgcatgccaaagaaaaagacccccaggagaaccccgaaaacgaaaacgaagcccccctccgggtatatttaaggaaggagaaggctttgcgcgcgctatgcttaggctgctaatctagcccccgcctaaacgtttcccctttctctttggtggattacgggctggatcgcaaagatcgatccagctcctaggactaataaaatagttggacctgagaaaaatgaaataattggaatttaatgtttttttggggaaaaaaaaaaaaaaaaaaaaaaaaaaaaaaaa

SEQ ID NO: 259041 - DNA, 715 bp, Zea mays
gtgcaacaagaagggcggcatacgtttcaccatcaacggccactcctacttcaaccttgtgctggtgaccaacgtgggaggcgccggcgacgtgcacgctgttgccgtgaaggccgagcgctcccccgggtggcaggccctgtcgcgcaactggggccagaactggcagagcaacacgctccttgacgggcaggccctgtccttccgcgtcaccaccagcgacggccgctccgtgctctccaacaacgccgccccccgcggctggtctttcggccagactttcagcggtgcccagttcaactgaacacacccccaccgttcatgcagcgtcgacgcagtggcactagtactagttgttccgtccaccccgattggagcctgccgagaggcgccatggttttatgaatggtctgcacctcgcatttgctcctgggaattaccagtagtttaggcctagtaatagcgcgggttttatcgggcttgcgttagcatggtgttttagtgttccttggttgtatccggcttggaaattggaggtggtggtaaggctggtccgcagataaacggaggcaggctgccttgtatctcccgccaattatgcgtttagggcctcatggtgatggctccttcaagatcaaatgttttttgagttattcaagtgtgttagttgtaatgaatcttatccagttaccctttcctaatatattatccttcg

SEQ ID NO: 259042 - DNA, 1017 bp, Zea mays
gaattcggctcgaggtcaaagacaaggacaacgtgaccttggaggatgtgctgcagcctggaacaaacatgcttgctgctggctactgcatgtacgggagttcatgcacgcttgtgctgagcactgggaacggagtcaatggcttcactctcgatccttcccttggagagttcattttgactcatccaaatatcaaggttaatgataaaaaaaactccacacttcttttctttcctggctgatcgatacccctggttagcactataaaacaaaatggtactacttgagtttgggtatcacgttttgtgcgtgcttcgttcttttcttgtgcagataccaaggaaagggaagatctattcagtcaacgaagggaacgccaaaaactgggatgggcctacagccaagtacgacgagctagggggctcgtttctgtccaaaaactactactgtgatttcgtaacaagccaggctgaattttatgccgtttcagattcgtggagaaatgcaagtatcctgaggatggttcaccgcctagatccttgagatatatcggaaggtgatccattgctcgttctcgactgtgtataccggtgtctcacagtttgctttcttctgcggtcatgaattgaatgtgtctgaagttttattaagaataatagtgcttgctcaagctattggtatctactcgtttttttcttctttttttttgtttaactaaaacggttgaatctatgttgttgtgagacttgtggtccttgtgaatggtttgcagtatggttgctgatgtccatcgcaccttactatacgggggcatatttttgtacccagcagaccagaagagtccaaacgggaaactacgcgttctgtatgaagtcttcccgatgtcattcctgatggaacaagctggaggccaggctttcacaggcaaacaacgggcgcttgaacttgctcccgctaaacttcacgacagatccccagtgttcctcgggagctacgatgacgttgaggagatcaaag

SEQ ID NO: 259043 - DNA, 896 bp, Zea mays
  unsure (1)..(896): unsure at all n locations
gcctttctcgccaagctcatcggcctcgccggagagaccaacgtccagggcgaggagcaaaagaagctggatgtactgtccaacgaggtcttcgtgaaggcgctcgtcagcagcggccgcacctgtgtcctcgtgtctgaagagaacgaggaggccatcttcgtcgacccggccctccgcgggaagtactgcgtctgtttcgacccgctggatggctcctccaacatcgactgtggtgtctcaatcggaacgatctttgggatttacatggtcaaagacaaggacaacgtgaccttggaggatgtgctgcagcctggaacaaacatgcttgctgctggctactgcatgtacgggagttcatgcacgcttgtgctgagcactgngaacggagtcaatggcttcactctcgatccttccctttgagagttcattgtgactcatccaaatatcaagataccaagggaagggaagatctattcagtcaacgaagggaacgccaaaaactgggaatgggcctacagccaagtacgaccagctagggggcccctttctgtaccagagcctccgaccgtgatttcgtcacaagccacgctgaattttatgccgtttcagattcgtggagaagtgcaagtatcctgaggatggttcaccgcctagatccttgagatatatcggaagtatggttgctgatgtccatcgcaccttactatacgggggcatatttttgtacccagcagaccagaagagtccaaacgggaaactacgcgttctgtatgaagtcttcccgatgtcattcctgatggaacaagctggaggccaggctttcacaggcaaacaacgggcgcgtgtcagtttcccgttctcagaccccaatccccaactgaaaaatcttgatg

SEQ ID NO: 259044 - DNA, 1923 bp, Zea mays
taaaaacggcccccccgatttaataatatagttataatgattaaattattattttttattttttttttttttatttttttttttttttttttttttttttttttttttttccgaagataccaatttattgccttgcaacaattaacgaagctagagatgtcgagccttgagactcaattgtctgcacggttccttaagctaaatctgacatactaagaggatttgcagagtgaacttttgtatgacacgtgaagccagtggtcctcttgtctgcaattctctagctccttttcttggacagcatatgcttgaaccagaaagctgaatccttggggtacctcttcagagtcttgtagtccacgtacaccaagccaaaccgcgaagtgtacccaagcctccactcgaagttgtcaagcagcgaccacgcaaagtacccaatgactctggcaccatcatctattgccttcttgagctcagttatgtagtctctgtaataacggattcttactgtgtcatgcacaccctgagtaatactgacatcaccaggttggtccattccgttttcagcaaggatcattgtaggatttttgtaagtttccttgacatagctgacagccttgttgatgccccacggcacaatgtacagccagtaggagtttgcgtgagcgccaataggaactccatttcgttcgtagacaaaaccaacatgccaatcatcctggtagctgactggtgtcaggttccatgtcccagggtccttcatgtagaaagaagtgtagtggttgatgccaacatagtctatagagcctttcaccatcctggcttcttcatcgctgaacaacggtagcctgtctttggcaatctcttgcatcgagtacgggtaccgtccatgtacaatggggtcaaggaaccagcctaggtggaagtccctggctcgctgtgctgcagcctggtccgcattgctgtcgctgaaaggttcgtaccacacgaaatccaggagaattccaatcttccccttctggtgaagctgatacttgtcgcggtatcgcctgacagcagctgcatgagaaaggatgagatggtgtgcgacaaggtacggctccgtggtggagttgcctccggcggggcacccggaacaccttcccggtgcgtgcaagccattgtcgtagcccagagcagcgacgcacctcggctcgttgaaggtaaaccagttcttcaccctgtctccgaacgcgtggaagcagaactcggcgtagtctgcaaacgcctccacaatctttgggctaagccagcccaggtactgttcatggagtgccaatgggaggtcataatggtagagatttgcatacggcgcgataccttgctggagcatgtaatctatgagcctgttgtagtaatccactccttcctggttcaccttgccagttccatctgggaaaatcctcgaccaagagatcgaaaaccggtacgcatcaaagcccatgttcttcattatgttcacatcttccttgtaccgatgatactcgtcgaccgtcacgtcagcggtggcattgttagggatggtcccgggaacctctatgaaggcgtcccagatgctggggccccgcccgccgtgcttggccatcccctcgacctggtacgccgacgcggccgtcccgaagacgaagccatccgggaacgcgcggcggctcagcccgccggcgtcgtagatctccgggttgagccagtagcatcgcgccgtcggcagcggcagcagaccgtggtgagctgctgccgctagcagaagagcaagcaccgcgagctttacggagctctgcatggccccggactccctgtggaagcggcaaaggccggagacacaggcggacaggccgcgctttccgaaggtctagtaaaagagggtcgagcgagacggtggctctg

SEQ ID NO: 259045 - DNA, 748 bp, Zea mays
cccacgcgtccgcccacgcgtccgcccacgcgatcactcatccacagctcgcagccgtattcctgtctcgaatcctctctcgccgctccgatggcccgcacgaagcaaacagcaaggaagtcgaccggcggcaaggccccccggaagcagctggccactaaggctgcgcgcaagtcggccccggccaccggcggcgtgaagaagccccaccgcttccgccccggcaccgtcgcgctccgcgagatccgcaagtaccagaagagcactgagctgctcatccgcaagctccccttccagcgcctcgtccgcgagatcgcgcaggacttcaagactgatctgaggttccagtcctccgccgtcgcggcgctgcaggaggccgccgaggcgtacctggtgggtctcttcgaggacaccaacctttgcgccatccacgccaagcgcgtcactatcatgcccaaggacatccagctcgcgcggcgcatcaggggcgagagggcttgagcgcccgtcgtgctgctcgtcgttgtagtgttactagaagtagatggtggctttcgtttcgtggcttccttatcctgtaggagtaatgttctagatgtcttggcttcagtgcaatggactgtgtttgctcatttctgaaatttatcaatggacttgttcttgcatagatttgccgtctaaaaaaaaacaataacaaaaaaaaaaaataaaaaaaaaaaaagggcggccgctcgcgatctagaactag

SEQ ID NO: 259046 - DNA, 731 bp, Zea mays
cggcgccccatctctcaaaccatccgaccccacctcgccgctcactcccaagccagtccctgccggcagcgatggcccgcacgaagcagacggcgcgcaagtcgacgggcggcaaggcgccgcggaagcagctggcgacgaaggcggcgcgcaagtcggcgccggccacggggggcgtgaagaagccgcaccgcttccgcccgggcaccgtggcgctgcgggagatccgcaagtaccagaagagcacggagctgctgatccggaagctgccgttccagcggctggtccgtgagatcgcgcaggacttcaagaccgacctccgcttccagtcctccgccgtggccgcgctgcaggaggccgccgaggcctacctcgtgggcctcttcgaggacaccaacctctgcgccatccacgccaagcgcgtcaccatcatgcccaaggacatccagctcgcgcgccgcatccggggcgagagggcctgagcacccccggtctctactgcgattccttcgcttcctgatttctgtagcgggaagaactactgtagtaggcgaggaactactgcgtgttatattggggttgtgggtaggaaactaggaatgttctgttggtttcgatgcagtgccccccgtgatactgacatccgtgctgcttgttctgttcttcctactacgaatgccattgttactattattttaaaaaaaaaaaaaaaaaaaaaaaaaagggggggc

SEQ ID NO: 259047 - DNA, 710 bp, Zea mays
cccacgcgtccgcccacgcgtccgcccacgtgtccgcaactctttcccaaatccaccgccggctcggctcgcccatcttcgcgccaagcaccgaatctccgatggcccgcacgaagcagacggcgcgcaagtcgacgggcggcaaggcgccccgcaagcagctggccaccaaggcggcgcgcaagtcggcgccggcaaccggtggcgtgaagaagcctcaccgcttccgccccggcaccgtcgcgctccgggagattcgcaagtaccagaagagcacggagctgctcatccgcaagctgcccttccagcgcctcgtccgtgagatcgcgcaggatttcaagaccgacctccgcttccagtcctccgctgtcgccgcgctgcaggaggccgccgaggcctacctcgtggggctcttcgaggacaccaacctctgcgccatccacgccaagcgcgtcaccatcatgcccaaggacatccagctcgcgcgccgcatcaggggcgagagggcttgatctcccgttgtcgtcgtccacgttgttgggcctttcctctgtgtctctgcttgtagaatccttgcttctgttcggttccttctgttcgcatgatggtgttcgtagtgttaggagttgcattttctaatctgcttgttcttgcaccggtgcctctgaagtggcgtttccctctatcttaatggaaatggaatgtgcttt

SEQ ID NO: 259048 - DNA, 832 bp, Zea mays
cccacgcgtccgcccacgcgtccgcccacgcgtccgatcccccagaaaatcaactcctccccagatccacgctgccaccaactcgccgtcctccgcgccaagcaccaaagctccgatggcccgcactaaacagacggcgcgcaagtcgacgggcggcaaggcgccccgcaagcagctggcgaccaaggcggcgcgcaagtctgcgccggccaccggcggcgtgaagaagccccaccgcttccggctcggcaccgtcgcgctccgcgagatccgcaagtaccagaagagcacggagctgctcatccgcaagttgcccttccagcgcctcgtccgtgagatcgcgcaggacttcaagaccgatctccgcttccagtcctccgccgtcgccgcgctgcaggaggccgccgaggcctacctcgtggggctctttgaggacactaacctctgcgccatccacgccaagcgcgtcaccatcatgcccaaggacatccagctcgcgcgccgcatcaggggcgagagggcctgagcgaggcgagctcctctcaccgcaggcggcgtcgttgttgcttcgggcctgcttgtaggacttgtgcttctcttggtttcctttctggtggcagtggcatcttggtaccattgtgcttgttcttagaatcttagggatagagagttgttcagttgctgggtaacctgattgtttatcttgcattcctgcctctgtaatggttgtctgctgtcttaatggaaatgatatttgctttttaattctcagtttaaaaaaaaaaaaaaaaaaaaaaaaaaaaaaaaaaaaaaaaaaaaaaagggcggccgc

SEQ ID NO: 259049 - DNA, 450 bp, Zea mays
tgtctttgggcatgatggtgacgcgcttggcgtggatggcgcagaggttggtgtcctcgaacagaccgacgaggtaggcctcggcggcttcctggagggccaggacggcgtggctctggaaccgcagatccgtcttgaagtcctgagcgatctcacggaccaggcgctggaagggcaacttccggatgagcagctccgtgctcttctggtacttgcggatctcgcgcagcgccacggtgccgggcctgtacctgtggggcttcttcacgccgccggtcgtcggcgccgacttcctcgccgccttggtggcgagctgcttgcgcggggccttgcctccggtggacttgcgggcggtctgcttcgtacgagccatcttctcctctccttggctgctcgatttcttccttgcctggacggaacgaatttgagggcgacgatcccacgcgtccg

SEQ ID NO: 259050 - DNA, 648 bp, Zea mays
cccacgcgtccgcccatttcaaatccttcgatcgcacagcgccgcccgccctcacgcagctctctccgatggcgcgcacgaagcagacggcgaggaagtcgaccggcggcaaggcgccgcggaagcagctggccaccaaggcggcgcgaaagtcggccccggccaccggcggcgtgaagaagccgcacaggtttcgccccggcaccgtcgcgctccgcgagatccgcaagtaccagaagagcacggagctgctcatccggaagctgcccttccagcggctggtgcgggagatcgcgcaggacttcaagaccgacctccggttccagtcctccgccgtcgccgcgctgcaggaggccgccgaggcgtacctggtgggtctcttcgaggacaccaacctctgcgccatccatgccaagagggtcaccatcatgcctaaggacatccagctcgcgcgccgcatcaggggcgagagggcctgattgctgctctgtcttcctgtttctgtagtgtctgaactaggggatggaatctatcgcttcttgtcctgcaatcgtgtactgacgttctaggcaaatcagtttggctgttatgaatgtgattcagtgctttgattcaaaaaaaaaaaaaaaagggcggcgcacacgggaa

SEQ ID NO: 259051 - DNA, 1619 bp, Zea mays
cggacgcgtggcgtgacgcgtgggcggacgcgcggcgtcgccctcaaattcgttccgtccaggcaaggaagaaatcgagcagccaaggagaggagaagatggctcgtacgaagcagaccgcccgcaagtccaccggaggcaaggccccgcgcaagcagctcgccaccaaggcggcgaggaagtctgcgccgacgaccggcggcgtgaagaagccccacaggtacaggcccgggacggtggctctgcgcgagatccgcaagtaccagaagagcacggagctgctgatccggaagttgcccttccagcgcctggtccgtgagatcgctcaggacttcaagacggatctgcggttccagagccacgccgtcctggccctccaggaagccgccgaggcctacctcgtcggcctgttcgaggacaccaacctctgcgccatccacgccaagcgcgtcaccatcatgcccaaagacatccagctcgcccgccgcatccgcggcgagcgcgcgtaggcgtatctcgcgcccggccccagtggcggcggagggatggaggagggcaatttgtaaccttatgctgtttgttcgcttttagacggcgtggtgaagaactagtgtaaaaacggctttaaagtctattttgtgcggtagttcgtgtaggccgcttcgtcccgaagcgatcttggtaaaagacttattcgtgttgccaaacgacacaattcgtattttttttgtgtgccgtgtagaacacggtccgttgttattcgaatggttcaccgaaatgtgcgtgcccatttgcgtaaaccattccaataacaacaaaccgtgttctacacggcacacaaaaaaatacgaattgtgtcgtttggcaacacgaatgatcagtcttttaccaagatcgcttcgggacgaagcggcctacacgaactaccgcacaaaatagacttgtaaagccgtttttacactacttcttcgccgcgccgtctaaaagcgaacaaacagcataaagttacaaattgcactcctccatccctccgccgccactggggccgggcgcgagatacgcctacgcgcgctcgccgcggatgcggcgggcgagctggatgtctttgggcatgatggtgacgcgctttgcgtggatggcgcagaggttggtgtcctcgaacaggccgacgaggtaggcctcggcggcttcctggagggccaggacggcgtggctctggaaccgcagatccgtcttgaagtcctgagcgatctcacggaccaggcgctggaagggcaacttccggatcagcagctccgtgctcttctggtacttgcggatctcgcgcagcgccaccgtcccgggcctgtacctgtggggcttcttcacgccgccggtcgtcggcgccgacttcctcgccgcctgcaacaaaacaacaaccgccgccgcgtcagcgccgtcttacaacgggaaccatcgaggggatcggaacagcagatcggtacgggtaggtagagacgaaccttggtggcgagctgcttgcgcggggccttgcctccggtggacttgcgggcggtctgcttcgtacgagccatcttctcctctccttggctgctcgatttcttccttgcctggacgga

SEQ ID NO: 259052 - DNA, 726 bp, Zea mays
ttgacgcgtgggcccgatctagacctagcaatctccccagcaatccctagcagaagccttccatcctcactcgctcgatggcccgcacgaagcagacggcgaggaagtccaccggcggcaaggcgccgaggaagcagctggcgactaaggcggcccgcaagtctgcccctgcgaccggcggagtgaagaagccccaccgcttccgccccggcaccgtcgcgctccgggagatccgcaagtaccagaagagcacggagctgctgatccgcaagctgccgttccagcgcctggtgcgggagatcgcgcaggacttcaagaccgacctacgcttccagagctctgctgtctccgcgctgcaggaggcggctgaggcctaccttgtcgggctcttcgaggacaccaacctctgcgccatccacgccaagcgcgtcaccatcatgcccaaggacatccagcttgcccgccgcatccgcggggagagggcctaagcgtcatattttctgtcatcagtgcccgatcagaagatgtagagatgtgctgggttctgtagtttgggttactgtcgaatcatcgagtgttggctgttcactgctgtaacttaattatcatgatgcatatgaaatggcaatgaactatgttatcagttctcgataaaaaaaaaaaaaaaaaaaaaaaaaaaaaaaaaaaaaaaaaaaaaaagggcggccgcccgggaatccggacggt

SEQ ID NO: 259053 - DNA, 718 bp, Zea mays
gaccggccgaattccgttcgcccagcgcctggcatccgcagagagcttgttccgtccaggcaaccaaaaagcaagttgccccgccgcgcagaggaagaagagagcagaggaggatggctcgtacgaagcagaccgcccgcaagtccacgggaggcaaggccccccgcaagcagctcgccaccaaggcggcgaggaagtcggcgccgacgaccggcggcgtgaagaagccccacaggtacaggcccggaaccgtggcgctgcgcgagatccgcaagtaccagaagagcacggagctgctgatccgcaagctgcccttccagcgcctggtgcgcgagatcgcgcaggacttcaagacagacctccggttccagagccacgccgtgctggcgctccaggaggccgccgaggcctacctcgtcggtctcttcgaggacaccaacctctgcgccatccacgctaagcgcgtcaccatcatgcccaaggacatccagctcgcccgccgcatccgtggcgagcgcgcgtagccatcatctccggggatctgatgaatgtctagttaccaaacaaataggctgtattagcgtcgttgttctgtattcgttattttggattcggttgcagtgaaaaacagctttactaatcttatttgtgatctctggtggtcgcttcgcttctaagcgatcatctgtggtgcaaaattcgtgctggctattttgtc

SEQ ID NO: 259054 - DNA, 346 bp, Zea mays
cgtcgccgctcttgttgtttccgatcccaaaccccaaacacgctccaccggcacctccgctcccacaccacaccgatggcccgcacgaagcagacggcgcgcaagtccaccggaggcaaggcgccgcggaagcagctggcgaccaaggcagcgcgcaagtcggccccggcaaccggcggcgtgaagaagccgcaccgcttccgcccgggcaccgtggcgctccgcgagatccgcaagtaccagaagagcacggagctgctcatccgcaagctccccttccagcgcctggtccgcgagatcgcgcaggacttcaagaccgacctccgtttccagtcctccgccgtcg

SEQ ID NO: 259055 - DNA, 618 bp, Zea mays
cccacgcgtccggactagttctagatcgcggcacagagcctcattcatctccattcgaaacaccctcgcacccacactctcccttcgtccccagcctaaatccccgcaacgatggctcgcacgaagcagacggcgcgcaagtccacgggcggcaaggccccgaggaagcagctggcgaccaaggcggcgcgcaagtcggcccctgcgaccggcggcgtgaagaagccgcaccgcttccgcccgggcaccgtggcgctgcgcgagatccgcaagtaccagaagagcacggagcttctcatccgcaagctgcccttccagcgcctggtccgcgagatcgcgcaggacttcaagaccgacctccgcttccagtcctccgccgtcgccgcgctgcaggaggccgccgaggcctacctcgtcggcctgttcgaggacaccaacctctgcgccatccacgccaagcgcgtcaccatcatgcccaaggacatccagctcggccgccgcatccgcggtgagcgcgcctaggcggtcggccggccggataggccgtggcgcagtctcttctcggaagtttgtactagtggtcgggtcgtgtggagggagtggtgtactaatcagcaa

SEQ ID NO: 259056 - DNA, 663 bp, Zea mays
tcgtcgcaatctccctagcaatctctagcagcagatcctcgtgcaacgcaaagcgctagccttcctactgtcccgatggcccgcacgaagcagacggcgaggaagtccactggcggcaaggcgccaaggaagcagctggccaccaaggcggcgcgcaagtctgccccggcgaccggcggagtgaagaagccccaccgtttccgccccggcaccgtcgcgctccgggagatccgcaagtaccagaagagcacggagctgctgatccgcaagctgccgttccagcgcctggtgcgtgagatcgcccaggacttcaagaccgacctccgcttccagagctccgccgtcgccgcgctgcaggaggcgtccgaggcctacctcgtcgggctcttcgaggacaccaacctctgcgccattcacgccaagcgcgtcaccatcatgcccaaggacatccagctcgcccgccgtatccgtggggagagggcctaggcgtcgtcccggtggaggtggaagtagtagtggccgtttctgtcatcactgtctggctagaaggtgtagagatgtgccgggttctgtagtttgggttatcggtcaaatcatgatgtagttgggtctaccctgctgtaatttaactatgactatgcaatggcaatgaagttctcggtt

SEQ ID NO: 259057 - DNA, 763 bp, Zea mays
  unsure (1)..(763): unsure at all n locations
caccacgcgtccgcggaccgtggcggactggtcngagacgcgtgggcggacgcgtgggcagtctccctagcaatctctagcagcagatcctcgtgcgaacaaagcgctagccccttcgtactgtcccgatggcccgcacgaagcagacggcgaggaagtccactggcggcaaggcgccaaggaagcagctggccacgaaggcggcgcgcaagtctgccccggcgaccggcggagtgaagaagccccaccgtttccgccccggcaccgtcgcgctccgggagatccgcaagtatcagaagagcacggagctgctgatccgcaagctgccgttccagcgcctggttcgtgagatcgcccaggacttcaagaccgaccttcgcttccagagctccgccgtcgctgcgctgcaggaggcgtccgaggcctacctcgtcgggctcttcgaggacaccaacctctgcgccattcacgccaagcgcgtcaccatcatgcccaaggacatccagctcgcccgccgtatccgtgtggagagggcctaggcgtcgtggcggtggaggtcgaagtagtagtcgcagtttctgtcatcaccgtctggctagaaggtgtagagatgtgccgggttctggagtttgggttatcggtcgaatcatgatgtagttggttcttcacagctgtaatttaactatgacgatgccatggcaatgaagttctcagctatgagttccccccaaaaaaaaaaaaaaaaaaaaaaaaaaactcggga

SEQ ID NO: 259058 - DNA, 716 bp, Zea mays
cccacgcgtccgcccacgcgtcctcccacgcgtgggtccaatctgcccttgccgccgccactgcccgatccaggtgtgcagactgctcactcctcctctccgctccgaatggcccgcacgaagcagacggcgcgcaagtcgaccggcggcaaggcgccgcggaagcagctggccaccaaggcggcgcgcaagtcggccccggccacgggcggcgtgaagaagccgcaccgcttccgccccggcaccgtcgcgctccgcgagatccgcaagtaccagaagagcacggagctgctcatccgcaagctccccttccagcgcctcgtccgcgagatcgcgcaggacttcaagacggacctgcggttccagtcctcggccgtggcggcgctgcaggaggccgcggaggcgtacctggtggggctcttcgaggacaccaacctctgcgccatccacgccaagagggtcaccatcatgcccaaggacatccagctcgcccgccgcatcaggggcgagagggcttgagctgtcgcgctgctgctgttcgtcgttgtaatgtctgaagtatatggtggtgggtgctttctatgccgtgcctatttggctatttcggacgtgttgtcctcactgaatggaaaatggaatgcgattgctcgtctgaacttaaaataaaaagatcaaattcaataaataagaaaaaaaaaaaaaaaaaagggcggccg

SEQ ID NO: 259059 - DNA, 685 bp, Zea mays
aaatttacccaagccttttgttcctaaccaatctctagcagcagatcctcgtgcaaagcaaagcgctagccttcctactgtcccgatggcccgcacgaagcagacggcgaggaagtccactggcggcaaggcgcctaggaagcagctggccacgaaggcggctcgcaagtctgccccggctaccggcggagtgaagaagccccaccgtttccgccccggcaccgtcgcgctccgggagatccgcaagtaccagaagagcacggagctgctgatccgcaagctgccgttccagcgcctggtgcgtgagatcgcccaggatttcaagaccgaccttcgcttccagagctccgccgtcgccgcgctgcaggaggcgtccgaggcctaccttgtcgggctcttcgaggacaccaacctctgcgccattcacgccaagcgcgtcaccatcatgcccaaggacatccagctcgcccgccgcatccgtggggagagggcctaggcgtcgtcgcggtggaggtggaagtagtagtcgcagtttctgtcatcactgtctggctagaagttgtagagatgtgccggtttatgtagtttgggttattggtcgaatcattatgtagttgggtcttcactgctgtaatttaactatgactatgcaatggcaatgaagttctcggttatcacttcccga

SEQ ID NO: 259060 - DNA, 767 bp, Zea mays
cccacgcgtccgggcatccgcagagagcttgttccgtccaggcaaccaaaaagcaagttgccccgccgcgcagaggaagaagagagcagaggaggatggctcgtacgaagcagaccgcccgcaagtccacgggaggcaaggccccccgcaagcagctcgccaccaaggtccgtccgtctgcccttctctacccgtttcggatccgctgttctgttctctagggttcccttctgagacgcgccggcggttgtgctgtggttgcaggcggcgaggaagtcggcgccgacgaccggcggcgtgaagaagccccacaggtacaggcccggaaccgtggcgctgcgcgagatccgcaagtaccagaagagcacggagctgctgatccgcaagctgcccttccagcggctggtgcgtgagatcgcgcaagacttcaagaccgaccttcggttccagtcctccgctgtcgccgcgctgcaggaggccgccgaggcgtatctggtgggtctctttgaggacaccaacctctgcgccatccacgccaagagggtcaccatcatgcccaaggacatccagctcgcgcgccgcatcaggggcgagagggcctgattgctgctctgtcttcctgtttctgtaatgtctgaactaggcgatggactctatcgcttcttgtcctgcaatcgtgtaccgatgttcttggcatatctatctggctgttttgtatgtgattcagtgatttgatttaaaaaaaaaaaaaaaaaaaaaaactcgac

SEQ ID NO: 259061 - DNA, 688 bp, Zea mays
cagagcaaagcctcctcggcctccctgtccccagccttccccgatggcccgcacgaagcagacggcgcgcaagtcgacgggcggcaaggcgccgcggaagcagctggcgacgaaggcggcgcgcaagtcggcgccggcgacgggcggcgtgaagaagccgcaccgcttccgcccgggcaccgtcgcgctgcgcgagatccgcaagtaccagaagagcacggagctgctgatccgcaagctcccgttccagcgcctggtccgcgagatcgcgcaggacttcaagacggacctccgcttccagtcctccgccgtcgccgcgctgcaggaggccgccgaggcctacctggtgggcctcttcgaggacaccaacctctgtgccatccacgccaagcgcgtcaccatcatgcccaaggacatccagctcgcgcgccgcatccgcggcgagcgcgcctaggcggttcggttgcggcgcctgctcgctactgatggaggtgcttagtttagcacgtcatggttgtgttataggtgtgcgttgttgttttcaagaggtagcttcttgctatgtgctgatgttaacggaggattatgattagcagttctgaaaaaaatgtaatggatgtgatctgctctatctacatgttgtctgtctttgtcctggaatcccatggtgtttagcattgatttcaca

SEQ ID NO: 259062 - DNA, 564 bp, Zea mays
cttgtcggtgcgtgcaagccattgtcgtagcccagagcagcgacgcacctcggctcgttgaaggtaaaccagttcttcaccctgtctccgaacgcgtggaagcagaactcggcgtagtctgcaaacgcctcccttcgattgggcacggtgtgcagctgggtcagactgactgacacatggtcgaatcaatttgaaatttggtttctcgatgtcgtctagtttgcaattcttacacaatctttgggctaagccagcccaggtactgttcatggagtgccaatgggaggtcataatggtagagatttgcatacggcgcgataccttgctggagcatgtaatctatgagcctgttgtagtaatctactccttcctggtttaccttgccagttccatctgggaaaatcctcgaccaagagatcgaaaatcggtacgcatcaaagcccatgttcttcattatgttcacatcttccttgtaacaatgccaccgctgacgtgacggtcgacgagtatcatcggtacaaggaagatgtgaacataatgaagtacatgggctttgtaccgatg

SEQ ID NO: 259063 - DNA, 1902 bp, Zea mays
tgctgtcggggtcctgcgcgaggcatgcgtcaagcacggcgtccgacacctggtcgcacagcttgtcggggtgcccctcgttcacggactccgaggtgaaaaggaagctctcggccgccattgccttcttctcgctctaccgagcctcttgcgctgctgctctttattcgggaccggcaagcccacgcgtccgcccacgcgtccgcccacgcgtccgcccacgcggtttgcctcttctccctcttgccggtcccgaataaagagcagcagcgcaagaggtcggtagagcgagaagaaggcaatggcggccgagagcttccttttcacctcggagtccgtgaacgaggggcaccccgacaagctgtgcgaccaggtgtcggacgccgtgcttgacgcatgcctcgcgcaggaccccgacagcaaggtggcctgcgagacctgcaccaagaccaacatggtgatggtgttcggcgagatcacgaccaaggcgaccgtggactacgagaagatcgtgcgcgacacctgccgcgagatcgggttcacctccgacgacgtgggcctcgacgccgaccgctgcaaggtgctggtgaacatcgagcagcagtcccccgacatcgcgcagggcgtgcacgggcacttcacgaagcggcccgaggagatcggcgcgggcgaccagggccacatgttcgggtacgccaccgacgagacccccgagctgatgccgctgagccacgtgctggccaccaagctgggcgcgcgcctcaccgaggtgcgcaagaacggcacctgcgcctggctgaggcccgacggcaagacccaggtgacggtggagtacgtgaacgagggcggcgccatggtgcccgtccgcgtgcacaccgtgctcatctccacccagcacgacgagaccgtcaccaacgacgagatcgccgccgacctcaaggagcacgtcatcaagcccgtgatccctgagaagtacctcgacgagaagaccatcttccacctcaacccgtccgggcgcttcgtcatcggcgggccccacggtgacgccggcctcaccggccgcaagatcatcatcgacacgtacggcggctggggagcccacggcggtggcgccttctccggcaaggaccccaccaaggtggaccgcagcggcgcctacgtggccaggcaggccgccaagagcatcgtggccagcggcctcgcccgccgctgcctcgtgcaggtgtcgtacgccatcggcgtgccggagcccctgtccgtgttcgtcaactcgtacggcaccggcacgatccccgacaaggagatcctcaagatcgtgaaggagaacttcgacttcaggcccgggatgatcagcatcaacctcgacctgaagaagggcggcaacaggttcatcaagaccgccgcctacggccacttcggccgtgacgacgccgacttcacctgggaggtggtgaagcccctcaagttcgacaaggcatcggcttaaggttgggagtgtcactgtggacatgaggactaccttcctctggctctgctgttacctgcaagcattgctgctgctggatgtgtgtgtttgatcagtgactggctgctgctccatagaagatgaacggagagaaggatgatgaagggctttggcaatcgccgctgcaactgcaacccatgccatgccggcttagtgattgggtataatttggcttggcagcagccagcattattatgtgctgatctgttatcttttactagtttggtcgtccgatatctttctttctttttccccccttttcgactctgtactgaaactgctgagagattcgcagtattgttgtatcgtattcatatgctactgttaaaaaaaaaaaaaaaagggcggccgcaaaaaaaaaaaaaaaaaaaaagaaa

SEQ ID NO: 259064 - DNA, 1731 bp, Zea mays
agttctagatcgcgggcggccgcccgcccacgcgtccgatccccgttcgcctcttctcctccctcctgccgggtccttaataaagagcagcagcgcaagaggttggtagagcgagcgagaagaaggcaatggcggcggagagcttcctgttcacctcggagtccgtgaacgaggggcacccagacaagctgtgcgaccaggtgtcggacgcggtgctggacgcctgcctggcgcaggaccccgacagcaaggtggcctgcgagacctgcaccaagacgaacatggtgatggtgttcggcgagatcaccaccaaggcgagcgtggactacgagaagatcgtgcgcgacacctgccgcgagatcgggttcacctccgacgacgtggggctcgacgccgaccgctgcaaggtgctggtgaacatcgagcagcagtcccccgacatcgcgcagggcgtgcacgggcacttcacgaagcggcccgaggagatcggcgccggcgaccagggccacatgttcgggtacgccaccgacgagacccccgagctgatgccgctgagccacgtgctggccaccaagctcggcgcgcgcctgacggaggtccgcaaggacggcacctgcgcctggctcaggcccgacggcaagacccaggtgacggtggagtacgtgaacgagggcggcgccatggtgcccgtccgcgtgcacaccgtgctcatctccacccagcacgacgagaccgtcaccaacgacgagatcgccgccgacctcaaggagcacgtcatcaagcccgtcatcccggagaggtacctggacgagaagaccatcttccacctcaacccgtcggggcgcttcgtcatcggcgggccccacggggacgccggcctcaccggccgcaagatcatcatcgacacctacggcggctggggagcccacggcgggggcgccttctccggcaaggaccccaccaaggtggaccgcagcggggcctacgtcgccaggcaggccgccaagagcatcgtggccagcggcctcgcccgccgctgcctcgtgcaggtgtcctacgccatcggcgtgccggagcccctgtccgtgttcgtcgactcctacggcaccgggaccatccccgacaaggagatcctaaagatcgtcaaggagaacttcgacttcaggccagggatgatcaccatcaacctcgacctcaagaagggcggcaacaggttcatcaagaccgccgcatacggccactttggccgtgacgacgccgacttcacctgggaggtggtcaagcccctaaagaaggcatccgcttaagaatgtattgggaagttcactggacatgaggttcatcttcgtctggctctgctgatacctgcaaggattgctgctgctgctgccgcccctggatgtgtgtttgatcagtgactggctgctctgctccatagaagatgaatgaagagagagatggtgaagaaggctttggcaaatggcaattgccgcagcaagccatgtcggcgccactgaccggcttagtgattggtataatttggtgtggcagcagccaggattaatgcgctggtcttttatctttactactagtttggtctcgtccggtatcttatttttctttccccttttcgagtctgtactgaaactgctgagagatttgcagttttgatctatcatatcctttggtaaaaaaaaaaaaaaaaaaaaagagaaaagagcaagaggagga

SEQ ID NO: 259065 - DNA, 2505 bp, Zea mays
cccacgcgtccggcccagccgccgtccgtccgcgcttcactatccttcattccctcccctgtcagcgacgactgggtaggctaccgccgccgccctacgctaggtgcccatctcttcgccggcgaagagcgcccaccaagctccggccaagggcgtgatggcggctgtaggcagcttgaagccggggatggagactcttcatgtgcaggactacaaggacgcgcctccggccaaggccgcggtagagagcctccagccggcgatggagagtctgcatgtgcaggattacaaggacgcgcctccggccaagggcgtggccgccaccgccgtagggagcttgcagccgggggcggagaacctgcaggtgcaggactacaaggacggtaacatgtattatggtgcttacccggcttatgcctatggagcctatggtggctggggggagtacccatacctgagccatgatggagcacagccaccaactgctggtacctatgctgacatgtactatggctatgctccatatggtgttgcaaccatgggacatgatggtcagatttatgggtctcagaattaccagtacccgtcgacatacaccaagcaacagaactctactgccaagctgtcatccaatggtataagtgagaaattgactccggcgccgcaaacggatgtatctactattggtgtggatgaggtgaaaggtttgaaaaattcaaattcggtgctgaagacagaccggaatatgccaggttccaatggttcatatggccgatctagtgtgcgttctggcagctatcagaaccagactagttggtcacactatccatattatagtagtgagatgttctctgacaagcagcaaaagttcaccggcaaccacaattcgacttccaaccctaaaaccaaggggcagtcgaggaatcaaaacacgaggcagtatcctcatctcatgggtttgcaaacaccaacttcatcagtgtactcagctaatggaatttatgggtatgatgggagctatggacccggcctttggtatggatcgcacatgtataattctggattatatggtggatggaattcactgtatgatggaaagtacagaaccagaggaagaggtaacaatgggtattatgtttatggtaatggaagcatagatggctttaatgagctgaaaagagggccaagaagtggtatgtacaaaaaccagctggggcttgaagctactacccaagcaccagcaaaagagcaggatcttttgtttgctaatggttcacatcctgccatgaaggatcagtataatcaggctgactttgcggaaacatactcagacgctaaattcttcattattaaatcttacagtgaagatgatgttcacaagagcgttaagtacaatgtgtgggctagcactcccaatggtaataagaaacttgatgctgcctatcaagaggctaaagaaaaatcaagcgaaactcctgtttttcttcttttctctgtgaatgcaagtggccagtttgtcggccttgctgaaatggtgggtcgtgttgattttgaaaaaacagtagagcattggcaacaggacaaatggactggttgtttccctgtcaagtggcacattgtgaaggatgttccaaacagcttgctgaagcacatcattcttgagaacaatgaaaacaagccagtgacgaacagcagagatacacatgaggtgaagcttgagcaaggccttcaagtgcttaagattttcaaggatcatgtctgcaagacatccatactggatgacttcggcttttatgataatcgtgagaagatgatgcaagagaggaaagccaaacagcagcagtcgctgaaaaaggtcattgatgtgaagctgcccagcgtcaccgacatggagagaagtcctaaaggagagactggatcaacagaactcactggggttgagactgacgtcttgaacaaagagcgtttattaggcaaagcaggagagaaaaatggcgagaaaggaaatgatgtcgccccacaggacctgaaaacacaaactgagaagttggcgggtctaaatggctgttaatatttttcgttagctcaagccgttgacagtggtgtcggggtggaacctaaggctgtggtgggttgtttgaggaaattctgatgtcccattgagcttgtttcctatagttcataggagctagaggcttagctagttgcttgtgtttggtggtagtcatggtctgtgttctggcgtgtcaggtattttaggaatagaaggatgattaactgggttttgcaatgatggatcatgggttttgaggctgtatttttcgtttatttgcctttcctctctggattctagttcctctctctctctctctctagattctggacaagtgtagtgcttattttaagttggttggtttaagaacctgaaatgaacatgggaattctatcaagcatttacaaacttactttcctctgtacaatatgtgaaacccgtcttcttccttt

SEQ ID NO: 259066 - DNA, 2233 bp, Zea mays
tctctctcttttttttttttttggaaagaatgattgcgtggttgctcaactacctgctagacaatgccatgcaaacacacacagacacagagagtaacgtacgtgttgtgtcctgctcaattatacaacattaataacacaacgaacaatggatcaggaccgtccatttatcagcatgggcagcgtcgatctgtccaccgaggctagacggaaaactcttcaatctaaaaggcccaacaaattacaggtaatccaaaattggactatgaggcatcgaactctaagtactcgggcacacggctagttagctcgacaccatcatttgatcgcacgcctgcagcgcctggttcgcgtagtacctcacatcgacgtcagggtcctcgctgagctcaacaaggcatggtttcacggtcttctccacgacagattgatcgaggatcggtacaagtgactttagtacttttgcaacgttgaacttgatgttaggaaccctgtcctttgaagaattaatgacgactggaagcagcttttgacaagtgatctctgcacccatgacgggagctagcaaggagatagcctgcagaatcgtcatgcggtacaaatagtgcggattgttgatcttctccagcacctgaggaattatatgctgcattgcccactctggaccgaactcttccgcaaggcgcttcaagttgttggcggcagcatctctgattgagaagaccttgtcttccaaccattgcatgcagagcgcccccagcttgtcatcgaaaaacccaacacctaactgactcgccaacaatgggatgtactcaattattgcaagccggactctccagtgcctatcctctgcaagttctacaattgctggtagcagtgattgagatagcaagtcaattccaataacctgattaacttgatcaagtttgctgattatgttaagtcgaacatcaggaaattcgtctttcaacaaagagaggaaaattggaacaagctgttcaatggtagcatcctttcccagtacaggagccattcccataatcactgaggctaaagctgaacgaacatgctgggatgaatctgatgacaattccttaacgcatggaagaatatgttggactgagagctgaggatttaatatgcggcaaaacttagttacttttccagcagctgctatccgcacttcagcctcattatcacgaaggaggcgaacataggcaggcaccaaatcagctcttgtaggctcagggccaacagcctcacagagctcatataattgattggcgaccatataacgaacacgccatgatttatcctgggagaaattgacaatgactggaagaatgtgtgctacgcaatcttgtggttccaacaatttaccaagggcagcacagccttcaacagccaacagacgcactgaatcttgatcatcttgggttaaatcatcaaatattgacattatttctgtcttcaaatgattctgttcaactgtagctgcaaactttccaagatttgatgcagctgctcttctgaccataggcatgtcatcctgacatagctgaccatagatagtcctcaattctgttttcaattggtccgacgcacttggataggctatgtggaaaagaccacaggacgatacgcgagctgtaaaccactctccagctgctagcctctttactactggaatgaaccagtcgacaatgtcagtttccttcatttgtgcaccaatacggcacagagattcaactgctttatcacggacacaagtttcctccactgtacacaatgtctccaaaggtgggagcaaaacatgagcatgttctacaccaccaacatacggaatgaacacacccaattcctcagccattgcaagaagcacctcgtcttcatcatcgttgttttcactaagaaaaggaatcagctccttcctggttctttcttctccaagagcccgtgcaattgttgaaagtcttctaatggagtttagacgcaactggatgtcctcattcttaagctcatcaatcagtacagcaattggatacagaggctcatcaatcatagccatcaggtatatcaaggattgctcgcggggtctggatcgggcttctgtgacggccggctgcctcgccgacggcgcggggggaccggagacggggcagggtaggaacgcccgaggcgtcgcctctgagagaagggggcgaggagaggagcgagcggagctacacgtggg

SEQ ID NO: 259067 - DNA, 1219 bp, Zea mays
agccccacgtcgtcggaggtgaacccgatctcgcgccagttgtcgcgcacgatcttctcgtagtccacgctcgccttggtggtgatctcgccgaacaccatcaccatgttcgtcttggtgcaggtctcgcaggccaccttgctgtcggggtcctgcgccaggcaggcgtccagcaccgcgtccgacacctggtcgcacagcttgtctgggtgcccctcgttcacggactccgaggtgaacaggaagctctccgccgccattgccttcttctcgctcgctctaccaacctggggcaagctggcggctcaccttgcgctgctgctctttattaaggacccggcaggagggaggagaagaggtgggcggacgcgtgggcggacgcgtgggcggacgcgtggtagctagcacaagcatagtgcaggggcttgccacctaagtaaggcccgcctgagagccatggcatccaaggccgtcctcttcttggctctcaacctcctgttcttcacggtggccaacgcctgcggcaactgcccgaccccaacgcccccggtcgagccaccgccgccgcctcctgctgctaccccacccccttcgtccagcggcaagtgcccgctgaacgcgctcaagttcggcgtgtgcgccgatgtgctcggcctcgtcaaaggcgaggttggcaaggtgcctgccgagccatgctgtaccctcatcaaaggccttgcggacttcgaggccgccgtctgcctctgcacggccatcaaggccaacgtgctcggcgtcgtcatcgatgtccccatcaagctcagcgccctcgtcaactactgtggcaagtgcgtgcccaagggctacttgtgcgcgtaagcagctccgcgcggtcacacgctcgtagctgttcacgtacgagattacatatgcacgcaccctgcatggcacgaatgcatgcattgtgtctgctgatatatctctcctgtctcagttgcattgtgcacctttcggttctacaaaacctagaaccattccagccaaatacttgtcagttcaattcgcatgtattgtctcttgttgaattcccatttttttttgtatttggtcatttcctcgtaagagtccgacaccttctccaaggaaaaagggcagtgttgagagtcattgttgtgtatgtaaaaccaaacacttgagcttgtagtaccttattcgatttcttatttattcctgtctttcg

SEQ ID NO: 259068 - DNA, 1204 bp, Zea mays
agcggccgccctttttttttttttttttttaaaccgtaaagttcaagctgtcatgttaacgcaaacacacacagcaacgcgttgtgtcctgctcaattacaacattaattaacacaaacgaacaaggggatcaggaccgtccgtttttatctgttaccgaggctagacacaaacaactcttcaaatctaaaggccaaattacaggtaatccaaaattggactatggagcatcgatcgaactctctaaatacttgacacaaaggctagttagcttgacaccatcatctggtcgcacgcctgcagtgcctggtttgcgtagtaccttacgtcgacgtcagggtcctcgctgagctcaacgaggcacggtttcacggtcttctccaccacagattggtcgaggatcggtacaagtgactgtagtactttcgcaacattgaacttgatgttgggaaccctgtccttcgaagaattaatgacgactggaagcagcttttgacaggtgatctctgcacccatgacaggagctagcaaggagattgcctgcagaatcgtcatgcggtataaatagtgtgggttgttgatcttctccagcacctgagggattatatgctgcattgcccactctggaccaaactcttctgcaaggcgcttcaagttgttagcggcagcatctctgattgaaaagaccttgtcttccaaccattgcatgcagagcgcccccagcttgtcatcgaaaaacccaacacctaattgactcgccaacaatgggatgtactcaattattgcaagccggactctccagtgcctatcctctgcaagttctacaattgctggtagcagtgattgagatagcaagtcaattccaataacctgattaacttgatcaagtttgctgattatgttaagtcgaacatcaggaaattcgcccacgcgtccggcggaaacatactcagacgctaaattcttcattattaaatcttacagtgaagatgatgttcacaagagcgttaagtacaatgtgtgggctagcactcccaatggtaataagaaacttgatgctgcctatcaagaggctaaagaaaaatcaagcgaaactcctgtttttcttcttttctctgtgaatgcaagtggccagtttgtcggccttgctgaaactgtgggtcgtgttgattttgaaaaacagtagagcattggcacaggacaa

SEQ ID NO: 259069 - DNA, 528 bp, Zea mays
ttttgcttccctcttctcctccctcctgccgggtccttaataaagagcagcagcgcaaggtgagccgccagcttgccccaggttggtagagcgagcgagaagaaggcaatggcggcggagagcttcctgttcacctcggagtccgtgaacgaggggcacccagacaagctgtgcgaccaggtgtcggacgcggtgctggacgcctgcctggcgcaggaccccgacagcaaggtggcctgcgagacctgcaccaagacgaacatggtgatggtgttcggcgagatcaccaccaaggcgagcgtggactacgagaagatcgtgcgcgacacctgccgcgagatcgggttcacctccgacgacgtggggctcgacgccgaccgctgcaaggtgctggtgaacatcgagcagcagtcccccgacatcgcgcagggcgtgcacgggcacttcacgaagcggcccgaggagatcggcgccggcgaccagtgccacatgttcgggtacgccaccgacgagacccccgagctgatg

SEQ ID NO: 259070 - DNA, 821 bp, Zea mays
aaatcgcgagcggccgccctttttttttttttttttttttttttttttttttaggacaaaatgtatcctgtatctatatggtttcaatgtgtgtctgtatgtactgaactgtacaagcttatcgagaaagatcactgcgagtctacaacaatccacacccaacacaggcggtggacacaacccatccaataatctttcatgagtacagtgtcggagtcatcggccaatttcttcaaaattatcattaatttatgatgttcatgtaactatagtcgtaggataaggcagggccggtttggtttcatcacgcggatgggagcaccttcttgacgatctcatcactgagcgaggcgatctgggcgtcgagcgccttaacagcctcctccttctgcgcctcgaggttggcgagcgcctctacgagctcggcctccacacggctgcgcccctcgtccagcttggcctccagctccgcggtggtctccttcttcatcttgttaagcgccgccgcgatctcggcgcgcgccgccttcatgatggccgccgcctggtcctccagctgcttcacctcctcggaggcgcccttgacatcgccgagctcaccgcggatcttggcgtcccgctcatccatgaacttgcctagcggcgtgaagtagagcttgtccagcgccaccatgagcagcaggaactcggtcgcgatcgccgggagcgtcaggttgaagtcaaacagtgcggccttctccatctgctccgccagcgccgggagcggcgcggctgctagcgccgccgccgccctcgccagcagccgcgggagctgctgcgct

SEQ ID NO: 259071 - DNA, 913 bp, Zea mays
cataaattaatgatgttcatgtaactatagtcgtaggataaggcagggccggtttggtttcatcacgcggatgggagcaccttcttgacgatctccactcgctagcactagcatagtcgtctctttcttttctgcttccagacattgtccacgagctagtgcactggtgtcgctcgcaaccaaattaaggactgaggcatggcatccaagggcgtcctcttcttggctctcaacctcctgttcttcacagtggccaacgcctgcggcagctgcccgaccccaacgcccccggtcgagccaccgccgccgcctcctgctgctaccccacccccttcatcatccagtgggaagtgcccgctgaacgcgctcaagttcggcgtgtgcgtcaatgcgctcggcctcgtcaaaggcgaggctggcaaggtaccagctgagccatgctgcaacctcatcaaaggccttgcagacttcgaggccgccgtctgcctctgcacggccatcaagggcaacgtcctcggcgtcgtcttcgatgtccctatcaagttcaatgccctcgtcaactactgtggcaagtgcgtgcccaagggctacatgtgtgcgtaagctccgcgcggttacacgctcgtagccgttcgcgtgcgtaattaagcatgcacctgcatggcacacatgtattgtgcgcctgctgatctctcctgtctcatttgtgcaccttaggttctacagtcctagaaccatattccaggcaaattcttgtcagttcacatgtattgtctcttgttgaatttctatttttttgttttattttgtatttgaacatttgtttataagagtttgccatcttcttctccaagaaaaagaggagtgctgcttctagtttttatatctacgagtcatgcatgtaatctgttga

SEQ ID NO: 259072 - DNA, 597 bp, Zea mays
  unsure (1)..(597): unsure at all n locations
acaatgttgaggctgatgtcttgaacaaagagctttcattagacaaagcagtagagaaaaacgaggagaaaggaaatgatgtcgccccacaggacctgaaatcatcagctgagaagtcggcaagcccaaatggctgttaaattttttttttggttagctcggccattgacagtggtatggggcgggaacctgaggctgggggttgtttgaggaaatcctgagatcccattgagcttgtttcttgcccttgttttctgtagttcataggagcttgaggattagttagttgcttgtgtgtttgggtgataggtgaggtcagtgtcctggcatggcaggtatttaggaatagaaggacgattaactggggtttacaatggtggttcatgggtttgaggttgtgtttccatctatttgcctttcccctctctatattccagttcctacctctctagattctggacaaacgtagtgcttatttaatgctggctggtttaagaacctgaaatggacaaaggaatccaatcaagtgtttacaaaaaaaaaaaaaaaagaaaaaaaaaaaanaaaacagaaaaaaaaaaaaaaaaaagggggggg

SEQ ID NO: 259073 - DNA, 430 bp, Zea mays
gctgttacctgccaagcattgctgctgctggatgtgtgtgtttgatcacgtgactggctgctgctccatagaagatgaacggagagaaggatgatgaagggctttgccaatcgccgctgcaactgcaacccatgccatgccggcttagtgattgggtataatttggcttggcagcagccagcattattatgtgctgatctgttatcttttactagtttggtcgtccgatatctttctttctttttccccccttttcgactctgtactgaaactgctgagagattcgcagtattgttgtatcgtattcatatgctactgttactctggtgcccctctctctctctctgctgagagttttctccgtccacttgtgcttgctctatcggtgacctttgagaaccatgaaaggtgatacgacatgtttcatgtg

SEQ ID NO: 259074 - DNA, 537 bp, Zea mays
aaacacgacgttcgcccacgcgtccgcccacgcgtccgcccacgcgtccggttctagatcgcgagcggccgccctttttttttttttttttttttttttttttttttttttttgttggtttcaatgtgtgtctatactgaactgtacaagcttatcgagcaagatcactgcgagtctacaacaatccacgcccaacacaggcggtggacacaacccatccaataatctttcatgagtacagtgtcggagtcatcggccaatttcttcaaaattatcattaatttatgatgttcatgtaactatagtcgtaggataaggcagggccggtttggtttcatcacgcggatgggagcaccttcttgacgatctcatcactgagcgaggcgatctgggcgtccagcgccttaacagcctcctccttctgcgcctcgaggttggcgagcgcctctacgagctcggcctccacacggctgcgcccctcgtcctgccagaacgtgtgtgtagaggcttgcgtcgacccgcgagtcctagtcctgt

SEQ ID NO: 259075 - DNA, 414 bp, Zea mays
  unsure (1)..(414): unsure at all n locations
aacccaccagccaccacgcacagcagcagctagctagctagcaaccacctcgatcgcacagaggccggaagctcagccgcgaattcggcaagcaacaaggagaagtcttgggttcctcgccacctctcgatcggtcaggcggatccaagaagagatggagaagaaggcaggacgcgagcatgtgatcgggatcccagtgaacaacagggccttcggcatcgaggagccggatttctccagcaaaggcgccgccaggaacgcagccgccgcgggacgggctgcaaagtccggctggacgaccggggacagggtcgctcaaggcctgaaagaacacgtggctctggggccaaacctgtacgagaccgtgaggggcaagctgtcgctgggggcgaggatcctncgggcaggcggcgt

SEQ ID NO: 259076 - DNA, 564 bp, Zea mays
cccacgcgtccgcacgtctaatcagacattttactcagaagtcatctttgcttgccggtcccgaataaagagcagcagcgcatgaggtcggttgagcgagaagaaggcaatggcggccgagagcttcctgttcacctcggagtccgtgaacgaggggcaccccgacaagctgtgcgaccaggtgtcggacgccgtgcttgacgcatgcctcgcgcaggaccccgacagcaaggtggcctgcgagacctgcaccaagaccaacatggtgatggtgttcggcgagatcacgaccaaggcgaccgtggactactagaagatcgtgcgcgatacctgccgtgagatctggttaacctcccaccacctgggcctccactccgacgcgttgaaggggcatgaaagcaaacaggctcagtgtcgtcatatatgtccccatgaagctcagcgccctcgtcaactactgtggcaagtgcgtgcccaagggctacttgtgcgcgtaagcagcttcgcgcggtcacacgctcgtagctgttcacgtacgaaaatacatatgcacgcaccctgcat

SEQ ID NO: 259077 - DNA, 482 bp, Zea mays
ggggcttgaccacctcgcaggtgaagtcggcgtcgtcacggccaaagtggccgtatgcggcggtcttgatgaacctgttgtcttaagtttttttttttttttgtctctgtgtgtaacgtacgtgttgtgtcctgctcaattatacaacattaataacacaacgaacaatggatcaggaccgtccatttatcagcatgggcagcgtcgatctgtccaccgaggctagacggaaaactcttcaatctaaaaggcccaacaaattacaggtaatccaaaattggactatgaggcatcgaactctaagtactcgatcaatctgtcgtggagaagaccgtgaaaccatgccttgttgagctcagcgaggaccctgacgtcgatgtgaggtactacgcgaaccaggcgctgcaggcgtgcgatcaaatgatggtgtcgagctaactagccgtgtgcccgagtactatgaggcatcgaactctaagtac

SEQ ID NO: 259078 - DNA, 201 bp, Zea mays
aaaaaaagaggggtgttgcttctagttttttatatctacgaatcatgtaatttgttgagagtcatttgatgtgtatgtataaccaaacacttgaacttgtagtgccttattcgatttgttatttgttcctgtcttttggagtgagaataaagccatttggtcaaaaaaaaaaaaaaaaaagaaaaagatgaaaaggaaagg

SEQ ID NO: 259079 - DNA, 1329 bp, Zea mays
ctattatgttgcccctgaggtgcttcaaaaatgttatggcccagaatctgatgtatggagtgctggagtgattttgtacattttgctatgtggtgtacccccattttgggcagagagtgaagcagggatcttcaggcagattttgcgaggcaaacttgatttggaatctgaaccatggccaagtatctctgatagtgctaaggatttagtccgtaagatgcttatccgcgatcctacaaagaggttcactgctcatgaggttttatgtcatccatggattgttgatgatgctgtcgcacctgataagcctattgattctgctgttttgtcaaggctgaaaaacttttctgcaatgaacaagctcaagaagatggcattgagggtgattgctgaaagtctatctgaggaggagattgggggtttgaaggagttgttcaaaatgatcgatactgacaacagcgggacgataacttatgatgaactgaaggatggtctgaaaagggttggctcggacctgatggaacctgaaatccaggctttaatggatgcagctgatatcgacaacagcggaaccattgactatggagagttcttggcggctacgttgcacatgaataaactggagagggaggaaagcttggtgtcggcgtttgcgttcttcgataaggacgggagtggcttcataacgatcgacgagctctcacaagcatgcgaacagttcggtctttctgatgtccatctcgaggatatgatcaaagatgtggaccaaaacaatgacggtcagattgattatagtgagtttgccgcgatgatgagaaagggcaatgctggcggagcaggacggcggaccatgaggaacagcttgcatgtgaatcttggcgagctcctgaagcccaccgagacctagttttttttaaccagaggatcctgcttcccagatgcgccccatctgaaacttaccgtgtgcctcatccgctttcacagatcgattagttgatctctagtagcagcgccaaaagcagtttaagattttctcagtggtactagtagtgaggggaaaatagcatcctgtggtgccagtgagagattttaggcgctgaagacgacgtgctatgctactccggagtcctgttgtcttcttcttcttcttgttgttgttgatttcaggtttgtactattactgatctttgttgtaaaatgcgctgttgtcccatgaggtaggcacctaggtctcctccatttgaattatatcaaacggatttgtaaacacgttctatgcatgaaaccatttcttaatgatgaaaaaaaaaaaaaaaagggcggccgccg

SEQ ID NO: 259080 - DNA, 747 bp, Zea mays
gaattcggctcgagcaagctatatgggttttgctcccacccaaggtacagatttttagtgtacgattatgtcgatagagggagccttcgcgcgtccttggaaaacgtggagatcgcaggggagctgggctgggacggagagacgagtcgccatcgcaagggacgttgctcaagctctgtattacttacaccacgagtgcaccccgccaattattcaccgagacataacaagtaacaatatcttgcttgacacagaatttaaggcttacgtttcagactttggcatagcaaagatcgtaagacctgattcgtcaaactggagcgaactagcaggaacatacggttatatagctccagagctttcacacacgccagcggtgacgacgaaatgcgatgtctacagcttcggtgtggttctgctggagatagtgatggggagataccctactgagctgcggtccaatacttccctgcaaggacagcatcaccagcttgcaatggagactttggacaagcgtccatcatcgccaacattagcggagaggcacgagatttctctgcttgtccaagtagcacttgcatgcctgcaaccttcccccaaatcgaggccagagatgcaggaagtttatcagaaactgactcatgaccatacttaaggctagtctgagaactctatttttctaaggattttttattttcccaaaaaaaaaaaaaaaaaaaaaaaaaaaaaaaaaaaaagggcggccgc

SEQ ID NO: 259081 - DNA, 697 bp, Zea mays
gaattcggctcgagctggtgcaggatcgtatgctggatctggcgccggcgccggctctggctctggctctggtgcgggttcaggagctgggtccggagcgggttcgggttcagggtacgggcaagggcaagggtctggatatggcgaagggcatgggtcgggccagggacagggttctgggtctggctcgggatacggtcagggaagtggatccggtcgaggatctggctacggcgaaggctccggttccggctctggccaaggatcaggatccggctacggcgaaggctccggttccggctctggccaaggatcaggatccggctacggtgaaggttacggctccggtcatggccaaggatctggatacggtgagggttcaggaagaggatacggagaaggttcaggctcaggctacggcgagggacacggctacggctacggctctggttctgggcatgtggcaaataaacatgactgaacaatgttctctgagctctgatgttctcttctctttctgtgtatccatccatatacataaataagtacacgttaccaactgtggacaaagaactgtactctctctctctcctcaaagcatttcctatatagctgctcaagatactgtttttcattatagactacactttttatggaatgtggtttaaaataaaaaaaaaaaaaaaagggcggccgc

SEQ ID NO: 259082 - DNA, 1545 bp, Zea mays
ctctttgcaaccaaatgctggtgctgcaggagagtatgctggattgatggttatccgtgcttaccacaactcaagaggagaccaccaccgcgatgtctgcatcattcctgtctcagcacacggcacgaaccctgcaagtgctgctatggttggaatgaagattgttgctgttggaactgatgccaagggtaacataaacatcgaggaattgaggaaagctgcagaagcaaacaaggacaacttggctgctctgatggttacctacccttcaactcacggagtctatgaagaaggcattgatgagatctgcaagatcattcatgaaaatggcggacaggtctacatggacggggctaacatgaatgctcaggttgggttaacaagccctggttttattggagctgatgtttgtcaccttaaccttcacaagacattttgcattccacatggtggaggcggtcccggcatgggtcctattggggttaagaagcatttggcaccatttttaccatctcacccagtgattcccactggtggctttcctctccctgagaaaacggaccctcttggcaccatttctgctgctccatggggatctgctttgattctgccaatttcctacacatatatagccatgatgggctcacaggggctcactgatgcttcgaagatcgcgatcttgaatgcaaactacatggcaaaacgtctagagaaacactacccagttctgttccgtggagtcaacggaactgttgcccatgaattcatcattgatctaagggcatttaagacgactgctggtatagagccggaggatgtggcaaagcgcttgatggactacgggttccacgcaccgaccatgtcatggcctgttcctggcacacttatgattgaaccaactgaaagtgagagcaaggccgaactggacaggttctgcgacgctcttatctccatcagggaagagattgcagagatagaaagcggcaaagcagatgtgcttaacaatgtcctgaagggcgctcctcacccaccgcaactcttgatgggtgacacatggagcaagccgtattccagggagtacgctgcgttccccgcggcatggctccggggcgccaagttctggccaacaactggtcgtgtggacaacgtctacggggaccgcaacctcatctgcacgctgcagcaggcgacccaggtggccgaggaagccgcggccgcaactgcaactgcgtaatctcgtccgagaaccacgataattgatcgcggcgtgcgaaacatcctcaagaaactataatgcatgcttcctgtaggagggaagcatcgtcatcttcctcgtcatcctttctgcagtgtatatactagctcatggcagcgcctgatcccccaccaccaccagcgcacacacacaaagctgccaccttgtaattttgtacattacttcattgcttctctgttattcccatttaataaattaaaaggaatagctttttattgaatataattaaaaaaaaaaaaaaaaaaaagggcggccgctcgcgatctaga

SEQ ID NO: 259083 - DNA, 412 bp, Zea mays
acggcacccacgtccccgcggtggtgctgcgcaacctcatggagaacccggcctggtacacccagtacaccccgtaccaggccgagatcgcgcagggccgcctcgagtcgctgctcaactaccagaccatggtcgccgacctcaccggcctccccatgtccaacgcctccctcctcgacgaggccaccgccgccgccgaggccatggccatgtgcagcgccatcctcaggggcaagaagaggactttcctcatcgcctccaactgccacccgcagaccatcgacgtgtgccgcacccgctccgacggcttcggcatccgggtcgtcgtcgccgacggcaaggacctggactacggcggcggcgacgtctgcagcgtgctcgtgcaataccccggcatcgagggcgaggtgct

SEQ ID NO: 259084 - DNA, 616 bp, Zea mays
gaattcggctcgagggccgcgctacgcccgcgctgcccgcggtcggggggtgaccagaacctcttcttcctcgaccccgtcacgcccttcaagttcgacaaccagtactacaaaaacatcctcgcctaccgtggcctcctcagctccgacgaggtgctcctcaccggcagcggagccaccgctgaccttgtcaagctctacgccgccaaccaggatatcttcttccagcacttcgcgcgctccattgtcaagatgggcaacatctcgccgctcaccggggccaatggcgagatcaggaagaactgcaggagggtcaaccacgcctgatcgattattatgtgacccctctactgtttggttgcttggtttgttgattcagtggccccagcttcctgaggtttattatttgtttccttcaaactctatggatttcccttgtccatctgttgttttctttcaaaattgttgaccttgttagaggaatccatttcaattgcagcacggattggaggtgcattataattaatgtttgttatgtatcagtttccggtcaagaaaatttggtgaataaactagaatttttagccagtaaaaaaaaaaaaaaaagggcggccgc

SEQ ID NO: 259085 - DNA, 796 bp, Zea mays
gaattcggctcgaggttggaaatgaatggttgggtagtgcttcagatctgttgggtacaaatggcattgacacttcactgccgcatatttgcaggcgagaatatattatcaactgtaactggaaggtcttctgtgacaattacctagatggtggatatcatgttccatacgcacatggggctcttgcatcgggtctgcagcttcaatcctatgaaacacttacatatgaaagagttagtgttcaaagatgtgaaagtgcaccagcagaaccagatgacttcgatcgcttagggacaaaagctctctatgcctttgtttatccaaactttatgatcaacagatatggtccatggatggacactaatctagctgtcccattagattcaaccagatgcaaggtggtatttgattattttcttgacaagtctctgctggatgaccagtgctttatcaagaaaagcctcgaagacagtgagcaagtacagatagaagacattgcactgtgtgagggggttcagcgtggcctggaatcgccggcctacagtgttggaagatacgctccgtctgtggagatggccatgcaccacttccaccgcctcatgcatgctaaccttagtgagtaattattctcatggacgcatcttgcaaagttgtacagaaccaaacgctttttttttggcaggacactgcatgaacactgttctctattgcaatcttgtgaattcagccacatttcacttacacaaaaaacatgtttgctggtaaaaaaaaaaaaaaaaaaaaaaagggcggccgc

SEQ ID NO: 259086 - DNA, 1525 bp, Zea mays
gaattcggctcgagcagcagcaatgcttcctgccttctgaagagcaaagacgctttcgtacgtctttgcattatcatcaacagcgcattagctggtgaagaggcagagaaggctccaatcggtttctttgaccgcgatggcaaatatattgagtgccttctgtcagtgaacagaaaagtgaatgcagatggcgtcgtcaccggagtgttctgtttcattcatgttcctagtgatgacctccagcatgcgctacatgtgcagcaagcctctgagcagacagcactgagaaggctgaaggctttctcgtacatgcgacatgccatcgacaaacctctctcaggtatgctctattctagggaaacactcaagggcacaggcctggatgaagagcagatgaggcaggttcgcgtcgcggataattgccatcgccagctaaacaagatactcgccgacttagatcaagataacattactgacaagtcgagttgcttggatttggacatggctgagtttgtgctgcaagacgtggtggtgtctgctgtaagtcaagtactgataggttgccaggggaaaggcatcagagttgcttgcaacctgccggagagatccatgaagcaaaaggtttacggggatggtatacggctccagcagatcctctccgacttcttattcgtttcggtgaaattctctcctgctggtggctctgttgatatctcttccaaactgaccaagaacagcattggcgaaaaccttcatctcatagacttcgaacttaggatcaagcaccaaggagcaggagtcccagcagaaatactgtcacagatgtatggggaggacaatagagaacagtcggaggagggcttgagcctccttgtttctagaaaccttctgaggctcatgaatggcgacattcgtcacctcagggaagctggcatgtcaaccttcatcctcactgctgaactcgctgctgctccttcagcagctggacattgaagccgtcactgcaaacaagtgccaaatgctgcccagctccctcagagttcattcggaaagccacggtggttcgcggagaatgggaaatgctgcagcctgtaggatcaccgaatgcataagaaataagattgacttgtatggttgtttgttaggcggggaagttgtgcaggcatagtaagactccatacttctgctcttttctgcctgtaaccaactgttttctatcagttattaggctatctcatcagtttaattatacttatccctcatatttaaatttcactttgcaaacaatacaaaacagtgttttgatgaccatatggatgaactgcgaagacaatttttttaggctgtctctaatatttcatccatatggtcacccaaaatactattttgtacggtagactacactgttagtagtgtggagtttaaatatagggatgaataacctgttggagataaccttacctatcttcagcaaatcttctatcatatctcttattttaaaaaaaaaaaaaaaaagggcggccgc

SEQ ID NO: 259087 - DNA, 553 bp, Zea mays
tgaggagggcttcagccttgctgtttctagaaaccttctgaggctcatgaatggtgacattcgtcacctcagggaagctggcatgtcaaccttcattctcactgctgaacttgctgctgctccttcagcagttggacgatgagggcaaactgcaacaagtgtcaaatgctctctcagagttcattcggaaagccacggtggtttgcggagaatgagaaatgttggagcggcgtgtaggatcaccgaatgcatagtacggctccatacttctgctctgtttctgcctgtaactcaactgtgaaaagttttaaactttcagaaagaaaaaccgtgtgaggtgcaggttcaagttaatatgaataataaagtgtttttttttaaaataaaaaacatgatgaaatgtcaaatttaacggcagctttggtgccttctttatgtccatgcgtgggcatgtggttgtacactggggtaactgcttggtgggctacccatggctcttgttcagcctccttgttcatagtttacactctggaaagccccttggtgttttttt

SEQ ID NO: 259088 - DNA, 879 bp, Zea mays
ggcggccgccctttttttttttttttaaataacctgtttgattttcagcaagagttcattttaattttatatactcagacagattcatgaagctagcaaagaacattaaagcagagaatcagagagccatgaaggacttaacacgagccatcatttccttggctctgctcttagatacctgagacttgctcaaaatctgaaacgcatgtccaacacctctgaacaccccatactcaacccttttccctgctctcaccaaagcatcgcagaactccaaattcctatccttcaatatgtccatctccgagatgcacaccaaggtacgcatgagcttcaactcctccaacttcaccttcaccaaagggttgcaccatggatggtcacggttcgcaccacacggtaacgccaagcgccaataagtatcagaagctgccaagttcaaagcagaaccgggtgattgagccatgcatttctcagaacctgttctcacttcccctccaaaaaagggttgtatcaaaataagacccttcaaattcaagggtcttaaagcagcgccatcacatgcacatagcctcgtggcaacgttgtaggctatgttagcaccagcactgtccccacctaagaaaacacttgagaagttgcattttgaagtccaccattcactaccacccttgttgtgttgttgatgtagcatttgttgtttcacccacatgatggcctttaagccatcatcatagggtgctggaagagggttctctggggccaatcgatagttcactgacataatcacacactccactttggctgatagccttgcgaggaaatcatggtagcaactccacgctgctgatccaacacaaaatccctcgagccgaattc

SEQ ID NO: 259089 - DNA, 862 bp, Zea mays
gcggccgccctttttttttttttttagtcttcattgataactcagaaaagctttgaaataaaaacaaatttaggcttgtcaatacattaagtcctgctttattctcgttggctacattccgcaaaaggtgtctagtcactcaagatgaagtttatatctttgatattattccttaacgaaggagaaacaaacactgaaaccaaaataatgaatgcccccccagtcaccagctgcaaggcaccattgcttcaatgtgttgatctaccacctatgcaaaaaatgaaactagtattacacgtctttcccttgtttggcaataaaatttaagactcctccactcccaaatattgggagtgagaagctgccaggagggctgcaccaatgccagagccatcattagcatgctcaatgacaatggtctcagcagcctcatctcccagcaattccttcagtgcactctccaagcattctctaaatttggtgtagtgttcaaacaaccccccatccaacgctatcactgacttttgcttctccccaaccttaactgtgtctcttcctattttcttaaggatgcccaaaataccagcagcagcaagccgagctccgcgagtagcaacaatgtcacacagttcaacaacgatcttcctcattttaagggatgtgtttgagatctctaatatatcctttaacttgtttccaaccactttcagatcagaacttgtgtcatggtgcatggctgacatgtcaggcgtcctaagtatgaaaggaactttcaatttggggggaacagtatcgccaaaaaagtcagcttcttcggccatcttcaataaagctctccttacaacttcctcgagccgaattc

SEQ ID NO: 259090 - DNA, 1791 bp, Zea mays
gcggccgcccttttttttttttttttttaaaaaagaaaaaagaaatactataagaacgtaaagtttacagtatattgtttacacaaagctccttgaccaaaattaaatgaagcatcttaatacccataattggtaccatatacggggccataatctgcagaaggcgcatggcctgtatgaccaccagcgctagtgggtggaggagcataaactggagcagttgttggataggcactgtaaccttggctgactgatccccccataggatcctgtgtcgcacttgcagcttcagccatgaaattctgaaccagctgctgggctgcctgtatttgagaagaagtcccacttatctcaacagtcatctcccctggcacaccccttgtttcctgaattgtaatacttgctccactagcacgacgtatatagctgatatttgtgcccgatgctcctataacagcatctgcatatgtaagaggaatctgcatgtgctgtgtgaccttagttacaacagattgttgtggttgtgcacttgatgaatgaattcccatagaagcatcccttgcataggcaggtggtggaccttgatgaaggtgtttgtccatgggaggcaactcagtaggtggataataactatcatagtgatgtgaaggtggcatatattgatgattaggtgcaaaagcaggtcctcctccaccaccaccaccagcaggagcaggaaacccttgaggaggaggaccccaattttgatgcggtggcaaattctggttaactctaacatctgacatttgcatctgcgtttcaaaaactcctactatgctgcggtcaaccaagaactttgcgtaaatgaactgcaataagttcaactgccttgtgaacaccagcagattccccttgtatttcaacaatactatcatctcgcaaagcaaatattggcaggttttctgatccaagaacacgtatagtgcaaccagagccatcttgaatggattttatggttgatccctgcttcccaatcaagcttcctgcttgagtatccgccactagaagcctggtaacaactgatcgcccagcagccaatgcactatctgcaaggtcacgatcaacattgataacttgcttatgaacccttaacaaaccatcaacagcaggtggtatgggacaatctggctcttcttttgcagaaaccattactgctctttctgagattccaggtggaccgtcaagaattttaattcgcgccttagtctcttctgtgattttctttataaactcgccctttcggccaataatactgccaaccttttgcactggaaccaacatcctgaagacattctctccaggccatcccggccacttttttatttcatttcccttcgaatcaatctcggatccctgtttcggcagagaatcaaaatcctcaggcacatctccagcaccatgaacttcctcaacatgctcctccggtggagaatccgcgtccccagccaaacctccaacatcatgttcatgcccaacaaaatcattttcaggaaaattggcgtcctccatcaaattgcctgcatcatcttcatcaggtagcaggtgaggaaatccggagctatcaatcacagtccctacatcatgttcatcagaatgattctgaggaaaattagggtcctcaggcacatatcctacatcatgtccatcaaaaccgtgctcggccatgagtatattttatggttggtgagataagtgacggatatggagccgctcagaatttaggttttgcctcgagccgaattccggctcgag

SEQ ID NO: 259091 - DNA, 1035 bp, Zea mays
ggcggccgccctttttttttttttttgtataggtagtggcacctatattttttctttgttaacctaagaataaatcttagatgcttagtggactacattaaccagcccaacgtaagagtttcatcattatgtaccaaaaaagtgatccatcattgaagatggaaaatgcaaaagacactcattttggggggagaagatcactattgttgtccctcaaactcaattacaatctcaccagtgatcctgtaagaaatattttagaagaataataaaagaaattgtgaaaatgaatgtgaaaaacacaaactcagctcagctttttcttctccaggatccaattatggactttgttgacatattgctcatttattttcaaatgtaataggcataattttctgtaacccttcaagatatacttatctatgtaatcttcatatctttcatagattgctggtactgtaagaacaataaaaagactggtgtatgccagggtaaggaaatcagttaagccaccgatgatagaaattatccagaggtatgcagctactttcaggaacagccttgagtctttaccaagggcaatatcttgagaaactgataacagatcattaactcttgtgcggataaaagtcttcacttcgtttgccatttcctctgagagatgcaactgtggtagaggtggagcaggtctgttgagaattgcagctgatttggcccagagaaaaagaatgacaatgaggaggaggagaacattagaaacaagagacagaagagtataaccagatctttcaaacacaacccaaacagctagtgtgaccaacaatatccccacagtaaggttcttccgcctccacagtattaaatctgcaacttgaccaccaccaaggatctcatgaagacttctttgccggttaaacaatcgatcagaggaacccattagggagagaatccaaagtgaggaacttgaacccagcaagggatctgtgtcacaaaaaagcagagagctttgagatgatccacgctcgagccgaattc

SEQ ID NO: 259092 - DNA, 989 bp, Zea mays
ggcggccgccctttttttttttttttaagtgtaaaagattcaagaaaagtattattgaggcttctttccgtttcttgtaatacaatcgacaagtatcaaagaataaaagaatgaacatccatacaaatgaaaagcaattcaatcagcctaggaagaataaagaatagtgttgtggtatttgtttcgagtaggattagaaggagttcaagatgtttggcactctgggggaaggccttgtggaaatcttttggtgtcagtgcagtaattgtaaatcatgtaattcttctgcacccaactcagtctgtcctggcttgttgaatccaactgttgggagaaccaggcattggaggaagaagagttggcagtgcaagatgatgatgatgatgatgatccagaatggacgcaggcattggcattgaaatttctatatgatgctgtgaatggagcttgtgtccaatctgtcttcacaagtccacctcttgttgcccagtcatcagcattccatagactagagtatatcctcattggctgttcctttgggaatgcaactccttttgattccatgttcttgaattctcttattggggtcccatccactgagaagattatgcgctgaggattccaaagaatggaataggtatggaaatctgcagttgggtcgaaccacagatagaactgttgctctctgctgcctttgccctgactgaacacattggtgtgaagaatgtatgggtcaccgctcagattccccaagaattcaaagtcaatctcatcccaatttgatccttttgatgacaaataataggcggtgacagtgcctgcagaatttccgggtacaagcttgagttgcatatcaatcttgccaaagagatactcgtttttggactgaaaccccgagccagaggctttgtcaagggaaagagtgagaagatcgccgttgttgagtatcttggcacgaccatctccccaagttacctcgagccgaattc

SEQ ID NO: 259093 - DNA, 591 bp, Zea mays
gcggccgccctttttttttttttttttttatgccaaagtgatgacatttgtagtcaatactaacaagtctaattcatagtttgcaactctagcacatggtcaaggtatacatctcatttcgtacaagaagcaattattcaggcctcaactctgaagaaccttgtgaaactaaatgcactgttagtccaatgtttcacaaattcatagccaggaaaaaaagaaacaaaaagttgctatatgtttttcaatggccaaggccatgaaatgcatgcaatgttaagcacccccgatgaagagaatcagaactggaactgcatctcagaagcatatccaagggcttcaaggtgtgcagccatggccttgttcataggtggtgggccacatctcaatatcttaatatcttgtgctggagcagggcaatgggtttgaatcatctcctttgacacaaatccttcaccaccatcccatacctcaggaggctgatttaacacatagtatattttgaatcgatctggatagttagaagcaagaccgtccagctcttccttcaaaagaatgtcctcatacgtaacattggctcgagccgaattc

SEQ ID NO: 259094 - DNA, 796 bp, Zea mays
gcggccgccctttttttttttttttgttcataaaaactagtatgtagaataactgaaagtttataaaaagtacagaaagaaagggatggatatagataaagaaaaaacttgtgttttcttctttgttattattgatattaaaaccataaaaaaaaaaaaaaaaacttatgttacgtatttctttcttgactacttttaaggagaacgcgaaaaacatgacttgtaaaattaactagaatgaagggtatatgtttgatctttattcaaggtttaagattgcagtgcccgttggtcatattcttgatagattcaaatctgggacccttttcaccgaacttggtgttgccatatagctccaaatagtctccataacgataattacttggatataagagtttgttagcaggggaaataatggcttcaccaactgggttataaaagctggctatggagagtctacttccgtttttgtcaggcatgaccctgtgcacaacacttttataaaagccattgctcaacacttctacttggtcacctgtgttcacaaaaatggcattgttcttggagggtggaatctccacccacttgccatctttgaagaattctaggccaggcacttggtcatcttggagcaataggatgatgccaccagcatctgtgtgttctctaagtcctctaaccagttcagggtgtggacattgagggtacttggccacttttgttcccatagcaggtccatttgttccagaaaatgcctccttaatgtagtttttctccaaaccctcgagccgaattc

SEQ ID NO: 259095 - DNA, 743 bp, Zea mays
gcggccgccctttttttttttttttcgttttcatatccatttgttattatcgttattatcccacaggtatccaagaaaagtcttggcggcatccaagcttggaaaatacgtcggttcaaggaaaatctgagtcaacgagtcagccgagtcgcaactcaacccaactcggttaccgttagcctctgaacttcccatcaccaccgccaacacctgcttatacgcgtagaagaatctcttcatcgccgcctcaatcgcctgcatcgcctgcaacaagtgaaccttctcgaactcgctcttcgaaacgtagagcttcatcgccgcctcttgaatcctcggtcctcccttcggatccacctccacctccaatatctccggcaccttgtgcctcagatctctgcacatcttcgtcagttccactaactcattcgatctgaagcagaacgatgccgtttcgccgctcgaggatttcaccgagagttgattctttagcctcaagaaatcgtccggatccatcatcaggtggaggtcctccacctccgcgagaagcttccagatcctctccacggcgtagcagtcctctgctgctttcaggaaggttctggagagcaccgcgtccgcgattctctccagaaccttccgcgacgcgtgaatccacgactccgcgatctggtgcgtggcgtgcaccgcgtggttctcgtggttctccacgcgctcgtcgtacggcgtcgctcgagccgaattcc

SEQ ID NO: 259096 - DNA, 1055 bp, Zea mays
gcggccgcccttttttttttttttttttttttttttttttttttttaaccaaaaacgcagaaaacttcctgctgcctttgtgtcattgttgtacaagttatttaacattaacttcctcccagatatgctgagaaggggaaaaaatgtatagcatctgtgagtcctgaaaattaggacagtattatgcatacaacagaatcttttaaaccaaagcctaacataataaatgagttaaaatcagcattctttggttgcaatttcttcctgctgttttgtggcggaaaatagggaaaattttgtttctgcaaagaactaaccaggacatgaaaattttccagaacattcaagcagatgcagccaaaggcacagatctgtagcatgctctctttgcagcacgaacaatatcttcaacctgtgggacagccattctttccagatttgctgcataaggcatgggaacatcagcccagcaattctctcaacgggtgcatcaagataaccaaaactttcttcaatgacagatgtgcagatttcagcgccaacgccatgctgaggaaacccttcttcaactgtcaccagcctgttggttttcctgacagaagcattgattgtggatcgatcaagcggccggattgaacgcaaattaatgacctcagcactgattccttcctttgccagtgtctcagcagccttgagagcatagccaaccatttttgaataggctgtaatagtcacatcttttccttccctctcaatctttgcttttcctatgggaaggcaaaaactggaatcaagaacttcggccgaaacagggaatgactcaccatataacaattcattttcaaggaaaacaacaggatcagggtccctaatagcagctttaagcaaaccacgggcatcttcagatgaatatggtgacaagactttcaacccagggcatgaaccatacaaagatgcataacattgagaatgctgagcaccaaccccagcagcagcaccattgggtcctctaaagacaataggtacagatatttgcccagcctcgagccgaattc

SEQ ID NO: 259097 - DNA, 955 bp, Zea mays; identical to SEQ ID NO: 354

SEQ ID NO: 259098 - DNA, 723 bp, Zea mays
gcggccgccctttttttttttttttttttttttttttaattgaaagtaaagaaatttatttgagaaaactgggcggtatacaatattgatatatgttaatgctcacccaattctacaatgggccttgacacataagataaagaagagtaataaaatataaatattcttatatctatatttctctctagatgtcaattgacatatagttgtccatggatgatttttggacaaagattattaattttgaaatgtatatatgatcaccactcttacacactaaaattataagtattagattctgaatcacccaagtttaccaaataaaaatactattaataattaaattccaattttagtggcaagtgggcgagccttgcacatggcctccaatggaattaaccttgacaaggtgatccaattgttctctgtcatatcaagcttttcctcacttactcgtttccagtcaaaacattgaatcaacaatcccaaagtaaagctgacactttgcatagccatgggttctcctgggcaagcccttcttcccatgccaaatgctaccaactttttctcctctccttccacatcaaacctctcaggtttaaagcatgtggcatcattccacaactgaggatctctctgcatgccccaaccattaatgatcacaattgtgtctcgtgggatattgaatccttcaattgtaatatcttctctcgagccgaattc

SEQ ID NO: 259099 - DNA, 1172 bp, Zea mays
gcggccgccctttttttttttttttaaaatgtactactatttggtatgtttgatgtagaagtcacataaggcaactaggtgttacaaaatagactagggaaccacagcaccctaatatagacaacaagaacaaaaatgagctaatcagagctatcatacaaatataatgtacctgccttcgcatctagtttagtagttacaaacacttaaaacagaactccgaaaatattaattggtggactagcaatactgaatacattatgtgaaataagatatgtacaatactagagtgcaataggctaatagctactgaggtgactgagttggtggatgagatcaccagcaacagatgcatgatgataagtttgcaatatcaagtatagagaggggatgcagaaggccggggataagctgtgggagtctccatagggctaatatcatcggcacttcttctacgaactcgagatccattaacagaaggattttgatagcctctattcacatcagcacttcttctacgaacacgagacccattttgatggcctccatttacattaggaacttgcagctgctccaatgttgtaaccacttcatccatgtttggcctgaacttggattctattgataggcaccgcaaggcaagggtggctagcttacaggcatcatctgttgaatattgtccttcgagccgggtgtccaacacacgaaatatcttacgcttgtttgccaggtaaggtttagcccattccaccaaattgtgttgtccagatggtctattcttgtcaacagccctcttgccagacaacatttccagcaggacaaccccaaaactatagacatcgctcttagcagtaagatgacctgtggctagatattcaggtgctgcgtatccgtaggttcccattaccctggtggagacatgacttttgtcacctgttggtccatcctttgccagcccaaaatcagaaagttttgcattatattttgaatccagcaagatatttgaagtcttaaaatctctatatatcacttttgcttctgcactgtggagaaatgcaagccctttggcagcatcaagagctaccttcaaacgtaagctccaagaaagtggttgaaaatatgagcctctcctgaacaaatggttttccaagcttccacctcgagccgaattc

SEQ ID NO: 259100 - DNA, 1162 bp, Zea mays
gcggccgcccttttttttttttttttttttttgggtttaaattaaatgcctaatctaccctctcttattaaaagaattacaaatctgcaaaatttattttcagtgattaaatacttcaatcaaaaattggtcagggatacaataacaaaacccaaatgggccatatagaaataccaaggtgaacaaaatctcatcccctgcctacaacgtcttgaaaggaatttagtacgtcatgggagccttcaatttattcttacaacaacatggtctctggattttcaatatagcctttgaatgcttttaaccattcggcaccaattgcaccatctataacacgatgatcacagctgagggtcacagacatgaaggaagcaaacttgaactcttcagcacctgaacccggaacgaccctcctctcagaagatccaacggcaagaatgccagcctgaggaggattgatgattgcacagaattgtctgacaccaaatggccctcccaggttagacactgtaaatgtacctccctcataatcttggggtttcaagctgttttctttggctttctttgccaattgtttgacctcttcccctattgtagagaggcctttcttgtctgcatccctgatgactggaacaaagagcccgttatcagtctgcacagcaacattaatattcacattattatactggcgaatataatcatttgcccatgaactgttacattgaggaactttacggagagccaaagcagcagccttgattacaaggtcattaactgatatgcgggagccaccagaggcttcttgcaatgaattgagttgggtccgcaaactcgtgagtttgtcaacacatgtatctactgttaaatagtaatgaggaatagtttgttttgataatagtagccgtgaagctgtgaccttccgtatctgagagacaggaatgtcagtataatccaatgctgcatctgttgcaaccttggccttggaggatgctgaaacttctttagcaccagaagccaagtaatcatcaatgtcggccttcacaatgagcccttcaggtcctgttcctttaatgctagagagaggtacatttttctcttcgcccaattttctagcaagaggactagcaaatgtgcgatctccagatgagctcgagccgaattc

SEQ ID NO: 259101 - DNA, 821 bp, Zea mays
gcggccgcccttttttttttttttttttagccataaataataataataataataatagtaataataattcaaaacaacaaccaccaccacctcatgcatgggaatagtgttgggagggctgcatttggaaaaccatgtttggtgtctgaggtcctaagtaagaagactcatgaagagaacttctgtgcagattttggccctgcatcttaaacccgtatgagttaaggccataaggggacatgaagacttgttcatgtgcagggttgagtgccatagctacccctgcatttggctgatcgctccactggaaattcaatccggatgaggcagcattagaattcagctgctggtggcgtgagagcattgcggaattttgtggcgaagcagatctcttgctttcatcagaagaagttctggtggtttctgtgagattaaccgttgttatgtcatggatgctagccctcctcttgtccttgcctcctgatagttgcctgatgaagtacttctgagcatggctagcaacttgagttggcgtcctagtgatcacataatttcgcgatatgtttctccaatcacctttgccatacttcttcagccccagtagaaacaacttatgttcctcttcagtccatggcacacctttcttcctttcctgctcaaggggtcttccagaggaggatctcttagcagtgattcctttgaagccatcatcataagcaggactagtgttcacccaatccaaggtgaagggtgaggttgtggtggtaccactactgtaccccggaattgggatcaaccctgcttctactcgagccgaattc

SEQ ID NO: 259102 - DNA, 802 bp, Zea mays
gcggccgcccttttttttttttttttttttttttaactgatgctaaataatttattgaaacactgaggtgtggtctaactacaaaaatcaacggattcaatttgtaaaccataagacatgaataacaaaaacaaattacctgggagaacctacaggtatgaactatacacataccccaccaccagcaataaccaccatatcaaaactatcatcatattcaagaatagaattgtatgctcctcctctctatacaccaaagttaaaattagaaaatataaaccccaggtagtgaaactaaatcaaggatgaatggaagttatggaaccctcttaaaatgatgaagcagaagtttctgtctggcttcctcttctgcgacggtgtcgttttccatggtgacggcggccaccaccgaacgtgacgggatcaaacctcctcagcctctcagcttcttgggaattgatgacacactctgaaggagggactttgtatctgactttgtcatagcagtaggagtatgtcatgtgcttcttcctgaaattctccattttgattctttgtgctggtgtaacaccagaaggaggaattgttgcctcagagctttgagcattgtcacacgtggccacgtgctgctcaattggatccactgcacaaccgtgcaggacaaggtcagagaattcagcaacatagggtgcatacttgtagttaaccctgtatttgcctccattggtagcccaatcagatgcatcccatattgttgcatacaaagtcattggcttagaagggaaatcctcgagccgaattc

SEQ ID NO: 259103 - DNA, 572 bp, Zea mays; identical to SEQ ID NO: 479

SEQ ID NO: 259104 - DNA, 660 bp, Zea mays
gcggccgcccttttttttttttttttcagctgcgcccacaacaacttttgctattttgcctattatttcaatttattatgttgcattatagttgtcgtcccaactaaaaataagggattttttttaaagaaaaatgttatgcaatgtgatacaagaatttcttgataggtgcaggcatgcagcctccttcaagttgtaggatcaatttatgaaagcggcgccttcaaaatttggataaaacaatttcccgcataaattcttcaggtgcttctaggccagtgaaaagattgaactgaccaatggcctgccttaggaacatttctaccccagccacagttattgctcctgcagcatccgcttcgttcaacaatctggttcttcttggagtatacacagcatcaaagactaaccggtagtcttccaaagtagcctctgccacaggaattctgtctgtattgggatgcattcctacaggtgttgcattcgcaagaattgcccctttctctggctgaaagttgaccaactctttgaaaggctgagcttcaccaaatacagcacaagcaagagattttgctctatcaatgagtgcatcctcaattgcagtaattgcagcctcacaatctgtattataaccaacaagttttccctcgagccgaattc

SEQ ID NO: 259105 - DNA, 1034 bp, Zea mays
gcggccgcccttttttttttttttttttttttttaggataaatattccaaatgccacttgaaatcaactatctattactttcaatttgttcttacataaacatttcaatagaaaaataaaaattattttctggtagaataatgatgtagttatctgacacctttctcgtgtccaactattcttttatagaaacaaaatgtgtatgaggggctgctcaatgcttcattattaaaagccccctagtttatggactatggagcaataatcagcagaataatctgactatgtacaacacttgcagccaatttcttttatttacattcgttttcgcgcagcctggtgcatgtttgcattctgtatgtgtggaattcaactacacaaagtaaaggggtgtcgttatttttctatataatgaacctaatagatctgctccatgattatctggcaaactgttgcatcacatgatccttatccgcatagtgcttcaagtgagagcttctttgcaattcccggacacgggtctcccccaaaaacttcaggagctacagtcaccaagcaagattgcttgccaatgcagttcttttgaggagcatcatatgatttgtgagcatgacaacttccttctctaaagtttccacaagttccctgtggcaatccataactagcaaatttaatctgagagatgtttttcccaggtggacaccacaagtgagccttgggtctaacaactttgccagagtctagcatctgtctgttcttaagagttggttgcccttggtatatatcagcacacacacttgctgttgttcttttcaccaaagtaattccagtaggatcacctccccattcttcaaacacaaccagatagttcccacttgggttcagccacgaccgaggaatatggtaccatctctgggagggttctccacaatttgtccggcattttttatcagtgtaagttccagcataataacaatccccacagttaccgcgtgctatatatccaggccaatggcgtccctcgagccgaattc

SEQ ID NO: 259106 - DNA, 1093 bp, Zea mays
gcggccgccctttttttttttttttaattaccaataggaacagtgaattttggaaatgcagtgtagaacgaactttatatgtttttgtaaaacagtagtaggctatctttatttttgtaaattacacttccaatttgaatagacatctaaaatagtaaaatactaattaaagcttaatataattgttttcaatcatccacttgatgctccagaagttagagtcacatttgtaggcccaataagcccatccaaatttggcacgagagtatacatccacttggacttgcgtaaatttttgttggtcaatctttgatgcactctgaactttccaatcactactccattccccaacaaaaatgaggggtccattagatgtggtgagagagctaagatctgagactctttgctttttaataaaatcgatgttctgctgcacattcatgttggagaacctatccgaaaagagattgtagtagtgcacatcaatgaccactccgctgaaagctccagcaaaggacaaaagcacttttgaatctctatcaagagggttagacattatcacataggcactagaagtgtgtttcctcacagcatcataacctgcttgataatagcttttaaggctttccaaattaactccctgaggctcattcattagctctattgcaactagacctgaactgttagcatatctttcagctagaaagtctatggctgccacagtgtcagatatgtatgaatcatcccattctagatatccatctcttgaggcactgtgaggtcttccattttgtgagcctggagcagcatgcaggtccacaattaccttgattccatacttttctgcccatgtgaaggcattatccaacacttccaaggatcccccaacaaatggctttggtggtgttgggtctagggttgtccaccatcccacgggaattctcacagcatttaagccattttctgacatgaacttgaaatcatcttcagtgatatacgtgttccagtgatccctcatgattttggaagctttatctgggccatatccatttgtaatttggtattcacctcttataatgctcgagccgaattc

SEQ ID NO: 259107 - DNA, 776 bp, Zea mays
gcggccgccctttttttttttttttttttttttttaactgaaaacttatcataaatagtttttgatacacccaatcaaacaaaaatatatttaatacaatcacgcaagagaaaaataactctatacatgtgatactagtttcctctccaatctgataactctttattccttacgggcgatatgtgactagcaaaaccaaggttgtagagtctataatgacctcgctattttgtatgttttaagtgctgaacttctgctcagtggtgcttgctgtggccccaactgatgttacaaaattgcaaactgcacatttcacggatcttgctccatattggtacgcgagtagcatcctgcagttgccacagttgacatgtgccacctgatttgcttccaaagctagattgacagtgtgacaacaagaacattgcacacttgtcgcgccccggatgtacatgagtaaagtatggcaacctccacatactaactgggccatttctgtgccaggaggtggtactgctgtgacagcattgcaaacagcacagcacacagaggtggctccaactgggaacactagaaggtttctgcacccagaacagacaagttgactctgtacaccattagctggtggtgtatatggagctggtggtgttgggtatggggcaagtggaactggcattataaaggactaaaaaatgttgttatcgttctctgtgtagagtttggcagagaacaaagcactttctcccatttttttcagctcccctcgagccgaattc

SEQ ID NO: 259108 - DNA, 868 bp, Zea mays
gcggccgccctttttttttttttttttaacaattttcatgttttattacaaatccaactcaaagtctcacacaattataaataaggatgatacaagttgcatcatgcacctgaattaaataaggaatgtttacaatttgatgagttttatcacaacttgaggttaagcataattacaaagatgatgcaacagaactaacttgatatttctgctaccattttgccaatctagtagattaacacagccttggagaaaacattatggtaaaaaaagaaagcaacacatacacaggaaatctatctattagcaaagcttgaacctgcaaaggtccattcattagtcttacaatacaaaggaaggaatcaaagaggctttgcaccaccaccattctccagtgcattgttgactggtgttgaagaaccactctttctggagccactatgaccagtgattgtccttcccatgaacttccctgccttgctcagtccactaccaacggctccaagaccactcccaacaataccaactccagcaccgatgccgcttccaacaagcccggctccagcaccaataccacttcccacaagaccggcaccagcaacaacaccagtaccaaccagtccaacaccagagcctaccactgatactgctccatctagtgcatccatcgtgcttcctatcattccagcttctttcagtttcttcctttcttctagtatcttcttttctgcctctagtgcaaccagctgctcttccttgttaaactgataatacatgacctttactgttaaggttcctcgatccttcttatctttcaccttcagtgtatcaagtgagggcagcagcctcaattcctcgagccgaattc

SEQ ID NO: 259109 - DNA, 561 bp, Zea mays
gcggccgccctttttttttttttttatgcaaaacatatatatgcttgagcaggtttaattttgaataaactgtttgctatgaatacacaaggacaaggaattaaatgtctgagaacatagccacacaattcaataccattcatgtggtaaaattcaccattttgacttaaatctgtagtaaaggaaaaagtgagacgccacgctacttccagtgtggatttgcaataccctataaaatgtatcttgtacgtacaaaaatctcctgagacagccctctataaggcgtacttaaacaaaagctttcactatgaatggactttacaattctgccgcttgttaccacagtgtcataagctggaacgagcataccaatgatacaaattgttcaatcaatgcccaaacttgaataaggttcaattccacctgagcaatcatcatgaacacgccaaacagtctcgcccagaaggtttgccaccgacaagacagttaattgagggaaatagttctgttctgccactggaattgtattagttatgataacttcttgctcgagccgaattc

SEQ ID NO: 259110 - DNA, 817 bp, Zea mays; identical to SEQ ID NO: 366

SEQ ID NO: 259111 - DNA, 842 bp, Zea mays; identical to SEQ ID NO: 367

SEQ ID NO: 259112 - DNA, 1202 bp, Zea mays
gcggccgcccttttttttttttttttttttttaccaagaaacaaaatccatctgaagttgatagcaagcaagtccaacgcgaaaggaaaaggatgaagacatatatataaagaaaaccaaaagctactagcattaaatttctatgcctctttgatcaggttgagggcatcagcctctgtgggaagagcaggaattgctccctttttagtagttgtaattgctccacacgcatttgcaaacttgagtacttcccttaaccttgcttcatcttcaagtacggattgatcatcgacaatcttgcttaatagagcaccaacaaaggaatcaccagcgccagttgtgtcgaccgtgctgacatgaaaagcctccactgatccatggaaattcttggtatagtatctagagccatgttcgccaaaagtgacaaggagcaacttcaaattggggtgccacagggagagagcagatgcatcatcaattttgtcacttccggttaggaattccagttccacatcactgaccttgattacatcagccttgtcccatatgctgagtatttgctgacgtgcttcctcggcggagggccacaagggtagccgcaggtttgggtcataagagagcaagcatcctgcttccctggcaacttccattgccttcaggtgtgctgatctgcatggctccacgatcaagcttatcgatccataatggaatacttttgcagatctgatgagttcgagattgagatcttcgggcgtgaggagcatgtcggcgctggggtttctgtagaacatgaactcacgctctccgtcggcgcgtagggtcacgaacgccagcgcggtgcgcgcgccctggtcgaagttgatcccgtcggatcgcacgtcgttctccttcaggattccagccagcatgtgcccgaactcgtcgtcgccgagctttccgacgaacgccgcctttccgccgagcctcgcgacggcgatggcgacgttggcgggggcgccgccgggggccttgaggaagcccggagcctccgcaagggacacgccggagacggtggggacgaaatcgatgagcatctcgccgaagctcacgatgaggccgttgccggtgggaggaagagcgttggtggaggaagccatggtttgaaaatttgatttgaattgcagaagaatgctgtagaagctcgagccgctcgagccgaattc

SEQ ID NO: 259113 - DNA, 486 bp, Zea mays
gaaagaaatcattatgcaaaaccccaaatcatatgatattaccgttaatgcagaatacggtaaaaataaaacaaagaaaaccaagaaacaaaatccatcttaagttgacagcaagcaagtccaacacaaaagtgaaaaggatgaagatatatataaaatgaaaaccaaaagctacaagcactaaatttctatgcctctttgatcagcttgagggcatcagcctctgtgggaagagcaggaattgctccctttttagtagttgtaattgccccacacgcatttgtaaacttgagtacttcccttaaccttgcttcatcttcaagtatggattgatcatcgacaatcttgcttaatagtgcaccaacaaaggaatcaccagcgccagttgtgtcaactgtgttgacatgaaaagcctccactgatccacggaaattcttggtatagtacctagaaccatgttctccaagagtgacaagaagcaacttt

SEQ ID NO: 259114 - DNA, 878 bp, Zea mays
gcggccgcccttttttttttttttttgaagtcaaataaatatatttttacagacaaagatttgtttacaaaattcaatcctttttgtttctttgtgtgagtaagatggaattgaagtgaataaaagaattaattttggttgtaataaccaagaaaggtcttggcagcatccaagctagggaaataagtgggttcaaggaatatcttggtgaacccattatcggcctcggagctccccatcataaccgtcacaacctgcttatacgcgtagaagaacctcttcatcgccacctcaatcccctgcatcccctgcaaaacatgaaccttccctttctctttctccgagtaaaccttcatcgccgcctccatcatcccgggcccacccttggggtccacctccacctccaatatctccggcaccttctccctcagattcctacacaccctcgccacctccacaagctccctcgacctgaagcaaaacgccaccgtttcgcccgcagttctcatcatccctaactccttcttcagcctcaagaaatcctctggatccatcatgaggttcatgtccccaacctccgttaacaacttccagatccgctccaccgcatggcactcactcgcggccttctccaacgcctttttctccaccgactccgttactctctccagcagcttcttcaccgagcgcgtccaacactcggcgatctgctgcgtggcgtgcagcgtcttgttctcgtggttccccacgtaatcatcaaacggcgtcgtctccaacgagtgaatctccctcggcctgcaaaccgcgtcgaagagaaatatcttctttcccgcgatattcgcctctcctaaacctaaggtgtagctcgagccgaattc

SEQ ID NO: 259115 - DNA, 433 bp, Zea mays
caaataaatattattttacagacaaagatttgtttacaccaacctattacaaaaatttagtcctttttttttttctctttgttttcccgtttgtgtgagtaagtatatatgactaggaattaattgattaattttttaattaactagcagggaaccccattttgattattattttcccaataataagcgagaaaggtcttggcagcatctaagctagggaaataagtgggttcaaggaatatctgagtgaacccattatcggcctcggagctccccatcataaccgccacaacctgcttataggcgtagaagaacctcttcatcgccacctcaatcgcctgcatcccctgcaaaacatgaaccttctcgaacccgttccttttctctttctccgagtaaaccttcatcgccgcctccatcatcccgggcccac

SEQ ID NO: 259116 - DNA, 1407 bp, Zea mays; identical to SEQ ID NO: 276

SEQ ID NO: 259117 - DNA, 723 bp, Zea mays
gcggccgccctttttttttttttttggatgaacaaatgatcctcaactcttttcaaaaagccaattgacccattttgaagtattggcaattgtcacacattgtcttcacccgactgataaaagataaaaacaatgcaattcctattaaaatatattaaccgtaccaatctcaaattctcaatcgcgcttatttatggcttctagagttcattctgacaaataatttattccaaaaactcactgagcagttgttatagaaaacccaaggcatgagggaaagaatcagttggcaccataaatccacttctctgcattgctagtgaaactaaccaactcctctggcttaaaccacaacttaatctcatccttggcagtttctggaccatcactcccatggatgatgtttcttccaacaacaacagcaagatcacccctaatggttccaggttctgatttctgtggatctgtggctccaattagctttcggccataggaaataactccctgtccttcccacaccattgcaataacagggccagagcttagaaaatcacacagcccatcgaagaagggtctttctttcaggtcgtgatagtgcctttgggcaaattcctttttaggaatcactactttaattcccacaagcttgtaccctttccgctcaaaacgagatataatctcagaaatctgaaataaagagaaaacaaatctcgagccgaattc

SEQ ID NO: 259118 - DNA, 1188 bp, Zea mays
gaattcggctcgagcaacacttcatttcttactctcactgaaaaaaaatagcttgttcacaccatcctattttttcaactcatatatacaaatatatataacatggcttctaccttctctcgaagcctagcacttgtaagcttttacattgtcgtttgtgctgccggtaacttgaaccaagactttcagcttacgtggggagatggtcgtgctaaaatactcaacaacgaaaatcttctcactctctcccttgacaaggcctctggctctggcttccaatccaaaaacgaatacttatatggcaagattgacatgcagctcaagctcgttcctggaaactctgctggcactgtcaccgcctattatctgtcttcaaaaggatcaacatgggatgagattgacttcgagttcttggggaatctgagtggcgatccatacattctacacaccaatgtgttcagccaaggcaagggcaacagagagcaacaattctatctctggtttgacccaactgcagatttccacacttattcaattctttggaatccccaacgcattgttttttctgtggatggcacccccatcagggaattcaagaatttggaatcaataggagttccttttccaaagagccaaccgatgaggatatactcaagcctatggaacgctgatgattgggccacaaggggtggactcatcaagactgactggtccaaagctcctttcactgcatcctacagaaacttcaacgccaatgcttgtgtttggaactctggaaaatcctcatgcaaatcaaattcttcaccttcctctgcatctcccactaatgcatggttatcacaagagcttgattccactgctcagcagaggttgcgttgggtgcagaagaactacttgatttacaattactgcaccgacaacaagagatttcctcaaggccttccactcgaatgcaaacactcctagagcctataggactcacatctcgcactacccataacaagtgttgcaatataatcttatgaaccattcttttaatttttgtaaaaaaaaaaaaaaaagggcggccgccttgagtgctatagtgctgttattatacaaatatacaatgtaaaaatatcccatgtaaaataatgcttctgttttttttttaaaaaaaaaataatgcatctcttgtttgtatgactg

SEQ ID NO: 259119 - DNA, 492 bp, Zea mays
cttagcatcatttcatatatacaaataacatatatggcttcttccttctctccaagcctatcatcacttgtgcctctgcttgtgagccttttcattgtggtttgtgctgccggtaacttcaaccaagactttcagattacgtggggagatggtcgtgcaaaaatactcaacaacgccaatcttctcactctctcccttgacaaggcctctggctctggcttccaatccaagaacgaatacttatttggcaagattgacatgcagctcaagctcgttcctggaaactctgctggcactgtcaccgcttattatctatcttcaaagggatcaacatgggatgagattgacttcgagttcttggggaatctcagtggtgacccttacattctgcatactaatgtgttcagccagggcaagggcaacagagagcagcaattctatctctggtttgacccaactgcagatttccacacttattcaattctttggaat

SEQ ID NO: 259120 - DNA, 437 bp, Zea mays
cgcatcaaaaccgattggtccaaagctcctttcactgcatcctacagaaacttcaacgctaacgcttgtgtttggaacagaggaaaatccacatgcaaatcaaattcaccatcctctaatgcatggctatcacaagagctggattccactgctcagcaaaggctgagctgggtgcagaagaattacatgatttacaattattgctccgacaaaaacagatttgctcaaggccttccactcgaatgcacacattcgtagaggacttcatcttccactagcacaagtgttacattataatttcatttaccattcttttattttatttttttttaattcctgttcacagtttgtgctcttttacgatgtaaaatatatcgcatgtaaaataacggttctgttatttggatgtcaaattttttcatgatttttgtacttgt

SEQ ID NO: 259121 - DNA, 1733 bp, Zea mays
gtccgcacacggtggtaccgagacgagaagccgctaaaacccaagcccggcccgagccgaacctgaacctgaggtggagagatcgcacgcgccctctgccgcttgttcgttcctcgcgcttgccaccaggcaccaccacacacatcccaatctcgcgagggcaagcagcagggtctgcggcggcggcggcggcggcggcagcgcttccggctcccctttcccattggcctccacgatggcgctccgcctcaacgacgtcgcgctctgcctctccccgccgctcgccgcccgccgccgccgcagccgcagccgcagcagcggcaggttcgtcgccgtcgcctccatgacgtccgccgtctccaccaaggtcgagaataagaagccatttgctcctccaagggaggtacatgtccaggttacacattcaatgccacctcacaagattgaaattttcaagtcacttgatgattgggctagagataatatcttgacacatctcaagccagtcgagaagtgttggcagccacaggatttcctccctgacccagcatctgaaggatttcatgatgaagttaaggagctcagagaacgtgccaaggagatccctgatgattattttgtttgtttggtgggagacatgattaccgaggaagctctaccaacataccagactatgcttaacaccctcgacggtgtcagagatgagacaggtgcaagccccactgcctgggctgtttggacgagggcatggactgctgaggagaacaggcatggtgatctgctcaacaagtatatgtacctcactgggagggtggatatgaggcagattgagaagacaattcagtatcttattggctctggaatggatcctaggactgagaataatccttatcttggtttcatctacacctccttccaagagcgggcgaccttcatctcacacgggaacactgctcgtcacgccaaggactttggcgacttaaagcttgcacaaatctgcggcatcatcgcctcagatgagaagcgacatgaaactgcgtacaccaagatcgtggagaagctgtttgagatcgaccctgatggtaccgtggtcgctctggctgacatgatgaggaagaagatctcaatgcctgcccacctgatgtttgacgggcaggacgacaagctgttcgagcacttctccatggtcgcgcagaggcttggcgtttacaccgccagggactacgccgacatcctcgagttcctcgtcgacaggtggaaggtggcgagcctgactggtctgtcgggtgaagggaacaaggcgcaggactacctttgcacccttgcttcaagaatcaggaggctggaggagagggcccagagcagagccaagaaagccggcacgctgcctttcagctgggtatacggtagggacgtccaactgtgagatcggaaacctgctgcggactgcttagacaagacctgctgtgtctgcgttacatagttctccaggttttgaccagatggtcccgtgtcgtcttatagagcgataggagaacgtgttggtctgtggtgtagctttgttttttattttgtatttttctgttttgatgtacaacctgtggccgcatgaactggggcgtggagatgggagcgaccatgccgtactttgtctgtcgctggcggtgtgtttcggtatgttatttgagttgctcagatctgttaaaaaaaaaaaaaaaaagggcggccgcttc

SEQ ID NO: 259122 - DNA, 415 bp, Zea mays
attcaaccgtggttccatttcacggtcattggttaattatctgttgttcatttcgttttttttttctttaaatataggccacttcttataaatatgtaggagggctaatatgtactttctttactgtgtccttttcaggctctggaatggatcctaggactgagaataatccttatcttggtttcatctacacctccttccaagagcgggcgaccttcatctcgcacgggaacactgctcgtcacgccaaggactttggcgacttaaagctcgcacaaatctgtggcatcatcggcctcagatgagaagcgacatgaactgcgtaaccaagatcgtggagagttgttgagacgacctgatgtacgtggtgcctgctgcatgtgagagagtccatgctgcactgagttgcgtcagc

SEQ ID NO: 259123 - DNA, 487 bp, Zea mays
cccacgcgtccgggctgacatgatgaagaagaagatctcaatgcctgcccacctgatgtttgacggtcaggacgacaagctgtttgagcacttctccatggtcgcgcagaggcttggcgtttacactgccagggactacgccgacattcttgagttccttgttgacaggtggaaggtggcggacctgactggtctgtcgggtgaggggaacaaggcgcaggactacctctgcacccttgcttcaaggatccggaggctagacgagagggcccagagcagagccaagaaagcaggcacgctgcctttcagctgggtatatggtagggaagtccaactgtgaaatcggaaacccattgcgactgcttgagttggagcatagtctatcatgcaccctaagacgcatcgcgacgacaagacctggtgtgtcgcgtgacatagttgttcaggttttgaccaaatggtctgggagcatttgttttgccttgtg

SEQ ID NO: 259124 - DNA, 1092 bp, Zea mays
gaattcggctcgaggaagcttgaacgttcttgagtcacttgacctctcgttgaacaaactgtcaggagccattcctccagggctaagcaatatgttgttcctctcgttgaacaaactgtcagggttgtactactgtgtgatcgctggagtcatttttgggttctggctgtggtacgggacgctcttctccgttgcgaagttgaggtgctctttcttgtttgttgatcgcgtacagtacagagttatgcagaaggtgcgtcctaccaatcattttttttatatccaaagattttgatgaactgctcaagatggcagctgccgacaaaagggaagagttagaagtatttacaaaagaggtcattcgctttggaaactattgcaaggatcctcagtggcataacttggaccgctactttgaaaagctggcatccgaactagccccacgaagttatctgaaaggaaaagcagaatcagtgatgcaaaaactggttacatgtgttcaaaatacagttgaatcatatcatgaattgcatgctttggatagattggaacatgattatcgccttaaacagaaagaataggatggtttgagtttaagaggagacagtctggatatactgaagcaggagacgattcttgattgtggtgttttgttgaaacattaaacaaaatttctttgtcctaatgatatttcttgtgtttactttatcattgcagacagacccaccctggtaaccccatgtatgctatgggaattgagaatacattctgatgtatttggttaaatctatcattcttattcctgcaatcagttgatccaagaggattccggctctcatcaagtgactcctccccctcacgatgactttgcggacatatgtctcaattctagtggtggagctacgaacaacattccgatgtcctgatcgagagcgatcgagctaatgttcgaacttgtgaacaaaaaatgtgaacttatgtatttggacttatgtgaatttgtgaacttatgtatttggacttgtgtgaatttgtgatatgaacatatatccatgtgtttgaaatctaaaaaaaaaaaaaaagggcggccgc

SEQ ID NO: 259125 - DNA, 2588 bp, Zea mays
gaaggtttggaaacgtggcgtggtttctatcaaagcataaggcccacacagatgggtctttctctgaatattggttagataccatcgctctcatttattgggtcatctaccttctatttttcaaacttgatacatgaccataatggaggagcacactacattctacatcatgatgcctatggatgtagtttgtggcatcactatttggtcttatctgaaaattgagtttgtgtaatttctctgtatattcgcagatatgtcctctactgcatttattgagcccctccctgtgattgattttgttgctcagcttcttaacagagatatctcagttaggccattgtctgattctgatcgcgtgaagattaaaaaagccctacgaggtgtgaaggttgaggtcactcacaggggaaacatgcgcagaaagtatcgcatttctggcctcacctcacaagcaacaagagagctatcattccctgttgatgatcgtggtactgtgaagactgtggtgcaatacttcatggagacttatggtttcagcattcagcacaccactttaccgtgcttgcaagtgggcaatcagcagagaccaaattatctgcctatggaggtctgcaagatagttgaggggcagcgctactcaaaacgacttaatgagaaacagatcactgctctactgaaggtgacctgccagcgccctcaagagcgtgagcaggacatcttgcagactgtgcatcacaatgcctactccgaggatccttatgcccaggaatttggtataaagattgatgagcgtcttgcatccgttgaagctcgtgttctgcctcctccaaggctgaaataccatgatagtggcagagagagggatgtattgccaagagttggccagtggaacatgatgaataagaaaatggtcaatggtggtagagttagcagctgggcatgcattaacttctcacggaatgtgcaagatggtgctgccgggagtttctgtcatgaattggctttgatgtgccaagtatcaggaatggattttgtacttgaacctgtgctgtcaccttgctatgcaaggcctgaacttgttgaaagagcactaaagggacgctatcaagatgcgatgaacatactcgggcctcagggccgagaactcgacttgctgattgttatactgcctgacaataatggttctctttacggggatgtcaaaaggatatgtgagactgatcttggattggtctcccaatgctgtctgactaaacatgttttcaaggcgaacaagcatcagtatcttgcaaatgttgccctgaaaataaatgttaaggttgggggaaggaatactgtgcttgttgatgctttggcaaggagaatcccccttgtcagtgacatagcgactattatctttggtgctgatgtgacccatccccatcctggggaagattctagtccttccattgcagctgtaagtgaagacctatcctgacaaagaaatgctacctttcagttgaagctttactatttttttctcactgtttttctcctaggtggttgcttctcaagactggcctgaggttacaaagtatgcaggattggtgagtgctcaagcccatcgtcaagaattgatacaggatcttttcaaggtatggcaagatcccgaaagggggactgtctctggtggcatgatcagggagcttctcatatctttctggagggcaactggacagaaaccaaagaggatcatattctacagggatggcgtcagtgagggacagttctaccaagttctgttgtatgaacttgatgccattagaaaggcctgtgcgtcattggagtctgactaccagcctccagttacttttgtcgtggtccagaagcgtcatcacaccaggttgtttgctaataatcacaatgataatcgtgctgtcgataaaagcgggaacatactgcctggcaccgtggtggactcgaagatctgccatccaactgagtttgatttctacctgtgcagccatgctggcattcagggaacaagccgccctgcccattaccatgttctgtgggatgagaacaactttacggctgatgggttgcaaactctcaccaacaacttgtgttacacgtatgctaggtgcacacgctcagtatcgattgttcctcctgcatactatgctcacctggcagccttccgagctcggttctacatggagccagatacgagtgacagtggatctatggcaagccgtggccctccaccaggggggcgcaacaccaaggctgctggtgttgggaatgttgctgtgaggccattacctgccctcaaggaaaacgtgaagcgggtcatgttctactgctaagactgatgctgttaaggcagagctaccttttattattacagtatatcgtgaagactagagtattttttccatgtacttgatgatgctgagctaccttttattatgtcgtacgatatatatgcgtggtactggttacagtaactttagttgtgtgttccatcgtgctagtctctagctggtgggcgggtggtgttacgtgaaaaacattctcctctaaaattcatcaaatttggacat

SEQ ID NO: 259126 - DNA, 1115 bp, Zea mays
cccacgcgtccgcccacgcgtccgcggacgcgtgggttcaagaccatctgaaaagcgtggaggggcttggatgaatgtagtcttttctcgaagtgcgcgtgctagctcgcaatggtttggctgctaggctgcctgttgcccatatagtgtgcaatcagactccaccagttggcgagaagcccagtctcatgaccttccgtgaggttgaaactgtgttccatgaatttgggcacgcccttcagcacatgcttactaaacaagatgaaggctttgttgctggcattcgtggagttgaatgggatgctgtagagttaccctcccagttcatggagaactggtgctatcacaagaatactcttttgagcattgcaaaacattatgaaaccggtgaaactcttccagaggaaatttatgcgaagcttgtagctgcaaagaatttccgtgctggcaccttgagcctgcgtcagatacgatttgccagtgtagatatggagcttcatacaagttatgaccccaatggctcagtgtccatatatgatgtggaccaaagagttgcagaacggacacaagttcttgctcctctgccggaggacagattcctgtgcagctttagccatatttttgcaggtggctatgctgctggatactacagttacaagtgggctgaagtactgtcagctgatgcattctcagcttttgaagacgctggtttggatgatgagaaggcaatcgaggaaactggcagacgattcagagacactgttcttgcgcttggaggtggaaagtctccgcttgaggtgttcgtttcattccgaggacgggagccttcgcctgaaccacttcttagacaaaacggcttgcttcctgttgctgcctagtgccccaaagatttctctgttatttatgcttaaacagggaccattttcatccggtcaattatttgatgaagatagacatttcacccttgtttgtttaccctcctctagattattaaataagttagaagacaaacaaacaacatatattattaatgtatgtgttttttatatgtgtctagattcatcgtctgctatttgaatatacccataaaaatgaaatgaatccccgttttttag

SEQ ID NO: 259127 - DNA, 593 bp, Zea mays
  unsure (1)..(593): unsure at all n locations
atttttataatataggcactgtggtggacttttttatttgccatccaaccgagtttgatttctacctgtgcagccatgctggcattcatnacaagccgtcctgcccattatcatgttctgtgggatgagaacaaatttacggctgatgggttgcaaactctcaccaacaacttgtgttacacgtatgccaggtgcacacgctcagtatcaatcgttcctcctgcatactatgctcatctggcagccttccgagctcggttttacatggagccagatacaagtgacagcggatctgtggcgagcggtgctacgacaagccgtggccctccaccaggggcgcgcaacaccagggctggtgctgcgaatgttgctgtgaggccattacctgctctcaaggaaaacgtgaagcgcgtcatgttctactgctaagattgacgctgcgctgatgctgtgagcaagcaattatcgttatggtggtgatgctaggacaccgttatgcaccggtaactttaatacattttgtactgtaactacttgtatggcattggaaactgtttgcgatatactcctattaagatgggcttgtctggatt

SEQ ID NO: 259128 - DNA, 569 bp, Zea mays
ttgtttttgatgatctttcttttgaagacggtctaacatataagcgcatgatttagatgaacggaattactattgtgccatttctgaagaatcttactgatttctcttgccttcttagaacaacatgggaagaagtgatgatgacagtccatcgccgccaagaggtcacaagagaagaacttgcagcccaagtcctcgtggtagttatggaggccatggcaagcgccccacaactaatcttatggtgacgaatcttggtccggattgtaggattctaactctcatcaagtgactcctcccctcacgatgactttgcggacagatgtctcaattatagtggtggagctacgaacaacaatccgatgtcctgatcgagagcgatggagctaatgtttgaacttgtgtgtttgaacttgtgaactaaaaatgtgaactatggatgtgaatttatgtgaatttgtgaaattatgtatttgaacttatgtgaatttgtgaacttatgtatttggacttgtgtgaatttgtgatatgaatatatatccatgtgtttgaatttgtcctccgaacat

SEQ ID NO: 259129 - DNA, 716 bp, Zea mays
atactgcctgacaataatggctggctgttcttgtaatctcaaaaggatatgtcacactgatcttggattggtctcccaatgctgtctgactaaacatgttttcaaggtgaacaagcagcagtatcttgcaaatgttgccctgaaaataaatgtgaaggttgggggaaggaatactgtgcttgttgatgctttggcaaggagaatcccccttgtcagtgacatagcgactattatctttggtgctgatgtgacccatccccatcctggggaagattctagtccttccattgcagctgtggttgcttctcaagactggcctgaggttacaaagtatgcaggattagtgagtgctcaaacccatcgtcaagaattgatacaggatcttttcaaggtatggcaagatcccgaaagggggactgtctctggtggcatgatcagggagcttctcatatctttctggagggcaactggacagaaaccaaagaggatcatattctacagggatggcgtcagtgagggacaattctaccaagttctgttgtatgaacttgatgccattagaaaggcctgtgcgtcattggagtctgactaccagcctccagttacttttgtcgtggtccagaagcgtcatcacaccaggttgtttgctaataatcacaatgataatcgtgctgtcgataaagctggaacatactgcctggcaccgtggtggactc

SEQ ID NO: 259130 - DNA, 2081 bp, Zea mays
tcttttacgcgtccgcccacgcgtccgcccacgcgttctcccacgcgtccgcggacgcgtggggttttagtatccagcacaccactttaccatgcttgcaagtgggcaatcaacacagcccacattatctgcctatggaggtttgcaacgatagttgaacgacagcgttactcaaagcgactcaatgagaaacaaatcactgctctactgaaagtgacctgccagcgccctcaagagcgcgagctggacatcttacagactgtgcatcacaatgcatactatgaagacccctatgcactggaatttggtataagaattgatgaacgtcttgctgcagttgaagctcgtgttctgccaccaccaagacttaaataccatgatagtggccgagagaaggatgttttgcccagagttggccaatggaacatgatgaataagaaaatggttaatggtggcagagtgagcaactgggcatgtattaacttctctcggaatgtgcaagatagtgccgctagggggtttctctcatgagctggcagtcatgtgccaaatatcaggaatggattttgctcttgagcctgtgctgcctccagtgactgcaaggccagaacatgttgagagagcgttaaaggcacgttatcaagatgcaatgaacatactgaggccacagggaagggaacttgatctgctgatcgtaatactgcctgacaacaatggttctctttatggggatctcaaaaggatctgtgagactgaactcggattggtctcccagtgttgtctgactaaacatgtttttaagatgagcaagcagtaccttgcaaatgttgcactcaaaataaatgttaaggttgggggaaggaatactgtacttttagatgctttgtcaaggagaatcccccttgtcagtgacagaccgaccataatatttggtgctgatgttacccatccacatcctggagaagattccagtccttccattgcagccgtggttgcttcgcaagactggcccgaggtcaccaaatatgctggactagtgagtgcccaagcccatcgccaggagctgatacaggatcttttcaaagtatggcaagatccacagagaaggacagtaactggtggcatgataaaggaacttctcatttctttcaagagagcaactggacagaagccccagaggatcatattctacagggatggtgtcagtgagggacagttctatcaagtattgttgtatgaacttgatgccatcagaaaggcctgtgcgtccctggagcccaactaccagcctccagttacttttgtcgtggtgcagaagcgacatcacactaggctgtttgctaataaccacaatgatcagcgcacagtcgatagaagcggaaacatactgcctggcaccgtggttgattcgaagatttgccatcctactgaatttgatttctacctgtgtagccatgctggcattcagggaacgagccgccctgctcactaccatgtcctgtgggacgagaacaagttcacagctgatgagctgcagactctgacaaacaacctatgctacacgtacgctaggtgcacccgctccgtgtccatcgtgcccccggcgtactacgctcatctggcagccttccgagctcgcttctacatggagccagacacctctgacagcgggtcactggccagcggtgcccgtggccccccacccggtgcggcacgcagcagcacgagaggggccgggagtgtcgaggtcaggcccctacctgctctcaaggagaacgtgaagcgtgtcatgttttactgctgagacgctggtgggctgccttcgccaaggaaaatgccctggagcattcccatgtacccgcactgtttcggtgatacagtactatctaacgccgattttgcgcgttaagacttccagtgatctgggaaatttcttgtacgactgttgtagtgttgtgtattcgtaatgtgatcacgcggcagttcttctaggagcttagtgccgtgtaaagtatctgttgtaagttgtaacctgtcaccctctactgctatgtcatgatgaaccaaattatttgttgtct

SEQ ID NO: 259131 - DNA, 610 bp, Zea mays
ctcgcttctacatggagccagatgcctgggtcagttgctcaatggccagtggtgcccgtggccctccaccaggtgcggcacgcagcatgagaggagcggggagtgttgcggtcaggcccctacctgctctcaaggaaaacgtgaagcgtgtcatgttttactgctgagatgctgagctaccttcaccaagaaaatatcctgacttgttccatgtacccgcactgtttcggtgatactatctgacaccgaatttatgcattaagtcttccagtggtctggagattttaagtaacgcctgtttttattcgtgagttgtaacgctgcagttcgaggagcttcagtgctgtatgatgtgtaaactatttgttgtaagttgtaaccaattgttgtaagttgtaaccagccactatgttataatcctgtttgtttcagcttttaaaaaaaaaaaaaaaaaaaaaaaaaaaaaaaaaaaaaaaaaaaaaaaaaaaaaaaaaaaaaaaaaaaaaaaaaaagtacgcctccaaaaaacgtcataacttttctataatgaaccctaaattcaattaactgccacttcgttttacctcgtttttattaggcaaaaccctgt

SEQ ID NO: 259132 - DNA, 998 bp, Zea mays
aaaaaggtactgattgatatgagcgtgcatacagcatatgtgaatgtcatccgaggtgctggacatttcatctatattgagaaccagtacttccttggctcttcatttaactgggactcacatagagatgttgaaaatgacaatgcacatgatgtatgagataatctataaggccttgaaagaagtaggactagatggtacatatgagccacaggattacctgaattgctcctgccttggtacccgtgaagctgaggacactacttgcacatctagtggaccattctcagccagttccccacaggaccaagctcggaagaataggagattcatggtgtatgtgcactcgaaaggcatgattgtggatgatgaatatgtgataattggatccgctaacatcaaccagagatccatggaaggaactagagatacagagattgcaatggctgcataccaaccccagcatacatgggcaaatatgctttctgctcctcgtggacagaacaacatgggaagaagtgatgatgacagtccatcgccgccaagaggtcacatgagaagaactcgcagcccaagtccttgtggtagttatggaggccatggaaagagcaccaagctctgggaatctctcttgttacatcttcacgagccatagctcttgttattgggcctgctattggaggcttccttgcacaggattccggctctcatcaagtgactccttcccctcacgttgactttgcggacagatgtctcaattctagtggtggagctacgaacaacaatccgatgtcctgatcgagagcgatggagctaatgtttgaacttgtgtgtttgaacttgtgaactaaaaatgtgaactatggatgtgaacttgtgtgaatttgtgaacttatgtatttggacttatgtgaatttgtgaacttatatatttggacttgtgtgaatttgtgatatgaccatatatcaatgtgtttgaaatatgtattgtatgtgat

SEQ ID NO: 259133 - DNA, 613 bp, Zea mays
atgattacttggggatatcattgcatgcacatgatccagaagaattttggaagttggatgacacaatcatcaaaaccattgagactgctcccaacaatggactgaagaaagcaaaagaaatcattcaacgtattcgccgaagagaactctacaagttttgcaaccagtattctgttccaaaggacaaactggagcatttcaaaaatattactgcacaggacatagtttgttcgcagaaatcttctgaggtgctgctgaaggaagaggatgttgcagtaagcaatgttaagatagatcttactcgtggaaaagataacccccttgaaagcatcaagttctttaaggattccggctctcatcaagtgactcctcccctcacgatgactttgcggacagatgtctcaattctagtggtggagctacgaacaacaatccgatgtcctgatcgagagcgatggagctaatgcttgaacttgtgtttgaacttgtgaactatggatgtgaacttgtgtgaatttgtgaacttatgtatttgaacttatgtgaatttgtgaacttatatatttggacttgcgtgaatctgtgatatgaacatatgtcaatgtgtttgaaa

SEQ ID NO: 259134 - DNA, 682 bp, Zea mays
atattatgtatgatataatctataaggccatgatagatgtaggactagatggtacatatgatccacaggtttacctgatttttttctgccttggtaaccgtgatgccgaggacactacttgctcatctagtggaccattctcaaccagtgacccacagataaatacaattatgctgcagcttggatatccaatcaggaccaagctcggaataataggagattcatggtgtatgtgcactcgaaaggcatgattgcggatgatgaatatgtgataattggatccgctaacatcaaccagagatccatggaaggaactagagatacagagattgcaatggctgcataccaaccccagcatacattggcaaatatgctttctgctcctcgtggatagattttcgggtacaggaaaatacagtgtacgtgttgaaactgttatcctgccccaggttgggatagacggtggtacattcgtgttggtagaactgtgagaagaaaagatgggaaaactttgctttcttggctgtgatgattatctgctcaaacaagacatgcaaattgcaaaactcttaaaggattagattagttctatttgttcatatagttctacagctagctgtttcttgctttgttcatggagtgcaatactgataagatcatgatggatgttgtgtgtgtttta

SEQ ID NO: 259135 - DNA, 514 bp, Zea mays
  unsure (1)..(514): unsure at all n locations
gatagtagtttatgatggaaaggggctgttcagtgctgcttgtgtttggtggtggggaggactgcacagttcgcatctggagcatcaaaacaggcgagctaatctttgcgcggagcatggcaaacagtcccttcacgacatcttgttggcccaaaagcagccatggcttgtgtagtccttggctgtttgatgtaaacccgtcagtctgtggaagtcagacgtcccctagagctagggtgtccattcttgacatgtttctcttagtgataggtggatactgtctagctaggaacagagtcttgagggattgatgggcgcatgcatcttcaattcctgtgtggtggattaccactgggacaatctccaatgcttgtgaacttatgtgtttggacttgtgtgaatttgtgatatgaacatatatccctgtgtttgaaatctaaattggatgtgataatttgtgctgcccgtggnannaaannnnnnnggnaaaatataataaannnnngaaannaaa

SEQ ID NO: 259136 - DNA, 904 bp, Zea mays
ttgttcccgagctgcaccaagccccagatgtccaacatcaagcccctgtggtggcaacaccatcttcgccaggagctggctcgtcctcgcagcctgggaaggctgaggtgagcactggacaagtccagcaacagttccagcaacttgcgattcgtaaccaaagcttagccagccaagctggtcagatggcaccagcgtcaagcaaatctgttaggttcccattgcgccctggcaagggtacgcatgggtccaggtgcattgtgaaggcaaatcatttctttgctgagctgcctaataaagaccttcaccaatacgatgtatcaataacacccgaggttacttcacgcggcgtcaatcgtgctgtcatggcagagctagtaaaactttacagacactcccatttggatggggcgtctgcctgcatacgatggaaggaagagtctttatacagctggagcgttgccatttgcttcgaagacattcgaaattactttgcaagatgaggaagacagtcttggtggaggccaaaggcgccagagggtatttcgggtgaccatcaaatttgctgctcgcgctgatctccaccatctggctatgtttcttgctgggaggcagccagatgcccctcaagaggctcttcaagtacttgacatcgtgctacgtgaaatgcctactgccaagtattgtcctgttggtagatcattttattctcccaagttagggagacctcagcaacttggtgaaggtttggaaacttggcgtggtttctaccaaagcataaggcccacacagatgggtctttctctgaatattgatatgtcctctactgcattttttgaggccctccctgtaattgattttgtttctcagcttcttaatagagatatctcagttagaccattgt

SEQ ID NO: 259137 - DNA, 853 bp, Zea mays
aattactgataagaaagaaattgagggtttacctgctacagcccttggtttagcagggcagactgctgtgtcaaagggccatgaaaatgctacagctgagaatggtccttgggttatcacgttggatgcaccaagctatattcctgttatgcaacatgctcgaaacagagagctccgcgaagaagtttatcatgcttatctgacccgcgcctcaagcagtgaacttgataacaccaacatcatctgccaaattctaaagttaaggctagagaaggctaaacttcttggctacaagaactatgctgaggtaagcatggctcagaaaatggcaactgttgagcgagtagaagagcttctcgagaagctgcgtgctgcttcctgggatcatgctgtcaaagatatggaagatctaaaagtctttgcgaaagattctggttctcctgaagctaatgatttgactcactgggaccttaccttctggagtgaacgactgagagagtctaaatatgatatcaatgaggaagagctgcgcccttattttgcactacccaaggttatggatggcctcttcactctggcacataagctttttgaagttactgttgaacctgcagatgggctggctccggtctggcacagtgatgtcaaattttattgtgtcaaagactcttccagtagccctgttgcttacttttacttcgatccttattcaagaccatctgaaaagcgtggaggggcttggatgaatgtagtcttttctcgaagtcgcgtgctagctcgcaatggtttggctgctaggctgcctgttgcccatatagtgtgcaatcagactccaccagttggcgagaagccc

SEQ ID NO: 259138 - DNA, 514 bp, Zea mays
cggacgcgtgggcggacgcgtggggttttgcaaccagtattctgttccaaaggacaaactggagcatttcaaaaatattactgcacaggacatagtttgttcgcagaaatcttctgaggtgctgctgaaggaagaggatgttgcagtaagcaatgttaagatagatcttactcgtggaaaagataacccccttgaaagcatcaagttctttaaggattttgggtgcgacgagaagttccccatcacagatgatagggttagccacttgctacctgcatacaacgaggatagaattgtgagggtctatgccaagaagcctgagttggttgatgtggtgtcagaagcctttgagaatctccaagatgagaatgtatggtgagaaaactcaagtgcatgagacgcccaagagaaagaggattagatccaactaggcagttggattttgtctaatcgcactttagataacatacaaatacaacacaggaaaatagcttcacaaacaagactatataga

SEQ ID NO: 259139 - DNA, 844 bp, Zea mays
cttattggttcagcgttcagcacaccactttaccggggttgcatgtgggccctgagcaaggaccaaattatctgcctatggagggctgtcagagagctgaggggcaccgctactcaaaacgacttactgataaacagagcactggtctactgaaggcgacttgccaacatccccaagcgcgtgagaaggacatcttgtagactgggtatcacaatgactactccaaggatccttatacccaggacttgggactaacgattgatgagcgtctagcatcctttgaagctcgcgttctgcctcccccaagggtggaataccctcactctgccagagaaaggcatgacttgccaaaaggcggccagaaccacttgccaagctcatgctcttgccgccagtgctatgtggccgttattggatacctctacttcaccaggatcattgtgtatgccctcaagacaattactaactacaagtacagatgggtcagcgttgcagccgaggaggtcgccaccatggcattctacatgttcatgttctacacgttcaggccagctgagaggaaccagtacttcgcacttgacgaggatgatgaggaagccgcagagatggcgctccgtgaggaggagtttgagctctagacgaccacgtggatgtccaatgacatgggaatgcagccatctcccattcattttctcctcgatgtgatgttgatcatactatacagattcagggtttagctaatatatgtctacgtattgtggtaaatcttctcaactccttttagttttggaagctgccaacgagacttgtgatgactagatttcttgtgttgcaaaagtaaagg

SEQ ID NO: 259140 - DNA, 526 bp, Zea mays
tcgactacccgcaacctcgccgcgcgctcccgccgccacaacctcgccggcgccgcgcgcgccccgcctccaccccgcgcggcgccggcaaatttctagggttcgtgtccaaacagccagttcacccgttccttatcttccgtcgttcagctggcgtcctctctctctcttgtcgcgacgactgcgtgacctccccgcccccgccgctctacgccaggtgcccaggtcttcctcgggcccttcgccgaagagcagccaacaggtaagcatggctcagaaaatggcaactgttgagcgagtagaagagcttctcgagaagctgcgtgctgcttcctgggatcatgctgtcaaaggtttgaacttagaagatggccatgcacactgcctcgacgtcatcttcaccagagcagactactgatgttgatggaagtaccactggtgatgtcaccttctaagtataacttgggattccggctctcatcaagtgactcctcccccttacgttgactttgcggacagatgtctc

SEQ ID NO: 259141 - DNA, 337 bp, Zea mays
ggctcgagtgcgctgattgggaccgggtggtcgttcctgaagccattcctgcaggagaggagaagaaagtgctcatggtggtgatccctctgcaggttgcagctaacatcgctgctgctgtggtcggcgagaccgggcctttcttgcagggatgggtgacatggaaccagatcttcttgtttgttgatgtcgcttgctgctgtgccgtgctcttcccagtggtgtggtcgatgcgcgcgctgcgggagtcatccaagacagacggcaaggcagccagaacccttgccaagctcatgctcttccgccagttctatgttgtcgtgattggatatctgta

SEQ ID NO: 259142 - DNA, 251 bp, Zea mays
tgactaccaggcctttctaatggcatcaagttcatacaacagaacttggtagaattgtccctcactgacgccatccctgtagaatatgatcctctttggtttctgtccagttgccctcccattcccatgttctgtgggatgagaacaactttacggctgatgggttgcaaactctcaccaacaacttgtgttacacgtatgctaggtgcacacgctcagtatcgattgttcctcctgcatactatgctcac

SEQ ID NO: 259143 - DNA, 644 bp, Zea mays
gaattcggctcgaggctgagtatgaggagctgaggaagaatccccagaaggcttacttgaagactattacaccaaagtttcagacccttattgacctttctgttatagaaatcttgtcaaggcatgcatctgatgaggtgtaccttggggagagggacaatccaaattggacatctgatacaagagcattagaggcttttaaaaggtttggaaataaactggcacaaattgagaataaactctcagagagaaacaacgatgagaaactgagaaaccgttgtggaccagttcaaatgccttatactctgcttttgccttctagtaaggaaggattaactttcagaggaattcccaacagtatctctatctgaagaggtttgtggttccttaagttttgtggctttgaataaaagatagaagagaaggaatctgaatttcttcatccaacctgcacatggtaatctagtgtgtttgagtgctttcatgtttggctttaataaaataaaagcagttgttttgtaaaatgttcagaatcaataaaagcatttactgctttgctttgtgcgcaaaaaaaaaataaaaaaaaaaaaaaaaaaaaaaaaaaaaaaaaaaaaaaaaaaaaaaaaaaaaaaaggggcggccgc

SEQ ID NO: 259144 - DNA, 719 bp, Zea mays
gcggccgccctttttttttttttttggaataaaataatataaaatagtagagtatctgtaatctgagacaaacataaacaactttaattaaaactaaccgcaagaatacaatttgcaataagcacttagagtgcattgaagtattacgcacttgctcattgaacttgaagctcactgaattccaagctgaaattgaaactaagcacttgcatgacatgtcgcgtctgcaattctctttacaacatgctctttcatggaagcttaaaatttcagcttcagggcttgtgaagtttgaagccaaaaactctcgggacatagctctgtgatggtttctgtggctttagttgtccataagtcatcaagaacagatgaggaaacgtagttccaaaataagctccatcaatgttgccttgatacttggaccgaggatagtaaatgtcttcacaccgagggcagtatattttcacagtactagacctagggatgtctgactgaccaactggaatacaaggttgtccagagcagtaaactcgtgggcatctgccaaaatcatagttcttgtacttgtcgagcattgcagccattcctttgcttgtcaatatgtaccgggcatgaatcagaccataaagcatctcggctgctgattcaattaactcattctgttcctcggtaaacatgtcaccatgagaggattcaacatccaaactcgagccgaattc

SEQ ID NO: 259145 - DNA, 1374 bp, Zea mays
gaattcggctcgagccccctctttctcttttcttgttctgtttttattttcactgttctctgataacaacgttgttagttgtcaccatggttgttctgtctcagccagcattaaaccagtttttccttctgaaaacatgcaagcccacgcccttgttcgcggggattcctgtggtcgacctcacggaccccgatgccaagacccacatagtcaatgcctgcagggacttcggcttcttcaagctcgtgaaccacggtgttccgttacagttcatggccaatttggaaaacgaaaccctcgggttcttcaaaaaacctcaatccgagaaagacagggctggtccccctgacccttttggctacggcagcaagaggattggccctaacggcgatgtcggttgggtcgaatacctccttctcaacaccaaccctgatgtcatctcccccaagtcacagttcattttcagagaaggtcctcagaatttcagggcggtggtggaggaatacattagagcggtgaagaacatgtgctatgaggtgttggaattgatggctgagggattggggataacgcagaggaatgtgttgagtaggttgctgaaggatgagaagagtgattcttgcttcagacttaaccactacccgccatgcccggaggtgcaagcattgaacggaaggaatttggttggatttggagagcacacagacccacagataatttctgtcttgagatctaacagcacctcaggcctgcaaatctgtctcacagatggcacttgggtttctgtcccacctgatcaaacttcctttttcatcaatgttggtgacactcttcaggtaatgactaatgggaggtttaaaagtgtaaagcatagagttttggctgacccaaccaagtcaaggttgtcaatgatctactttggaggaccacccttgtgtgaaaagatagcacctttaccttcactcatgttaaaaggagaagagagtttctacaaagagttcacatggtgggaatacaagaaggctgcgtacgcgtcaaggctagcggataatagactcggcccttttgagaaatctgctgctgattaaggaggcaaagtgtgtcaaaattctactactcaattttggcacgtgttgttaggccaacttttttattttttattttttttgggtgtgtgtatctaggttccaaacagttgactttacttgagatatatagaaaatgaataggttgcttatgcacttccttttaatccttgttctttttcttgtttgattgaagtgtaatagtcactactgcccttctattatcaatgaaacgcaactctagtcacagcttttcaaaaaaaaaaaaaaaaaaaaaaaagggcggccg

SEQ ID NO: 259146 - DNA, 1632 bp, Zea mays
gaattcggctcgaggacggctcctaaataataatcccacttctctccttcgccgcctcaaagtctttcgtggaatacgatgctgttttctcggatatcgaaaaacctcagaggcagcttcaactcttgtcggtggtttcggtccatcggagaccacaaccactgctttctttccccgcacaattttcattcacgcggtggagactctactcaacaggttatgagaagtttaattttttcaaagggcccagcactgcatagtagtagatatctgatccatcatcaaagcagctccatagttgaggatgaacatgatccattttcactggttgcagatgaactgtcacttcttggcaacaagttgcgagcaatggtagttgctgaggttccaaagcttgcctcggctgctgaatacttcttcaaaatgggagtggaaggaaaaagatttcgccctacagttttattgttaatgtcaactgcactaaatctaccaatacatgaagcacctcctcctatcgagataggaggtactttgacaactgatgtacgtttaagacaacaacgcatagctgaaataacagagatgattcatgtggcaagccttcttcatgatgacgtattggatgatgcggataccagacgtggtattggttcattgaattttgtaatgggcaataagttggcagtgttggctggagattttttgctttctcgggcttgtgttgctctcgcctctttgaaaaatacagaggttgtatctttattggcaaaagttgtagagcatcttgtaactggggagaccatgcaaatgactacaacatctgatcaacggtgtagcatggaatattatatgcaaaagacctactacaagactgcatctttaatatcaaatagttgcaaggcaatagccatccttgcagggcaaacagcagaagttgcaatgcttgcttttgagtatggaaaaaatctgggtttggcatttcaattgatagatgatgttcttgatttcacaggcacatcagcttcccttggaaagggttctttatcagacattcgtcatggaattgttactgctccaatattgtttgctatggaggagttccctcagttgcgtgcaattgttgatgagggcttcgaaaaccctgcaaatgttgatcttgctctggagtatctaggaaaaagccgaggtatacagaggacacgggagctagctgtggagcatgctaaccttgcagcagcagcaatcgattccttaccggagaacgacgatgaagatgtaagaaaatcaaggaaagccctgatagatctaactcacagagtcattacacgaacaaagtaaaaggaagactctcccctcccttattttgtttttgtgggtagctaaaggggaaaagatcttggtaaaaatcaatactcaaaattgttttgttgccatcaatttttctgtaatggtccccctaagcccgaaagtgtgggggaaaataagctgtttctaggattaatgtcgtcattcgtttttcttatttatttaaattaatttctttccctctgtttgtgctccattgttataatattaactttgggcaagtttggccagtttaaaaaaaaaaaaaaaaaaaaaaaagggcggccg

SEQ ID NO: 259147 - DNA, 1819 bp, Zea mays; identical to SEQ ID NO: 238

SEQ ID NO: 259148 - DNA, 1244 bp, Zea mays
gaattcggctcgagcaattttactttgccataacggtgagtttagagagggaataatggatggaagaggaggctgttgcatcgccaggtatgtacccggtgcatcccacgggtccaccgtcgacaaaataatgcttaggtttcgtccaatcgctcccaaacccgccgccgcggccaccgcttccgacggctcttcgtccgagagcagtgacgcttttctcaaaaacggaaccactaaaagaaagtacgtaagagataacaactacaccagcaaacgaagaatccgccggagaaagaacacttcctcgccggagaaaaagcagaagccggtggtgactcttccgttgcttccggaaactcccgatcggaaggattctcgggcaaaggatctaactccatcaccagctaaaccagtacgaaacaacaacaacaacaacaacaagagcaagaacttgaatattattaacaagaacgtgccggtgtgggtgagttttgagaatcgaagccttacgatgatgggagggtggtgttcgtgtgtgacggtggagggcgtgacggacacgtgcttggagagcgagtggctggggagtacagacgaggaacggagactgaacctcagcaatgacacgtgtccagggttcatatcagacggttacgggagggtgacgtggacgaacgaggcgtacgggaagatgatgatgatgaagggcgagggtgatgagggacagggaccagtgttgctggtgaataaggtgaatacggtggttccgcacgcgtcgttcacgtgcttggtgagggtggtgcaatactcgtgtgggaaggagagaaactcgctcacggtgccctgcgatgtgtggagaatggactgtggtgggtttgcatggagattagacgttaaaactgcgcttagcttgagattgggttattagttcacaaaggtatcacgaactcgaaatacaaaacggcgtcgctccatggtcgtagaactataacactatttcttctcttttaagagcttagaatcgtgaatatatatatctatatatctatatatatatatatataactactgacgctaagctagcttgtttcactgtaaattcatatatgcatgtagcttgtcttttgttctcttagatggttttttctgatttgagtttgagcttggaacagtagctgtgagctaattatgaataactcgctacgtaccgttatggttaaaaaaaaaaaaaaaaagggcggccg

SEQ ID NO: 259149 - DNA, 395 bp, Zea mays
gagaaagagtctctagagctcttttgtcattatgcctttcgaaaaagttgtcctgaatcaaactataaacatctgtccaatcgagcaatgagttgttgcaaacgccttccattggccttagaagtactacgctctcatttgtttaaaaaaaatgtggatgtatggaaggacgcattggatagatatgaaaaaggtccacatgtatatgttcatctatatctatgtatatataactactgacgctaagctagcttgtttcactgtaaattcatatatgcatgtagcttgtcttttgttctcttagatggttttttctgatttgagtttgagcttggaacagtagctgtgagataatattgcatcattagttaataaatcacttttaactgttgact

SEQ ID NO: 259150 - DNA, 579 bp, Zea mays
gaattcggctcgaggcagagatgggaacatcggtggcccttactatggaaccaacaccgcagacaccggtactggtcccagaagtggaaccacgggcggcaccggttatggaggcactggtggcactgattatggaacaactggtggcactggttatggaagtggaactgggtatggagtcaacactgggggtgcgcacactgaagcaggatataggaaggaacatcgtcagcatgaccaatctcatggtgatcagaacgagaagaaagggattatggacaagattaaggagaagcttcctggaggacacagtgacaagtagatgcatcgtgcatcatgcatgcatgcatatatataatattgttgtctttgaataaatttgctgcatatgtacttacgtacgtacagtgtcttgtcatgtatgtggaggatatagtatatggttatagtttatgtagaagaataaaaaatgtatgcatgtagtaatgtaagggtcttatatatgtggctgaaatataaaccataataaaggcagagatgttgtgccaataaaaaaaaaaaaaaaaaaagggcggccgc

SEQ ID NO: 259151 - DNA, 1227 bp, Zea mays
gaattcggctcgagggacctgatcgcgctggtgcagacagggtccgggaagacgggcacattcatgctgcccattctgcagaagttgctgagcaaccgccaggccgagcagtctttcttcgcttgcgtgctctcgctaatgagagagctggttattcagatcgtggagcagtttgaggcgctcggatcaactattggtttgtgttactcagtgttgtactttatctatgttattgatgcggcatgggcgacgaggagaacattggggagatcgaaggagcgattgggattgagaatgggaacacaggggaagcgaggaagtggtgcggtgttgtcaccagcagttatggcaggatcgccggtcaccaccgtctaagggaaactcatctacttgggagatttattctcgatgcttgttttcggcaaggtcttgaatcggtgtgcaatacatcaaaaggttgctgagggttcaaaagatgttggtgcttctcgaattattggcattgacatcaacaataaaaagtttgacgttgcgacatcaaatgttcctgcaatagtggcatggacgaccagttcctgggtgaagctgtttcgagcaacaacggcatcgaaggtggcaaaaggttttggtgtattagatgctgggaaagctatgctgggaaagctatgccatgaaagatatttgtagcagtgttacatgatggcatcaagtgctgggcaaatatttattagtttgtggtttcacttctatggaatataggagtcatgattttatgcatttgatcggagaccacattaactagaggggttgtgatcctgtagatgaattcccgtacatgaacttgcctcaagactaccttcaacattttgagttgtacgattctgttagtgtcgagcaagccaatatctttgatgtgggtctgaagatggtagatcgagtggtgactgttagccgcggctacttgtgggagctgaagacagtggaaagtggtcggggcctccacgacatcattcgttctaacgactggaagattaatggcattgtgaacgacatcaatgcactcgactctaactatttttgtatcagttagcttcctcatagcctgaaatagtagttgcagagattttgagtgtcaatgtttaaccaccacctttatgacctgttgattggattggtgaactgagtgcaaatggtgtcaattcaccaaaaaaaaaaaagggcggccgc

SEQ ID NO: 259152 - DNA, 652 bp, Zea mays
gaattcggctcgaggttataatgctgtacaaggggtctcatgtgcatgcaccggctaaagattgttcaccgggacctcaagagtgcaaattgcctcgttaacaaatactggacagtcaagatatgtgattttgggctctctcgagtaatgtcaaattctgcaatgaatgacaactcatctgcgggaactccagagtggatggctcctgagctcattcgcaacgagccattcacagaaaaatgtgatatcttcagcttcggggtcatcatgtgggagctttgcactctttgtagaccttgggaaggaattccacctgttcagatcgtttactctgttgcgaatgatggggcaagactggaaataccagatgggcctcttggaagcttgatagcagattgctgggcagaaccggagaggcgtccatgctgccaggagatcctgacccgccttcttgattgcgagtataccttgtgctgaggctttgcttctagtctgtatagcggttataggggcatcagacggtctggcttatatatacatcacttaattttccatttcacatacatcattgagggtgtaaattaccatgtattaataagcaaactttttctaaacctctttaaaaaaaaaaaaaaaaaaagggcggccgccg

SEQ ID NO: 259153 - DNA, 1403 bp, Zea mays
gaattcggctcgaggagactattccaaattcaattggagagcttttcaaccttaggcttttatgcctcaataaaaccaaagtgaaagagctccctaaatctattacaaaacttcaaaacctacagacaatgagtcttgagaatggggagttagtgaagttcccacaagggttttcaaaactgaagaaattgcgacatcttatggtttcacggttgcaagatgtaactttcagcggtttcaaaagttgggaagctgtggagccatttaagggcttgtggactttgattgaactgcaaactctgtatgccattacagcaagtgaagtattagttgcaaaacttggaaatttatcccagctgaggcggcttataatttgtgatgtaaggagtaacttatgtgcacagttgtgtggctctttgtcaaagttgtgccagctgtcacgattaacgataagagcatgcaatgaagatgaagtgctacagctggatcatttgacatttccaaatcctcttcaaacccttagtttagatggacgactgtcagaaggaactttcaaatctccctttttcttaaatcatggaaatgggcttcttaggctaatgttgttttacagtcagctttcagaaaatccagtaccacacctctctgaattgtcaaacttgactaggttatcccttataaaggcatacaccggccaagaattatacttccaagcaggttggttcctgaatttaaaagaactttacttgaagaatttgtcccggctcaatcaaatagacatacaggagggagctttggccagccttgaacgtataacaatgaaacacctcccggagctacgggaggttccagtcggtttcagatttctcaagtccctaaaaacaatatttttttccgatatgcatcctgagtttgaaagcagctttcaaaaggaaatgtagatcatatcccgtacatatgcaggacaacaacataagtatggtttgtttgtatgtctacgtgtaccttctgtcctctcccaaaaatagggcgggttgcattggcgaaaagttcatgatgggtgttttgagcttgggcaattactgtggagaggaaatgcagcactaggatccaagctttcgagcagaaagcagcgctgaagctgaagggcatgtcatgtcattcaggtacctagtaggatccaaaccttcgagcagaaagcagcacaggcactggcaccaaagaggaaccatagccgccaggcaacatcagtcatcaggaccggttaataatgtttatgtgtgataatgttgtttcaataattatttggaaccatttcgaactccgaatacttgagagtctgtacgaagcatttggcaataaatactatttcagagtaaaaaaaaaaaaaaaagggcggccgc

SEQ ID NO: 259154 - DNA, 1723 bp, Zea mays
gcggccgcccttttttttttttttttttaatcgaagtaatcatccagcagccttggctagcatccaaatcagatacttacaggggagcacgctttcgcggaagaggccatggcccattggggggagggagcgagcgcactgctcggccagacacgttcacgtcgcccatccgcgtcgctggcaagtccggccgtcaatgggcaccaacagtgcctgactttcacgtggcactgggcccactaacagtgacatacaggttgtcctttactcctgcctcgctcagctcagctccgctcttcctctaaatcctctacgcaattctgcactggagtccaaacgcaacccaggcgctgagcttgactgggttccgacccagactactactactgtctactgctaatacgctcgagaattgacaaaaagtagggctaggtaaaaccccgttttacaaaatttgcagaaaagccccttctttatcgctccgaattcctctattcggttattcctccaccgctcgtccgagatcccgattctactacgctgcactgccgcgtccacctcggttcagttccagtgttccgcgggctcgttccaccacgccatcgccggcggctgctccacggcgaagaacccgccgcacggcccgtcgtcgtctaaaaggcccgtctcgtcctcctccaccttcaggaaactcccgtggaagaacaccccgccatggttcgccgccgctgcgccggcaacggggccagccggcgcgacaagaagggtgccctgcacctcgggcgccggcgccggcgcctccgccacgggcgggtccgcgtcgttcagcaccgcgctggagtcactgatctcggacgaccccacccccgcgggggccggcccgtccgaggccgccggctccgccttgaccgacgtgaagctcgccgctgcgtcctcgtcgtcccctagcttcgccttgagctccctgatctcggcgaggagggcgtccttgtcgcggcggagcgcgtcgtggtcgagccgaagcgcgtcgtaggagcggcgcagcgcggcgtagtcgcgctccagctgcttggtcttccagcgggcgcggcggttctggaaccagacggcgacctggcggggctgcaggccgaggtcgcgcgccagccgcgccttgcgctccggctccagcttgttctccacctcgaagctccgctccagcgcgcgcacctgctcggcgctcaggcgccgcttcttctccccgccgccgccgccgccgaacgccatcatctcctcgtccacgtccacgtccacgtccgcctccatcccgaccacgccgtagccgtcatcttcctgatgattgggcatcgcagacagggagggagtagcgccgcgtggccgcttcatgtcgagagttggatcaagtggaattcggagggcaccgcgggactatctttacagcgagagcagggtcaatgagcgcctccattgctgcctccctgctgctcgtctctgttccctgccgtggcgcatggccaaggccaacacaccgtgcaaccacttcggccgatacagttctctgcaactgcaaactccccgagtggtttcctcgcgatccaagaaagcgctgggactggaagacgactgagagtgtggaggagtgaggcctctgtctccgaccgtctcccactctcccctctctctgttttctttttttcctttttcctttctcgagccgaattcc

SEQ ID NO: 259155 - DNA, 797 bp, Zea mays
ggtcagccattgcgcgcgtcatcgtgctcgtccagcagcttgtataacggcataacgtcgacaactacctcggcgaggagggcgtccttgtcgcggcgcagcgcgtcgtggtcgtgccgcagcgcgtcgtaggactggcggagcgcggagtagtcgcgctccagctgcttggtcttccagcgggcgcggcggttctggaaccagacggcgacctggcgcggctgcaggccgaggtcgcgcgccagccgcgccttgcgctccggctccagcttgttctccacttcgaagctccgctccagcgcgcgcacctgctcggagctcaggcgccgcttcttctccccgccgccgccgcacgccatcatctcctcgtccgcgtccgcgtctgcgtccgcctccatcccgaccacgccgtaaccatcatcgttcggattggtcatcgcagccagagggggactggcgccgcgtggccgcttcatgtcgtgttcgatcgagtgaaattcggaggccaccgcaggactaccttatagcgaggacaggatcaatgagctggggggagagcgccgacctgctcgtctctgttccctgccgtgacccatggccaacaccatgcaccttcgtcggacgatacagttctctactacaattgcaaaatttccagtggattcctcgcgatccaagaaagctctgggactgagagacaagacagtgtgtggagtgaggcctctgtgtctctccccctctctttcttttttggtgtgcggacgcgtgggcggacgcgtgcgtcgagccgggaattc

SEQ ID NO: 259156 - DNA, 969 bp, Zea mays
agtgaaactggaacggctggtgctccgccggctctgacgacgtgagtaagccagcggtcggctgcgaagacgacggcggccggaagagggctgctcccgcgtcgtcgtccgccaagaagtgcgcgatgaacctgccgccgccagcgcactcggacgagtagagcgcggccccggcgcaggcgtctgtggactcctccacctccttcgtgccgccgacgccgccagagcgcacgtcgtccgcattgccgctgtagtacttgccgtgcggcggctcgtgcagcatctcggccagcttctccagctgcttgaggagcgcgcgcttctcgtccttgagggactcgtagctgcagagcagcccctggtagtcgtcgcgcagcgccgagtactcgcgctccagctgcttggacttccagcgcgcgcgcttgttctggaaccagatggcgacctggcgcggctgcaggccgagctcccgcgccagctgcagcttctggcgcggctccagcttggcctgcgtcgcgaacatggactccagcgacttggtctgctcgtcgctgaagcgcttcttgttcttgtcgagcgcgccgccgccttttcccttccctccggcaccatgcatcatccactccgtcccgtcgtcctcggcgccgtccatggccacgcacgcacgcctctcggaccacgacctctcacttcctcagctggagctcgtctcgctcaagtagctaggctgctgggcgagaggaggaagggagcaagaggcggcagggcagcccgatcacaggcgatcgagagcctgtgagcttggtgtgatcgactagtttagtcgtcggcgtgatggcaacgacgcggccaatggaacgcggtggcgtgcgtgcgcgcgcggcctgtccctctctagacaggggctggctgggaattcgctcccgatcccaatccctcgccaattctctcctgcccggacgcgtggaa

SEQ ID NO: 259157 - DNA, 1336 bp, Zea mays
atttgaattatcgaattgcttttttttgaaaatctttttcttgcgttatcttttattcattagttattataaagggctacatatttattggagaaaaagatagaaccccacactagcctatataacacctcgcagggtttttttttataacaaggacaagcatctgctcgagcaagagggcacaaaaacgatcgccatttctcacggcacggcatccaaacagctatctagcggcgtcggcgagcatccaaaattagatacagagacgcacgacaggtcgacgaaggagccagagccacgcttccgcggaagaggccattgggggagcgcacggccagacacgttcacgtcgccgatccgcatcactgacaagtccggcggtcaattgggcgccaacaatgcctgactttcacgtggccctgggcccactaacagtgacatacagcttgtcctttactccctacctcgctcagctcttcctctacactcctcttcccactgtccctctctcccctttctgcatcagggtttggtctcatctctttttcttgcatttttttttgcattcgagtccaaacgcaaccaggtactgatctcgactgggttcctaaagactactgctactgctaaaatattcgcgcgagaattgacgaaagagggctacgtaaaactccattttacaaaatttgcagaaaagcccccgcctctcgctccgaattctttattcctccaccgctcggcccagatcccgagtctacgctgcgctgcatctacctccgcctcggttcagttccagtgttccgtgggctcggtccaccacgccatcggcggcggctgctccacggagaagaacccgccgcagggctcatcgtcgtccaggagccccgtctcgtcctcctccaccttcaggaaactcccgtggaagaacacgccgccatggttcgccgccacggcgccgggcgcgtcaagaagagtaccccgtacctccggcaccggcgcctccgccacgggcgggtccgcgtcgttcagcaccgcgctggagtcactctcggacgaccccacccctacggggggaggcccgtccgaggccgccggctccgccttgaccgacgtgaagctcgccgctgcctcctcgtccccgagcttcgccttgagctccttgatctcggcgaggagggcgtccttgtcgcggcgcagcgcgtcgtggtcgtgccgcagcgcgtcgtaggactggcggagcgcggagtagtcgcgctccagctgcttggtcttccagcgggcgcggcggttctggaaccagcccacgcgtccgcggacgcgtgggcggacgcgtgga

SEQ ID NO: 259158 - DNA, 691 bp, Zea mays
atgccgccgacgcccgagcgcacgtcgtccccgagcgccggcggcgtccgcattgccgctgtacttgccccgcggctcgtgcagcatctcggctagcttctccagctgcttgaggagcgtgtgcttctccttcttgagggactcgtagctgcagaggagcgcgtcgtagtcgtcgcggagcgcggagtagtcgcgctccagctgcttggacttccagcgcgcgcgcttgttctggaaccagatggcgacctggcgcggctgcaggccgagctcccgcgccagctgcagcttctggcgcggctccagcttggtctgcgtggcgaacatggactcgagagacttgatctgctcctcgctgaagcgcttcttgttcttgtccagcgcgccgccttttcccttccctgtggcgcccgcgccgcccacctccatcatccactccgggccgtcgtcgtcgccctccatggccacgcctcagcagctagatcgagctagtcggtctcaacctggctagctggctgaagtagccagggtgctgggcagcaagaggatcggaggcagcgacccggtcgatcacaggcaggcgagctgggcgatcgatcgggtagtctcacccggcgtgatggcataacgccgtcgccaatatagcgtggtggcgcccaggagtacgaccatgcgtccgcccatgcgtccg

SEQ ID NO: 259159 - DNA, 1981 bp, Zea mays
aggacgctgggtcgaccacgcgtccgcccacgcgtccgcggacgcgtgcaagcagctcaaagctctagttctagctagctagcaaagggggggaaaatggctccgcttctcgctgctgccatgaaccacgctgcagcccatcctggccttaggagccacctagtaggacccaacaatgagagtttctcacggcaccacctgccgtcttcttctccacagagcagcaagcgaaggtgtaaccttagctttactacacgatctgcaagagtaggcagccaaaatggagtccaaatgttgagcccctcggaaatcccacaaagggactggttcccctctgacttcaccttcggtgccgccacttcagcgtaccaaattgaaggtgcttggaatgaagatggaaagggggaaagcaactgggatcacttctgccacaatcatccggaaaggatactggacgggagcaattcagacattggagcgaattcgtaccatatgtacaaaacggacgtcagattgctcaaggaaatgggcatggacgcatataggttctctatctcttggcccagaatactgccgaagggaaccaaagaaggaggtattaacccggatggcatcaagtactacagaaacctcatcaacttgttgctagaaaacggcatagagccatatgtaacaattttccactgggatgtacctcaagcactagaagagaagtacggcggcttcctagataagagtcataagagcattgtagaagattacacatactttgctaaggtgtgctttgataacttcggcgacaaggtgaagaattggttgacctttaatgagccccagacatttacttccttttcctacggaactggggtctttgccccaggtcggtgctcacctggactagactgtgcctacccaactgggaattcactcgtcgagccttacactgctggccataacattctcctagcccacgctgaggctgttgatctttacaacaagcattacaagcgcgacgacacccgcatagggcttgcgtttgacgtaatgggtcgtgtgccatacggaacatcgtttctggataaacaggccgaagaaaggtcctgggacatcaacctaggatggttcttagagccagtggttcgtggtgactaccccttctccatgagatcattggctagggaacgactacccttcttcaaggacgagcagaaggagaagctcgccggttcctataacatgttggggttaaactactacacctcacggttctccaaaaacatcgatatctcaccaaactactcacctgtgctcaacactgacgacgcctacgccagtcaagaagttaacgggcctgacgggaagcccattggtcctcctatgggaaatccatggatctacatgtaccctgagggcttgaaggatctccttatgatcatgaagaacaaatacggaaacccacctatctacatcaccgagaacggaatcggggatgttgataccaaggagacacctctacccatggaggctgccttaaatgactacaaaaggctagattacatccagcgccacatcgctactcttaaggaatcaatagacttgggatcaaatgtgcaaggctacttcgcttggtctctgctggacaactttgaatggtttgccggcttcaccgaacgttatggcattgtctacgtcgaccgcaacaataactgcacgcgctacatgaaggagtctgccaagtggttgaaagagttcaacaccgcgaaaaagcccagcaagaagattcttacgccagcttaaaaatcgggggcctcatgatgtgggtgcagcccataaaaactgtgtggtttggaaccgaagattttctctttttttttctgccacgagaggttctctggaggcatactctccagcaccgtggctaataacgcgttgttccaattcagtctggccttgtcatgcatgcaataaataaagtgatggg

SEQ ID NO: 259160 - DNA, 1954 bp, Zea mays
tcgacaaaagcaaagcaaagcagctcaaaaaactttagccagctatcaagacatggctccacttgttgctgctgccacgaatcacactgcccatagaagccacatagtaggacccaacaatgagaattttccaaggcaccaaccttgttcatcacaaaacagaaacaagagactcaggcttaggtcacgagcacaaaggataagcagtcagctgcttgcaagccgaaagcttatgccatggcaaatccctaaaagggactggtttcctcctagcttcatctttggtgccgccaccgcagcataccaaattgagggcgcctggaatgaagatgggaaggggccaagcaattgggatcacttctgccacaattttccggattggatactggacgggagcaatgcagacattggagccaattcctaccatatgtacaatgcggatgtcagattgctgaaggaaatgggcatggacgcatataggttctctatctcttggccagaatactgccgaagggaacgctcgaaggaggtattaaccaggatggcatcaagtactacaaaaagctcatcaacttgttgatagagaacggcatagagccatttgtaacaattttccactgggacgtccctcaagcactggaagacaagtacggtggctttttaggcgacaggattgtaaaggattacacagacttcgctaaggtgtgctttgagaacttcggtgacaaggtgaagaattggttgacctttaacgagccacagacatttacaaccttttcgtacggaacggggtttttgcccctggacggtgctcaccgggaaaaatgtgccagcctattgctaactcactcaccgaaccatacattgctggccacaacattcttcgagcccacgctgaggctgttgatctttacaacaagaattacaagggtacagacggccgcatagggcttgcatttgacgtaatgggtcgtgtcccatacgaaaagtcggcgtttacggatcaacaggccgaacaaaggtcctgggacattaacctaggatggttcttggagccggttgttcgtggtgactatcccttctccatgagatcattggcaagggaacgactacccttcttcactgacaaagagcaagagaagctagtgggttcctatgacatgttggggttaaactattatacctcaaggttctccaaaaacatcgacatctcaccaaaatactcgcctgttctcaacactgacgacgcatatgccagtcaagaaacgaatgggcctgacgggaatcccattggtccttggatggggaattcgtggatctacctatatcctgaaggcctaaaggatctgcttatgatcatgaagaacaaatacggaaacccacctatctacatcactgagaacggaatggggatgttgaccaaggagatctacccatggaggatgccttaaatgactacaaaaggtagattacatccagcgccacatcgctactcttaaggaatcaatagacttgggatcaaatgtgcaaggctacttcgcttggtctctgctggacaactttgaatggttcgccggcttcaccgaacgttatggcattgtctacgtcgaccgcaacaataactgcacgcgctacatgaaggagtctgccaagtggttgaaacagttcaacgccgcgaagaagcccagcaagaagattcttacgccagcttagaaatcgggggcctcatgatgtgggtgcagcccataaaaaactggtgtgtggtttcgaaccgaaaattttctgtttttttccgccacgagaggttctggaggcatactctccagcaccgtggctaataacgcattgttccaattcagtctggccttgtcatgcatgcaataaataaagtgatgggtttccctgtttcaaaaaaaaaaaaaaaaaaaaaaaaaaaaaaaaaaaaggcggccgc

SEQ ID NO: 259161 - DNA, 435 bp, Zea mays
tgcagctcaaagctctagttctagctagctagcggggggggggaaaatggctccgctgctcgctgctgccatgaaccacgctggagcccatcctggccttaggagccacctaggaggacccaacaatgagaggttctcacggcaccacctgacgtcttcttcttcacagagcagcaagcgaaggtgtaaccttagctttactacacgatctgcaagagtaggcagccaaaatggagtccaaatgttgagcccctcggaaatcccacaaagggactggttgccctctgacttcaccttctgtgccgccacttcagcgtaccaaggataattgtctagcgcgaatggtggttattacgtctctgttagatatatacatatatgaaaagaaactacttgcgctcactgttacataatggcagctgatttatatatata

SEQ ID NO: 259162 - DNA, 480 bp, Zea mays
cacacgcgtccgagcagctcaaaactctagctagctaccagggggggaaatggctccacttctcgccgcagccatgaaccacgctacccatccagtccttagaagccatctaggacccaacaatgagagtttctcacgacaccacctatcttcttcaccacaaagcagtaagcgaaggtttaaccttagctttacgccacgatctgcaagggtaggcaatgaaaatggagtccaattgttgagcccctcggaaatccctcgaagggactggttcccctctgacttcatctttggtgccgccacttcagcgtaccaaattgaaggtgcatggaacgaagatggaaagggggaaagcaattgggatcacttctgccacaattttccggaaaggataatggacgggagcaatgcagacattggagcgaattcgtaccatatgtacaaaacggatgtcagattgctgaaagaaatgggcatgga

SEQ ID NO: 259163 - DNA, 795 bp, Zea mays
ctggattcgacccacgcgtacgttattcgtccgataacctcggccagggtacgggtacctttcttcttggacgtacagacggacaagctcgccggtttctataacatgttggggttaaacttactacacttcacggtgcttcaaaaacatcgacatcttaccaaactactcacctgtgctcaacactgacgacgcctacgccagtcaagaagttaacgggcctgacgggaagcccattggtccttctatgggaaatccatggatctacatgtaccctgagggctcgaaggatctccttatgatcatgaagaacatatatggaaacccacctatttacatcaccgagaacggaattggggatgttgataccaaggagacacctctacccatggaggatgccttaaatgactacggatggctagattacatccagcgccacatcgctactcttaaggaatcaatagacttgggatcaaatgtgcatggctacttcgctcggtctctgctggacaacttcgaatggttcgccggcttcacccgacgttatggcattgtctacgtcgaccgcaacaataactgcacgcgctacatgaaggagtctgccaagtggttgaaacagttcaacgccgcgaagaagcccagcaagaagattcttacgccagcttagaaatcgggggcctcatgatgtgggtgcagcccataaaaaactggtgtgtggtttccgtatttgttcttcatgatcataaggagatccttcaagccctcagggtacatgtagatccatggatttcccat

SEQ ID NO: 259164 - DNA, 734 bp, Zea mays
aatggatcacacgtccattaattatttatttgcataaaacgggtcggacacacactactgtattgaaactacacaccactacattctagctagcttgtttcatcccacggccatacacatcagacacacagctgaactgaaactacacaccactacattctaagctggcgtaagaaccttcttttcagcctttttggcagctccgttgaactctctcagccacttagctgagcgcttcaggtagcgcctgtagccgtcgtcacggtcgacgtagatgatgccgtaacgctcggtgtagccactagaccactcgaagttgtccaacagagaccatgtgaagtggccgcgcacgtccgcccccaagtctattgattctttgataactgagatgtggcgctggaggtaatctagcctcttgtagtcgtccaacgcatcttgcatggatagaggattatcctttgtgtcaacgtccccgattccgttctcggtgatatagataggcgggtttccgtatttgttcttcatgatcataaggagatcctttaggcctttagggtacatgtagatccatggatttcccataggaggaccaatagaattcccgtcaggtccaaagatttctgcagtggcataggcgtcgtcggcgttgagcttaggtgagtagtcttctgagaagtcgacgtgcttagagaaccttgaggtatagtaatttatccccaatatgtcataggaac

SEQ ID NO: 259165 - DNA, 786 bp, Zea mays
acgacccattacgtcaaacgcaagccctatgcgggtgtcgtcgcgcttgtaatgcttgttgtaaagatcaacagcctcagcgtgggctaggagaatgttatggccagcagtgtaaggctcgacgagtgaattcccagttgggtaggcacagtctagtccaggtgagcaccgacctggggcaaagaccccagttccgtaggaaaaggaagtaaatgtctggcggacgcgtgggcggacgcgtgggcggacgcgtgggagaaaggtcctgggacatcaacctgggatggttcttggagccagtggttcgtggtgactaacccttctccatgagatcattggctagggaacgactacccttcttcaaggacgagcagaaggagaagctcgccggttcctataacatgttggggttaaactactacacctcacggttctccaaaaacatcgatatctcaccaaactactcacctgtgctcaacactgacgacgcctacgccagtcaagaagttaacgggcctgacgggaagcccattggtcctcctatgggaaatccatggatctacatgtaccctgagggctcgaaggatctccttatgatcatgaagaacaaatatggaaacccacctatctacatcaccgagaacggtaagtagtaaggttttacaatttaagtcataggttgtactaacctgtagctaactacaaacagctgtcttttttgtataaaggtgtttctttatatttttaaacaagcgaaccgtgacaagtaactaaacttttcgggat

SEQ ID NO: 259166 - DNA, 661 bp, Zea mays
cccacgcgtccgcccacgcgtccgcccacgcgtccgcccacgcgtccgcccacgcgtccgaggagaagctcgccggttcctataacatgttggggttaaactactacacctcacggttctccaaaaacatcgatatctcaccaaactactcacctgtgctcaacactgacgacgcctacgccagtcaagaagttaacgggcctgacgggaagcccattggtcctcctatgggaaatccatggatctacatgtaccctgagggcttgaaggatctccttatgatcatgaagaacaaatacggaaacccacctatctacatcaccgagaacggaatcggggatgttgataccaaggagacaccgggtctacccatggtcggctgccttaactgactacaaaaggctagattacatccggcgccgacgagcgctactcttaaggaatcaactgaccttggggccagaggaattcaggggaggtggttttgtccttagaggtccactgatccatgggctagatgaagttccaagaacactttgtcaatttttcaaacaaaggtccgggcggccttctcgaggggttttaatggttttttcttgagaacagacctggtattgttggtcagccctaatcccaatggcaggaaaggacaggaacctct

SEQ ID NO: 259167 - DNA, 489 bp, Zea mays
aggctgccttaaatgactacaaaaggctagattacatccagcgccacatctcaactctcaaggagtcaatagacttgggagcaaatgtgcatggctacttcgcttggtctctgctggataactttgaatggtacgccggctacaccgaacgttatggcattgtctacgtcgaccgcaaaaataactacacgcgctacatgaaggagtcagccaagtggttaaaagagttcaatactgcgaagaagcctagcaagaagattattacgccagcttaaaaacatgggacctcgtgatgtgggtacggtgccacccatgaaataaaaacctagtgtgtggtttgaaacctaaatttttctttttcttttttgcaccatgagagaggtagtggagtcatattctccagcaccgtggctaataatgtattgttgcagtacaatctagcattgtcgtcatgcaataaataaagtgactggtttccctatttcaaaa

SEQ ID NO: 259168 - DNA, 653 bp, Zea mays
cgtcgcgtgggttcaagcttccagcaagtatgctgaaagttgaaccgggacaagagcaacacttatgatcatgaagaacaaatacggaaacccacctatctacatcaccgagaacggaatcggggatgttgataccaaggagacacctgtacccatggaggatgccttaaatgactacaaaaggctagattacatccagcgccacatcgctactcttaaggaatcaatagacttgggagcgaatgtgcagggctacttcgcttggtctctgttggacaacttcgaatggttctccggctacacggaacgttacggcatcgtctatgttgaccgcaacgatggctgcaaacgctacatgaagcggtcagccaagtggttcaaagagttcaatgctgcgaagaaagcggctgccaagaagattcttacgccagcttagaaatcgttgggcctgatgtatggtatggtgccacgcatgaaagaccgggcacgtttttctttgcactatctgaggaggcagcatctgttctctccagcaccgtggattgttcccgccagttcagtatttccttattatgcaataaatgaagtgatcgatttccccttttcagtatcatgtaatgttgaattattatagaatatatctttttttttgt

SEQ ID NO: 259169 - DNA, 329 bp, Zea mays
ccacgcgtccggctttagctagctagcaagagagagagagagagagaaaaaatatggctccactcgtcgctactgccacgatgaaccacgctgtggcccatctgctaggacccaatcatgagagtttctcacggcaccatctttcttcctcgctgcagcaaaacagtaagcgaaggtgtaatcttagcttcaggccacgagctgctgagagtcagaatggaagccaaacgctgagcccctcggaagtccctaaaagagactggttcccctctgacttcatctttggtgccgccacttcagcgtaccaaattgaaggtggatggaacgag

SEQ ID NO: 259170 - DNA, 301 bp, Zea mays
cccacgcgtccggttgcgctgtgtgttattttttatgaaataaaaatctagatggttgtgtttatgatagatgttactatacggtcccgcgtgccgtcaattcaatttttatttgtgcaggaatcggggatgttgataccaaggagacacctctacccatggaggatgccttaaatgactacaaaaggctagattacatccagcgccacatcgctactcttaaggaatcaatagacttgggatcaaatgtgcaaggctacttcgcttggtctctgctggacaactgtgaatggttcgccgg

SEQ ID NO: 259171 - DNA, 801 bp, Zea mays
gaggtgtccaactactgccgggagaggctccaggtactcttgaggcaggagctgaggctactcggcgaggatctggggcagattagctgcgacgtggacatgaagccgcgctcgcgcgggctgttcaccgggtgcttccagaggctggatgacgaggtgtcagggcaggcgagcaggctcgtcggtgccgtccaggagtcacggccggtggccgccgagaacgtgggctccactgcggttgtcgccgtcgtgtgctcatcccatgtggtggtcgccaactgcggggattcgcgtgccgttctctgccgtgggaaggagccagtagagctgtcgattgatcacaagcctgacaggaaggatgagcgggcgaggattgaggccctgggaggcaaggtcatccaatggaacggctatagggcctccggtttacttgctatgtcaagatcgattggtatgtatattggttcctcagctgggtcttggtagaatgactctttttaagtgagatggaaattatagttgtagcaacatgaaaatgcttatgctgttgcaaccactttttattcgagttgcatagtttaaccactttttttattcaagttccatagtataagatgggctctttagacacctacatcaatgcaaccctactgttgttatgagacatctaagaagctccatcatacaatggagggtttttaaaatcaaccatattataaatgctttcaagagattatgttgcgtacgaagagtcatgtatagatgggctattcgcgaatagccgcttcttgggtttttaca

SEQ ID NO: 259172 - DNA, 420 bp, Zea mays
gaattcggctcgagggatgaacgagcgaggattgaggccctggggggaaaggtcatccaatggaatggctaccgggtctccggtatacttgctatgtcaagatcgattggggaccggtatctgaagccgttcgtgattccaaaaccagaggtcacggtcgttcccagggcgaaagatgacgactgtctcatcctcgcaagcgatgggctgtgggatgtggtgacgaacgaagaggcatggccaaagaactgctgctaggtgctagctggtcgtccgcacgagacttgaccggcccacagttttttttttgggtccgttgggcgtcaagaattgtacatgtatatatggtagatgcgttttccgtggagggttatggcgctcaaaaaaaaaaaaaaaaaaaaaaaaaaaaaaggcggccgc

SEQ ID NO: 259173 - DNA, 608 bp, Zea mays
aaccagaggtcacggtggttcccagggcgaaagatgacgactgtctcatcctcgcaagcgatgggctgtgggatgtggtgacgaacgaggaggcgtgcaaagctgcgcgccggcaaatccaagtgtggcacaagaacaacggtgccgctggcgcatcgtggtcgttgtgcgacgagggtgatggatccaccaccgaccccgctgcccaagccgcagcggattatctcgcgagggtcgcgctgaagaagggtaccgaggacaacgtcaccgtcatcgtggttgacttgaaacctcgacagaaaagctcaggagctactcgtagcatcgggcgtgctgggtccatcacagtagagctgagctgaccatggcatgtccaaagaactcctgctagctggtcgtccgcacgagacttgaccggcccacagttttttttttgggtccgttgggcgtcaagaattgtacatgtatatatggtagatgcgttttccgtagagggttatggcgctcaaccccgctcttgttttctgtggctaaaaatctcttcattcgcatctctaccgtgagcccccctgcacttaatatgcccctaatgcttgatgatagtcgag

SEQ ID NO: 259174 - DNA, 1055 bp, Zea mays
agaattggcctcaggatggttcagaacggtgacatagttttgaacaaggtgttcgtccctgacgaagaccggttgccaggcatcaactcgtttcaggacatcagcaaggtgctcgccatttcacgcattatggtggcatggcaaccggttggcatatcaatgggggtcttcgacatgtgccaccggtatctgatagaaaggaagcagttcggagtccctctggcggcgtttcagctgaaccaagagaagctcgcccggatgctcggtaacgtccagtcgatggtcctcgtcggctggcgtctctgcaagctctacgagtcggggaaaatgacgccgggccacgctagcctagggaaggcttggaactccaggacggcccgcgaggtggtctcccttggccgagagctgctgggtgggaacgggattttggccgacttccttgtagccaaggcgttctgcgacctggagcccatctactcgtacgagggcacgtacgacatcaacagcctggtgaccggcagggaggtcaccgggatcgcgagcttcaggcccgccgcgccagcgaaagcccggctgtgacgtgataacctgtgtccccgtgttgcagggaactggaggcgaataaatcatgatcaggtcgtcgtcgtcgtcgccatcgaacaaactgagcacgttcctggaacccgcccggtcaacgttggctgctcacatggtgtaccgtagccgagtgcggatgggaacggattcctagatatatgtagtactatacgaagatatctgttgcgggtggattactgtaaaccgggtctaatctctgttgcggtgtttgccgtctttggtcagaaggtaaggggggaacgccaggcagatctggtgggtttggttgttgttgttgtcgtgttgggtgggtagcatgcgagtgtggaggcctcgaccaatgaataaaacatggtgccgtttgggcggtagtacgtacacaggcaggcgggtccagaagagtccgtcgtctggaagttatggtaagtaaaaaaaaaaaaaaaaaaaagggcggccgc

SEQ ID NO: 259175 - DNA, 1536 bp, Zea mays
atggtgaggactatgtccacgacggccgcggtcacgcccccagtgtcggtcgccaccatcaaccccaaggtcttgaagtgtgaatatgcagtccggggagagattgtcacacgtgctcagaaactgcaacaagaactgcagagaaatccagagtcgcttccttttgatgagatactctactgtaacattggaaatccccattccattggccaacagccagttacctatttcagagaagttctatctttatgtgagaatccagctctcctggacaaaagtgaaacgcatgctttatacaggtcagatgctatagagagagcacggaaaattctagacaaaataccaggaagagctacaggagcatatagccacagtcagggtataaaaggtttacgtgatgaaattgctgccggaattgctgcccgtgatgggtttcatgcaagcgcagataacatcttcctaacagatggagcaagcccagcagtgcacatgatgatgcagttgttgataagttctgagagcgatggcattctctgccctattccacagtacccactgtactctgcatcgattgctcttcacggtggttcccttgttccttatttccttaatgaagagacagggtggggactcgatgttgatgagctgaagaaacaactggaggaggctcgatctaagggcatcactgtcagggcgcttgttgtcataaatccaggaaatccaacaggacaggttcttgttgaggaaaaccaaaagaaaattgtcgaattctgcaagaatgaaggacttgttcttctcgcagatgaggtttaccaggaaaatatatatgttgaagataagccattccactcattcaaaaaaattgcacggtcactgggatacactgatgatgatcttcctttggtatcattccagtcagtttctaaaggctactacggagaatgtggaaaacgaggcggttatatggagataactggattcagtcctgaagtacgggaacaaatttacaaggtggcatcagtaaacctgtgctccaatgtttcggggcaaattcttgctagccttgtaatgaacccaccaaaggctggggatgaatcctttgaatccttcatgtcagagagggatggtatcctttcatcgttggctcggcgtgcaaaggctttggaagaagcattcaacagtttagaaggaattacatgcaacaaagccgaaggtgcaatgtatctgttcccacgccttcacttaccccagaaggcgattggagctgcccaagcagccggcactgccccagatgcttactacgctaaacgcctactagaggccactgggatcgtcttcgtccctggttctggttttggacaggtccccggaacatggcacatcagatccacgatactgccgcaggaggacaaaatacctgggatagtatctaggttcaaggagtttcccgacaagttcatggatgaattccgtgattattgagtgtccatctcagttcagtcattgcatgaattctgccaagatggcatcctgtcc

SEQ ID NO: 259176 - DNA, 613 bp, Zea mays
aactaaacaatggaaaattagccatgtattaaatctcagctgtaattgacacacacatggtttaagtgacatgggatggattcactcaatcccaccatgtattggatcccaatatgtattaaatactagagtgccgaacaaggccttatatggattgaggtgaatactcgtcacccaaacaaggctccagtgggtttacctgaccaaaactgaaaatcaacgcagctccaataagcatacacactcaatatgaggagtatgaggaaacatatccacaggaattacactcttcagttcatagaatcctctcaaatctttctcctccacgccatgacataggtagtccaaatcccgagcacaagtagctggattacatgagacatacactattcgaggagctttaacttctaacagccacttgattaacttcatgtgcatcccagggcgattaggatctgagatgattatgtcaggctttggaaattccttcccgaatgattcattgattttattgaggtccccttgaacaaatgttgcattgttgataccgttcaacttggcattctttcgcgcatcttcaatggcttcagggacaacttcatatccataaatg

SEQ ID NO: 259177 - DNA, 729 bp, Zea mays
gaattcggctcgagatcaagtccagcaaggaaacaaacatagagcgccatggacgacgcgcagtcccgctcccatgaactagcgacaggatggcctcttctcccccagctgctggtggtgccactcctcctcctcctcctctcccctctcctctgcctgctgtcgtccgggcggaggaggaggagagagcaaggagcagcagaacgaaggcgtgctcccccggggcccccgaagcagctgccggtgctaggcaacctgctccaggtaggcagccggccgcaccgctacttccaggcggtcgcgtggaggtacggccccgtcgtggaggtgcagctcgggcgcgtgcgcacggtcgtcgtctcctcgccggatgccgccaaggaggtcctccggattaacgacctgcactgctgcagtcgccccaactcaccaggacaaggaagtggtgttgatggtgctagtacaaagaaggcacaaaagctgaagctccagatgcagatgaggatgctgctttaaactgcattttgttcatgctttaaactgctttaaactgaaatacgttacagctagaactagatcagctgtacatgcttctgttgttcatgcttctgcattgaactacattttgttgaacgtggactgtattttgcaaaaaacatgaccctcactatactagagtgaagcgaacatggactacattttgcaaaaaaaaaaaaaaagggcggccgc

SEQ ID NO: 259178 - DNA, 1059 bp, Zea mays
atttcatgagagggaacaatatgtctatttcacatagacacaaatacaagataaggaaagagagttgaaaagggactataggttgctaaaggatgcaaagaatcaaagtggagcgcattttgatgagaagacagtgaggattacggctgacccagctttatggaaaaatatactgacttctcatgctaaggctaaaaagttctgcaacaagtcttttcctctatatgaggccttgggggagctttatgatgggcaaacagctgaagggacctactactacacctccacccaacttttagatcttactcaagtaggaaatagagatgagtttctcatcatagaacatgaacaagatgaagtggaagaaaccttgccggcacatgaagaagatgatgtccatgttgttgaggcaggagatgcaacaggtttaaggcatgatccagtgccgcagagaacgactactgctacaagagggaacaatgaggaaacgaggacaaagaggcataaaaagggcgataacctagaaggaataatgggaagatacattgacatgagaatgaagcaagctgaggaagaagccacacatctagcaaaagagagggaggaaaaggaagtgagtcaagctgcagacttctcaatcaagaagtgcatatccattattggtacaatggaagttacaaaggaggaaaaagcgaaagcctacaatgccttcaaggaccttgacaacaggcaaattttcttgagtgcatgtgatgatgatgccgagcctacactgatttggctgagaaacgagatggcttagctggtggagtcgtctgaattgcttgctggatagccagtatgttatgttgttcaaatgaaaaattagctctctccctttggtttgttcttaatctaaatgcacacactctattgtaatgtaataagagacaaatgagtggccaacttctgattttgatgcttcaaatttcatccgcttcatagacctaatatgatggacactgatctttttatatgcatgcaacaaattaatgtatccatgtggtgtaaccaaacaat

SEQ ID NO: 259179 - DNA, 458 bp, Zea mays
cggaattcccggttcgagccacgcgtcacgcttgcggtgattggaccggtggaggagacagggtgggcacttgaggttgatgagctgaagaagcaacttgaggaggctcgatctaagggcatcagtgtcagggcgcttgctgtcatagatccagcaaatccaccaggacaggtccttaccgacgaaaaccagatgaaaattggtgaattctgcaagattgaaaggctcgctcttctcgcggatgaggtttaccaagaaaacatatatgtcgaagacaagcaattccactcgttcaaaaaaatcgcacggtcgctgggatacactgatgacgaccttcctttggtatcgttccagtcgatttctaaaggctactatggagaatgtggaaagcgacgtggttacatggagataactgggttcagtcctcaagtacgggaccaaatctacaagatggcatc

SEQ ID NO: 259180 - DNA, 523 bp, Zea mays
acggttctgggtttggacaggtccctggaacgtggcacttcaggtgcacgatactgccgcaggaggacaagatacctgcgatagtatccaggctcaaggagttccacgagaagttcatggatgaattccgtgattgagctgagtatccatcgccctggcgtgatttttatctgttcaaaataataatgctgccaattggttgcccccgctccctcgtcgtcccatggatgctacagccaaacaccatcccaaattgtgttacaggcagatccctatcgaaaaacctacagaatctcgggcactgcagtctgcaatgccatgcttctgtttgccttgtgagaagtgtatcaggctaggctctgagccctgatgtgtacaaacatacccgaactttgaggccaagttgagttgtctcggcgcatgctgaatactctgctcgccttgtgttgcggagaatctttgctgtccaggttgatttgttcgcgaaaaaaaaaaaaaaaaaaaaaaaaaaaggacgtccgct

SEQ ID NO: 259181 - DNA, 485 bp, Zea mays
gaattcggctcgagttatgacacacaggagcgtgatccaattgaaagggttaggaagctcatgttggtccatgagttcgcaacggcccaagagctaaaggacatggagaaggagatcaggaagcaagtcgacgctgccattgctaaagcgaaggagtgtccactgcctgatccatctgagctcttcacaaatgtttatgttaatgactgcggtttggagtcgtttggtgtagacaggaaggaggtgaggaccgttcttccgtaggctggcaaacaaaaaaaaaaggttctactgatacaggcgaagcgaagggatcctctcctctgttaccgtgtatttgtttatctggtagtacgaagaagtttgctgcgtatgtatatggacgcatcacaccgcagtagtttcctcacttgtggttatggtcctatgaaccccgggttataatttaaaaaaaaaaaaaaaaaaaaaaaaaaaaagggcggccg

SEQ ID NO: 259182 - DNA, 618 bp, Zea mays
caggaagcaagtcgacgctgccattgctaaagcgaaggagtgtccactgcctgatccatctgagctcttcacaaatgtttatattaatgactgcggtttggagtcgtttggtgtagacaggaaggaggtgaggaccgttcttccgtaggctggcaaacaaaaaaaaggttctactgatacagtacgaagaagtttgctgcgtatgtatatggacgcatcacaccgcagtagtttcctcacttgtggttatggtcctatggaccccgggttataatttcctctgctcgtcgagctatcacaatgtgcagccgagattttgtcaggtgctcatgtcatgccgatgtttcgtcttctgctctactgcaacacttccacagatcccctttctgagcagtgcccccacgtaaacagtagtagttggctgcattagctagggggcggctaatagctttttattagttacaaaacagtttctttgttaactatagctgtttctgaacagtgcccccacgaaaacaatagtgatcacgttgtgtcgttgtgacacaccattgtcaagtccatcaagagctttttaaaccaatctgtcttaataatgcctcgcttggttgaagagcc

SEQ ID NO: 259183 - DNA, 1914 bp, Zea mays
gaattcggctcgagcatctccaagtgcgtgcgccggccgccccctatcccgccggccctgtgtgtgttccggctcaccaagcgccgactacccctacgacaccgtgcccaacaaggtggagcacctcttcttcgcgcagatctaccacgaccgcaagcagcgggaggcgcgcatgtcgctgccccgcgccgagcgcgcgcgggcgccgtacgtcgacttcctcaagcccatcatcgccgacggcgacacgggcttcggcggcgccacggccaccgtcaagctctgcaagctcttcgtggagcgcggggcggccggggtccacctcgaggaccagtcctccgtcaccaagaagtgcggccacatggcgggcaaggtgctcgtcgccgtctccgagcacgtgaaccgcctcgtcgccgcgcggctccagttcgacgtcatgggcgtcgagaccgtcctcgtcgcgcgcaccgacgccgtcgccgccacgctcatccagaccaacgtcgacgcgcgcgaccaccagttcatagtcggcgccaccaacccgggcctcaggggccagagcctcgcggccgtgctgtcggccggcatgtcggcgggcaagagcggcagggagctccaggccatcgaggacgagtggctggccgcggcgcggctcaagaccttctccgagtgcgtcagggacgccatcgcgggcctcggcgtcgcgggccaggagaagcagcgcaggctccaggagtgggaccgcgccaccggcggctacgacaggtgcgtgtccaacgaccaggcgcgcgacatcgccgccagcctcggcgtcacgtccgtgttctgggactgggacctgccgcggaccagggaagggttctaccgcttcagggggtccgtggcggcggccgtggtccggggccgcgccttcgcgccgcacgccgacgtgctgtggatggagacgtccagccccaacgtggccgagtgcaccgccttcgccgagggcgtcaaggcggcgtgccccgaggcgatgctcgcctacaacctctcgccgtccttcaactgggacgcgtctgggatgacggacgccgagatggccgccttcatcccgagcgtcgcgcgcctcggctacgtctggcagttcatcacgctcgccgggttccacgccgacgcgctcgtcaccgacacgttcgcgcgggacttcgcacgccgcggcatgctggcctacgtggagaggatccagagggaggagaggatcaacggcgtggagacgctggagcatcagaagtggtcgggcgccaatttctacgacagggtgctcaaggctgtgcagggtggcatctcctcgactgcagccatgggcaaaggagttactgaagagcagttcaaggatccacggcccgcaactgggagcagtggcctgcaagttatggccaaatccaggatttgatgaagactcagaagaagaagaatgatttggagaaggctctaaataaattcgaaaaaaaaataagctgggttcagttcatcagcaatggggaagctgctttccaagttctaaactgaacataatcagcataaatgaatcaacgaatcgtctagctagctacgtacggatggagttctgagttgtgactccaaatgaaaacccaggttgggttgaaagtattggtgtcaatctgtgagattatttatcacttcagattgaatatatgatttggttttggtaaaaaaaaaaaaaaaaaaaaaaaaagggcggccgccggataattgagtactactgaaaggatggggacgggtaatccgaaattaatagtagaaggggctagagttacagtgattaaacaaggaagggggcacaggagaagggggcgcagtccaaggcctcatgatgattatggtggtcgtggtaaggatctcccaaccagt

SEQ ID NO: 259184 - DNA, 761 bp, Zea mays
cgtcatctccaagtgcgtgcgccggccgccccctatcccgccggccctgtgtgtgttccccgctaccagccatggcgtcgccgttctccgtgccttcgctgatcatggaggaggaagggcggttcgaggcggaggtggcggaggtggagtcgtggtggggcacggagcggttccggctcaccaagcgcccctacaccgcccgcgacgtggtcctcctccggggcacgctccggcagagctacgcgtcgggggagatggccaagaagctgtggcgcacgctcaaggcgcaccaggccggcggcaccgcctcccgcaccttcggcgcgctcgaccccgtccaggtcaccatgatggccaagcacctggacaccatctacgtctccgggtggcagtgctcgtccacgcacacctccaccaacgagcccggcccggacctcgccgactacccctacgacaccgtgcccaacaaggtggagcacctcttcttcgcgcagatctaccacgaccgcaagcagcgggaggcgcgcatgtcgctgccccgcgccgagcgcgcgcgggcgccgtacgtcgacttcctcaagcccatcatcgccgacggcgacacgggcttcggcggcgccacggccaccgtcaagctctgcaagctcttcgtggagcgcggggcggccggggtccacctcgaggaccagtcctccgtcaccaagaagtgcggccacatggcgggcaaggtgctcgtcgccgtctccgagcacgtgaaccgc

SEQ ID NO: 259185 - DNA, 2008 bp, Zea mays
gcccttcttgactttgtctccgcagtctatcatggaaacaagctcaactgggacaaacatacctcagtttgttcatggcatggcgtaaaatgctcagaagatcagtcacaagtttttgaattgagggtaccggctgctggtcttatcggagtaatttctccaaacactcttggcaagctttattctcttcaagtactgagcctgcggtctaatcgattgaccggaagtcttccagctgatgtggcctcccttccgtctttacgttccatatacctacagcacaatgaactttcaggagggttgccttcttccttcagtcctaacctcagtgtaatagatttctccgaattcggctcgagaggagaagtacctgcaagtttacaaaacctcactcagttaaccgttcttaatttgcaagataattctttctctggatccatccctgacctcaagcttcacagtctgaaactattaaatctgagcaacaatgaactgaaaggctcaattcctcgatctctccagaaatttccaaagggttcattttcagggaatcatggactgtgtgggctacctctagctgaatgctcacatccttcactagcacgctcacctgaatcatctccatcgcctcaatctccacctttgacacatcatgataagaaactaggcacgggtttcatagttgcagttgctgttggtgggtttgcattgctgatgctagtcgtggttgtgtgcttttcaaagaggaaaggcaaggacgagattgatgtggaatccaaaggtaagggtactgccaccaggagcgagaagccgaagcaagaattcagtagcggcggccaaattgctgagaagaataagttagtgttcttggagggttgcacctatagctttgacctggaggatctactgagggcttctgcagaagtccttggcaagggtagttatggaactgcttacaaagctatactcgaagatggtactgtcgtggtagtgaaaagattaaaagatgttgtggcagggaaaagagagtttgagcagcagatggagctcatcgagaggttgggcaaacatgcaaacctactcccactacgcgcctactactattccaaagacgagaagctcatcgtgtatgattatattgacactggaagtgtctcggccatgttgcatggtatccggggtgttaccgcgaagacaccgttagactggaactccagaatgaaggtcatccttggaacagcatatggaattgcacatatacattcagaagggggcgcaaagctcacccatggcaatgtcaagtcaaccaacgtactcgtagaccaagatcacaatccttccgtctcggactatggcctcagcgctctgacgagtgtgccggtcaacgcatctcgcgtcgtggtcggctaccgtgctccagagatagtcgagaaccgcaagatcacccagaagtccgacgtctacagcttcggcgtcctcctcatggagatgctcacagggaaggccccgctccagacccaggggaacgacgacgtcgtcgacctgccgagatgggtgcactcggtggtccgggaggagtggacggccgaggtgtttgacgtggagctgatgaagcaccagaacatcgaggaggagctggtacaaatgctgcagatagccatggtgtgcacggccaagtcgccagaccggcgcccgacgatggaggaggtgatcaggatgattgaggggctccgccagtccacctcggagagccgcgcgtcttctgatgagaaatccaaggagtcgaaccctccatcggtgtaaatcctgcgcagctcccttcgtccgcttgatcggttgttgttgccagttgcacctcatttgatttgttagctaatttatttatgattgagtttcttgtaaaccgtggttagcatctgctgcatttagcctcagatagaaagaactgagctttcttattgataaaaaaaaaaaaaaaaaaagggcggccgcagaattcttccgctgg

SEQ ID NO: 259186 - DNA, 1659 bp, Zea mays
ctagttctagagcggccgccaccgcggtgaacacccacgcgtccggctcaggccgtggcttccacccacagccttcgcacttccctccttcctcgcaaatggccgtcgccgtccccaacgctcccggccgcctcttccttctccaatccaccccgttcccgaaccctagcagctcggcatccgccgctcgagcccaatccttccgcgtaccacccctccgcctctcgctattccgacgcatggctgggcgctcgctgacggtgatcgcaggcgcctccggcggctccgaacgagatctcagcgcctccgcagtctccgtggaggccctggactccatcgcctccgattctgacttagagacgaaggagcccagtgtgtcgacgatgctgacgagcttcgagaactcgttcgacaagtatggggctctgagcacaccgctgtaccagaccgccacctttaagcagccttcagctacagattatggaacttatgattacactagaagtggtaaccctactcgtgatgttctccagagcctcatggctaagcttgagaaagcagatcaagcattctgcttcaccagcgggatggcggcattagctgcagtaacacacctccttcaggctggacaagaaatagttgctggtgaggacatatatggtggttctgatcgtctactctcgcaagttgtgccaagaaatggaatagttgtaaaacgagtagatacaacgaaaattagtgatgtggtgtctgcaattggaccctccactagactggtttggctcgaaagtcccacgaaccctcgtcagcaaattactgacattaagacaatctcagagatagcacattctcatggtgctcttgttttggttgacaacagcatcatgtctccagtgctctcccgtcctatagaactgggagctgatatcgtgatgcactcggctaccaaatttatagcgggacatagtgatcttatggctggaattcttgcagtgaagggtgagagtttggctaaagaggtagggtttctgcaaaatgctgaagggtcgggtctggcaccttttgactgctggctttgcttgaggggaatcaaaaccatggctctgcgggtggagaaacaacaggctaatgcccagaagattgctgaattcctggcgtctcacccgagggtcaagcaagtaaactacgctgggcttcctgaccatcctgggcgagctttacactattcccaggcaaagggagcgggctctgttctcagttttctcaccggctcactggccctctcaaagcacgtcgtggagaccaccaagtacttcagcgtaacagtcagcttcgggagcgtgaagtccctcatcagcctgccgtgcttcatgtcccacgcatcaatccctgcctcggtccgcgaggagcgtggcctaaccgacgacctcgtccggatatcggtcggcatcgaggatgtcgaggacctcatcgccgatctggaccgcgcgctcagaactggcccggtgtagacatcgccgatccttaggtcatgtcaagctatcttttgatgattcattggttgactgcttgcgtgatgataataatgggaatgttgcttggataaaaaaaaaaaaaaaaaaaaaaaaaaaaaaaaaaaaaaaaaaaaagggcggccgc

SEQ ID NO: 259187 - DNA, 1479 bp, Zea mays
gtcgacccacgcgtccgcggacgcgtgggctcggctgctacgtagctatatatagctgcagaacagttttagttaccggactgtaggcacaccaagctagatatccaaggggcccccccggaaactagctagctaggatgccaacagcagaggcgacgacgcccgtgccgccggagctgtcctccgggcaagggcggacggtttgcgtgaccggagctggagggttcattgcctcctggctcgtcaagcgcctcctggagaagggctacacagtccgcggcacggtcaggaaccctgtggatccaaagaacgaccacctgagggcccttgacggcgccgtcgaccgtctcgtcctcctccgcgccgacctgctggacccacagagccttgccgaggccttctccggctgtgacggcgtcttccacgccgcctccccggtcaccgatgaccctgagatgatgatcgagccagcgatccggggcacgcgctacgtgatggcggcggcggcagacgccggagtgaagcgcgtcgtgttcacgtcctccatcggcaccgtgtacatgaacccctaccgtgaccccagcaagcctgtggacgacacctgctggagcgacctcgagtattgcaagaacacccagaactggtactgctacgccaagacggtggcggagcagggcgcgtgggaggtggcgcggaagcgagggctggacctggtggtggtgaacccggtgctggtgctgggcccgctgctgcagccgacggtgaacgccagcacggaccacgtgatgaagtacctgacggggtcggccacgacctacgtgaacgcggcgcaggcgtacgtgcacgtcagggacgtggccgaggcgcacgtccgggtgtacgaggcgccccacgcgcacggccgctacatctgcgccgagagcaccctgcaccgcggcgacctctgccgcgtcctcgccaagctcttcccggagtaccccgtacccaccaagtgcaaggaccaggttaaccctccggtggtaggatacaagttcaccaaccagaggctcaaggatctggggatggacttcgtgccggtcctgcagtgcctctacgagacggtcaccagcctccaggagaaaggcatgctgcccgtgcttccgacaaaacaagaccatgaccaactcggcaaatcatgatcatattcatatccctcgttgacgatactagctgctgctaccacgcatatcatatcatatatataagatatatatatatatagtggattcatatagttaaccttatatatatgtgtgtgtgtgtgtgttattgtgtgttattagtgtgtacaattaaatggcaactctaatgggtgcatgcatctgcatgcatgctttcctgacaagtgccacacatgcatgcaatgtatctctttggacgatttatatacaatactccgttgccaaataaaaaaaaaaaaaaaaaaaaaagggcggccgc

SEQ ID NO: 259188 - DNA, 1541 bp, Zea mays
gtcgacccacgcgtccggccacattggcccctcaaccatcctccctccacagatctctccggggaggcagcaacagttatgtcatatcattgtcgcgtcctcgtccccgttccatttcattatccccccggagctggtgcgcgagtcggagctggtgcagggtcacccttcccctcggcctcaagagctctgcggttgccgcggccaagggcgtccgtggagaagcgggagcaggtggcggcgatggaagagcaaggcggccaggcggcgctcgggtgggcggccagggacgactccggcgtcctctccccctacagcttctccagaagggttcctaaagacgacgatgtcacgatcaaggtgctctactgcgggatctgccacaccgacctgcacgtcatcaagaacgactggcgaaacgccatgtacccagtcgtcccggggcacgagatcgtgggcgtggtgaccggcgtcggcggcggcgtcacgcggttcaaggccggcgacacggtcggcgtgggctacttcgtggggtcctgccgctcctgcgacagctgcggcaagggggacgacaactactgcgcggggatcgtgctcacctccaacggcgtcgaccacgcgcacggcggcgcgcccaccagggggggattctccgacgtcctggtcgcgagcgagcactacgtggtccgcgtccccgacggcctggcgctggaccgcaccgcgccgctgctctgcgccggcgtcaccgtgtacagccccatgatgcgccacggcctcaacgagcccggcaagcacctcggcgtcgtcggcctcggcggcctcggccacgtcgccgtcaagttcggcaaggccttcgggatgaaggtcaccgtcatcagcacgtccgccagcaagcgccaggaggccatcgagaacctcggcgcggacgagttcctcatcagccgggacgaggaccagatgaaggcggcgacggggaccatggacggcatcatcgacacggtgtcggcgtggcacccgatcacgccgctgctggcgctgctgaagccgctggggcagatggtggtcgtgggcgcgccgagcaagccgctcgagctgccggcctacgccatcgtgccgggcgggaagggcgtggctgggaacaatgtcggcagcgtcagggactgccaggccatgctcgagttcgcggggaagcacggcatcggggccgaggtcgaggtcatcaagatggactacgtcaacacggccatggagcggctcgagaagaacgacgtccgctaccgcttcgtcatcgacgtcgccggcagcctcggctctgccgcctaggcatggctgcaaaggtttcaatcagagcccagccgcaataatttgttagctaccgaatgaatgatggtctacgcttgttgatgagttggtgctttgtcgtggttttgtggatgtaataattcgatgtacaaataaaaaaaggggagacaaggtgcttgttcccttggtttggtgacaaaaaaaaaaaaaaagggcggccgcaaaaaccacccgggagc

SEQ ID NO: 259189 - DNA, 1429 bp, Zea mays
cccacgcgtccgcccacggtcgacccacgcgtccgcccacgcgtccggtcacaagtgagggcgggagaggttgaggttgaggaagagcagaggaatccattccaggagtgtttaatggcgggaggcaaggaagcgcacgggtgggcagccagggatgtctctggtcacctctccccttaccacttctcacggagggttcagagagacgacgacgtcaccatcaaggtgctcttctgcgggctttgccacactgacctccacgtcatcaagaacgagtttggcaacgccaagtaccccgtcgttcccgggcacgagatcgtcggcgtcgtcaccgacgtcggctccggcgtcacaagcttcaagcccggcgacacggtgggcgtgggctacttcgtcgactcctgccgcagctgcgacagctgcagcaaggggtacgagagctactgcccgcagctcgtggagacgtccaacggcgtgagcctggacgacgatgacggcggcgccaccaccaagggcggcttctccgacgccctcgtcgtccaccagcgctacgtggtgcgggtcccggccagcctgccgcccgccggggccgcgccgctgctgtgcgccggcgtcaccgtgttcagccccatggtgcagtacggcctgaacgcgccggggaagcacctgggcgtcgtcggcctcggcggcctcggccacctggccgtccgcttcggcaaggcgttcgggatgaaggtcaccgtcatcagcacgtcgctgggcaagcgggacgaggccctcggccgcctcggtgccgacgcgttcctggtcagccgcgaccccgagcagatgagggcggcggcgggcaccttggacggcgtcatcgacacggtgtcggccgaccaccctgtcgtgccgctgctggacctgctcaagccgatgggccagatggtcgtcgtcggcctgcccaccaagccgctccaggtgcctgccttcagcctcgtcgccggcgggaagcgcgtggccgggagtgccggcggcggcgtcggggagtgccaggccatgctcgactttgccggcgagcacgggatcaccgcggatgtggaggtcgtcgggatggactacgtcaataccgccatccagcgcctagagaggaacgatgtcaggtaccgcttcgttgtcgacgtcgcgggcagcaagattggaggctaggcatcaccattcctagtgttctgtcgatcgacgtgtgatttgcttcttcctcgagcgtgtcttattgttctggttggagcacgtacgcggccatcacacgcaggcgtggataataaacaaggtagagtttcgggttgtgtcgtttctggatgtatggtgccggtggataataaacaagcttaattggcgtggtcgaaaaaaaaaaaaaaaaaaaaaaaaaaaaaaaaagggcggccgc

SEQ ID NO: 259190 - DNA, 551 bp, Zea mays
caggtctgtccgggtgggggcgcacagcagttatgtcatatcattgtcgcgtcctcgtccccgttccattcccttatccccccggagctggtgcgcctgctccctcgctcggagtcggagctagtgcagggccacccttcccctcggcctcgagagctctgcggttgccgcggccaagggcgtccgtggagaagcgggagcgaggtggcggcggtgggagagcatggcggccaggcggcgctcgggtgggcggccagggacgactccggcgttctctccccctacagcttctccagaagggttcctaaagacgacgatgtcacgatcaaggtgctctactgtgggatctgtcatacctacctgcacgtttattaagaacgactggtgaaacgtcatgtacccagtttttccggttcacgagaccttgtactttgtttctcttgtcctttttttctctttttctttttttattatttctcttttttttttcttttctttttatttttctttttttctttttattttctttatttttatttttttctttttta

SEQ ID NO: 259191 - DNA, 244 bp, Zea mays
cccacgcgtccgcaagttcgtggttagtgattacgaccagcaagtcacaagtgagggcgggatatgttgaggttgaggaagagcagaggaatccattccaggagtgtttaatggcgggatgcaaggaagcgcacgggtgggcagccagggatgtctctggtcacctctccccttaccacttctcacggagggttcagagatacgacgacgtcaccatcaaggtgctcttctgctggctttgcca

SEQ ID NO: 259192 - DNA, 3345 bp, Zea mays
cgcctccctaaggccgggacctgcagcagcacgagcagcacgtcgtgccgctccaaccatctcgcttccgtgcttagcttcccgccgcgccatggcgtcgaccaaggctcccggccccggcgagaagcaccactccatcgacgcgcagctccgtcagctggtcccaggcaaggtctccgaggacgacaagctcatcgagtacgatgcgctgctcgtcgaccgcttcctcaacatccttcaggacctccacgggcctagccttcgcgaatttgtccaggagtgctacgaggtatcggccgactacgagggcaaaggagacacgacgaagctgggcgagctcggcgccaagctcacggggctggcccctgccgacgccatcctcgtggcgagctccatcctgcacatgctcaacctcgccaacctggccgaggaggtgcagatcgcgcaccgccgccgcaacagcaaactcaagaaaggtggcttcgccgacgaaggctccgccaccaccgagtccgacatcgaggagacgctcaagcgcctcgtgtccgaggtcggcaagtcccccgaggaggtgttcgaggcgctcaagaaccagaccgtcgacctcgtcttcaccgcgcatcccacgcagtccgcccgccgctcgctcctgcagaaaaacgcgaggatccggaattgtctgacccagctgaatgccaaggacatcactgacgacgacaagcaggagctcgatgaggctctgcagagagagatccaagcagccttcagaactgatgaaatcaggagggcacaacccaccccacaggacgaaatgcgctatgggatgagctacatccatgagactgtatggaagggcgtgcctaagttcttgcgccgtgtggatacagccctgaagaatatcggcatcaatgagcgccttccctacaatgtttctctcattcggttctcttcttggatgggtggtgaccgcgatggaaatccaagagttaccccggaggtgacaagagatgtatgcttgctggccagaatgatggctgcaaacttgtacatcgatcagattgaagagctgatgtttgagctctctatgtggcgctgcaacgatgagcttcgcgttcgtgccgaagagctccacagttcgtctggttccaaagttaccaagtattacatagaattctggaagcaaattcctccaaacgagccctaccgggtgatactaggccatgtaagggacaagctgtacaacacacgcgagcgtgctcgccatctgctggcatctggagtttctgaaatttcagcggaatcgtcatttaccagtatcgaagagttccttgagccacttgagctgtgctacaaatcactgtgtgactgcggcgacaaggccatcgcggacgggagcctcctggacctcctgcgccaggtgttcacgttcgggctctccctggtgaagctggacatccggcaggagtcggagcggcacaccgacgtgatcgacgccatcaccacgcacctcggcatcgggtcgtaccgcgagtggtccgaggacaagaggcaggagtggctgctgtcggagctgcgaggcaagcgcccgctgctgcccccggaccttccccagaccgacgagatcgccgacgtcatcggcgcgttccacgtcctcgcggagctcccgcccgacagcttcggcccctacatcatctccatggcgacggccccctcggacgtgctcgccgtggagctcctgcagcgcgagtgcggcgtgcgccagccgctgcccgtggtgccgctgttcgagaggctggccgacctgcagtcggcgcccgcgtccgtggagcgcctcttctcggtggactggtacatggaccggatcaagggcaagcagcaggtcatggtcggctactccgactccggcaaggacgccggccgcctgtccgcggcgtggcagctgtacagggcgcaggaggagatggcgcaggtggccaagcgctacggcgtcaagctcaccttgttccacggccgcggaggcaccgtgggcaggggtggcgggcccacgcaccttgccatcctgtcccagccgccggacaccatcaacgggtccatccgtgtgacggtgcagggcgaggtcatcgagttctgcttcggggaggagcacctgtgcttccagactctgcagcgcttcacggccgccacgctggagcacggcatgcacccgccggtctctcccaagcccgagtggcgcaagctcatggacgagatggcggtcgtggccacggaggagtaccgctccgtcgtcgtcaaggagccgcgcttcgtcgagtacttcagatcggctacaccggagaccgagtacgggaggatgaacatcggcagccggccagccaagaggaggcccggcggcggcatcacgaccctgcgcgccatcccctggatcttctcgtggactcagaccaggttccaccttcccgtgtggctgggagtcggcgccgccttcaagttcgccatcgacaaggacgtcaggaacttccaggtcctcaaagagatgtacaacgagtggccattcttcagggtcaccctggacctgctggagatggttttcgccaagggagaccccggcattgccggcttgtatgacgagctgcttgtggcggaagaactcaagccctttgggaagcagctcagggacaaatacgtggagacacagcagcttctcctccagatcgctgggcacaaggatattcttgaaggcgatccattcctgaagcaggggctggtgctgcgcaacccctacatcaccaccctgaacgtgttccaggcctacacgctgaagcggataagggaccccaacttcaaggtgacgccccagccgccgctgtccaaggagttcgccgacgagaacaagcccgccggactggtcaagctgaacccggcgagcgagtacccgcccggcctggaagacacgctcatcctcaccatgaagggcatcgccgccggcatgcagaacactggctaggcggcttctcttcactcacctgcagagtgcaccgcaataatcagcttccggatggtggcgttttgtcagttttggatggaaatgccgaactggcagcgtctgttttccctatgcatatgtaatttcctgcctctttatattcactcttgttgtcaagtccaagtggaaaatcttggcatattatacatattgtaataataaacatcgtacaatctgcatgctgttttgtaataattaattaatatcccagcccattggatggacttgtttaaaaaataatcttaattatacaaaaataaaaatctttgcttataaaattcttaaaacattgtggtcctctt

SEQ ID NO: 259193 - DNA, 830 bp, Zea mays
gcctcaccgcctcatctgctctcttcccccgtcttcttcccaagctgccacgttgcctccctccgctccagcggcccatggcctccatggcgttcgccctggcgggggccttcaagggcctctccctggcgcccaccaccaccacctcttccttcccgcgctgcgaccgcgcctcgctctccgtcggcggcgcagcgggcgtgccggcggtgccggtgccggcgcggcggctcaccatccagatggcgcacaagaagggggccgggagcaccaagaacggccgcgactccaagggacagcgcctcggggtcaagatatacggcgaccagctcgccaagcccggggccatcatcatccgccagcgcggcaccagggtctatcctggaaataacgttggaatgggcaaggatcacacactcttttctttgatagatggactcgtcaagtttgagaagtatgggccggacaagaaaaaggttagtgtttacccatatgagaaggagcctgaaaacccaaacagttacagagcaaggaagagagagtacttccgcatgcggcgtgaacggaagaaggcgagagcggagggcgccgctgagcctcagttggtactagctgctgttgatgaaaactctgaggtcagcgcggactgctgataagtttcctgtgtggtgtttctctttttcacagcccttgttacactttttcttccttaattgtaagaccacatgatctataaaggtcatatttacatgtgttgtttagataaatggatatgttctacttgtactttttgtgcggaagttgtgctttagagtcacagtgggggtcta

SEQ ID NO: 259194 - DNA, 774 bp, Zea mays
cccacgcgtccgcaggggtgtagatacaagccgtgataaacaacagccttgccaaattggcttgcttatataagagcaataggtctcaacaagttgctgcacgctcgagaggaaagggcatatcgaggaggtttttagggtggtggtggtgttgtgaggagctgctgccgctgctctccagtctccaccgatggcgatcaagaacatgacggtggcggcgacgacgcggtcgctggacgcggacatgacggtggacgagttcaaggagtggctgcggcggttcgacacggaccaggacgggcgcatcagccgcgacgagctgcggcgcgccctgcgtgccatccgctcccggttcacggggtggaggagcaggcagggcatcagttacgccgacgctgacggcgacggctacatcgacgacagcgaggtcgatggcctcatcgagttcgcgcagaagaacctcggcctcaagatcgtcgcctactgatctcacatggggcgcggcgcgcggcggtcggggggtgggacgcactagctcgccatgagctagctatagcgacaatgcaactcaccatcactctctccggctaaaataagagctgcttgatctatcatcgcttgtctgttaaaattgctttccatgtacttagtcaattcgagttcgggatcacgcactagctctctacgctgttgttgtgtgatttatgaaaggtgtgtatgatacccatgcgtggctgcctgcatcggcttgcataccctagctccgcccgtgtg

SEQ ID NO: 259195 - DNA, 552 bp, Zea mays
  unsure (1)..(552): unsure at all n locations
tccgggccgaccacgcgtccacccaagcgtccgcggacgcgtgggcgctgaagcggataagggaccccaacttcaaggtgacgccccagccgccgctgtccaaggagttcgccgacgagaacaagcccgccggactggtcaagctgaacccggcgagctagtacacgcccggtctggaagacacgctcatcctcaccatgaaaggcatcgccgccggcatgcagaacactggctaggcggcttctcttcactcacctgcagagtgcaccgcaataatcagcttccggatggtggcgttttgtcagttttggatggaaatgccgaactggcagcgtccgttttccctatgcatatgtaatttcctgcctctttatattcactcttgttgtcaagtccaagtggaaaatcttggcatattatacatattgtaataataagcatcgtacaatctgcatgctgttttgtaataattaattaatatcccagcccattggatggacttgtttaccatggtgttacttcnnannaaaaaaaanaataaaaaaataaatt

SEQ ID NO: 259196 - DNA, 643 bp, Zea mays
ccggtattccagggtcgacgcacgcgtccgcccacgcgtccgaggatattctcgaaggcgttttattcctgaagcatgggctggtgctgggcggccattacatcaccacgcctgaacgtgttccaggcctacacgctgaagcggataagggaccccaactgcaaggcgacgccccagtcgccgctgtccaaggagttcgccgacgagaacaagcccgtcagactggtcaagctgaacccggcgagcgagtaccctgacggcctggaagacacgctcatcctcaccatgaaaggcatcgcctgctgcatgcagaacactggctaggcagcttatcttcactcacctgcagagtgcaccgcaataatcagctttcggatggtggcgttttgtcagttttggatggaaatgccgaactggcagcgtctgttttccctatgcatatggaatttcctgcctctttatattcactcttgttgtcaagtccaagtggaaaatcttggcatattatacatattgtaataataagcatcgtacaatctgcatgctgttttgtaataattaattaatatcccagcccattggatggacttgtttaataaaaaaaaaaaagataaaatgcataaaaaaagagaagaataaagtt

SEQ ID NO: 259197 - DNA, 435 bp, Zea mays
gccaaaatggcggccttggcaacggagaattacgcccccttctcctccaaggaggccccctcctccaataactcaaattcggtaaaaccggaaaccaattacggaaggataaaaaccggaacccggcaacccaaaagaaggcccggcggcggaataacaaccctggccgcaaccccctgattctccccgtgaaccaaaacaagtttcaacctccccttgtggctgggagtccgcgccgccttcaagttccccatcgacaaggacgtcaggaacttccaggtcctcaaagagatgtacaacgagtggccattcttcagggtcaccctggacctgctggagatggttttcactagaggatagttcggcactggcagattgttcgaccatatgcctgtcgaggcatttgacataccctggaggatgccgctcacggac

SEQ ID NO: 259198 - DNA, 860 bp, Zea mays
cccacgcgtccgcccacgccccatcagccaatctcctcctcctcctccgctctcagacgagcagcggttgccatcactctccacttcccacgcccgctgcgggctcgcaggcggcagagaattgtctgtgccgccgggtgggaatttgattcggtcggattcgctgcgccgcgatgccggagcggcaccagtccatcgacgcgcagctgcggctgctggcccccgggaaggtctccgaggacgacaagctcgtcgagtacgacgccctcctcgtcgaccgcttcctcgacatcctccaggacctgcacggcccccacctgcgcgaattcgtgcaggagtgctacgagctctcggcggagtacgagaacgaccgggatgaggctcggcttggcgagctcgggagcaagctcaccagcctgccgccgggggactccattgtcgtcgccagttccttctcgcacatgctcaacctcgctaacctcgccgaggaagtgcagatcgcgcaccgtcgccggatcaagctaaagcggggagacttcgccgacgaggcctccgcgccgacggagtcggacatcgaggagacgctcaagcgcctcgtctcgcagctcggcaagtcgcgggataggaggtcttcgacgcgctcaagaaccagaccgtcgacctcgttttcacccgccaacctaacacagtcgggaggaaggctttttttcaaaaacaatgaaagatcccgaactggctgaagcaactttaatgccaagacattaattgttaccaccaaccagaacctggataagcaccttaaaaggaaaattaaacctgttttaaaaatgaagaaattcggagaaacccttccaattctt

SEQ ID NO: 259199 - DNA, 564 bp, Zea mays
cgtgatcgaccgggatgaggctcggcttggcgagctcgggagcaagctcaccagcctgccgccgggggactccattgtcgtcgccagttccttctcgcacatgctcaacctcgctaacctcgccgaggaagtgcagatcgcgcaccgtcgccggatcaagctaaagcggggagacttcgccgacgaggcctccgcgccgacggagtcggacatcgaggagacgctcaagcgcctcgtctcgcagctcggcaagtcgcgggaggaggtcttcgacgcgctcaagaaccagaccgtcgacctcgttttcaccgcccaccctacacagtccgtgaggaggtctcttctccagaagcatggaaggatccgtaactgcctgaggcagctttatgccaaggacatcactgctgacgacaagcaggagcttgatgaggcacttcagagggagattcaagctgctttcagaactgatgaaatccgcagaacccctcccactcctcaagatgaaatgcgtgctggaatgagttacttccatgaaactatatggaagggtgtaccaaaattctt

SEQ ID NO: 259200 - DNA, 287 bp, Zea mays
gctcgatcgagtaggcagggcatcagttagcgccgacgctgacggcgacggctacatcgacgacagcgaggtcgatggcctcatcgagctccatcctgcacatgctcaacctcgccaacctggccgaggaggtgcagatcgcgcaccgccgccgcaacagcaaactcaagaaaggtggcttcgccgacgaaggctccgccaccaccgagtccgacatcgaggagacgctcaagcgcctcgtgtccgaggtcggcaagtcccccgagaggtgttcgaggcgctccaga

SEQ ID NO: 259201 - DNA, 1405 bp, Zea mays
tccacgcgtccgcccacgcgtcgacccacgcgtccgcattaccacgcctcctcacaggcacacctcacacgagcagcagcggacgataagagatgtgctgaagctgaacggtggccatgtccaccggacgcacagaggaggccgccgggagcgcggagacggcgtgcgtgacgggcgccggcgggtacatcgcctcgtggctcgtcaagctcctcctctcccgtggctacaccgtccacggcaccgtccgcgacctcagtgacaataaaaccgctcatctgaagcggttagagaatgcttccgaaaacctcaagcttttcaaggctgatgtccttgactacgacgctatggcgggtgcagtcgcagggtgccagggagtctttcatgtcgccactcctgtgccttcagggaagatcaccgatccagagcgagagatgctgggtcctgctgttaccggcaccataaacgcactcaaggctgcgtctgctgcaaatgctcgtcgagtggtcgtcgtttcatccatggttgccgttgagatcaacccgaaagactggcccagagacaagatcaaagatgagaactgctggtcagataaagagttctgcaggaacgaagagaactggtattctgtcgccaagatctcgtcagaagaggccgcacttgaatacgcgaagcagaccgggctggatgttgtgacggtcaatccagctgtggtctttggccctcttctgcagccgacgctcaacacgagctgccagttcctcgtctacttcctgaaaggaggacctgatcgaatgagggacaagctttggcacatcgtcgacgtcagggacactgccgatgctctcctgcttgtgtacgagacaccacaagcctccggcaggcacatctgcgctcctcatttcatcagcgcgcgtgacctgctggagctgctgaagacgatgtaccctgatgattaccctttcattagcaaggagagcatctacgacatggagcacccagctccaatgacgtccgacaagctcaagaaactgggatggaaggtcaggccgctgaaggaaacaattgcggaaaccgttgagttctgccagcatgctgggtttctcgaggacgtggagggattccgttttcctcccctgtacaacataatctagtttacaataacgtcagtagtgtaagagcaactccaacggaatccgtaaaatttacacaaaaaaaaaaaaaaaaaaaagggcggccgcaaatagctcgttggaaagcaagctctgatagatccgtcattcatcgctgttttgttttaatcccgcggcaaggaagatgcaggttctgtctgaggtgccctagtccagctaggtatggctagaccagagaacctgttcatttcccaataaagctttatttaggt

SEQ ID NO: 259202 - DNA, 343 bp, Zea mays
aattgcggaaaccgttgagttctgccagcatgctgggtttctcgaggacgtggagggattccgttttcctccccctgtccaccataatctagtttccaataacgtcagtagtgtaagagcaactccagcggaatccgtaaaatttacacaaaaactttgatttggaggctctctaaaataaatagctcgctggaaagcaagatctgatagatccgtcatttatcgctgttttttttttaatcccgcggcaaggaagatgcaggttctgtttgattgccctagaccagctaggtatggctaggccaggttcctgttcgtttcccaataaagctttatttaggta

SEQ ID NO: 259203 - DNA, 2725 bp, Zea mays
cccgggtgtcggaggagcttcgcgccgcgctctcagcgttccagcagaccttcgtcgtgtccgatgccacccgccctgaccaccccatcctctacgccagcgctggattcttcaacatgacgggctactcctccaatgaggtcgtcggaaggaactgccgcttccttcaaggttctgggaccgaccccgtagagatttccaagatcagacaggctctcgcagctgggtcaaattactgtggccgtatcctcaactacaagaaggatggtacaccattctggaacctcctaaccgttgcccccacgcggccggaggatggcagggtcctcaagttcattgggatgcaagtggaagtaagtaagtacacggaaggtaacaaagatactgctcttcgtccaaatggattgccagagtcactcatcaaatatgatgcaaggcagaaggatcatgctcgtagctcagtctcggagctcctacttgccctgaaggatccacggtcactgtcagaatcaagaaacaataccttaaaaaggaaatcacaggaatcagcaggttcagctctagttcccggcaagagaagctccgaaactggatcccgtcgtaactcacatagtggaatcagaaactctctacaaaaaatcagtgaagtacctgaaggagggaataagacccggaaattctggtttgcgttcttttatgggccttattggtatgggacatgggaatgtagagaagaacattctaaaaccaagggaagatcccctacttgatagcgatgatgagagaccagatagcttcgatgacgatttcaggaagaaagaaatgagaaagggtatagatttggctaccacacttgaacgtattgaaaagaattttgtcatcaccgacccgaggttaccagataatccaattatatttgcatcggatagctttttgcgtttgacagagtattgccgcgaagaaatattgggaagaaactgcaggtttcttcaaggacctgaaactgaccgtgggacagtaaagaagataagagatgccatagataaccaaacagaagttactgttcagctgataaattatacaaagagcggtaagaaattctggaacctctttcacttgcagcctatgcgtgatcagaagggggatgttcaatacttcattggggttcaattggatggaactgagcgtgttcgagaggctgctgcaaaagatggtgccatactggttaagaaaactgcacacaatattgatgaggctgcaaaggagcttccggatgctaatttgagacctgaggatctatgggctaatcactcaaaaccagtcttgccaaagccacatatgaaggatactgcatcgtggagagccatccaaaaggttcttgagaacggtgaaagcattgatttgaaacatttcagaccagtaaggcctttaggatctggtgatactggcagtgtccacttggtggagttgcttggcacaggtgaatactttgccatgaaagctatggataaaagtgtcatgcttaaccgaaacaaggtccatagagctaccgctgaacgacaaatccttgatatgttggaccacccattccttccgacattgtatgcatcatttcagacaaagacacatatatgtcttattgttgactattgtgctggtggggaactctttatgctccttgataggcaacctatgaaggttctgaaggaggatgcggtcggccgctatgctgcagaagtggtcacagcacttgaatacctacattgccaaggtataatctacagagacttaaagccagagaacattttacttcatagagatgggcacatttcattgacagactttgatttgtcttgcttgacatcctgccgaccacaagtgtttcttccacacgatattgataagaagaaaaagaggaggaagagcaggagtaatcccatattttttgctgaaccaatgcgagcatcaaattcttttgttggtacagaggagtacattgcaccggagattattaccggagctggccatacgagtgctgtagattggtgggcgctaggaattcttctatatgagatgttatatggttatacacccttcagagggaaaacaagacaaaggacatttgctaatattctgcacaaggatatcagatttcctgcgagcatacaggtgagcctggcggcaaggcagctgatataccggttgctacaccgagaccctgcaaataggctaggttcctatgagggcgctatggagatcaaacaacaccccttctttcgtggcataaactgggctctagttcgtgccgccacgcccccagagctggaggctcccctccaggatacattggaggccacactgcctcctcctgcagctgatgcggctcacaccgatatgttctgatcatacattgatccatgatgctacatgttaatttgcttaaaggaagaaaaaatattagatgatgaagatgcatgactttggcatagatgagaacaataatgtatgttaaggactaattatcttgatccatctatgcatgctcacaattagaataagattggatgtgtatattgtttctgtggttgcaatatacgcacgagtctatgaaaggatctatggatagcttgaggggatgacagacactaggcatgttgattagtactccgtttcgttttacaagtcgtttccaacagcttcgtgctgattaaggaatctatgaatc

SEQ ID NO: 259204 - DNA, 2293 bp, Zea mays
gtcgacccacgcgtccgaaaactcccatttcgccgtccgtgacgcgagagacctcttcgcatcccgaggcggcgcttttggggtcggaagcgacacgggcgcccggcgggtccgcgggtggtggtgctactgctagcaagcagcagcaggcgacgctaggcgagagccccagtcggagcaggccaccatgtgcggcatcctcgctgtcctcggcgtcgctgaggtctccctcgccaagcgctcccgcatcattgagctctcgcgcaggttacggcaccgagggcctgattggagtggtttgcactgtcatgaggattgttaccttgcacaccagcggttggctattatcgatcctacatctggagaccagcctttgtacaatgaggataaaacagttgttgtaacggtgaacggagagatctataaccatgaagaattgaaagctaagttgaaaactcatgagttccaaactggcagtgattgtgaagttatagcccatctttacgaagaatatggcgaagaatttgtggatatgttggatggaatgttctcctttgttcttcttgatacacgtgataaaagcttcatcgcagctcgtgatgctattggcatctgccctttatacatgggatggggtcttgatggatcagtctggttttcttcagagatgaaggcattgagtgatgattgtgaacgcttcataacattccccccagggcatctctactccagcaagacaggtggtctaaggagatggtacaacccaccatggttttcagagactgtcccttcaaccccttacaatgctctcttcctccgggagatgtttgagaaggctgttattaagaggctgatgactgatgtgccatttggtgtgcttttatctggtggactcgactcttctttggttgcatctgttgcttcacggcacttaaacgaaacaaaggttgacaggcagtggggaaataaattgcatactttctgtataggcttgaagggttctcctgatcttaaagctgctagagaagttgctgattacctcagcactgtacatcatgagttccacttcacagtgcaggaggggattgatgccttggaagaagtcatctaccatattgagacatatgatgttacaacaatcagagcaagtaccccaatgtttttgatgtcacgcaaaatcaaatctttgggtgtgaagatggttatttctggcgaaggttcagatgaaatttttggtggttacctttattttcacaaggcaccaaacaagaaagaattccatgaggaaacatgtcggaagataaaagcactacatctgtatgactgcttgagagctaacaaagcaacttctgcctggggtgttgaggctcgtgttccattccttgacaaaagtttcatcagtgtagcaatggacattgatcctgaatggaagatgataaaacgtgacctcggtcgaattgagaaatgggttatccgtaatgcatttgatgatgaggagaggccctatttacctaagcacattctctacaggcaaaaggaacagttcagtgatggtgttgggtatagttggatcgatggattgaaggaccatgccagccaacatgtctccgattccatgatgatgaatgctggctttgtttacccagagaacacacccacaacaaaagaagggtactactacagaatgatattcgagaaattctttcccaagcctgcagcaaggtcaactgttcctggaggtcctagtgtggcctgcagcactgccaaagctgttgaatgggacgcatcctggtccaagaaccttgatccttctgggcgtgctgctttgggtgttcacgatgctgcgtatgaagacactgcagggaaaactcctgcctctgctgatcctgtctcagacaagggccttcgtccagctattggcgaaagcctagggacacccgttgcttcagccacagctgtctaaccttatgtttatcacccagcaatgcttgaaacagcaaaggttgtccattgcttgtttcagtttccttccgatcatgtttttagttccatcaatcaagcaatggagacatgcttgtgcttcatacttggcagcatcgtgtttgggttttcactgggcagtactgtttaatttttatggactgaaaagactcagttttgtaaatattcgtcactgtgaccaattcctgtggtggtttatgtgatttgcagattgcagtggttagtgtatcttcccaattttcaatcctttaacacttgtggttgttaaaaaaaaaaaaaaaagggcggccgc

SEQ ID NO: 259205 - DNA, 315 bp, Zea mays
gaaacagaagtctgtgccccacctacataactcttttgattattacagcctgcagcaaggtcaactgttcctggaggtcctagtgtggcctgcagcactgccaaagctgttgaatgggacgcatcctggtccaagaaccttgatccttctggccgtgctgctttgggtgttcacgatgctgcgtatgaagacactgcagggaaaactcctgcctctgctgatcctgtctcagacaagggccttcgtccagctattggcgtaagcctagggacacccgttgcttcagcacagtgtctaacttatgctatcaccagc

SEQ ID NO: 259206 - DNA, 1492 bp, Zea mays
gtcgacccacgcgtccggcttcattcttctgaacggagaagccaagtaaggtagatcaagctacggtgtccatggagcaaggcggcaagatggcccatgggtgggctgccagggatgcctccggcctcctctccccttacagcttctcaagaagggttcagggggacgacgacgtgacgatcaaggtgctcttctgcggcatctgccacaccgacctccacatcatcaagaacgagtggggcaatgccatgtaccctgtcgtccccgggcacgaggtcgtcggcgtcgtcacggacgtcggccatggcgtcagcaagttcaaggccggggacacggtgggcgtgggctacttcgtcgactcctgccgctcctgcgagagctgcagcacggggcacgagaactactgccccgacctcgtactctcctccaacggcgtggaccaccaccaccacgacggcggcgcgagcgcgagcgcgaccaccaaggggggcttctccgacgtgctggtcgtcagccaggacttcgtggtccgggtgccagagagcctgcctccggacggcgccgcgccgctgctctgcgccggagtcacggtgtacagcccgatggtgcagtacgcgctcaacgggccgggcaagcacctcggcgtcgtcggcctcgggggcctaggccatctggccgtcaagtttgggaaggcgttcggcatgacggtcaccgtcatcagctcgtcgcctgccaagcgcgaggaggcgctcggacgccttggcgccgacgcgttcttggtgagccacgacgcctcgcaaatgaaggctgcagccgccacgatggacggcatcatcgacacggtctcggcggggcaccagatcgtgccgctgctggcgctgctgaagcccatggggcagatggtggtggtcggcgcgccgagcacgccgctggagctgccggcgtacgccatcatcacgggcgggaagcgggtggccgggaacggcgtcgggagtgtcgcggactgccaggcgatgctggacttcgcggcggagcatggcgtcaccgctgacaccgaggtcgtgccgatggactacgtcaacaccgccatcgagcggctggagaagaacgatgtcaggtaccgcttcgtcgtcgacgtcgcgggcagccagatggataccgttgcttagaagcctggatgcgtagttcgatcgagtcatgtagcagccgtcgttgtgcgtggtgtgaaattgtttgctcgtgccgtctatttgttggtgggtgtgggtcaataaactaggcagaacaattgggccgtatgcatgcatggtctgcacttcctgccattcgttgaatccttatgtacctttgaattttaaatttgactgagaaagtggatgctgaaacaccgtaggtgtatacacttgtttgtacgagcgcttccgacaatctaagccttttgagattgatcaaaaaaaaaaaaaaaaaaaaaaaaaaaaaaaagggcggccgc

SEQ ID NO: 259207 - DNA, 415 bp, Zea mays
ggcttccacttcgccccgcagctgttcctcatgtgctacggcgcggcgctcagctacccgctactggaggggatgttcctcaggcgggatcctgcgagggttccgccacgcatcaccgcactctcggtcgcattggcagccgtgctgcttgccgccatgcttggatgaacatcaaccgagagatgcacggcctgcttcaactcttgtctactgttctagatatactgtacttttaattactattcccactgtattcccaccgttgaagcacaacaacgcagtgaactaaacgacgaacgagaagaagcccaaggttaattagaactaatttatgatatacgttcggactaattattctacacatcaaagatatttatgtaatgcggtataatatatataatttgtttactattgc

SEQ ID NO: 259208 - DNA, 251 bp, Zea mays
gtcgacccacgcgtccgcaaaaagcttggccgttgcatttccccccgagaagaagcccggatacttataggttaattagaactaatttatgatatacattcagactaattattctacacatcaaaggtatttatgtaatgcggtacaatatatataatctgtttactaaaaaaaaaaaaaaaaaaaaaaaaaaaaaaaaaaaaaaaaaaaaaaaaaaaaaaaaaaaaaaaaaaaaaaaaaagggcggccgc

SEQ ID NO: 259209 - DNA, 1631 bp, Zea mays
gtcgacccacgcgtccgcccacgcgtccgcgttggactaccatttcaagtatgagcaagaggccggctcctccgtgtattcattctttggcttcaatgggacagctggtgtctggaggatctcagcgatcgatgatgctgggggctggaaggaccggacgacagtggaagatatggacctggctgtccgtgcgatgctgcagggatggaagttcctttacgtcggcgacattaaggtcaagagcgaactgcctagcacattcaaggcgtaccggtttcagcagcacaggtggtcatgtgggccggcgaacctgttcaagaaaatgatggtagagattttagaaaacaagagagtgtcgctgtggagtaaaatccacctatggtacgatttcttcttcgtcgggaaagtcgctgctcatacggtgacattcatctactactgcttcgcgatccctgtgtctgttctgttccctgagatccagatccctctctggggagttgtctatgtcccgacagtcataaccctgttgaaggctcttggcacaccgagcttctcgccgttacagttcctttcacctggtgatcctctgggtcctgtttgagaatgtcatgtcgttgcaccggattaaggctgcagtaagtggtcttctggatgctggtgggcgagtcaatgagtgggttgtcactgagaagttgggcgacaccagcaaggcaaagcctggcaccaatggatcagacactgctgtaaaggtgatagatgtgaagctaacagaaccgcttgttccgaagctagtgaagaggcgagcaagattttgggagaggtaccactgctcagaacttttcgttggaacctgcataatcctgtgtggtttctatgacctgctttttgcaaataagggatactacatttttctcttccttcaaggcacggcgttccttgttgttggttttgggtatgtcggcacactacctccttgcactgcataagctgtcatggacaactgatattacctgctcaccagaaactgagcaagcaaagctcctctctcctgcacatatcaaactcttgaattcaatgatagttgagcaatgttcccccatcagtcttggcctgacatgatccaccgccgagaaggttgttcagatatcgccgtcgttctcctgtcagtgttggtcagatttgagccaaaccattctttattgtcagaaggccattcaaatagtgtcaccattgcaaattttataataacggtgtttaccgaagcatcatgaaaaaaaaatgattgatgcagcagcatttcgttcgcattccatagagatgcagttcacatccagtattttttttttggaaatctagtgatattactcagagttcagattcataatggaagattgttggcttcctcagttcataacctgtgtaggcttaaaacttgtagatgtaaattgttattaacactaatattttttattgaatccgggtattattgaaaaaaaaaaaaaaaaaagggcggccgccctgtaacaagcccaagatgacttctccgtaacacgtctaatcagacattttacttgatgtggcacatggaatagtggatctattttaactatgtagcagcaaccatttggtcc

SEQ ID NO: 259210 - DNA, 982 bp, Zea mays
ggcagctctgcaggcggcggcggcaagcggtccgcgagccccggctggtggtccagacgatgagcgacatcgaattcggctcgaggacggctatcggtggaggaagtacgggcagaaggtggtgaagggaaatccaaacccaaggagctactacaagtgcacgacggtcgggtgccccgtgcgcaagcacgtggagcgcgcgtcccacgacctgcgcgccgtgatcaccacgtacgagggcaagcacaaccacgacgtgcccgccgcgcggggcagcgccgcgctctaccggcccgcgccgccgaccgcggacaccgccggccaccactacctcgccgcggctcggccgggcgtggcctaccagacggggcagcagtacgggttcggtgaccagctgggctcgttcggcctcagcggcgccccggcgcagagcggcggcggcggcttcgcgttctcctccggcttcgacaacccgatgggctcgtacatgagccagcaccagcagcagcagaggcagaacgacgccatgcacgcgtcgagggccaaggaggagccccgggaggacatgtttttcccgacgtcgttgctgtacactgactgaaggacaaggacggcaggacatggcgtggtgtggtgtccataaactgttcctttggcacacggattgttgttgttgttgttgttgttgttgtatctaggataggttgaacagatttctttatttgtttggaggcctccatgttggcagtggcagatgcttgccgtgccgcaggggtgtctcccttaacacgtgaaaggggggaaagaaagggatttaggatactagagtctaggacacgtggcaattacacagaaggggtaaagaagttttgttcctcaaagacaaattcacacatgagacttgttgtagtcaggattggacataatttcatgtcacagaacatttgttaagattcaaaaaaaaaaaaaaaagggcggccgc

SEQ ID NO: 259211 - DNA, 531 bp, Zea mays
tccgtcacgttcggcgacgacgaagcggagaacgggtcgcagcggagcggcggtgacgagcccgacgccaagcgctggaaggcggaggacggtgagaacgaaggcagctcaggagccggcggcggcaagccggtgcgcgagccgcggctggtggtacagacgctgagcgacatcgacatcctggacgacgggttccggtggcgcaagtacgggcagaaggtccggaaggggaacccgaacccgcggagctactacaagtgcaccacggcggggtgccccgtgcggaagcacgtggagcgcgcgtcccacgacgcgcgcgccgtgatcaccacgtacgagggcaagcacaaccacgacgtgcccgtgggccgcggcgccgccagccgagctgctgctgctgcggcggcgggttccggggccttgatggccaccggcggcggccagctcggctatcagcagcagcagcagcagcagccatacaccctggagatgctgagcagcggatcgtacggcggcggccgcggcgggtac

SEQ ID NO: 259212 - DNA, 2235 bp, Zea mays
gaattcggctcgagcacgattcgtgcccgccggccatcaggtccgcggtcgagctcatgtacgcggcgtgtaccttcaagatccccgagctcacctcgctcttccaggcgaacctggtggcttgaagtctatgaattgaaatggaatcattattcattaggctgctcaacatttgaatattacatttatggctgtatagtttatcaatcagtttaacatcaattgagctttgctttgtctttacggaaggcaaatggttaacatggtcttcttctacagcggcggcttcttaattttgtagacaagactctagtggaggatgtcattcctattctggaagttgcttcccactcagggctgactcaagtgatcgacaaatgtattcaaaggattgctagatcagatcttgatgatatatctttggataaggagctccctccagaagcagttgatgagataaaaaatttgcgcaagaagtcacaaactgctgatggtgatacgttcatttcggaccctgtgcatgagaaaagagtcagaagaatccacagggcacttgactctgatgatgttgagcttgtgaagttgcttcttaatgagtccgacatcacattagatgatgccaacgcattacactatgctgcttcttactgtgatcctaaagttgtctcagagctgttagatttggcaatggctaacttaaatttgaagaatagccgtgggtacacagcactccacttggctgctatgaggagagaaccagctataatcatgtgtctccttaacaaaggggcaaatgtgtcacaactgacagctgatggcaggagcgcaattggtatttgtcggaggttaacaagagcaaaagactacaatacaaagatggagcagggtcaagaatcaaataaagataggctgtgtatagatattctagagagggagatgatgcggaatcctatggcggtggaagatgccgtcacctcgcctttgttggcagatgatcttcacatgaagcttctctacctggaaaacagagttgcatttgctagattgttctttcctgctgaagccaaggtcgccatgcaaatcgcacaagcagacaccacagaagaattcggcggtatagttgcagttgcagcaagcacttccggtaaactgagggaggtggaccttaatgagacgccagtgacacaaaacaaaaggctccgttcaagggtagatgcactgatgaaaacagtggagctgggccgtcggtacttcccgaactgctcgcaggtgctggacaagttcctggaggacgatctgccggaaggtctggaccagttctacctccagaggggcacagccgatgagcagaaggtgaagaggatgcgcttctgcgagctgaaagaggacgtgctgaaggcgtttagcaaggacaaggcggagggcagcgtgttctcgggcctgtcctcgtcgtcgtcgtgctcgccgccccagaagtatgcccagaggtgatcaaggcaccagtttttgccgtatagtttgttatcatggtcttcgagacttggacccggacagcatatagggacatgtacacctgtgtatgtatagtgcttacaattggcgtaagtagaactatatatatggaacataaggaaacatggcaggaacaccgcgcaaaaagatgaaaagatggccgaagtgctctatgcgagtgcgcacctgattcgatggccctattcaacggcgccctgtcagcatgctgcatgcccactgagaccttcggttgcatagggataggaggagatttctgttcaattttggctagcaagtgatataggggtgtttaggactgtttcactttatgaaaatcaacttagctcataaacacttttaacttcaataacttaggtcctgtttggagtggctgtatttttctagtcccaagaaaataatgtggtatctgagaataccatggtctagaaaccaaaatgtgtttggcagactcttttaaaccatggtatttaaaatcttggttttgacaagaccacattatttctgggtatagaatactgtcagccgagttcggctcggctcggtgcggctcgttgactgaacgagctcgactcggctcgtccattccacgagctggtgaaagaggctcggctcggctcgaccttagctcgcgagccatattcttgtaaaaaaaaaaaaaaaaaaaaaaaaaaaaaaaaaaaaaaaaaaaaaaggggcggccgc

SEQ ID NO: 259213 - DNA, 921 bp, Zea mays
cgacggacgaacgcgagatcgatcgagctactaaagctgcaaggccacgacacgcgctgttgttctcatcagctgctgctagttagctagccatggtggccggcctcgaagatcccgccattgacccgaccgcgctctcccttgcgctccctgcatcggcaccggcgctcaataaggaggactacatcgccatctgcctcgccgcgctcgccgggacccgcaagttcgggctcggtcgggagaaggaccagcaccagcacaccaagtggtgcccgacgacgacgacaacccacgcgccatctgcgcacaggagcttcggttccggtgcgcggtctgcgggaaggccttcgccacctaccaggcgctcggcggccacaagtccagccaccgcaagccgacgacgccggagcggtacgccgccgcccttgccgccgcggcgacgacgacagcggcccggggcgaccactccgacgagacgacggcgtcgtctctgtcggggtcggcggctagcggcgggccacaccggtgcagcatctgccggaggggcttcgccacgggccaggcgctcggcgggcacaagcgctgccactactgggacggcatgtccgtgtcgatctccgtgtcgtccgggatggcgtcgtcgtcgggcctcagtaccgtcaggaactttgacctcaacctggcgccactgccggagaatggcgacgccgggatgatgaagaggtgggccgaggaagaggaggtgcagagtccgttgccgatcaagaagcgcaggatgtcggactgactactcaccgatgccgtcgtgtctatcgtttcatgtaaaaatggatgtacgccatcgttgtgtcgttaatttaatttcttttaattaggttctgtttttctggacaaaattcgttcaattcattgagcgttaaa

SEQ ID NO: 259214 - DNA, 1314 bp, Zea mays
gaattcccgggtcgacccacgcgtccgccctctcccgctcccgtccgagagatcccagttgtggccgcttccgcccaagagcaacccctggaggccgccaaggacgacggtggctacgaggtcgtggagctcgacgccgccgagctgctagcggagcacgtccacttctgcgagatctgcggcaagggcttccgccgcgacgccaacctcaggatgcacatgcgcgcccacggcgaccgcttcaagaccctagacgcgctctcccgccctggtcacggccagccgaagccgcccgttggcagcaacgtgcgcttctcctgcccctttgcgggctgcaacaggaaccgcacacaccgccgcttccggccgctcaagtcggcggtgtgcgcgcggaaccacttccggcgcagccactgccccaagctctacgcctgcgagcgatgtggcggcaagaagcgcttcgctgtcctggcggacctccgcagccacctccgccactgcggcgaggaggcacagtggcgctgctcctgcggcaccaccttctcccgcaaggacaagctcttcggtcatctagcgctctttgaaggccacacgccagcagttactaagccaaacaaggatgtggtgacagggcctacagagtccaccattgatgctatggaggaagggggatttgaagaaggcattcctgaccgggaggaggatgaagagggcggttatgatccagagttcttcaaggagtggatggatgagctcagaggtggtgctggtggctccaattggcctggaccagcagcagatggacattagcaatgttgcgagggttaataggaattattcggcaagccaaccaacctagttgtgatgttatgaatatgtcagcttgattgtctagcaagtcatcctcatacaaaaagtgtaagattcaggtgataaatattataattagtcctattgtggaagaatgtaaacaacaaatgagtctatgactattatcaagagagcagagctagtgctagaggatcccacatgagtggggttgagaggagggataaaccaaggcaagcctccccccaatgtggagagactgcttcgatcccgcgacctggtaactcagtgaagcagctctcaccagtcaccactacatcaggcctgctcctcaagagatgaaacttttttgttaaacttttgccaagaactctgactagaatgaacagcatgtagcttgaattcaatggtggctgcacttataagtgagtttcataaagtaatatttagtaggttttaaaaaaaaaaaaaaaaaagggcggccgc

SEQ ID NO: 259215 - DNA, 416 bp, Zea mays
ggttatgatccagagttcttcaaggagtggatggatgagctcagaggtggtgctggtggctccaattggcctggaccagcagcagatggacattagcaatgttgcgagggttaataggatggtttgacaagggacatctgcttacatcaagtgaccaggaggatcaataaagactgaataaaggtgatagtaaagccaagaggtgctttgggatagtttgtaggatttctctttaccactgtgtttgtgcgttcgttctaaccagtagcttgtatggtatggtgtgcgtgtgttgtttagttgctgttcactgggcctctcccttgccattctcggttgctttcatgttatcctgtgaatttgtgatctaccaggtaatacagtggagaaatgtgtcaaaaaaaaaaaaaaaggaa

SEQ ID NO: 259216 - DNA, 732 bp, Zea mays
gcggccgcccttttttttttttttttcataaatcatataaaaatgaatttgtattcaaatatggatcgtcaaatgttccaaaaatttcactatcttacaaactaaattaaaccaaaccaccaatttaaatttatattaaataattataccagcagaaattaaaatttaatcatcccaaatgactccaaaactctcccagaaacgtctttgccgcgtcaaggctcgggaaatacgtcggctccataaatatctgactcagtgagtcacacgactcttgactcgccgtcgcgttcatctccgcacttcccatcatagccgccactaactgcctatacccaaagaagaaactcttcgccgccgcttccaccgcttgcatcccctgaagcaaatgaatcttatcgcactctgtcttcctcgcgtaaagcttcatcgccgcctcttgtaatcttggtcctccggttggatctacctcaaccgccaagaccgccggtactttctgtctcagatctttcgacatcttcatcatctccactaatcctttagatctgaaacaaaacgcatcgtttttacccgtcgatttgatctgtaactgtttcttcaatttcaaaaaatcttccggatccatcaacatatgaagatcttcaatctccgctaaaattttccagatcttctccagcaagtaaacatcgtttgaagcttttcccggacgcgtgggcggacgcgtgggtcgac

SEQ ID NO: 259217 - DNA, 856 bp, Zea mays
gaattcggctcgaggccgcagcgagataaagcggatcgagaacccgacgcagcggcagtccaccttctacaagcgcagggacgggctcttcaagaaggcaagggagctcgccgtcctgtgcgacgtcgacctgctgctgctgctcttctccggctccgggaagctgtaccactacctctcgcccaccgtgcccactgtcaaggacctggtcgagaggtacgaggccgcgacgcacagcaaggtctgggccgacgttcgccaggagcggcgcgcggagctggagaaggcggagcggatgtgcgagctcatggagaaggagctgcggttcatgacggtggacgacggggagcagtacacggtgccgtcgctggagcagctggagcacagcctggaggcggccgtgcacagggtgcgctccgagaaggaccgcaagatcggcggcgagatcgactgcctccagaacattatcagaggacgccacgaggagcgctacgggttgtgcgacaagcttgctcattctcaggcctggaacaacggcggggaaggtggagggtcgaccccaccaagcggcggcggcctggaactcaaactgggattcaactgacgctggctggcttggaagctggaggatggatcgaagactatgcgctgcttcattgtaccctatcactctgtcaggctacctccccccctgcaccctgttggttatggtttaaaatggttgttgaccaaagttgtcctggatcaaacaaggctcagcttgatgttaatgagctgagggatctaatgtattattagccttaaaaaaaaaaaaaaaataaaaaaaataataaaaaaaaaaaaaaagggcggccgc

SEQ ID NO: 259218 - DNA, 2306 bp, Zea mays
gcgacacgcagatgcagccacagcagggatccagctcctctctgcagcaaaactccacagctgctcctggcgccgcggcggtgccgccgccaaagaagaagaggaaccagccaggcaacccaaatcctgacgcggaggtgatcgcgctgtctccgcggacgctgctggcgacgaaccgcttcgtgtgcgaggtgtgcaacaaggggttccagcgggagcagaacctgcagctgcaccggcgcggccacaacctgccgtggaagctgaagcagaaggacccgtcgcaggcgcagcggcggcgcgtgtacctgtgcccggagccgacgtgcgcgcaccacgacccctcccgcgcgctcggcgaccatgaggggatcaagaattcggctcgagttcagccgcaagcacggcgagaagaagtggaagtgcgacaagtgctccaagcgctacgccgtgcagtcggactggaaggcgcactccaagatctgcggcacccgcgagtaccgctgcgactgcggcacgctcttctcccggagggacagcttcatcacgcaccgggcgttctgcgacgcgctcgcgcaggagagcgcgcggctgccgccgaccagcagcctcagcaacctcaccagccacctctacggcgccgccaccaacgcgggcaacatggcgctcagtctctcgcaggtgggctcccacctcacctccactctccaggacggccaccaccaccgcccgtccccggagctcctgcgactcggcgctacggccggcggcggcggtggcagcagcatcgccgcgcgcctcgaccacctcctgtcgcccaacggtgcctccgccttccgcccagcgcagcctccgtccttcttccacaacgcgggggcatcggtcggccaggactttggggatgacgcgggcaatgggccgcactcgttccttcagctgcaggccaacaagcctttccatggactactcatgcagctgcccgacctccaaggcaacggtgctgggggccccggcgcctcaggcggacccagctctctcttcagcctgggtttctttgctaacaatggcaacagcagctcggggtccagtcacgagcatgcaagtcaggggctcatgaacagtgaccagttcagcggcggcggttcggaggcacaggcggcggcagggatttttggcgggaacttcgttagtgctggtggagatcaagttccaccgccggggctctacagagaccaagcctccatgctgccgcagatgtcggcgaccgctctgctccagaaggcggcgcagatgggcgcgaccacgagcgccaacggcgccagcgcggcgtccatgttccgaggcttcgcgggctcttccccacaacacgtgcggccagcgacgccgcacatggaacagagcgacgcgaacctgaacgacctgatgaactcgctcgctggaggcggtggcctcggtgccggcggaggaatgttcggcggcggcagcaacggcgccggccacgcgggcatgtttgatccgaggcagctgtgcgacatggcggagcgcgaggggaagttcggcttcggccagggtggtggcggagacatcacgcgggacttccttggcgtcggcggaggcggcctcgtgcgcgggatatcgacgccgagaggagaccaccagagcagcagcgatatgagctccatggaggctgagttgaagtcggcctcgtccttcaatggaggcaggatgccatgacagagaccgacccatcgatcaagattatacagacataagctcgcgcacagtaatccagagacttgatcaaccagatgcaatgggagagcagtaaggtcgtcgtcatgaagttagaaactgagtcgcatgagtgagttcatgcatgggataaagctagctagctagctttcatcatccgaagggaccttgggtgagaaagatgcgtcttctctgactaatggagcagtaagctggagtgcgagttggacgcatgtgatcacccatttgctcgtgcatggcgggggttggtgttcattctgctggtctcgttcttgttggttttcccttcctttgtagttggataatctttgttggatcaagtatagtttttctagtgatagaacctataaggatgttatttgtagctagcttataaaggggcgtgatttgcagcttaatttgctccattcccctcctcctattttttatttccttttctcttgtatcaaaacaatacccccccttacaatgtcattaatcatgctagctgaaaaaaaaaaaaaaaagggcggccgcacttggaaaaataaaaa

SEQ ID NO: 259219 - DNA, 983 bp, Zea mays
cttggtcctagagggagagagatctcgaactccaagggcgcatgctccggttgctagctacgatgccgtgtgcgtagctgcggcagcccttgatcgatcaatcgatcgcttgtgcggaaggagccggatcgagtggagtcagctagctagatactccgtggtcgtcgtcgtcgttggacgtacgccagaagagggagctagagaagaataccgtacagctgcttccaacatggcagctgcctcgtctgcccacctgttcggactcggcgacgggcagatgcagatgcagccgcagcagcagcaggcgccgcctcctcctcttgtgaacaacccggccgcgccgccccccaagaagaagcggaaccaacccgcagaccctgacgccgaagttattgcgccttcccccaagacgctgatggcgacgaaccggttcctgtgccaagtgtgcaacaaggggttccagcgggagcagaacctgcagctgcaccggcgcgggcacaacctgccgtggaagctgaagcagcggggcgcgggcaaggaggcgcagcggaagaaggtgtacgtgtgcccggaggcgtcgtgcgtgcaccacgacccggcccgcgcgctgggcgacctcacgggcatcaagaagcacttcttccgcaagcacggcgagaagaagtggaagtgcgacaagtgctccaagaggtacgccgtccactccgactggaaggcgcactccaagatctgcggcaccagggagtacaagtgcgactgcggcaccgtattctccaggcgggacagcttcatcacgcaccgcgccttctgcgacgcgctaccgaggagagcgccaggcctcggcggcgtcacgccatggcagcgccgtgcacaccaccacaccgatgctctttcgcgtccgcggcacgtatgcagagatgacgttctctctcagagcatcacaccacagacagcagagagagagacatgtatgacagcgcgcg

SEQ ID NO: 259220 - DNA, 702 bp, Zea mays
cgggaccagatcctgtagctccaccggcggggccacaacctgccgtggaagctgcggcagcggagcggcaaggaggtccggaagcgggtgtacgtgtgcccggagcccagctgcgtgcaccacgacccgtcgcgcgcgctcggcgacctcaccgggatcaagaagcacttctgccgcaagcacggcgagaagaagtggaagtgcgacaagtgctccaagaagtacgccgtgcagtcggactggaaggcgcacgtcaagacctgcggctcccgcgagtaccgctgcgattgcggctccccccgctcccggagggacagcttcatcacccaccgcgccttctgtgacgcgcttgccgaagagagcgccaaggcgcgggcggaggcgccttccgcggaggatgggagctcggcagccgccgtggttccgccaccggcacccccgtctgcgccagcgccggcgccactgcgacagcaaccgcccccgcctgcgccgcatcatgcggagccacgtaatgagcctgacacgaatgcgactgaggccgtccagttcgcgccgccgactccgccaccgccgtcgacgtcgcagttacagctgccggtgctttcgcaagcttcggtgagcgctgctgccaacgttagcgccagcagcagcagcagcagcgtcgcggggacgtcgcagagcctgctcggcggtatgttcgcg

SEQ ID NO: 259221 - DNA, 682 bp, Zea mays
cggacgcgtgggtgacgcgggacttgcttggcgtcggcggtcgagccatcgtgcgcgggatatcgacacctagaggagaccaccaaagcagcagcgatatgagctccctggaggccgagatgaagtcggcctcgtccttcaacggaggcaggatgccatgaccgacccatcggtcgagcttataaacaagacataagctcgcgcacagtaagcaagagacttgatcaagcagatgcagtgagaagagtaaggtcatcgttatatagcgtagtagcaatcaatgcaagttatcaactgagtcgcatgagtgagttcatgcatggataaagctggctagcttagctagctttcatcatccgaagggaccctgggtgagagatcgagaggcgtctttctctgactaatggagtaagctagagtgcgagttggacgcatgtgatgacccctttggtcgtggtgggggttggtgttcctgttggttttcccttgctttgtagttggataatctttgttggattaagtatagtttctggtgatagaaccaataaggatgtttgtagctagcttataatgagggcgtgaattgcagcttaatttgcttcactcccctcctattttttattaccttttctctttttgcaaagcaatattctccttacaatgtcattaatcgtgcaagctg

SEQ ID NO: 259222 - DNA, 1581 bp, Zea mays
gaattcggctcgagccagatccgggaggaccgcaaggggtacaaggccggcgcgctgcgggcggggatgaggcacgcgtacgtgcgcgactgcgagtacgtggccatcttcgacgccgacttccagcccgacccggactacctcaagcgcaccatcccctacctcgtccacaacccggagatcgccctcgtccaggcgcgctggagattcgtgaacgcggacgagtgcctgatgacgaggatgcaggagatgtccctggactaccacttcaccgtggagcaggaagtgagctcctccgtctgcgccttctttggattcaacggcaccgccggcgtgtggcgcatctccgcggtgaacgaggctggggggtggaaggaccggaccacggtggaggacatggatctggccatccgggccagcctcaagggctggaagttcgtctacctcggtgacgtccaggtgaaaagcgagctgccgagtaccttcaaggccttccggttccagcagcacaggtggtcgtgcggcccggcgaacctgttcaggaagatgctcatggagattgtgacgaacaagaaagtgacgatctggaagaagatccacgtcatctacaacttcttcctgatacgcaagatcatcgcgcacatcatcaccttctcgttctactgcgtcatcatcccggcaaccatcttcgtccccgaggtccgcatacccaagtggggctgcgtctacatcccctcggccatcaccctcctcaactctgtcggcactcccaggtctttccacctgcttttcttctgggtcgccttcgagaacgtcatgtccctgcacagaacaaaggccacgctgatcggcttgctggaggccggcagggccaacgagtgggtggtgacggcgaagctcggcagcgccatgaagatgaaatcggctaacaaagcggggctcaggaagcagttcatgaggatatgggagaggctgcacgtcacggagctcggggtggcagccttcctcttctcctgcggctggtacgatcttgcgtacgggagggaccatttcttcatctacctcttcttccagtctgtcgcgtttttcatcgtcggcgtcggctacgtcggcaccatcgtcccgcagtcgtagcggaagcgtgtccagatcatccgcttctctctggttttcgcattgtgtcttgggtaagtttcgtagtggatgaccggtttgaggtaaagatcatgcatgcggtcctctcttccatcgtctttttttggggaccggccgtgtgtgcttcgtcgaccttcggctgcatgcgcggtgttttactgtaaaataggaaagcagtgttgcaagatcgctgcaggagaatttagagattggtgccacatgggcaggagatgtcctggtgtttctgcttatatgctatatcaactatgtgatgtgttttaagggggggtgcaggatggctgcttccaatgtactagtaacatacagagaaacaggttcagacatgtgttcagaaaaaaaagagtcaactattcagccttctaaaaaaaaaaaaaaaaaaaaaaaaaaaaaaaaaagggcggccgc

SEQ ID NO: 259223 - DNA, 672 bp, Zea mays
ggcctgcaccagatccgatgccttctttttcgttcttgctctgctctcatgggcagggcagggggtgcccatctacttgaattgcgatgcgtacatacatcgctgtctccatctagctgcacacatatatacatacatgcatacagagtgagagagaaacagatcgatctcacttagctgctgctgctgctggtggtggtggtggcctgggcctggctgctgtgtctgtatcgatgtgtccgtattttctccatctcgtctgcatacgctgcaattggtaaggagctagctggcctttcatgtcttccatgctgccatagccatacggccggccggcaggcaggataccccatcgctcgctgcacatgcatgtatgccgcatggggatacatgttcatcatcagcagcacagtggctctgtatcccccatcccaatccgatcctatataggaggagaaggaggagcagcagcagcagccaggcgcggccggcggccggagtagtatccgaatccgctcaacacccaccggctggtctctaactttcctatcgatcaatggctttcaaaggactcccgcgtgattcccgagggtccctcgaagtcttcaatccagacgcccctgtttcagatcgagcaaccacctccccgtttctcctccctcctgcggccgc

SEQ ID NO: 259224 - DNA, 1294 bp, Zea mays
cccacgcgtccgcccacgcgtccgcccacgcgtccgcaagacactgagctggtctgtttagttggaaagccatctgtactgtacgtttttcgccgatcatggaggatgagaggaacacccagcagcaccagggcggtgagcaggcccaggaccaggagaacgaggtgaaggacaggggactcctggacagccttctcggcaggaacaagcacgacgaccaggagaagaagaaccagcaggaggaggaggagctcgcgaccggcatggagaaggtcacggtggctgagcccgaccacaaggaggagggacacgaggccgccgagaagaaggacagccttctcgccaagctgcaccgcaccagctccagttccagctcgtcgagcgacgacgaggaagaggaggtgatcgatgagaacggcgaaattgtcaagaggaagaagaagggccttaaggagaaggtcaaggagaagctggcggcccacaaggcccacgatgagggcgaccaccaccagccgggcgtacctgccccggcgcccgcaccgcccgtggcggtggacacgcatgctcaccaccaggagggagagcacaagccgcacttcccggcgccggcgcctcccccgcacgtggagacgcaccaccccgtcgtcgtccacaagatcgaggacgacgacacgaagactcagaccccaccacaggcaccggaggaggagaagaaaggcctgctggacaagatcaaggagaagctacccggtggccacaagaagccggaagacgctgccgccgccgccgccgcgccggccgtccacgcgccaccgccggcgccgcacgccgaggtcgacgtcagcagcccggatggcaagaagggcttgctgggcaagatcatggacaagatacccggctaccacaagagctcgggtgaagaagaccgcaaggacgccgccggcgagcacaagaccagctcctaaggtcgcagcgtgtgcgtgtccggcgatcagaagcgttgcgttggcgtgtgtgtgcttctggtttgctttaattttaccaagtttgtttcaaggtggatcgcgtggtcaaggtccgtgtgctttaaagacccaccggcactggcagtgagtgttgctgcttgtgtaggctttggtacgtatgggctttatttgcttctggatgttgtgtactacttgggtttgttgaattattatgagcagttgcgtattgtaattcagctcggcttaacaaaggaaaagtaacaatggcactagttgaaaatcatttggtgtaatatttgtcaattact

SEQ ID NO: 259225 - DNA, 1079 bp, Zea mays
  unsure (1)..(1079): unsure at all n locations
cccacgcgtcccacgcgtccggcgaaaaggcactgaagaagccagtcaatagcgagttctactactagtagctagcctgctgatctgttctgttgtttagttcgcaaagccttctgtttcggcgaccatggaggatgagaggaacacccagcagcaccagggcggtgaggcccagcaggacgccgccgatcaggtggacgtgaaggatagggggctcctggacagccttctcggcaggaagaagcacgacgacgaccaggagaagaagaagcagacggatgagctggcgaccggcatggagaaggtcacggtgtccgagcccgagaagcacgggcacaaggaggaggagcacgaggtcgtcggcgagaagaaggagggccttctcgccaagctgcaccgcaccagttccagctccagctcgtcgagcgacgaggaagaggaggcgatcgatgagaacggcgagattatcaagaggagaagaaaggcctgctggacaagatcaaggagaagctccccggtggccacaacaagaagcctgaagccgttgccgctgccgcaccgggttcgcccgtccacgcgccggcgccggcgccgcaggcggagaacgtcagcagcccggatggcaagaagggcttgctgggcaagatcatggacaagatacccggctaccacaagagctcgggtgaagaagaccgcaaggacgccgccggcgagcacaagaccagctcctaaggtcgcagcgtgtgcgtgtccgtcgtacgttctggccggccgggccttgggcgcgcgatcagaagcgttgcgttggcgtgtgtgtgcttctggtttgctttaattttaccaagtttgtttcaaggtggatcgcgtggtcaaggtccgtgtgctttaaagacccaccggcactggcagtgagtgttgctgcttgtgtaggctttggtacgtatgggctttatttgcttctggatgttgtgtactacttgggtttgttgaattattatgagcagttgcgtattgtaattcagctgggctacctcgccattgttatgtattaatacatcctttgctttcttctnnaaaaa

SEQ ID NO: 259226 - DNA, 1317 bp, Zea mays
cctttgctttcgctgtttcggcgaccatggaggatgagaggaacacccagcagcaccagggcggtgaggcccagcaggacgccgccgatcaggtggacgtgaaggatagggggcttctggacagccttctcggcaggaagaagcacgacgactaccagtagaagaagaagcagacggatgagctggcgaccggcatggagaaggtcacggtgtccgagcccgagaagcacgggcacaaggaggaggagcacgaggtcgtcggcgagaagaaggagggccttctcgccaagctgcaccgcaccagttccagctccagctcgtcgagcgacgaggaagaggaggcgatcgatgagaacggcgagattatcaagaggaagaagaagaagatgggcctcaaggagaagctcaaggagaagctgccgggccacaaggacggccaccacacggccgcaccgtccccggcgcccgcgcccgtggagacgcatgcccaccaccaggaggaagcgcacaggccgcacgtcgtcccgaccccggccccgccgcctccaccgcacgtccaccagcacgaccacggcgtcgtcgtccaggacgacgtgaagaccgggaccccgccgcatgcaccggaggaggagaagaaaggcctgctggacaagatcaaggagaagctccccggtggccacaacaagaagcctgaagccgctgccgctgccgcaccggctccgcccgtccacgcgccggcgccggcgccgcaggcggagaacgtgagcagcccggatggcaaggagaagaagggcttgctgggcaagatcatggacaagatacccggctaccacaagagctcagctgaggaagcagaccacaaggcggacgccgccggcgagcacaggaccagctcctaaggtcgcagtcgcagcgcgtgtcctggccgtggccgggccttgggcgatcagaaggtagctagcgttggcatgtgggttcggttctggtttgcttttaccaaaagtttgtttcaaggtggatcgcctggtcaaggtccgtgtgctttttaaggtggatcgcgtgactggcagtgagtgttgctgcttgtgtaggacgtggtacgtacgggttttattttggttccaagtcaaaagtcacggtcggtctggatgttgtgtactgggtttgttgaattatgagcagctgcgcgttgtaattcggctgggctacctggatgcgttaataattgctttggtttctgcccagcgcgcgaacgtgttagcgtgtaatctctattttgcactatccagcgactaacaaccagaaacgggtatatat

SEQ ID NO: 259227 - DNA, 639 bp, Zea mays
catctgttcgtctgtgggactatgtaaatggatgtctccttgatacatttcaagccaaagataagatgggagaactcttaggaccaaatgaaacagatgataacagcctagccattacagacatatgtccgagtaatgatggctcattggttgctgtagctattcaaagtttcagtggcataatgcttttagcatgtgatttggtaggaaagaagctatctttcctaaaggtgattacaatggaaaagagttatattcctactagcctagcatccagcccggcctcggaactcctgtggactgtcatgggcgcatcaaacatgcccagccgggcttcctcccatctattgacccgtttaaggatcatcacgtgtttccaaaaggacagattatcttcttccgatgccggtcctgcaaccctcgaagacggcgatgtaccccacggtgagaagctccttctggcactgcaaggaagcctcgacgtcgcgaacaagaggaggtgctagcttcagtgctggctgcgctgaaggtttccatgcataagatgctggtgaagaagcactactcggaagagaagagggagcagaggaaagagttacgacgacaagaagttgagaactagctgaaaagaagatgaag

SEQ ID NO: 259228 - DNA, 664 bp, Zea mays
cggaccggtcggattctgtgtgaccacgcgtcgttagactagacccaccacaggcaccgggtgttgagttgaaaggactgtggacaagaccaggaacgctactggtggccacaagaagccggaagacgctgctgccgccgccgccgcgccggccgtccacgcgccaccgccgcggcgccgcacgccgaggtcgacgtcagcagcccggatggcaagaagggcttgctgggcaagatcatggacaagatacccggctaccacaagagctcgggtgaagaagaccgcaaggacgccgccggcgagcacaagaccagctcctaaggtcgcagcgtgtgcgtgtccgtcgtacgttctggccggccgggccttgggcgcgcgatcagaagcgttgcgttggcgtgtgtgtgcttctggtttgctttaattttaccaagtttgtttcagggtggatcgcgtggtcaaggcccgtgtgctttaaagacccaccggcactggcagtgagtgttgctgcttgtgtaggctttggtacgtatgggctttatttgcttctggatgttgtgtactacttgggtttgttgaattattatgagcagttgcgtattgtaattcagctgggctacctggacattgttatgtattaaaaaaaaaaaaaaagggcggccgc

SEQ ID NO: 259229 - DNA, 657 bp, Zea mays
tcgtttcacgcgtccgcccacgcgtccgcccacgcgtccgggaggatgagaggaacacccagcagcaccagggcggtgagcaggcccaggaccaggagaacgaggtgaaggacaggggactcctggacagccttctcggcaggaacaagcacgacgaccaggagaagaagaaccagcaggaggaggaggagctcgcgaccggcatggagaaggtcacggtggctgagcccgaccacaaggaggagggacacgaggccgtcgagaagaaggacagccttctcgccaagctgcaccgcaccagctccagttccagctcgtcgagcgacgacgaggaagaggaggtgatcgatgagaacggcgagattgtcaagaggaagaagaagaagggccttaaggagaaggtcaaggagaagctggcggcccacaaggcccacgatgagggcgaccaccaccagacgcccgcgccgcccgtggtggtggacacgcatgctcaccaccaggagggagagcacttcccggcgccggcgcctcccccgcacgtggagacgcaccaccccgtcgtcgtccacaagatcgaggacgacgacacgaagattcagaccccaccacatgcaccggaggaggagaagaaaggcctgctggacaagatcaaagaga

SEQ ID NO: 259230 - DNA, 560 bp, Zea mays
agacggtcggatccgggcgacccgcgccggacaggcgggacctgggcgacctgggggccgatcatggaggatgagaggaacacccagcagcaccagggcggtgcgcaggcccaagaccaggagaacgaggtgaaggacaggggactcctggacagcctactcggcaggaacaagcacgacgaccaggagaagaagaaccagcaggcggaggaggagctggcgaccggcatggagaatgtcacggtggccgagcccgaccacaaggaggagggacacgaggccgccgagaagaaggacagccttctcgccaagctgcaccgcaccagctccagttccagctcgtcgagcgacgacgaggaagagggggtgagcggtaggatcgacaagaagatgaagaactagctgaaaagaggatgaagaactagctcagcatgcggtatcgagttgctataacggttctcttttttgtttgttcgtttttttagggaaacaaaaacagttattactgtagtatcagaaaccgtaagagtaataaatttgccaggattttttcttcttaa

SEQ ID NO: 259231 - DNA, 988 bp, Zea mays
ctactcgtgcgcggacgcgtgggcgaaaccgcgcgtgtcgccagcccatagatcagagcctagccagagccagagccagagctgagagccgaggagggaaacgaagaagcggccatggcgatgaagcggccggcgcgcagcgacccacacctgccacccgaggaggcggcacgggtggaggccgaggttcggagctacttcgacagcgtcgcgccgaggcgcccggccaagccgccgcgcagcgacccgtcggtggacaccttcgcggaacccgccgccgtcgacgccggggaccacgacttgccggagctccgcaagctgcgcgacctcgaggcgaagccccagaagctggtgttggacggagggggaggggacgtggatggcggggaggattacgtggagacgcgatactacgatggcctcataggcatcgacaagcagcatcacacgactgggacaggctttatcaaagtggagagatccaatggcagcagcttcagtgtgatgactaacggctacccacctgccagctctgtccgctgcacgagcaatcctgcgacaaatgattggataccatcttctgaatcgatcatccctgcttcgaacaagcccagcaggagcgactcctgaccagccttgccttgccttgaagtgccgtgaattgcttacctgcaaagataataaaatgcactgcttctgtgtggtagtaccgtacgcgccagagatcgtgcctcgacactcgagagagagagaagggaagcatactgccggagtgccgggcgcgtgggtgggggacacgagatgtgactacttcaacgaagaatgtgtacgggtacgggtgcgtcagcacatgttacttgttgctgcacctgcatactactgttcgagtgttgataatgaactacagaccctgaatgaatgtgcctatgtgatggtttggtcctaaaaaaaaaaaaaaaaaaaaaaaaaaaaaaaaaagggcggccgc

SEQ ID NO: 259232 - DNA, 1199 bp, Zea mays
atggcatcggaggccgcgattgctcgtgcgcagtgcctccttcgcttccgccgctggtcgccactgccgcttcttcctctcccttcccctcccgctaccacacgagcagcttcctgccgccgcagcgtacgcatggcctcgtcggacggctctgccgcggccctgcccagcgctaccgtcgatgtgcccggcgccggggcccctgtcctcgtcgtgggcgcgccggggctccccgaggctgacttcaggaacgcggtggagtcgtcgctgttcaagcagtggctgcggaacctgcagtcggagaagggcgtcctcacctacgggaggctgagcctcacgcgggttctcatccagggcgttgacatgttcgggaaacgggtgggctttctcaagttcaaggctgatatcgtggacgaggaaaccaaaaccaaggttccaggaattgtctttgcaagagggcccgcggttgctgtgttgattcttttggagtcgaatggagaaacatatgctgtgcttaccgaacaggttagagttcctattggaaaattcctgttggagctgcctgctgggatgctagatgacgaaaaaggtgattttgttggcaccgcagtccgtgaggtggaagaagagactggtataaagctgaatatagaagacatggttgatcttacggcactggctggaccctgctactggaggtcgaatgctaccatcaccgggttggctgcgacgaagagattggcctgttcctgtacaggggccgcgttgacgaggagaccataagatcgctccaggggaaggaaaccgggctgcgcgaccacggtgagctgatcaagctgcgcgtggttccgtacagcgagctctggcggtcgaccggcgacgcgaaagcactctccgcgatagccctgtacgagatggccaagagggaaggcctgctgccgcagccgacgccgtcggccaacttgtgaagacctgctagcactttaaaacagtggtggccgtcatgcctgtaaaatggaaggaggaacgtcactcgcgaaaccaaatcatatatatctctatctcttcgtttggtataacgcgcttaagcttgtctgtttgtgttatgtatacatatactaataatttaaaaataaaagtataatcgtgtttaaataaaaaaaaaaaaaaaaaaaaaaaaaaaaaaagggcggccgccg

SEQ ID NO: 259233 - DNA, 964 bp, Zea mays
gaattcggctcgaggatttatggagtgatgatgaggacaacgagaagatgtcgagatcctggagttccacctctgatgaatcattgttcaactgtgatgtgttatggtccaacaggaagcgtccagggcacctgtactttgagttctttgaagtaggttcaccttatggaagggttcctctcattgacaaggtttatgaactatcccagggctttcctggattgacatcactgaagagtgctgagctttcgcctgttagctggatgtcagttgcctggtaccctatataccacattccttaccagcgcagcgtgaaggacttatctgcatgcttcctaacttaccataccatttcctcctcgtttcaagatcacgggcttgagaccatgaccactgattgttgccatccagttgcaaacggcaaacaaaatggccacatggataagaagagcaacaccgtatcactgcctccatttggcctcgcagcacacaagatacaaggttccctctggaccaaccccatgacaggagaccgcagaaagatggacttcctcttcagtgcggcagactcctggctgaagcagcttggagtccagcatcatgacttcaacttcttcatcactcaccccatgtgaactgctgatccggagtggcttgcaaagaaccacatgggtacagtttgaagctagttatattacctacaccaccaccaacggggtagcaaaacgtttacagtacaatgcactggtgaaacgagtctaacaatcgcaggatagatttatacttgagtttactgctgcagcgaataccaaacatgtcggcactcaaaaaggttttctgtttcttgtttcttggcagaaaatgtaactgatctgtacagaagttttgcaactaatttggtatccaatgtgggggttggatccaaaaaaaaaaaaaaaaaaaaaaaaaaaaaaagggcggccgc

SEQ ID NO: 259234 - DNA, 528 bp, Zea mays
agcagcttggagtccagcatcatgacttcttcttcttcagcactcaccccatgtgaacgtgctgatccggagtggcttgcaaagaaccacatgggtacagtttgaagctagtgatattacctacccaccaccaacggggtagcaaaacgtttacagtacaatgcgctggtgaaatgagtctaacaatcgcaggatagatttatacttgagtttactgctgcagcgaataccaaacatgtcggcactcaaaaaggttttctgtttcttgtttcttggcagaaaatgtaactgatctgtacagaagttttgcaactaatttggtatccaatgtgggggttggatccatactgtagctgttgcttgtgaactttagtgccctagagaatgttagttccaggacgaaactgtttgcgcagactccagctggacctgaatctgtcgatgacaattagttatcttctacagtaaggcagttgtccgcgtaataacacagtttctcagttagttacagttaacttgggcggccgt

SEQ ID NO: 259235 - DNA, 980 bp, Zea mays
gaattcggctcgaggaaaagagccttttctatctcatcatccccactggcacacccaaatcaaatccatttgaccgttagcgtcgtagcatgggttactccattcaagagaacccggcgtggactctgctctacatggctggccgggctcaatccaaataaagacaatcttatcccgtgttggatacaccaagggtccctgcctcctccacgtccattggttcctctcgtgttgattggaccaggaacagggtgtgcaccattccgtgcatttgtggaggaaagggctgcacaggctgcagctgaaccaacagccccggttctgttcttttttggctgtagaaaccaagaaaacgattttctatacaaggatttctggctaactcatgcgcaggatgagggggtgttgtcctcgaaaaggggcggtggtttcttcgtcgctttttcccgggatcagccgcaaaaggtctacgtgcaacacaagataaaggaacagagttcaagactgtggaacttattactgtccgatgcagtgatctacattgcaggctcttcgacgaaaatgcctgccgatgttacagctgcgctagaggaggttatttgtaaagaaggtggtgtcaagcaagcggatgcttcgaaatggctcagggatctagaaagggctggtagacttaacatcgagacatggtcatagttgtgatgggcaagaaagtacatattatttatgtttgctgaatatagaaccagtgagaatttcactgtaaatcaaaggcattggaaatgtggaaacgtgtagatgttaaagcatccaatacggagaaatagttggaggatgatctaaactttcctcatttagccctctgtacgaaacgccatttcgtttgattaagtgagcacagtaattacatcaaaaaaaaaaaaaaaaaaaaaaaaaaaaaaaaaaaaaaaaaaaaaaaaaaaaaaaaaaaaaagggcggccgc

SEQ ID NO: 259236 - DNA, 805 bp, Zea mays
  unsure (1)..(805): unsure at all n locations
cggcccggaaggcccgggttgatttacgcgnccganacccctcccatactacatctttgctagtgtttggggccacaggatctacacaatctacagcattctgtttattgtcttcatcatcctccttattgtcactgcgttcatcactgttgcactgacatacttccagcttgctgctgaagaccatgagtggtggtggaggtcattcctatgcggaggatcaactggatttttcgtatacggctactgcctgtactactactatgcgcgatcggatatgtctggcttcatgcagacatctttcttctttggctacatggcctgcatctgctatgcattcttcttgatgctcgggatggtgggcttccgcgccgccctgttctttgtccgccacatatacaaatctatcaagtgtgagtgagctgttgctgggagacgaagagcagcagagttgtacccgtttttggtgccccaccgagaggtcccagatatagaaaaggttagctctcgcatgcgacaggagcagctagagattgccatgtttcagagtaggccaattatttataggaacaggtaatgaacctataaatttgttctgtttttgtgactgctgtgataaaaagaccgtctgttccttcgtcctatgtatcatctcctagtgacgtcagacagcactataactttgttggaaccgtgacatgcctgaatatctgtggaaaaagaaacccgtgttatgttgttatatatgttctctaaagcatagaataatagaagtgtagacctctagtgtggcaggttcatctgt

SEQ ID NO: 259237 - DNA, 1161 bp, Zea mays
gccttatttaggagaaaaaatacatttgctctttgatttgcttttttcttaccggaagtcagattcaaggggtttgtgtttttgtgttatctttcaatatattcggctaacttcatggatagcacatccaaccaaataatatttcatctctatatgattttggactggagaaattgttttctatttattgtaggcagtaaaaatccttaatgcttgtactcctgtgcctgtatgtttacttgaaactgtacatcttcacttgaaagtatgcccatgatgaggaagcagccgatgaccaggaagagtctggatggaagtatatccatggtgatgtcttcaggttcccaaagaataagtcgctattttccgctgctcttggcacaggaactcaactatttgctctcacaacctttatattccttcttgcacttgtcggagtattctatccttacaaccgtggtgcactatttactgcattggttgtcatctatgcactcacttcaggaattgctggatacgttgctacctctttttattctcagctggaggggacaaactgggtgaggaacttgctattgacaggatgcctgttctgtggacctctcttactgacattttgcttcttgaacactgttgctattgcttatagtgcaacagcagcactgccctttggcactatctgtgtcattgtgctcatctggaccttggtcacatttcctttgcttgttttgggtggtattgctggtaaaaacagcaaaagtgagttccaagctccttgccgtaccacaaaataccccagggagattcctccacttccctggtaccggagaaccattccacagatggctatggctgggttcttgcctttcagcgccatatacatcgagctatactacatctttgctagtgtttggggccacaggatctacacaatctacagcattctgtttattgtcttcatcatcctccttattgtcactgcgttcatcactgttgcactgacatacttccagcttgctgctgaagaccatgagtggtggtggaggtcattcctttgcggaggatcaactggttttttcgtgtacggctactgcctgtactactactatgcgcgatccgacatgtctggcttcatgcagacatctttcttctttggctaca

SEQ ID NO: 259238 - DNA, 1091 bp, Zea mays
gatctcccttcccttccgttcctgttcctctctattaagcagcaagcaaagcgccactctcaatccacctcaggcctcgctcagatctctccgcccgggtccatcttcccaccccaaaccttctcccgcctctctcgtcaacgccgcccgacgagagggatggcggccttgcgggctccggccgcaacgctcctcgtcctcctcgccctagcggcggccggcggcgtggcggccgacggctccgatcaccggtacaagattcgcgagcccgtcccgctctacgccaacaaggtcggcccatttcacaatcccagtgaaacatatcgatatttcgacctgcctttctgctctcctgacaaagtgaaggagaagagcgaggcccttggcgaggtcctcaatggggatcggctagttgatgcgccttacaagcttgatttccgttcggaagttgagtccaaggcggtttgctcaaagaagcttaccaaagaggatgtagtgaagttccggaatgcagtagcgaaggactactacttccagatgtactatgatgatctcccactgtggggcttcattggtaaagttgagaagggaggcaaggccgatccgagcgagtggaagtactacctgtacaggcacatcatcttcgatatcctgtacaacaacgaccgggtgattgaaatcaatgtgcacactgatcagagtgcattggttgacctgacggaggataaggagacaaatgtggatttcctgtactcagtcaagtggaaggagacaccaacaccatttgagaagaggatggagaagtactccagctcctccaacatgccgcaccacctggaggttcattggttctcaattataaactcttgtgttactgtcctcctcctcacagggttccttgcaacaatcctcatgcgagtattgaagaatgattttgtcaagtatgcccatgatgaggaagcggctgatgaccaggaagagtctggatggaagtatattcatggtgacgtcttccggttcccaaagaataagtcgctattttccgctgctcttggcacaggaactcaattatttgcactcacaacctttat

SEQ ID NO: 259239 - DNA, 1209 bp, Zea mays
gtacaatggctggttgagccccaggatcctgggtgatttcacagctttcgccgacttctgcttcaagacgtacggcgaccgggtgaagaactggttcaccatcaacgagccgaggatgatggcccagcatggctacggcgacggcttcttcccccccgccagatgcaccggctgccagttcggcggcaactccgccaccgagccgtacatcgccggccaccacctcctcctcgcgcacgctgccgctgtcaagctgtaccgcagcaagtacaaggttcgtcaggccggcaagatcggcatcctgctggacttcgtgtggtacgagccgctgaccaagtccgtggaggacgagtacgcggcgcaccgggctcggatgttcacccttggctggttcctgcaccccatcacctacggccactacccggagacgatgcagaagatcgtcatggggaggctgcccaacttcaccttcgagcagtctgccatggtcaaaggctcagcggactacgtcgccatcaaccactacaccacgtactacgccagcaacttcgtcaacgccacagagaccaactaccgcaacgattggaatgcaaagatttcgtatgagcgagatggtgtgcccattggcaaaagggcgtactcggactggctttacgtcgttccatgggggctctacaaggctctgatttggaccaaggagaagttcaacagccctgtgatgctcatcggagagaacggaattgaccagcctggaaatgagaccttgccgttcgctctgtacgacaagttcaggatagactacttcgagaagtacctgtacgagctccagtgcgccatacgcgacggtgcaaacgtcttcggctacttcgcgtggtcgctgctggacaacttcgagtggcggctcggcttcacctccaagtttgggatcgtgtacgtggaccggaacacgttcgtccggtaccccaaggactcagctcgctggttcaggaaggtcatcaagaacgagaactgaatgatcgatcggccggtccattattaaggaacgaaccccctgcgtttctttttagctaggggtatagtagtgcgtgtagggggtgcatcgatcagtttggtcatttcaataaaatgcttgtagttgttgttttggacttcgaataataaaaatacaacttcccttctcaaatagttgtcgtccgctagttcatgttt

SEQ ID NO: 259240 - DNA, 458 bp, Zea mays
tgaaaccgctgcagaacctgcgctccctatccctggagtcctgcagggtgacggcaagcgagatggataagctccggctggtcgccctccccaaccttatcagtgtgcggccggagtgatacgaccgccagcgctcccacagcgacctgtaactgtggagcaagtggcgcctggctagagcaggccgccttgtacatacttttgcaaaaacgaggtgtctgtacatattgttcgtcgtgtcgtgtcgtgtcagtgtgcctgatggcaacgggctaatacgtccgtgccaacgtgtgcatggtatcccacggaccctgtggtagtaaggagcagttgtaaatatgccgtgcttcctctccatgtggggtgctgctgtataaatagattggtgcattgctaaatacctctgcttggaaaaaaatatctaaacataacatccgcccaacatttttttatat

SEQ ID NO: 259241 - DNA, 778 bp, Zea mays
cgtcgtcgtcggtggtagtatctgagccaaatcttacttggaagtagggttttggcctgtgtaatccgatcgaccttgcgcagttgctccgatgggcaaggactcgaagccgaaggacgccaaggggaagggcaagcaggcggccggctcctctggcggcgacgacggcggcggcaagggaggcaagggcaagggcaagggcaagggcggcaagtccgctgacggactcggcacttgcacctacgtcaaagctaggcacgtattgtgtgagaagcaggggaagatcaatgaagcttataagaagttgcaggatggatggctgaataatggggacaaagttcctcctgctgagtttgctaaggtagcacaagagtattctgaatgcccatcagggaagaaaggtggagatcttggttggttcccgcgtggcaagatggctggtcctttccaggaggttgctttcaacacacctgagggaactgttagcgcaccattcaagtccacgcacgggtatcactttatcctctgcgaaggaaggaagaactgatctggaaatgtcggttggggagactgcatcatcaggttgtatgagacgcaatgcaaactactcaccttctctaataagcgctggacatgtgtactttgtgttgggctattcgcattctgttccaaacaagttgccaaaacaaaagaatgtgtgattcgctgtaattaacatattgtactgataatctgatatggcatacctatctgggtcagttaacaggtgggttttagc

SEQ ID NO: 259242 - DNA, 983 bp, Zea mays
ccacccgagcccgtccgcatggctgattgcttttggtttagcctttttctgacagggaactggtctgggtactactcgccaaaggaccatatatcataattggaaaggagcaaggcaagctgtagggaagatcactgcacaattatttttatattatcgctcctataacgttttgagaatctgtggttaagttgtattgtaaagctagttagtagcaaaattgtttataaggctatttgagctcttatatcttcatacacatttaatttttcgcagcttgtgaacattgggaagcccaattaaatatttgaatctgcatagagtattggaaatagtcaatagtggtgaacttttgaatgattcagttttgagactctggttggagcatgtgtagctactatttagtggggtgcatgtgacatcaaatttcgattgttgacctcatatatgttactggacttcaaaatttgttcttccattttcaatctgactaactacttcgtcgaagtttttctcatattttttgtgccattattagataccatgatgataatagatcctgactttattttttgtactacaggtagcacaagagtattctgaatgcccatcagggaagaaaggtggagatcttggttggttcccgcgtggcaagatggctggtcctttccaggaggttgctttcaacacacctgagggaactgttagcgcaccattcaagtccacgcacgggtatcactttatcctctgcgaaggaaggaagaactgatctggaaatgtcggttggggagactgcatcatcaggttgtatgagacgcaatgcaaactactcaccttctctaataagcgctggacatgtgtactttgtgttgggctattcgcattctgttccaaacaagttgccaaaacaaaagaatgtgtgattcgctgtaattaacatattgtactgataatctgatatggcatacctatctgggtcagtt

SEQ ID NO: 259243 - DNA, 421 bp, Zea mays
cggacggtgggcggacgcgtggtcgtggtcctcccgtcgtcgtcgactcgtcgtcgtcggtgttgctccgatgggcaaggactcgaagccgaaggacgccaaggggaagggcaagcaggcggccggctcctctggcggcgacgacggcggcggcaagggaggcaagggcaagggcaagggcaagggcggcaagtccgctgacggactcggcacttgcacctacgtcaaagctaggcacgtattgtgtgagaagcaggggaagatcaatgaagcttataagaagttgcaggatggatggctgaataatggggacaaagttcctcctgctgagtttgctaaggtagcacaagagtattctgaatgcccatcatggaagaaaggtggagatcttggttggttcccgcgtggcaagatggctggt

SEQ ID NO: 259244 - DNA, 770 bp, Zea mays
caagaaatccaaatattcagactccagtctagcattgagcgacgagcccgagtatcgtctttagactcctcattcctcaacccgacgcggcggtgtgcccccctgctttttttggcctctcctctccgttggcgacgcatacatccggcgagggagcggaagaagtcagtaaattctgtcgctccaatccggacgaggagatgccgcggatccctctgatcaagttccccaagcggaatctgaaagccccatccgcgccagtgccgtcgcaacccgcagatcagcacgcgaccctcatgtcccggttgggggctaaagcagaggcaccatcttctggagggattaaaaattaccgctttagatctgatgtgccttgcccaccttctcatactgctgtaggaggtccagcttcactccttcctaagcgcaaacccctgactgaagaagagattgaggctattatgctggggggctccatctgatatcacctcatatgaattggaaattctaggaacatcaataagattgtatgcctgagcttattgcctttgacctctgaaagagtgttattgaagccatgtcgatatggaagtggttttttttaattcagtctggaagttggctgttgagacatccatttccagtactccgcacatgtaactgagcaaaccgtgaacacatttagttccttgcagaagtgttgagcatggaatggttttgcttttgcaaaaccccaaaaaaaaaaaaaaaaaaaaaaaattatttaaaaa

SEQ ID NO: 259245 - DNA, 498 bp, Zea mays
aaaaattaccgctttagttcagatgtgccttccccaccgtcgcatactgctgtaggaggtcaagcttcactccttcctaagcgtaaacctctgactgaagaagagattgaggctattatgctgggtggctccatctgatatcacctcatatgaattggaatttctaggaacatcaataagatcgcatacccggacttattgccttcgacctctgttattgaagtcatgttgatacagaattgggtttttttttttctaattctctgcaagtcagttgtggagacattaatttccagtattctgcacatgtaactgaccaaatcgtgaacacattgaggtccttgaggaagaagtgttgatcatggaatgtttttgcatctgattattttgtattgatgtcttgaattcttgccacacctgaagatctgatgatcatgccttttgaagcaagcatatttttttgaagcaaaaaaaaaaaaaaaaaaaaagggcggccgc

SEQ ID NO: 259246 - DNA, 643 bp, Zea mays
atcgaggaaccagtatttcgtccggtcgtccagccctatctgcagtccaccgtcgggcgagcccgagaatcccgtctcctcggcgccgcggcccccggtttttttatgctttcctttcggtcggcgacgcatacattcggcgagggagaggaagaagtcagtaaagtaaattctgtcgctccaattcggacgaggagatgccgcggatccctctgatcaggttccccaagcggaatctcagagccccatctccatccgcgccagcggggtcgcaacccgcagaccagcacgcgaccctcatgttccggttaggaggtccagcttcactccttcctaagcgcaaacccctgactgaagaagagattgaggctattatgccggggggctccatttgatatcccctcatatgaattggaaattctaggaacatcaataagattgtatacccgaacttattgcctttgacctctgaaaaagtgttattgaagccatgtcgatatggaagtgtgtgttttttttaattcagtctggaagttggctgttgagacatccatttccagtactccgcacatgtaactgagcaaaccgtgaacacatttagttccttgcaaaagtgttgagcatggaatggttttgcttttgc

SEQ ID NO: 259247 - DNA, 838 bp, Zea mays
aattccatggcggtgggctgtggctggtaataaagctcgcgccacgggagccacgcacgcggacgccggcatattcgccaaacgcatcgcatcggcctcggccaccggcgcggctgccctcctcctcttctccgtcgatccggagaggactttctctcgcctgctcgtcccttccgcccccgccggccggccggtcctcttcccggcccactccgttccgatcgaccatggcggctaccgcccccaacggcaatcccactgtcagctccctcgcggcaaccgttccggtccaggcggttctgttcgacatcgacgggaccctgtgcgactcggatcccctccaccacgtcgctttccaagagatgcttctcgagatcgggtacaacaatggcgtgccgatagacgaggagttcttcatcaagaacatcgctgggaggagtgacgtcgaagctgcccagaacctgttcccggactgggagcttgagaaggggctcaaattcctagaggacaaggaagcaaaatacaggagtctggcaaaagagcgcttggtgcctgtgaaaggcctcgcgaaggtggtccagtgggtgaaagaccacgggtacaagcgcgcggcggtgaccaacgcccccaggatcaacgcggagctgatgatctcgctcctgggcctctcggacttcttccaggccgtcatcgtcggaggcgagtgcgagcagccaaagcccgcgccgtacccttatctcagggccctcaaggagctccaggtgtccgcagagcacagcttcgtcttcgagattcgcctgccggtatccgggctggcgtcgcggcagggatgcctgtc

SEQ ID NO: 259248 - DNA, 401 bp, Zea mays
gatcctcaacaacgaggagtgcttcatcctgaagctggaggctggcgccgcgacgctgcgggcgcggagcgctccggcgttcgacatcatccaccacacggtttggggctacttcagccagcgcacggggctgctcatccagctcgaagactcgcacctgctccgcatgaagtccggcaagggcgctcgccgcatcgagaacatcttctgggagaccagcatggagtccgtcatctccgactaccgctacatcgacggcatcaacatcgcgcacggcggccacaccaacgtcacgctcttccgctacggcgagggatccgtctaccacaagcggaagctggaagagacatggactgttgatgaggccgatttcaacgtgcacggtctaaccacggactact

SEQ ID NO: 259249 - DNA, 774 bp, Zea mays
  unsure (1)..(774): unsure at all n locations
nccacgcgtncgcccacgcgtccgcccacgcgtccgcccacgcgtccgcgaaagaagtcgcctaattctttcgatcgaattaggcgccttcttcgtcccacgctccgtctttatttgtaatctgaagcttacaggaacatttgagtggatcatggacggattggtaggcctcttgaaagtccgggtggtgaggggcatcaaccttgcctaccgcgacgcaagaggcagcgatccgtatgtcgtcctacgacttggcaagaagaaacttaagacgagcgtgaagaagagatctgtgaaccccatctggcacgaggagctaactctgaccgtcacagatcccagcctagctctgaagctggaggtgttcgacaaggacacgttcagcagggacgacccgatgggggacgcggagatcgacgtggcgccgctggtggaggcggcgaacgcgagcccggaggcgagcctgaggaacggcgccatcatcctgtcggtgcggccgagcgccacgaactgcctcgccgacgagagccacgtgtgctggaggaacggcaagttcgcgcaggacatgatcctccgcctcaggaacgtggagagcggggagattcagctgcagctgcagtgggtcagcatccctcctgctgcagccagcaggtgaaggaaggaagaacaggcgacacgaagcaatcgcattttcacctcttgtgaatgtcggattgtaaacttaatggggtctgggtcagtcagggtagttcatgtgttgcctattaatgtaca

SEQ ID NO: 259250 - DNA, 1045 bp, Zea mays
tagcggtctgatcgtatccgggtggccccacgcccccggtagtagcgaaaggcaagggacgtaagaagtcgtctaattcttggatcgaattagacgacttcttcgtccctctcttcattagcacgctaacttgtaatctgcaggatctaagcaaagacttgatttagttatggacggattggtaggcctcttgaaagttcgcgtggtccggggtatcaaccttgcctaccgcgacgcaagaggcagcgatccgtatgtcgtcctacggcttggcaagaagaaactgaagacaagcgtgaagaagagatccgtgaaccccatatggcaagaggagctaactctgaccgtcacagatcccagccaaccactgaagctggaggtgttcgacaaggacaccttcagcagagacgaccccatgggagacgcggaggtggacgtggcgccactgatggaggcggtgagcatgaacccgcgggaggagagtctgaggaacggcgccatcatcaggtccgagcggccgagcgccaggaactgcctcgccgacgagagccacgtgtgctggaggaacggcaagttcgcgcaggacatgatcctccggctcaggaacgtcgagagcggggagatacagctgcagctgcagtgggtgaacttccctcctggtcctgctcctgctgctgcaacaaccaggtgacctgatcgatggtagctgctgttcctgtcgccattgcctcctgctggcaggaacaggaactctctgaagcacggggtcagggtagttcatgttgcttcgattcgatcgtaggggagataatgccggatggctttgtaaagtttgggaggacatgcatcataattgaagtcaagtgataggatcctgttttttaagtacacgatacaacacaaatcttaacataaaaaaaaaaaaacataaaaatagataaaaaaaataaaaaaaagaaaataaaaaaaaaaaatataactaaaaaaaaaagaaaaaaaaaaaaaaaaaaaataaaaaaaaaaaaaggggcgcccctttaaaaga

SEQ ID NO: 259251 - DNA, 412 bp, Zea mays
taaagagattcgctatatcttggatcgaattagacgacttcttcgtccctctcttcattagcacgctaacttgtaatctgcaggatctaagcaaagacttgatttagttatggacggattggtaggcctcttgaaagttcgcgtggtccggggtatcaaccttgcctaccgcgacgcaagaggcagcgatccaaactgaagacaagcgtgaagaagagatccgtgaaccccatatggcaagaggagctaactctgaccgtcacagatcccagccaaccactgaagctggaggtgttcgacaaggacaccttcagcagagacgaccccatgggagacgcggaggtggacgtggcgccactgatggaggcggtgagcatgaacccgcgggaggagagtctgaggaacggcgcca

SEQ ID NO: 259252 - DNA, 995 bp, Zea mays
cccacgcgtccgggcaagggacgtaagaagtcgtctaattcttggatcgaattagacgacttcttcgtccctctcttcattagcacgctaacttgtaatctgcaggatctaagcaaagacttgatttagttatggacggattggtaggcctcttgaaagttcgcgtggtccggggtatcaaccttgcctaccgcgacgcaagaggcagcgatccgtatgtcgtcctacggcttggcaagaagaaactgaagacaagcgtgaagaagagatccgtgaaccccatatggcaagaggagctaactctgaccgtcacagatcccagccaaccactgaagctggtgagtgagcagcaagcagaacgatcctgtttgtgattcattattctagactgtttgctacaggaggtgttcgacaaggacaccttcagcagagacgaccccatgggagacgcggaggtggacgtggcgccactgatggaggcggtgagcatgaacccgcgggaggagagtctgaggaacggcgccatcatcaggtccgagcggccgagcgccaggaactgcctcgccgacgagagccacgtgtgctggaggaacggcaagttcgcgcaggacatgatcctccggctcaggaacgtcgagagcggggagatacagctgcagctgcagtgggtgaacttccctcctggtcctgctcctgctgctgcaacaaccaggtgacctgatgatcgatggtagctgctgttcctgtcgccattcgcctcctgctgtcacgaacaggaactctctgaatcacgggtgcaggttagttcatgtggcgttggattctatcgtatagtagataatgccgcatggcgctgctcatgctttgtaaagtttgggaggacatgcatcataattgaagtcaagtgataggatcctgttttttaagtacacgatacaacacaaatcttaacatactccctttgtttaaaaaaaaaaaaaaaaaaaaaaaaccaa

SEQ ID NO: 259253 - DNA, 468 bp, Zea mays
ctgcttcgatgagtttgtttcttccgttaccggggcaggtagctcctctccctctctgtcgccgacgactacgccaggtcttcttcggggcccaggtcgctgccgcctacatcaggggccccaagttttcctacttcctaggacccctcgccggcgacgagcaccaccagcttggttcactcccaacaaaatgtcagccaatgtgggtgaatcaactagcggtgtcagcagcagcgatgcagctggggggagctttgagtgcaacatatgcttcgagctgcctcaggagccaatagtgactctctgtggccacctcttctgctggccgtgcctttaccggtggctgcacattcacgcacactcgccagagtgcccagtgtgcaaggccctcgtggaggaggacaagctcgtccccctttatgggcgtggcaaggatcgcgtcgacccgaggtcgaagaacatgcccga

SEQ ID NO: 259254 - DNA, 937 bp, Zea mays
caccagccgccagtagcaatagcggagtagcaacccgccgagcaccgacctctccatagttcctctacggctctaccgagcaaccgccggcgtcgaccctgccgtccaggcccgtcctgccgcggtgccgcctgcgtccctgccccagccacccggccgccacccgccgccgccagcgaggcgcgagtagtagcgaccctggtccctgccgcccttgcgttcgtggctccctgcccagtgcccctgcgtcagcgtcactgcactctccgaggtggaggtggttctcaaatctcaagtccatccacggcgctactaccctcgctgcaatggagttgaggaggcctgcatcctctcctcttgtcgacaactacgtggtacctggtgacgtcgtcctggacctctctgagatgaacaaccagaccattaaactcggcgcgggtctgcgtcaggagtgtgacaccatccaggcgactagtgctgggaagctgcggcagttgaaacccaacaagtattggattgaaaactcacagaaaagatatataccttctgtagaagataccgttcttggtattgtggtcgacaccaaaccagacaactttttggtagacataaagggccctaatttggcctttctaccagtactttcatttgaaggcggtacaaggagaaacatacccaagttcgagattggtacattaatatatgctcgagtggtgaaagcaaatagtatcatgaatcccgagctctcatgcatggatgctactgggaaagctgccgaatttggacagctcaaagatggttatatgttcgacacaatcaaacttgctgtcacgaatgttgttaaagttttctcaagacctccagaactggacatgttggggaacttaacaacattcgtgacatgccaagttctgaggtccttgggaaaaaactgtcg

SEQ ID NO: 259255 - DNA, 1751 bp, Zea mays
gtccgcctggagggcgtacgcggcggcgggcgaggagagcgatgtggtggtggtgggtggcgggcccggagggtacgtggcggcgatcaaggccgcgcactggggctcaagaccacctgcatcgagaagaggggcactctcggcgggacctgcctcaacgtcggatgcatcccatccaaggctcttctgcattcatcacatatgtatcatgaagcaaagagttcttttgcacaccatggagttaagttttcaaatctggaagtggacctcccagccatgatggctcagaaagacaaagctgtggcaggactaacaaagggaattgaagggctctttaaaaagaacaaggtgacttatgttaaaggctttggaaaattgtcatccccctcagaagtgtcagttgacttgattgatggtggtagcactgttgtcaaaggcaaaaacataataattgcaactgggtctgatgtaaaatcacttccaggaataacaattgatgagaagaaagttgtttcatctactggtgcactgtgcttgtcagagatcccgaaaaaactggtggtaatcggagcaggttatattggccttgagatgggttcagtctggaaccgccttggttcagaggtcactgttgttgaatttgccccggatatagtaccatcaatggatggcgaggtcaggaagcagttccaacgcatgctagaaaaacagaaattcaagttcatgctcaagacaaaggttgttgggtgtgataccagtggagatggcgtaaagctgacactggagcctgcagctggtggtgagcagaccatccttgaagcagatgttgttcttgtctctgctggcagaagcccatttacttctgggattgggcttgaaactcttggtgttgagacagacaaggctggcaggatccttgttgataagcgcttcatgaccaatgtgaagggagtctatgcaatcggggatgccatccctggtcccatgcttgcccataaagctgaagaggatggtgtcgcatgcgtagaattcattgctggaaaagaaggccatgttgactatggcacagttcctggtgtggtctatacacatccagaagttgcatctgttggcaagactgaggagcaggtgacggctctaggaattccctatcgtgtgggcaagtttccacttttggctaacagtcgtgcgaaggccattgatgatgctgaaggggtagttaaggtgatcgcggagaaggaaaccgataagattctaggtgtgcacataatggcacccaatgctggtgaaatcatccatgaagctgtcatcgccttgcagtatggagcatccagtgaggatgttgctcgaacatgccacgcacaccctaccgtgagcgaggccctcaaggaggcttgcttgcaaaccttcgataaagcaatccacatataatttctcattttctatttccttgccatccaaacttttggctcaacaagatccaaagtttatggtaattttgggcctgttggaacagaaggcccccggttgtccttttgttttgttggcaataatgtgaattctttgagttgcccacatcttagaggcgtttatgcttccttggcttggcttatccatccaaattccaaaataacgttctgatactatgttttactgtgtatgcccatgaaccattgatggataaaaaaaaacaaaagtaaaacgtatacagcaacagaaaaaaagggcggcagctcgcgatctagaactag

SEQ ID NO: 259256 - DNA, 509 bp, Zea mays
attgatgacgctgaaggggtagttaaggtgatcgcagagaaggaaacagataagattctgggcgtgcacattatggcacccaatgctggtgagatcatccacgaagctgtcgtcgccttgcagtatggagcatccagtgaggacgttgctcgaacatgccacgcacaccctaccgtgagtgaagccctcaaggaggcttgcttgcaaaccttcgataaagcaatccacatataatttctcattttttgtgtccaaactccaaagtttgtggtaattttgggtctgttggaaaaaaggcccctgattgtccttttgtttttgtcggcaatactgtgaattgaccctttgagttgtccatcttagcggggttttgtgcttccttggcttggtttatccatccaaataataacctgatactatgttttacattttatgcccatgaaccattgatggatatacatttctaaggttccagtaaccgcagtgttaaaaaaaaaaaaaaaaaaaga

SEQ ID NO: 259257 - DNA, 575 bp, Zea mays
cccacgcgtccgcccacgcgtccgcccacgcgtccgcggacgcgtgggggcgtgcagattatggcacctaatgctggtgagatcatccacgaagctgtcgtcgccttgcagtatggagcatccagtgaggacgttgctcgaacatgccacgcacaccctaccgtgagtgaagccctcaaggaggcttgcttgcaaaccttcgataaagcaatccacatataatttctcattttttgtgtccaaactccaaagtttgtggtaattttgggtctgttggaaaaaaggcccctgattgtcattttgtttttgtcggccatactgtgaattgaccctttgagttgcccacatcttagcggcgttttgtgcttccttggcttggcttatccatccaaattccaaaataatgttctgatactatgttttactgtgtatgcccatgaaccattgatggatacatttcggacgttccagtatggccgtgttcgtgccttgatttctttttctactgttgcatttgtttaacatccttttgctgaaaaaaaaaaaaaaaagggcggccgctcgcgatctagaac

SEQ ID NO: 259258 - DNA, 381 bp, Zea mays
cggacgcgtgggcggacgcgtgggcggacgcgtgggttttgggcctgttggaacagaaggcctccagttgtccttttgttttgttggcaataatgtgaattctttgagttgcccccatcttatagtcgtttatgcttcattggcatggcatatccatccaaattccaaaataatgttctgatactatgttttactgtgtatgcccatgaaccattgatggatacatttcggacgttccagtatggccgtgttcgtgccttgaaaaaaaaaaaataactaaaacataaagggagggccaaaatgaatggacacgtaaaagaacgtctgccacaataatagcaaagctaacccaatgatggatgggggggcggccgttttaaa

SEQ ID NO: 259259 - DNA, 526 bp, Zea mays
  unsure (1)..(526): unsure at all n locations
cccactcgtccgcagcagtacttctcaaataccatatctcggctcttgctacctgttgatggtgctcatccgtctgcttgtgaagatatggggtcagcagtatcagtagttgaggctgctgctcacaaaggactgctacaatgtattgatactgttatgtctgaggttgaaagattgttgtcttcggaacagaaggctacagattatcgaacaccagatgatggagctgcaccagatcatcggccaactaatgcttgtataagaattgtagcctatctctctcgtgttcttgaggttgcattcagtgcccttgaaggcctcaacaaacagtcctttttgactgagctgggaaatcgcttgcataaggggctgcttaatcattggcagaagttcacatttagtcccagtggtggcctacggttgaaacgtgacataactgaatatggggattttgntttgatctttaatgctttcttcataggatatatgtttattccgttattattatttttttaatttttttttt

SEQ ID NO: 259260 - DNA, 556 bp, Zea mays
gggaaatcgcttgcataaggggctgcttaatcattggcagaagttcacatttagtcccagtggtggcctacggttgaaacgtgacataactgaatatggggatttcgttcgtagcttcaatgccccctccatagatgagaagttcgaactgttgggaattgtggcgaacgtcttcattgttgctccagaaagtttagcatccctgtttgaaggaacccccagcatccgaaaggatgccttgaggttcattcagctccgggatgattataagacagcgaaaatcgcttcgatgctcaactatatcatgtccgagtaatgagtgaagtggaaccgttagaccgttacactttgctgctctcgtggactattgatgccgtttgtataaatgaccttcgaaattatgtttattcttgtttccaatttatttgttttcctatccttttctttttgggctttgctcaatttgagctgtacatgtggttcaggtcctttagacctctacttgtataaatgatgagaaatttctgtggctgtttacgtgcaaaaatttggccgc

SEQ ID NO: 259261 - DNA, 1630 bp, Zea mays
  unsure (1)..(1630): unsure at all n locations
ctggtttctttccccttggccaagcccaagcccaaacccgggaaccccgtctttaaaaagtacaccctcgactcgtcctccgcattccccgtttgccttgtttaccattcctccccaaaacacctcgcctgcgatcttcgtagcctccgtcgcgtcgagcatcgatcatgtcggcctactgcggaaagtacaaggatgagctcatcaagaatgctgcctacattggcacccctggcaagggtatccttgctgctgatgagtccactggcaccattggcaagcgcctttccagcatcaatgtcgagaacgttgaggagaaccgccgtgccctccgtgagctcctattctgctgccctggtgctctccagtacatcagcggtgtgatcctcttcgaggagaccctgtaccagaagaccaaggatggcaagccttttgttgatgtcctcaaggagggaggcgtcctccctggcatcaaggttgacaagggcaccattgaggttgttggcactgataaggagaccaccacccaaggccatgacgaccttggcaagcgctgcgccaagtactacgaggccggtgcccgctttgccaagtggcgcgctgttctcaagattggccccaatgagccatcacagcttgccatcgacctgaacgctcagggtctggctcgctatgccatcatctgccaggagaatggtctggtgccaattgttgagcctgagatccttgttgatggccctcatgacattgatcgctgcgcttacgtcactgagaccgtccttgctgcctgctacaaggcgctcaacgagcaccatgtcctcctggagggtaccctcctgaagcccaacatggtgactccaggctccgactccaagaaggtgacccctgaggtgattgctgagtacaccgtccgtaccctccagaggaccgtccctgctgctgtgcctgctgttgtcttcctctctggtggacagagcgaggaggaggccacccgcaacctcaatgccatgaacaagctcagcaccaagaagccgtggtccctgtctttctccttcggccgtgccctccaggcgagcaccctcaaggcctgggctggcaaggtggagaacgtggagaaggctagagctgccttcctcgccaggtgcaaggccaactctgaggctaccctcggcacctacaagggtgatgctgccgccgacaccgagagcctccacgtcaaggactacaagtactgagttgcttctctttgcgtgcccgttttggaactcctgcctacgagctaggttgcggagtgtggtttgctcgttagagcttattttcggacatccaaaaaacatgcttcctatgtgggatgatggttatctttatatttgtatgttaattagtctctttgctgttaaatttcgtgtaagttggtcctgccgatggagaatcgagcagctccctttttttgttctatcaactatgctgtaattctggctatgtatcggcaaaaacaattctatatgctgagttggagtcggcaaaaattcatatatgctgagttggagacagcaaacttatttggatccaaaaaaaaaaaaaaaaaaaaaaaaaaaaaagggcggccgcncgggaatacggacggtac

SEQ ID NO: 259262 - DNA, 727 bp, Zea mays
cgcgtccggacagttccctaaccttcaatgtcatcctccagtggagccaacccgctttgtggagattttccgacgtccaagaaggtgacccctgaggtgattgctgagtacaccgtccgtaccctccagaggaccgtccctgctgctgtgcctgctgttgtcttcctctctggtggacacagcgaggaggaggccacccgcaacctcaatgccatgaacaagctcagcaccaagaagccgtggtccctgtccttctccttcggccgtgccctccaggcgagcaccctcaaggcctgggctggcaaggtggagaacgtggagaaggctagagcggccttcctcgccaggtgcaaggccaactccgaggctaccctcggcacctacaagggtgatgctgccgccgacaccgagagccttcacgtcaaggactacaagtactgagttgcttctctttgcgatcccgttgttttggaactcctgcctgcgagtaggttgctgagtgttgtttgcttgttagagcttttatattcggacatgaaaaaaacatgcttcctatgtggatgatggttatctttatattcgtatattaactactagtctctgttgttaatttccgtgtaatttgctcctcccagatgggagaatcgaaccccgcttttttgttctatctgatatgctgtaatactggcctttgtattggccttggtatcggcaaaaaccattccgt

SEQ ID NO: 259263 - DNA, 468 bp, Zea mays
gctcgaggtttaccattcctccccaaaacacatcctgcgatcctcgaagcctccgccgagcatcgatcatgtcggcctactgcggcaagtacgcggatgagctcatcaagaatgctgcctacatcggcacccctggcaagggtatccttgctgctgatgagtcaactggcaccattggcaagcgcctttccagcatcaatgtcgagaacgtggaggagaaccggcgggctctccgtgagctcctgttctgctgccctggtgccctccagtacatcagcggtgtgatcctcttcgaggagaccctctaccagaagaccaaggatggcaagcctttgagggttgttggcaccgacaaggagaccaccacccagggccacgatgacctcggcaagcgctgcgctttgccaagtggcgtgctgttctcaagattggccccacgagccgtcacagcttgccattgacctgaat

SEQ ID NO: 259264 - DNA, 681 bp, Zea mays
ctcgcgggtcgacacaagcctctagatcgactcattatagagatcgcgcgctcgaggtttcgttatcctcctcgatcttaattacaggtcatagctaagcaggtctgacaggatgtcgtggcagacatacgtcgatgagcacctcatgtgcgagatcgagggccaccacctgacctccgctgccatagtcggccacgacggcgccgtttgggcccagagcaccgcattcccacagttcaagacagaggagatgaccaacatcatgaaggacttcgacgagcccgggttcctggccccgaccggcctcttcctcggccccaccaagtacatggtcatccaaggcgagcccggcgctgtcatccgcgggaagaagggatctggaggcataactgtgaagaagacagggcaagcgatggtggtcggcatctacgacgagcccatgacccccggccagtgcaacatggtggtcgagaggctcggcgactacctcgtagagcaaggcctgtaaacggaattgcttcagtccaatcggaattggttataactggttggtgtcgttccggcaaataattttgtgtggtttcacctaaaactctggttgtcgtatgatttgtaaaccccgaacagtatctatatgtgattgaactgcgcctacctattcttttattatacgggaatatg

SEQ ID NO: 259265 - DNA, 773 bp, Zea mays
ccacgcgtccgacaacgcgtccgcccacgcgtccgcccacgcgtccgcgatcgagcttaattgcgccactgctcgttatcctcctcttgcattgcattgcaggtcgtagttgagcagcagcaaccactgcacaggatgtcgtggcagacgtacgtcgatgagcacctcatgtgcgagatcgagggccaccacctgagctctgccgccatagtcggccacgacggcgccgtttgggcccagagcaccgcattcccacagttcaagccagaggagatgaccaacatcattaaggacttcgacgagcctgggtttctggccccgatcggcctcttccttggccccaccaagtacatggtcatccaaggcgagcccggcgctgtcatccgcgggaagaagggatctggaggcataactgtgaagaagaccggacaggcgctggtgatcggcatctacgacgagcccatgacccctggacagtgcaacatggtggttgagaggctcggtgactacctcgtagagcaaggcctgtgattgaatgcatccaaacaacgacaccaacgccaacattaattaattagtagtctccatgccctgggattgtgcgtggccgctccgttaaacaccacccatccttcgttcggcattttttcccccttgtttatataattttattgtatcgttttggcaaataattttgtgattcgaccccaaagcaagtttggttgtcttacgatttgtaaacctggaacaatatataatgtgattgaactgct

SEQ ID NO: 259266 - DNA, 723 bp, Zea mays
aattcaacagagaatcatgggcgtgaggtttacctgacaggacgtcgactccaacctacatggacgggctccttatgtgctaggtcgagggccaccaccacctcaccttcgccgtcatcatcggccacgacggcaccgtctgggcccagagcgccgcattcccgctgttcaagcctgaggagatggccaacgtcatgaaggacttcgacgagcccgggttcctggccccgaccggcctcttcctcggccccaccaagttcatggtcatccaaggcgagcccggcgctgtcatccgcgggaagaagggatctggaggcataactgtgaagaagacagggcaagcgatggtggtcggcatctacgacgagcccatgacccccggccagtgcaacatggtggtcgagaggctcggcgactacctcgtagagcaaggcctgtgaatggattcatttaacctcgctcgctcgcttgtccatggttcgcagcaacgataccaacacccgcattatttaattggtagcctcctctagctacgcacgcatttttagtctcctacacgcccttggattgtgcgtggctctgttaatcatctctcatccttcgtctgccatttctcccctgagatttttgttccttgttggtaccatgcattttggcaaataattttgtgattccacttccaaattaaagtttggttgtcgtatggtttgtaaacccagaaca

SEQ ID NO: 259267 - DNA, 825 bp, Zea mays
ccgggtggcgccacgcgtccgccaacacgtccgcccacgcgtccgcccacgcgtccgctcgttatcctcctcttgcattgcattgcaggtcgtagttgagcagcagcaaccactgcacaggatgtcgtggcagacgtacgtcgatgagcacctcatgtgcgagatcgagggccaccacctgagctctgccgccatagtcggccacgacggcgccgtttgggcccagagcaccgcattcccacagttcaagccagaggagatgaccaacatcattaagggcttcgacgagcctgggtttctggccccgatcgggctcctccttggccccaccaagtacatggtcatccaaggcgagcccggcgctgtcatccgcgggaagaagggatctggaggcataactgtgaagaagaccggacaggcgctggtgatcggcatctacgacgagcccatgacccccggccagtgcaacatggtggtcgagaggctcggcgactacctcgtagagcaaggcctgtgaatggattcatttaacctggctcgcttgtccatggttcgcatctacgattccaacacccgcattatttaattggtagcctcctctagctactcacgcatttttagtctcctacacgccctttgattgtgcgtggctctgctaatcatctctcatccttcgtctgccatttctcccctgagattctcgttcctaggtggtaccatgcattctggcaaataatcttgtgattccactcccacattaacagtttggcgtcgtatggtttgtaaacccagaacaatatatatatgaggtgtgattgaactgct

SEQ ID NO: 259268 - DNA, 324 bp, Zea mays
cggacggtgggctagctcctcccaccagtgagatcgatcgagcttccacctcctgtcatcctcctcctcctcttgcaggtcgcagctgagcagcaacaaggccggaaaggatgtcgtggcagacctacgtcgacgagcacctcatgtgcgaggtcgagggccaccaccacctcacctcagccgccatcatcggccacgacggcaccgtctgggcccagagcgccgcattcccgccgttcaagcctgaggagatggccaacatcatgaaggacttcgacgagcccgggttcctggcccccaccggcctcttcctcggccccacca

SEQ ID NO: 259269 - DNA, 1002 bp, Zea mays
gtccgcggacgcctgggtttgaaatgtaggtatgctcctctatcatgttcagcaagggaatcaaagcatgtttgacatacataggagctgttccctggaatgagaacgaggaggagaagctgaagaatctctttgcaagattcacttttgacgaagcaatatcccaggatatactggcaagactgcgaccacacaactggaaaagctcagatgacctcgctgtacagcttattcaatctgtcactaacagcaccagcactatggcaagaaaagacatgcaatctttggtgaatggtcttctaagcaaaagttcagtctatcaaaaggactcgtcaggattaaacaaggagagcctgtatcagatctgttattcatgtcttgagtcactggttgacctctttgaagaggccatagaaccaacatattacacaggtcaggctctggtagttagagggagcaaaccactgatcgagcgagtctctacgcaaacagagaacctcagttggctcttggatattctagtagacattgacattgcagaagaatttgtagaactgtgggcgaagcaagacaggctcattaggatgcacgagcaagcgtcagcgatggtcaggtatgagctaagccgaatatcagccgctgtgttcattgcacttggtaaaggaaaagttcagtgtcgtggcgatgtacgaagcctcgtctttcgtggatggttcagcacgatgttgttggattttggctggcttcagcgctgccccaaaggtctagacctaagatcactggaggagaatctagggcgaggcattttaaccctccctctgaggcagcagcaatgtttgtttgaagaatggttccagttctattcgaccaaaggtgctgagtgtccgaaccttattagggctttccaggtatggtggagaaggtctttcattagatcattggtagaacctcaaaactaagtttttccttgatgtactagtatgttgcgtgtatgatttgtaa

SEQ ID NO: 259270 - DNA, 1116 bp, Zea mays
aagttgtggcaaaacgggagaaatttcctctcacagggccctcttcagcttatcccccttcctccctcacacgatctctcctcgacggctaacccggattgccgtctcaggctcgggatccgggcgctcgcggcgatggacggcggcggcggcgctggcggcgcggagggggagctcacggcgcaggagacagcgctctacgaccgccagatccgcgtctggggcgtcgatgcccagaagagactaagtaaggcgcacgtgcttgtgtgtggcatgaacggaaccaccatcgagttctgcaagaatattgttctagctggagttggaagtttatccttgatggatgataatgtagtcacagaggaggatctgaatgcaaatttcctaattcctcctgatgagagcatatatggtggtagatctcgagcccaagtttgctgcgagtctttgatagatttcaatcctatggttcgagtttctgttgaaaagggtgatccatcattaattgatggagaattccttgacaagtttgacattgttgtacttagccgtgcatctcttaaaacaaagttgttgattaatgaaaactgtcgaaagagaagcaaacacattgcattttatactatagattgcaaggattcatgtggtgaaatatttgttgatttacagaagcatagctatgttcagaaaaagcctggaggagcaactgaacaacaggagttgacatattctagccttcaggaagctatctctgtgccttggaatagtctaccgaagaagacggcaaaattatactttgctatgagagtactggaggattatgaattatctgaagggcgcagccctggccgaaacaacactttctgatatagatgcagttctggctcggaggaaggatatgtgtgataaaatgtctttgaatgagtctcgtattcctactactctcgtggaacgactgctagcagctggaaagacggagcatcctcctgtatgtgctatccttggtggcattgttggtcacgaggcgatcaaatcgatatcctgcaagggcgatccatgtatgaatttgttctatatcgatgtggctgacggtaaaagtgtgatcgacgatatacc

SEQ ID NO: 259271 - DNA, 686 bp, Zea mays
aggtggtcatgacaatctacaagccagcgcggcggggggcgccgtacaagaaccgcaccgtccagcgcgcgaacccgcacgacgagttccgcatgatggcctgcttccacagcacgcgaaacatccccaccatcatcaacctgatggagtcctcgcgcggcacgcggaagcgtggcatcaccgtctacgccatgcacctcgtggagctctccgagagatcgtccgccatctgcatggtccacaaagctcgtcgcaacggcatgccgttctggaacaggcggcgcaacggcgacggcggcggcgaccagctcgttgtcgccttcgagacgtaccagcagctgagccgcgtgtctatccgggccatgacggccatctccgacctggaaacgatccacgaggacgtcgtcaccagcgcgcaccagaagcgagccgcgctcatcgtgctccccttccacaagctccaccagatcgacggccacatggagtcgcttggcgaccagtaccagcacatcaaccagcgcgtgctccaccacgctccctgctccgtaggcatcctcgtcgaccgcggcctcggcggtgtcgctcaggtggccgccagcgacgtgtcatacaccatcgttgtcatcttcttcggtggccgcgacgaccgcgaggccctggcctacggcatgcgcatggtcgagcac

SEQ ID NO: 259272 - DNA, 1141 bp, Zea mays
gctgaactggctgcagctgttgcaaaagagaaagcatcccagattgaacagattggtgaagcaaatctcaatattgatgctctgtgtatggcattctatgcgcggtctgaagaagctaggcagagccattcagttcataaacttgctctgggcactcttgctttggaacacgctttatccagtggatcaccaatccgatcagaagtggagctattgcgtaaatctgttgaaggcatcgacaaagattcactgttagaactggctctttcatcactcccagaagatgttttagattatggatcagataccatgatggggttgaagcaaaagtttaactccttgaaggaaactatcagacacttcagccttctaccagcaggcggtggtggaatcctggcacatactgttgctcgagttgcttcttcaatcaagattaaaggcgataactctggagatggcattgagtctcttatcaacaaagtagaaagcttgattgtcgatggagacttgagtacagcggccgatgccttggagcaagggtctacatggaactgaagcagaggagatagctaccgagtgggtgaagcaagccaggaaacgcgctcttgcagagcagacacttgctctccttcgcgcttgtgcttcttcgaccacgttctcgtgattttgacaaccatttccccttccttttcttcgaccgcatttgccggtactccttgcaaccgcatattttttccccagaccatgctgcaaatgtgtggacggtgagcgagaagactagatacaatactgtatgagccactcggtctcaaagtgggcccctgcctagctttcctcctgtaaacagagctaataagttctggcgttctgccctgtatctacttgctgttcttaacattttagtggccagttaaagcaatgtttttggatccaactgctgaaggattctttgtacctgtagtctctgtagtcatgtacagttcaacaaggggtcagtggacactggacatagtgggcgaaaagaaccttatgctccgtttggatgtcgatattgaattgaaatgagatgtaattctaattctattatttggatgtcactgaattggagtttaaaaaaaaaaaaaaaaaaaagggcggccgc

SEQ ID NO: 259273 - DNA, 462 bp, Zea mays
  unsure (1)..(462): unsure at all n locations
gcaagggttacatggaactgaagcagaggagatagctaccgagtgggtgaagcaagccaggaaacgagcgatcggccgaacagaccccttgctctccttcaggcgtgtgcttcttcgaccacgttctcatgattttggccagacttttttttttcttccttttgtttgcttggatttgccggtttcagtactctgtgaaaaagcttgtttttcccagaccatgttgaaaatgcgtggatggtgaacgagaaaaatcagatacaatactatagcagccagccagccactgggtctcaaagtgggggccctgcctaagtttttcatcgtgtaaacaaagctaataagttttgccctgtagctacttgctgttcgtgacattttagtgtccagttaaagccatgtttttttaatgcaaaaaaaaccccacaaaaaaaaaaaacaaaaaatataantaccaaacaa

SEQ ID NO: 259274 - DNA, 507 bp, Zea mays
cccgcgtcggagggccagtcgacctctctgctcgcgaaaaatggcggcggcagcggaaggtttggctgcctacagggcggtgctgcgggcggcgcggcggacgttcgcgggcgaccagctgatgctgaaggagtctgcggtggagatccggcgccgctttgaggaccaccgtggtctaaccccgggctccgacgatgcagcgcgtgccctcgccgacgcccgcgaggcggcgcacttcatcacccatatgatagtccaggccacacgcgcaccctccggatccttcgttgtgaagcctgagagtgttcatgctggagctacactgggaagttccttccgaggagatcctttcaaagttgaagtaggtcactagcattgctgaagtaggtcaccatcttcatgctagtaaaataagaccagttgcaacggttgattcttgtgttgatactggtgcacttagtagcttacacttttggctttatattataattatattactgagagcat

SEQ ID NO: 259275 - DNA, 992 bp, Zea mays
gccgaccacgcgggcgcagacgcgtgggatacgaacgtcgtacgagaacctttctccctcctccacctttctccttttcttgccacggcaaaacaccttcgccggcgagagcatggcgatggcgtaccgtgtcctggaggtcaccctggtgtcggcaaatgacctcaagaaagtgtcgctcttctcccggactcgcatctacgccgtggcttccatctccggattcgacctccgcatcccttcccacagcacccaagcagaccacagcaacggctgcaacccctgctggaacgccgtggtacacttccccatcccggctgccgctgacacccgcggcctcgcactccacgtgaggctccgcgcccagcgtctatacctgggcgatcgcgacatcggcgaggtgtttgtgcccatcgacgacctcctggccggcgccgacaagggtggcgatccgaggcccgtgagctaccaggtgcgcaggccgcactctggccgcgcccacggcgtcctctacttctgctataagttcaccgaggtccccgccgtctcttgtgtctcggaaccggaaagcaaacaagtccagtacgccaagaagtacgtgcaggactccaagaacacgacggacaagactatggtgccgcccaccgtgtacccaccgccgcaggccatggcgtccgcatacccgccgcaacaatattgttcgccgtacgcggcgtacccgcggcagccttacgggtaccctgctccgccaccgtacgggtacaatgctgcttccccacaaccggcgatgtacaactacgcagcacagccggtagctgcaccggcgaggcatggcggaggtatggggatggggctcggcctaaggctcctaggcggtgcggtcggggggatgatgctcggagaggcgatcggtgactatgagaccgacgccgcttatgatgccgggttcaacgatgcattggcattttagattcaggttgtcgtgcagtcat

SEQ ID NO: 259276 - DNA, 1506 bp, Zea mays
cccacgcgtccgcccacgcgtccgcccacgcgtcggccgcctccgcatccgcagcacgaaggctgtgcaggaggcatgggcatcggcgtgcggcggcactgggaagcagacaatcctcatacccaagggtgacttccttgtcggacaactcaacttcacaggcccttgcaagggcgacgtgaccatccaggtggatggcaatctgctggcgaccacggacctaagccagtacaaggaccatggtaattggatcgagattctacgcgtggataacctggtcatcaccggcaagggaaaccttgacgggcagggcccagccgtgtggagcaagaactcctgcaccaagaagtacgactgcaagatccttcccaactcgctggtgatggacttcgtgaacaacggggaggtgtccggggtcacgctgctcaactccaagttcttccacatgaacatgtaccggtgcaaggacatgctgatcaaggacgtgaccgtgacggcgcccggggacagccccaacacggatggcatccacatgggcgactcatccgggatcaccatcaccaacaccgtcattggcgtcggcgacgactgcatctccatcggccccgggacctccaaggtgaacatcaccggcgtgacctgcggccctggccacggcatcagcatcggcagcctagggcggtacaaggacgagaaggacgtcacggacatcaacgtcaaggattgcactcttaagaagacgatgttcggcgtccgcatcaaggcgtacgaggacgccgcctccgtgctcaccgtctccaagatccactacgagaatatcaagatggaggactcagccaaccccatcttcatcgacatgaagtactgccccaacaagttgtgtactgccaacggcgcctccaaggtcaccgtcaaggatgtcaccttcaagaacatcaccggcacctcctccaccccggaggccgttagcctgctctgcactgccaaggtcccatgcaccggcgtcaccatggatgacgtcaacgtcgagtatagcggcaccaacaacaagaccatggctatatgcacgaacgccaagggcagcaccaagggttgcctcaaggagcttgcatgcttctagaccctccatcgactgacccatctctctagttataatttttctctcgtccttgcattgcccattagatgctatccattggtaacgcacaacagtaaaacgacagacatccgacagctatattatgttcgacggtgtaacaccctgaatttgagggtataaaatttcttctctaaataccaaccaaattcaggtgttacctcttgtctctctctctctcttttccttttgattaaaagtaagtgaattaggcgagggtttaattatttattttgtcaaaacttatgtgagtcatgaaatgttgcatcatgctgagcctaaattattcttttgtttgatgcacatgtttgaattggtttgaatttgaaatttggtttgagtttgatttg

SEQ ID NO: 259277 - DNA, 577 bp, Zea mays
cccacgcgtccgcccacgcgtccgcccacgcgtccgcgcacgcgatcacgacaagatggcgtgcacaaacaatgcgatgagagccttgttcctcctggtcctcttctgcatcgtgcatggtgagaaggaagagtcaaagggcatcgatgcgaaagcgtccgggcctggtgggtccttcgacatcaccaagttgggcgcctccggcaatggcaagacagacagcacgaaggctgtgcaggaggcatgggcatcggcgtgcggcggcactgggaagcagacaatcctcatacccaagggcgacttccttgtcggacaactcaacttcacaggcccttgcaagggcgacgtgaccatccaggtggatggcaatctgctggcgaccacggacctaagccagtacaaggaccatggtaattggatcgagattctacgcgtggataacctggtcatcaccggcaagggaaaccttgacgggcagggcccagccgtgtggagcaagaactcctgcaccaagaagtacgactgcaaggtcctgtcggactcgctggtgatggacttcgtgaacaacggggaggtg

SEQ ID NO: 259278 - DNA, 654 bp, Zea mays
accggtccggaattcccgtgtgtcgacccacgcctccgcgcttaagaagacggccaacggcgtccgcatcaaggcgtatgaggacgccgcctccgtgctcaccgcctccaagatccactgtgagaatatcaagatggaggactcgggctaccccatcatcatcgacatgaagtactgccccaacaagttatgcaccgccaatggtgcctccaaggtcaccgtcaaggacgtcaccttcaagaacatcaccggcacctcctccaccccggaggccgtcaacctgctctgctctgccaagatcccatgcaccggcgtcaccatggacgacgtcaacatcaagtacagtggcaccaacaacaagaccatggccgtatgcaagaacgctaagggcagcgccaagggttgcctcaaggagctcgcatgcttctagaaccaccatcgacccatctctctagttatacaatgtgtttggttgttggatgctgagagattggttctcagctcagatgcaagctgcgcctagcctgtgtaggtttgtgctggtacattgagagctcttatttatttgctttgattgcaattaaccaggatgaccatagcccttgtttggtttgctgtttttataagttgcatgaacacaacttctgtttggtt

SEQ ID NO: 259279 - DNA, 652 bp, Zea mays
  unsure (1)..(652): unsure at all n locations
ctcgtgggtcgatacaacaccctacagtgactcgtactaccccgggacctccaaggtgaacatcaccggcgtgacctgcggccctggccacggcatcagcatcggaagcctagggcggtacaaggacgagaaggacgtcacggacatcaacgtcaaggattgcactcttaagaagacgatgttcggcgtccgcatcaaggcgtacgaggacgccgcctccgtgctcaccgtctccaagatccactacgagaatatcaagatggaggactcagccaaccccatcttcatcgacatgaagtactgccccaacaaggggtgtactgccaacggcgcctccaaggtcaccgtcaaggacgtcaccttcaagaacatcaccggcacctcctccaccccggaggccgttagcctgctctgcactgccaagggtcccatgcaccggcgtcaccatggatgacgtcaacgtcgagtatagcggcaccaacaacaagaccatggctatatgcacgaacgccaagggcagcaccaatggttgcctaaagagcttgcatgcttctagaccctncatcgactgacccatctctctagttataatttttctctcgtcaaaaaaaaaaaagcaactttaaagcttcgccattaaaggaccttatat

SEQ ID NO: 259280 - DNA, 628 bp, Zea mays
gaggagaatatcaagatgccgttcgctgagtcctccatcttgatattctcgtagtggatcttggagacggtgagcacggaggactcagccaaccccatcttcatcgacatgaagtactgccccaacaagttgtgtactgccaacggcgcctccaaggtcaccgtcaaggatgtcaccttcaagaacatcaccggcacctcctccaccccggaggccgttagcctgctctgcactgccaaggtcccatgcaccggcgtcaccatggatgacgtcaacgtcgagtatagtggcaccaacaacaagaccatggctatatgcacgaacgccaagggcagcaccaagggttgcctcaaggagcttgcatgcttctagaccctcagtcgactgacccatctctctagttataatttttctctcgtccttgaattgtccattagttgctatccatttgtaacgcacaacagtaaaatgatagacatccaacagctatattatgttcgacggtgtaacaccctgaatttgagggtataaaaaaaaaagataataataaacaaagaaaaaacaaaaattagaactaaaataaaataaatatgatatacgatccattgaaagcagaatcaattcattc

SEQ ID NO: 259281 - DNA, 683 bp, Zea mays
  unsure (1)..(683): unsure at all n locations
attcggccgtcgacccacgcgaccgaggacgcgtgggatagcatgcgccgtccttttatattctattccagcatggccagttcatcaccggcaagggaaaccttgacgggcaaggcccagctgtgtggaccaggagggcctgcaccattaactacgactgcatgatccttcccaactcgctggtgatggacttcgtgaacaacggggaagtgtccggggtcacgctgctcaactccaagttcttccacatgaacatgtaccggtgcaaggccgggcggagccacgacgttcacccgtgacagcgcccggggacagccccaacacggatgtgcatccacatgggcgactcatccgggatcaccatcaccaacaccggcattggcgtcagcgaccactgcatctccatcggccccgggaccttcaatgtgaacatcaccggcgtgacctgcggtcctgtgcactgtatcatcatcttctgtctanggcggtacaaggacgagaaggacgtcacggacatcaacgtcaaggattgcactcttaatganacggtgtgcnncgnncggggcaatgcgtactatgacgccggctccgtgctcaccgtcttcaacatccactacgagaatatcaagatggaggactcagccaaccccatcttcatcgacatgaagtactgccccaacaag

SEQ ID NO: 259282 - DNA, 441 bp, Zea mays
ggaattgccgggtcgacacccggccgccgaatcgatcacaacaagatggcatgtatagacaatgcaatgagagccttgttccttctagcgctcttctgcaccgtgcatggtgagaaggcaaagtcaaaggacaacgattcaaaagcgtccgggcccggtgggtccttcgacatcaccaagttgggcgcctctggcaatggcaagacggatagcacgaaggctgtgcaagaggcgtgggcatcagcgtgcggcggcaccgggaagcagacgatcctcatccccaagggcgacttcctcgtcggaccactcaacttcacaggcccatgcaagggcgacgtgaccatccaggtgaatggcaatctgctggcgaccacggacctaagccagtacaaggatcatggtaattggatcgagattctactcgtggacaaccttgtcatc

SEQ ID NO: 259283 - DNA, 591 bp, Zea mays
accctatcatgaacttgtcgcccttctcccggattcgcatcaacgccgtggcttcaatctccggattcgacctccgcatcccttcccacagcacccaagcagaccacagcaacggctgcaacccctgctggaacgccgtggttgaacaacggggaggtgtccggggtcacgctgctcaactccaagttcttccacatgaacatgtaccggtgcaaggacatgctgatcaaagacgtgaccgtgacggcgcccggggacagccccaacacggatggcatccacatgggcgactcatccgggatcaccatcaccaacaccgtcattggcgtcggcgacgactgcatctccatcggccccgggatctccaaggtgagcttcaccgacgtgacctgcggccctggccacggcatcagcatccgatgcttagggttgttcagggacaatcaggacttcagggcaagtagcatgcaggattgacttctgttaaaacaatcttctggcttcgtctattggcattagacgtatgcgtcgcctttcacaagttcacgttgatccagtacgacatttgcacttgttacgtttgacccacgc

SEQ ID NO: 259284 - DNA, 537 bp, Zea mays
agcaactaatccctgatttacatctgctatctatagcagctaggattctatccctgatttacatctgctatctatagcagctaggatatccacagatggcatattctattgcctaacagggccgtcgcagagtggacagttgacgccggcccgttagtgatggggggccagggttcgcggattttctcggccgggaccattgtttcggtctcttcttatatggaataccgggagggcggtcttttccctccccggccgagtttttttttatttcatggtaaattcttggccaagttatcatttagtaaaaattatccacacaaacaagcatggtatcatatactagactgataagatatatcacacatatggtggctttaaagcctaagtggctaagtgtgacaatattgagctaaaggtttcgtcccaaactatgttgtcaaatcatggttagaagttaatggtgtcagacaaatcatacttttttctgtagcttgatccggacgcgtgcgtccacccgggaattccgagaccggt

SEQ ID NO: 259285 - DNA, 771 bp, Zea mays
gctagagacatgaatgcagttatagttgtgggcaggggcactcaagaaaacagcattcagaactggatcgaagatttattctggaaacaactcgatctcgactacccaggcatgcctgaagcaaaggttcacagtggattttattctgcttaccacaacacaacaatgcgtgacagagttatgagaggtgttaaaaatactaggaaactgtatggtgatattcccatcatggtcacaggacattccatgggaggagctatggcttcattttgtgcccttgatcttattgttaatgttgggttcaaggatgtgtcactcatgacatttgggcaacctcggattggcaatgctatatttgcatctaatttcaaaagatatttgccgaatgcaattcgattgatcaatgcacatgatattgtgcctcatttacccccatactatcactactttccacaaaagacataccaccattttccacgagaggtatgggttcatcttgctgcccttttaccttcactagcaatttgatctagtattgcgaaagggcctctagcctagcggttaaggacttccgagtagcacctccaagtcctgggttcgattcctatcgagagcgaattttcaggcttggttaaaaaaatcccctcactgtgccccatccgctctcgggttgcgatgtcctgtgcgccacccttccggagggccagggttcggggattttctcggccgagaccgggtctttccctcccctgccgagtttttttttaactt

SEQ ID NO: 259286 - DNA, 419 bp, Zea mays
cggactcgtgggcggacgcgtgggcggacgcgtgggcggacgcgtggggttatgcgaaagggcctctagcgtaatggttaaggacttccgagtagcacctccaagtcctgggttcgattcccctcgggagcgaattttctggcttggttaaaaaaatcccctcgctgtgccccatccgctcccgggttacgatgtcctgtgcgccaccctccggttgggccgttgcagagtggacagttgacgccggcccgttagtgatggggggccagggttcggggattttctcggccgggaccattgtttcggtctcttcttaatataataccgggagggcggtctttccctccccggccgagttttttgtgcttctgtgtagaacttgaaggataacaacatacacacgaatgacatggacgaac

SEQ ID NO: 259287 - DNA, 483 bp, Zea mays
cgcccacgcgtccgcccacgcgtccggccgagaggagaaccagcagcctccaataagagccagccagagaaactaataaaactctcgccgccgccatccgagcgaacaagccaaccgaccccgtccccaaggcaatccgccgccgacgtaccaccaccaccgcaggagcgagatggagatgaagaggatcctcttcgccgtcctcgtcgtcatcgccgcctcggccaccgcagtgctggcctccaccgaggccgccgccgcgggcgccccaactgcctccgagtcgtccgccgaggctcccgctggcgctggcgctggcgctgccgctggcgccgccgcctcggggccctccgccagcagcggcgcgcccgccctcgccgccgcgcccgccgcgctcctcttctccctcctcgcctactacctccactaagcgtgtgcgtgcgtacgtacgcgcgcatggacgacgatggatccgttcaccgt

SEQ ID NO: 259288 - DNA, 439 bp, Zea mays
caaaacaagaacctccaattagaagcagccagaggaacttattaaactcctcgccgccgccatccgagcgaacaagccaaaccgaccccgtccccaaggcaatccgccgccgacgtaccaccgccaccgcaggaccgagatggagatgaagaggatcctcttcgccgtcctcgtcgtcatcgccgcctcggccaccgcagtgctggcctccaccgaggccgccgccgcgggcgccccaactgcctccgagtcgtccgccgaggctcccgctggcgctggcgctggcgctgccgctggcgccgccgccgcggggccctccgccagcagcggcgcgcccgccctcgccgccccgcccgccgcgctcctcttctccctcctcgccttctaacttcaattaacctgttccttccgtccgtccccccgcttggccaacaatgga

SEQ ID NO: 259289 - DNA, 577 bp, Zea mays
  unsure (1)..(577): unsure at all n locations
cgtatatcctttcctgagtaggagagagagttgagttaggagttgttgtgctgatcatctcggtcgaccgagagatggaccaccacttcactgagatagaggggaagatggcgcacgagccactggcacacagctccaccttctccgatgagacgaaagacaaaatggagcacgattcactggtgtacagtccacgcagcatcgcgagggccacaaccaccggcatccctgtcggcgatcaaggcgtggccgtgctacgtgggccgcttatcgtgggtgcagggccggcgggtctggcatgcgcggcgttgctcaccatgttatacattccctacgtgctcctagagcgcgacgtgtgcgtagcctcaatgtggcaccgtcgcacgtaccgcaggttgtgtctgcacctacccaagcgctactgtgagctcccgctcatgcactttccacgcacctaccccacatatccaacccggcagcagttccttgtctacctcaatgagtacatgcgcgcatntggcatcctgccatttttcagcctcgaggttgtcgctgccgagtacaacggtgaatactg

SEQ ID NO: 259290 - DNA, 885 bp, Zea mays
gggtcgagacacgcgtctaggccgatgcggggcactgcctcgctgacatcggtgacatgatgacccgcgagttcacggctcagcaggatgtgctgagcacactcgaggcgctatgcaagcaagcgcgcgactccgtcctcctcctcccacgcctgccctccttccgcccccccgccggcgacggcgacggcgtcgacgagagtacaagcgtctccggcgggcggaaacacgtgtcgttcggcgacctgagcctcgcggagtggacgtcgttcctggagaggttcgagcagctgctgccggcggcgctcgaggacaagaagtgcgctgtgctagggacgtcgacgtcgtcgtcgttctgaccgtgctacgtactggtcaatcactaccgccaccatttgcatgcatacatgcgtgagtgcgtgcgtgcgtggatgcaaaataatacacgtgtgcatggcgctgtgctagggacctactagctccgtctggatgccttttgtgtgtctactacgtagggtcgtcgaccttgtacggtggcattggcatgcatgctgttgggatgggatcatgggagttgggagctgctgtggaacaccctttccaaagaagctgacgtgtgggggcaatgccacccgataccttgaacagcaacgactctttcccaggcgggcgtgtctccacaaatctgtcatcacatacacaacacgtacgagaagtaccctggaaattgtatatacgacagtagttcgatcagtgtggattttccgcaatgacggccacgccggaaactacattatggtacacaataaaaccccgtgcttttcggcgggattacattagaaatcagatagaaatgtatagttattcggtacctttttggaaata

SEQ ID NO: 259291 - DNA, 1221 bp, Zea mays
cccactcgtccgggcggatcgggagcgggagagaccacccaaatcgcgtcgcgtcgagaggtgcgcgcgggggaaccgagccgactgatggagtcgacggcggcgcccgccgcctgcgagatcgcgcgcctgccggatgacctcctgtcggcggcgctcggccggacggggccgctggacgcctgccgcgccgccgcggtctcgccggcctttcgcgccgcggccgacgccgacgccgtctggtccagcttcctgccgcccgacctgcccccgctcgccgatggggagctccccgccgacgcgacggccaccaagaagcagctcttcatgcgcctctccgaccccgccagacccgtcctcctcgccgacggcctcacgagcatgtggctggacagggccaccgtcgccaagtgctacatgctgtccgccaggaagctgaccatcatatggggtgatacgccgcagtactggcactggatccccctcaccgactccaggttctcagaatgcgcagaactccagcacgtttgctggctggaaatccgcggcaagataccctgcgacatgctgtcccggaacaccacttacgccgcctacatggtgttcaagatgtccgacgaatcctatgggctggactatccgctccaggaggctgaagttagcatcggggcaaccaggtccactcgtcaggtctgcctagggtacgtcgacgacgacgaggacggggaagaggtgcctcagaactaccggtcgttcggggcggtgggaaatgtatttagaccaaggatcgggaggcggaaccgtcgccagcctcctggagtgcacgtcctgcaccctcagacaagacccggcggctggatggagatggagatgggtgagttcaggaacgaggaagctgaagatggtgaggtgtccgtcagcctcatggagaccaggggcggcaactggaagagaggtcttactgtgcagggcattgagatcagggtcaagaagtaaggatgtgaaggctgtggggatcgggctttgcgcatcaaaacaaataaaaggatcttagttagatttgtagtgcgtgttcttctgcagcacttgcgtatgtgtgtgtcttgcctatgcccagcaaaaaaaaaagttcttcttgaggcaaaagaactgcagttttgtacacaatattgttgtgtcccagatcactcggtgctcgatgactggccatgtttacttttg

SEQ ID NO: 259292 - DNA, 560 bp, Zea mays
gtgcgtcctctcctcaacctcaacccccaccccgccctacctacaaccctattaaatggcggcttccgacccgtagacctgattgatccccgcatcgaatccggcggatcgggagcgggagagaccactcccaaatcgcgtcgcgtcgcgtcgagagcgagagcggaagaggtgcgcgcgggggaaccgagccgactgatggagccgacggcggcgcccgccgcctgcgagatcgcgcgcctgccggatgacctcctgtcggcggcgctcggccggacggggccgctggacgcctgccgcgccgccgcggtctcgccggcctttcgcgccgcggccgacgccgacgccgtctggtccagcttcctgccgcccgacctgcccccgctcgccgatggggagctccccgccgacgcgacggccaccaagaagcagctcttcatgcgcctctccgaccccgccagacccgtcctcctcgccgacggcctcacgagcatgtggctggacagggtcaccgtcgccaagtgctacatgctgtccgccaggaagctgaccatcatatg

SEQ ID NO: 259293 - DNA, 910 bp, Zea mays
cttcattttaccaaaggaagttgacttcaagttttggtggcatgggtccaatgttgttcaatgttaacctcaaagttcaggccagctaccaaggagagcatgtccctcttgtctctttgatgagcagacttaatggcaaagcaattgttggacaccctatccaaattgaaatagttgaagatggttccacagatcatctgtattctgtggtgacagtggtatgcaagagacctcagctgctccacctgcttggccaacaggtagaaggactgccatgcaaagagttccccgttcaaatccatcaggagcactgttggatggcgataatgaaggtggtcttgtgtattctgattatgagatgaaaccaaccaagttgtacacttcttccaatcatcaggttaaggtgaataagaaaagcagttcaaatactaggaggtcagtagctaagtcccaaaagaagtcatccaagaaaacaaacctctcaagccagaaacgtagagttctctcttccatttccactgcaaaaaaacatcatggagaaggtggccgagcaaaggcacattggcgcaatgacatattgggtggtttaatcggatcagaaggagcagttcctctagtgacatgtgtcccaacgaaggttgcgttcactaggatattggaagcagttggcaggccacctctgtctgccgctcgccgtgttagaatggctagtcctccggtacgagatcctccataggcttcaactgtagtgctacatgcggtttatgtcgccagccatcgacatgcaagttttatgtacattcctgttaattgatgaagaggcagaccattcaatcatccggtaacacctgtgaggagtcgattgacatggttgctccgtaataacttggaacagctgatcccttattag

SEQ ID NO: 259294 - DNA, 917 bp, Zea mays
cccacgcgtccgcccacgcgtccgcccacgcgtccgggcaactgaaaacagccgagcgatctcctctccctctccctctccgatccattctccagcgcagcgaagtaaacatgtctgaccgggcaaagatgtcgtggcaggcgtacgtggacgagcacctgatgtgcgagatcgagggccaccacctcgcggcggcggccatcgtcggccacgacggtgccgcctgggcgcagagcacggcgttccccgagttcaagaccgaggacatggccaacatcatgaaggacttcgacgagccagggcacctcgcgccgacaggcctgttcctcggacctaccaagtacatggtcatccaaggcgagcctggtgccgtcatccgtggcaagaagggatcaggaggcatcaccgtgaagaagacagggcaggcactcgtcgttggcatctacgacgagccgatgacgcctgggcagtgcaacatggtggtggaaaggctgggcgactacctgcttgaacagggcatgtaactactacgtaccagctggaatgcatgtcgacgacgatggtttcgagtttcgacttccaataatagtaacaacaaagcaaaggccttcctcccggcgtatttgctttggctcttctcctccacgccataagatatctagcaattggtcactcgccttaattagttcgctttgcttttgaggttgattcgaccattttgctgtagcgtgaattgcatgcatggacatgcaacgctccaatggcctttggaatgtggaatttttttccccattttctgtatttttcctataaaaaatgaactggttcttatataattcctctcagatccctgctgttcaaatgatatgaaagcagatactatattctgtgctgataaaaaaaaaagcgtggaatta

SEQ ID NO: 259295 - DNA, 739 bp, Zea mays
aggaaagcgaattgctgttattgaaaatgagtttggagaagtagacattgatggctcactagtcgctgcacaaaccgctggagctgaggacataatgatgctaaataacggctgcctttgctgcactgtgcgtggtgatttagtccgtatgattggtgaattggtaaacaagaagaaggggaggtttgatcatattgttattgaaaccacaggtctagcgaatccagcacccattatacaaacattctatgcagaggatgtagtttttaatgatgtcaagctggacggtgttgttactttagttgacgcaaagcatgctagacagcatttggatgaagtaaagcccaagggtatagtcaatgaagcagttcagcaaattgcctatgctgacagaattatagttaacaagattgatcttgtcaaagaacctgaagtgttgtccttggttgagcgtataaggggtatcaaccacatggctaatttgaagcgagctgagtatggtaaagttgatttggactatgttcttggaattggaggatttgatctggagaggattgagagtgctgttgctgaaaagtcacatgaagatcacgcagagcatgatcatgaacaccatgagcatgagcatgagaatgaacacgaccatgaccatcatcaccatcatgatcatgatcatgatcatcatgcacatgaccacactcatgatcctggtgtttcttctgtgagcattgtttgcgaa

SEQ ID NO: 259296 - DNA, 634 bp, Zea mays
cggacgcgtgggcggacgcgtgggcggtctcgtgggtgagagtgctgctgctgaaaaggggcgtgatgatcccgctcagggtgagcatgaacaccatgagcatgagtaatgaacacgaccatgaccatcatcaccatcatgatcatgatcatgatcatcatgcacatgaccacactcatgatcccggtgtttgtatctgtgagcattgactgcgaaggggtcggggatcttgaaaaggctgacatgtggctgggggacctactgctggaacacagcgaggatatctacaggatgaaaggtctgctttctgtcagtggaatgccgcatcgacttgtctttcagggagtccatgacattttccagggatctcctgagagaatgtgggagccaaatgagccgcgcatcaacaagattgtcttcatcggcaggaacctcaataaagaagagctggataaggggttcaaggattgcctactgaagaaatagagtgatttcagaatagtcgggatatagatctccagttttggccttcttcgaatgtagtcagattcacatcaattcatatctgttggagtggattgaagacagtgaagcttgaactaaattctaccccaattcatccgacatatgtaga

SEQ ID NO: 259297 - DNA, 1072 bp, Zea mays
cggacagctgtcggatcagaaaccctagcgggggaggctctcacctattattagaatccacctcgcaccccgcgagcggtgacttccctagggtttagtcgcgccgccgccgccgccgaaacagcacatcgctctctcgatctcagccatggcggaggtggagcagccccaggacgcggtgaagctcttcaaccgctggaccttcgacgatgtccaggtgaacgatatctcgctgaacgactacctggctgtgactgcggcgaacacgcgacattcctgccgcactccgcggggcgctactccaagaagcggttccgcaaggcgcagtgcgccatcgtcgagcgcctcaccaactcgctcatgatgcacgggcgcaacaacggcaagaaggtcatggccgtccgcatcatgaagcacaccctggagatcattcacctgctcaccgatgccaaccccatccaggtcgtcgtcgacgcgatcatcaacagtggaccacgtgaggatgccacccgtattggttccgctggtgttgtgagaaggcaggccgtggatatctcacccctgaggagggtgaaccaggccatctacctcctcaccactggtgccagggagagtgctttccggaacatcaaaaccattgccgagtgccttgcagatgagctgatcaacgctgccaagggctcatccaacagttacgccatcaagaagaaggacgagattgagcgtgttgccaaggccaaccgttgaacggagcttgtatcctggtgcactctgcgctggaaacttttatgtcgctggcagtcgtatcggttcttgttttaccaatgtttagagttttttgagacctatatgcggttttggttttcagtgcacaattaaaattactgagtaatgtagttgattgggaacagaaatgtttggtgcctggtttaccgaactccatttctcttgtcatttttctttattctgtagtctgtattatgtatgcgtatgagtattgagatgattctgcatttgaaaaaaaaaaaaaaaaaaaaaaaaaaaaaaaaaaaaaagaaaaaaaaagaaaaag

SEQ ID NO: 259298 - DNA, 957 bp, Zea mays
gcttccagccgcgcgggccgacgcgtgcgcggtcgcttccagccgccgccgcgtccgcctcgccaagcgcagcagccgccgcagcacatcgctctctcgatctcagccatggcggaggtggagcagcaacaggacacgccgaagctcttcaaccgctggaccttcgatgatgtccaggtgaacgacatctcgctgaacgactacctcgctgtgaacgcgacgaagcacgcgatgtacctgccgcacaccgcggggcgttactccaagaagcggttccgcaaggcgcagtgcccgatcgtcgagcgccttacaaactccctcatgatgcacgggcgcaacaacggcaagaaggtcatggctgtccgcatcatcaagcataccctggagatcattcacctgctcaccgatgccaaccccatccaggtcgtcgtcgacgcgatcatcaacagtggaccccgtgaggatgccacccgtattggttccgctggtgttgtgagaaggcaggctgtggatatctcacccctgagaagggtgaaccaggccatctacctcctcaccactggtgccagggagagcgctttcaggaacatcaaaaccattgctgagtgccttgcagatgagttgatcaacgctgccaagggctcttccaacagctacgccatcaagaagaaggacgagattgagcgtgttgccaaggccaaccgttgagtggagcttgtatcctggtgcacttgcactagaactacgtttctggcagtcgtatttttttcttgtgtttttacccatgtttagactttgagacctatatctaaggttttggttctcagtgaacaatgaaaattactgtgaaatgcagttgttttggtgcagaaatgcgcactgagatattctgcttgtgaatttgtgagtgctggtggcgtcgccgctggcttgccgatgtagtatttcttgtcactc

SEQ ID NO: 259299 - DNA, 1049 bp, Zea mays
gtagctcctcaccaagaagcatgacaaagagtccatcagtcacatgcaggaagcctctccaatctgacaacacttctcacagtcaagatgaggactcatattctgtcacttcttcaactgtaacttcagcaagagctgggaaaactaagaagacaactgttgctgttgcacctacattcgtctgtgctaatcgtgctgagaagagaggagagttttacacaaaattagaagaaaagcgcaaggctttggaagaggagaaactccaagcagaggccagaaagagggaagaggaagaagaagctctaagacaactgaggaagaacttggtcgtccgagcaaaacccatgccaagcttctaccaagagggacccccaccaaaggttgaacttaagaaggtgcctccaactcgtgccaagtcaccaaaattgacacggagaaagagctgcagtgaaacccctcatacaccagagggaggaaatggcagtgcagtatgctgccggttgcatcgccacagcattgggaacgccagagatgttagcagcaaggcacaatgttctccaaagagcgcctcaaaggctggatcagctactagatccagggtcaccaaatccagggaagacctgaaggcttccgtgaagaaagtgggactgccaagcgccgcgaacttcgctgtacaaacctaactcatcaggcattcactcccatatgccatttttcattttaatttatacctcacatcaccaaaaagatggcctcgtgttatttttgcattgtccttgtaagaacctggctaccagagacctgcgctgttcccgtcctgtaaatttgttgaaggttttgtaagggggtaaccgagtcagtcctgtgagaaccaagcgggtgggcagctgatgggatattggagtgacatattgtcgttgtgtggcggcattcgcgcgttctatgtattgtatctgagctgtaacttattgtggacattggcaaagcgattctgattgttgtcgcaaaatttataaaaaaaaaaaaaaagggcggccgttcgcgatcta

SEQ ID NO: 259300 - DNA, 922 bp, Zea mays
tatcaacctgtacacttcagcaagagctgggaaaactaacaagacaattgttgcagttgcacctacattcgtctgtgctaatcgtgctgagaacagacgagagttttacacagacttaaaagatcaacgcacagctttggcacatgagaatatccagacacacgccagcaagagggaagaggaaaaagaagctctatgacaactgaggaagaacttggtcgtccgagcgtaacccgtgccgtgcttcgaccacgaacccccaccaaaggttgaacttaagaaggtgcctccaactcgtgccaagtcaccaaagctgacgcggaggaagagctgcagcgacacccctcacacaccagagggaggaaacggcggcggcgcagtgtgctgccggctgcaccgccacagcgtcgggaactccaaagacatcggcggcaaggcacaatgctctccaaagactggaccagctgctaagtccagggcgcccccaaatccagggaagacccgagggcttccatgagaagaaagcgggacagcagccaagcgccgccgctgtacaaacctgacccgtgaagcatccattgccatgccgtttttcatcttaattcatataccctcacatcacccggaaatatggcctcatgccccggcagcagacagcgtgcctggtgctggattgtttttttttgggcgttgcccttgtaagaacctggctgccactgccagagaccgtgccctgtgtccgtgtctgtaaatttgctgcaagttttgtatggggtgaccgagtcggtcctgtgtgagaaccaaacggccgggcatattgtcattgcgtgggggcagcattcgctgatactatgtaatgtgacctgagtgagctgttgtaacctgttgtgggcatattggcaaagcgattctgattgctgtc

SEQ ID NO: 259301 - DNA, 917 bp, Zea mays
gttacctacgctttagtcgcaccgacgacgccgccgtatatcagtacatcgctctctcgatctcagccgtggcgggggtggtgcagcccgaggacgcggtgaagctcttcaaccgctggaccttcgacgatgtccaggtgaacgatatctcgctgaacgactacctgcctgtgactgcggcgaagcacgcgacattcctgccgcactccgcggggcgctactccaagaagcggttccgcaaggcgcagtgccccatcgtcgagcgcctcaccaactccctcatgatgcacgggcgcaacaaccgcaagaaggtcatggccgtccgcatcatcaagcacaccctggagatcatccacctgctcaccgacgccaaccccatccaggtcgtcgtcgacgccatcatcaacagtggacgtacagtctcactacctcctgtcctcactctcgatctcggctaataaccgttaaacctactcgttactatatgttgattccattcagtatgctggatccccccccccccccgaaccgtgtgtgtattcctgtgtaattgagcttattcctataaaattcatctataatttctgtcttccaaagggtatttttctttgatagacctatatattagttccatgctggttgctgctactcttttatatctgatagcatggtcctgtataaatgcctagttgctgaaattcaaattgaatgctatgacaaagtttcccatcatctcagagtatgctgttgtgcttcctggtatatctttaagctgtgtcatgctagtttaaccatatggcgatgcactgcactgtttcaagttccatttaaaatgtggatatgtagcctggtgtattatctcagagtgcttttgtgtccatctgttttcatggctcatgttagttcccttcaattgt

SEQ ID NO: 259302 - DNA, 493 bp, Zea mays
  unsure (1)..(493): unsure at all n locations
gtgccagggagagtgctttccggaacatcaaaaccattgccgagtgccttgcaccagtggtgaggaggtagatggcctggttcaccactggtgccagggagagtgctttccggaacatcaaaaccattgccgagtgccttgcagatgagctgatcaacgctgccaagggctcatccaacagttacgccatcaggaagaaggacgagattgagcgtgttgccaaggccccccgttgaacggagcttgtatcctggtgccctctgcgctggaaacttttatgtttctggcagtcgtatcggttcctgttttaccaatgtttaaagtttttttagacccatattcggttttggttttcagtgccccatttaaatttctgagtaatgtagttgattgggaacaaaaagtgcctggttttccccaaacaaaaaaaaaaaaaaaaccgggcaaggggggnntngnngtggggaaaaaaaaaaaaaannngaaaannaaa

SEQ ID NO: 259303 - DNA, 540 bp, Zea mays
  unsure (1)..(540): unsure at all n locations
atcaactcatctgcaaggcactcagcaatggttttgatgttcctgaaggcgctctccctggcaccagtggtcaggaggtagatggcttggttcacccttctcaggggtgagatatccacagcctgccttctcacaacaccagcagaaccaatacgggtggcatcctcacgtggtccactgttgataatggcgtccacgaccacctggatgggattggcgtcagtgagtaggtggatgatctccagggtgtgcttcatgatgcggacggccatgaccttcttgccgttgttgcgcccgtgcatcatgagcgagttggtgaggcgctcgacgatggcgcactgcgccttgcggaaccgcttcttggagtagcgccccgcggagtgcggcaggaatgtcgcgtgcttcgccgcagtcacagcgaggtagtcgttcagcgagatgtcgttcacctggacatcatcgaaggtccagcggttgaacccacgcgtccgcggacgcgtgggcggacgcgtgggcggacgcgtgggcgnacgcgtgggt

SEQ ID NO: 259304 - DNA, 416 bp, Zea mays
attacatatgtgtctgccatgtccaagtgacggggcgctcgctctcaccagatttaatgatagacctctccgatgcctgctggttactcgaacctcaagtatctgccgggtgccggtaacttgcgcccagaagacctaatcagcattgacgccaaggactcaccggactggcgctcgcttgtttccaggtacaggcagatgaggcaactggccatggtgtacatgctgcttggacccgtgcagttgcagtttatggatgaagacgaagctgacttgcagatgtaggctttgttttccctgaacccgatcttgtgtatcctaattgaacggagcttgctctgataaatatagcgagaaaagatatgtgtcgctgcttatgccttctggtttttcagctatgcttgaactcgatcatg

SEQ ID NO: 259305 - DNA, 489 bp, Zea mays
ttcacctccaacaaaacacatcctaatcgactcgcgaccccgtttcccggagagccgcgacggtgcgacgccgaactccctaaccctaagtccctaagcgtaggcggcggggggcggcggtgcgaggcaagctgcacagcaacacgggccacgggcgcggcctccgcctccgcctccacgcttctgctgctaggctgcaagggcggcggcgcggcgcggtgggcggcggacagctggccaggtccagcccagtagtccaggtgacgaggtccgcactccgcaacggttctggcgttctgcagctgaggatagacgagagaggaagtgaggatttatattagtgatttacaaggcaacttgaaagacagcagggttgcatcccacaatgtcagctcccaacagtgatagcaacatgcagcagctagtccctatagcaccaccaggaaaggcttctggtggtgacaggggaaggagctggttgtggcagat

SEQ ID NO: 259306 - DNA, 550 bp, Zea mays
cccacgcgtccgcccacgcgtccgcccacgcttacgcgcttccttcttcccccttcgtcgggctatataagtgtccagctgttgcatcttaagttcgtcgttagtttcgccatcagcgtctagccaaaagcatcgtcgtggtgaaaaagggagtcggggaggtagtgaattacgtcgtcgtcggtgatctccgtcggtgccagattgtcgtcctcggtgtttggctgagaggggtcaccatcgtccgcggaagccgttcatggctgtggttggagtcaagtgcctatgtcgcggggtgaattgctcaccagagcagcggatccgcccatcgtcatggttggtctgcgccagcgataatcgacatcgacagacaagcaactgaggacccaggtgctcagtaggtggaaaatactgaccatgagctcgttgaaggtaaattgtgcccttgatcacttctatttacccaataatgttcctgttaatcattatgacctgcataggttaattttgatggtacccaatatgtcaccccagtttggctatccttttc

SEQ ID NO: 259307 - DNA, 651 bp, Zea mays
cccacgcgtccgcccacgcgttcgcccacgcgtccgcccacgcgttcgcccacgccgggttccacatgggccgcctcagcgtcgactgtaacgtcgtggagccggcggacgtcaagaaggtggccaccacattgcagcgcgccatcaaggtggtcggcacgccggcgtacgaggagatggtgaggaactgcatgatccaggatctctcctggaagggccctgccaagaactgggagaacgtgctgctcagcctcggggtcgccggcggcgagccaggggtcgaaggcgaggagatcgcgccgctcgccaaggagaacgtggccgcgccctgaagagttcggcctgcagggcccctgatctcgcgcgtggtgcaaagatgttgggacatcttcttatatatgctgtttcgtttatgtgatatggacaagtatgtgtagctgcttgcttgtgctagtgtaatgtagtgtagtggtggccagtggcacaacctaataagcgcatgaactaattgcttgcgtgtgtagttaagtaccgatcggtaattttatattgcgagtaaataaatggacctgtagtggtggagtaaataaataaaaaaaataaatattatctttctataataatttttttatgtctttatttttttaattt

SEQ ID NO: 259308 - DNA, 836 bp, Zea mays
gtcaacggcatggacgtcagcgagtgggacccagcagggagcagtacattcccgccaaatacgacgtgtcgacggccgtggaggccaaggcgcagaacaaggaggcgctgcaggcggagctacgggctcccggtggaccggaacatcccgctggtggcgttcatcggcaggctggaagagcagaagggccccgacgtcatggcggccgccatcccgcagctcatggagatggtggaggacgtgcagatcgttctgctgggcacgggcaagaagaagttcgagcgcatgctcatgagcgccgaggagaagttcccaggcaaggtgcgcgccgtggtcaagttcaacgcggcgctggcgcaccacatcatggccggcgccgacgtgctcgccgtcaccagccgcttcgagccctgcggcctcatccagctgcaggggatgcgatacggaacgccctgcgcctgcgcgtccaccggtggactcgtcgacaccatcatcgaaggcaagaccgggttccacatgggccgcctcagcgtcgactgtaacgtcgtggagccggcggacgtcaagaaggtggccaccacattgcagcgcgccatcaaggtggtcggcacgccggcgtacgaggagatggtgaggaactgcatgatccaggatctctcctggaagggccctgccaagaactgggagaacgtgctgctcagcctcggggtcgccggcggcgagccaggggtcgaaggcgaggagatcgcgccgctcgccaaggagaacgtggccgcgccctgaagagttcggcctgcagggcccctgatctcgcgcgtggtgcaaagatgttggga

SEQ ID NO: 259309 - DNA, 416 bp, Zea mays
aaaaaaaggggggggggaaaaaaaaaggggaaaaaaaaaccggtgggccgcgccctgaagagttcggcctgcagggcccctgatctcgcgcgtggtgcaaagatgttgggacatcttcttatatatgctgtttcgtttatgtgatatggacaagtgtgtgtagctgcttgcttgtgctagtgtaatgtagtgtagtggtggccagtggcacaacctaataagcgcatgaactaattgcttgcgtgtgtagttaagtcccgatcggtaattttatattgcgagtaaataaatggccctgtagtggtggagcaaataatcccaaaaacaaaaaaaaaaaaaaaaaaaaagaaaaaaaaaacaaaggcaacaagctgcaaaggatcaaaagctcaagtactataaagagcaacgatata

SEQ ID NO: 259310 - DNA, 338 bp, Zea mays
cccacgcgtccggcagttcctcaccatttcctcgtacgccggcgtgcaaagatgttgggacatgttcttatatatgctgtttcgtttatgtgatatggacaagtatgtgtagctgcttgcttgtgctagtgtaatgtagtgtagtggtggccagtggcacaacctaataagcgcatgaactaattgcttgcgtgtgtagttaagtaccgatcggtaattttatattgcgagtaaataaatggacctgtagtggtggagtaaataatccctgctgttcggtgttcttatcgctcctcgtatagatattatatagagtacatttttctctctctgaaaaa

SEQ ID NO: 259311 - DNA, 869 bp, Zea mays
cccacgcgtccgcccacgcgtccgcccacgcgtccgcactccttcacttcctcgctggcccataaatatatatctatctatcgccatcgagcaattataatctcacagaataataaacatcatggggcaagcctcacggctcgtcctcctcgccgtcgtggcgctgctgtccgccggcctcctcccgcaggcgctgggtaagggtaggggaggcaggggacacggtggcgccgtcaacccgcaggtcgccggcatctgctctcgcaccccgttcccggaggtgtgcacgtccaccgccgggcggcacgcgtccaagtacccggtcatcgacaacctggccgtgctgaacatgcaggtggacgcgttcgccaagcgcaccgcgcaggcgcgcaagcacgtcgcgaggtcggcccgcaccatcccgccgcagcagacgcaggcgctcacgttctgcgacaccatgtacatgaacacgcaggacaccatcggcgcggcgcagcgggccatcacgttcaaggacaccggcaccgccaagatcatgctgcagctcgccgtccaggacttcgactcgtgcgaccgccccttcacccaggccggcgtccccaaccccatggggaagtttgacaaggagctcaaccagatggccaacaactgcatggctcttgcaaacatgatatgaaccacgcatgcaaccccagcgtgaggtgccatcgcatgcagggaatgcttgcattcatttttcatttaattaagaattcattgaaattatgagttatatatattgagtaactctatgtatttgttcctgacctgcactatttattcaatagtatgtcatgaaacgaggtagagcgcctttcattgccttt

SEQ ID NO: 259312 - DNA, 974 bp, Zea mays
cccacgcgtccgcccacgcgtccgcccacgcgtccgcccacgcgttcgcccacgcgtccgtgcacgcgtccgcccacgggtcgacccacgcgcgcgcgctggcctgcagtcatctcctccatcaccaccaccaagctcaacaacagccagctcgcgaaaataatgaagagccgcagcatggcatcatcggccgcgctcttggtgctagccctcgcgctagtggcggccaccgccccacaggtagcggaggcaaagaagaagagagcggcggagagcggcgaggcggcggaggcgaagaagatccaggacgacttctgctcgacgctgtgcgagggcaagaaggggacggacctggtcgtgtgcaaggagtcctgcgcgctctcccagcagtccaacctggtgctgtacggcaggatccagtgcaagggcaagtgcaccgagcagaagggcatcacggcgccggccatgaaggtctgccaggaggagtgcgacaaggcgtacgtggtgaaggcggccgaggtcaccaaggcctgcagcgtcacctgcgccaaggagaagaacccgcgcctcagcgagaactgcaagaggtcctgcacccctcctccttcttgaagcgaagccccttgaaatgaatgaaccatgcatgcatgcatgtatgcatgcgccggggtgacgtggcgttcagctcaggcgctgagcgagtctatacgtacgtcgtcaccggctggccacgcatgcgataaccatctgatatggacggaactatatattgtattcctattaatctggcattttctaagctaattgttttttttccaaatataccgtcgatggaactccaaatgtaatgtcacgcaaatgtgtgtttttcatcgattgaatggataataataaaaaggcatgctggcagttactagtaggagagaggcgaggggggcgggggagggagggagggaggggggggggggaggggg

SEQ ID NO: 259313 - DNA, 820 bp, Zea mays
cccactcgtcggtcgagacaagcatcttctccgatccatcaacaatcgccgagagcgatcgagagataaataaagatgaagaaagtggcatcatcgtcagccgttctcttcgtgctagccctgacgctagtttgtgccccgctgatagcagaggcaaagaagaagagagtcgccgccgccgccgccgaggagaagaaggtgcaggacaacttctgctcgacgctgtgcgagggcaggaaggggatggacctggtggtgtgcaaggagtcctgcgacctctcacagcgctccaacctggtgctgtacggccggatccagtgcaagggcaagtgcaccgagcagaagggcatcaccgcgccgcagatgaaggtgtgccaagaggcgtgcgacaaggactacgtggtcaaggcggctgaggtcaccaaggcctgcaacaccacctgcgccaaggagaagcagcctctgctcagcgagaactgcaggaggtcctgcacccctcctccttcctgaacgcagagcacgcccgccggtcgtcgtcttctgcctgcttgcgtgacactgaatcactgatacatcatacatgcatgcatgggatgcgatgacgatttgatgcatgcatgcatgggtatacctaccaatttgatgaccgacgatgtatagtttcgtcgactgcttcatacacatatatagcagcccaattaatgtaacgttacgcaaatgcttatttgcgaggtatgacattacctctacaatgctatagcacataatagcagttgctaagccacgggttcgcagataatcatcatgcatgcgtgcacat

SEQ ID NO: 259314 - DNA, 749 bp, Zea mays
accacgcgtccgccacgcgtccgaaactatggggcaagccttcccacggcttgtcctcctcgccctcgtggcgttgttgtctgccggcctcttcccgcaggcgttagggaacggcaagggcaaggtgcatggcggcggtgccgtcaacccgctggttgccggcatctgctctcgcgccccattcccagaggtttgcacggccacagccgggcgccatgcatccaagtacccggtcatcgaccatttggccgtgctgaacatgcaggtggccgcgttcgccaagcgcacagcgcaggcgcggaagcacgtcgcggtggcggcccgcactattccaccgccgcaggcacaggccctcagaacctgcgacacgatgtacatgaacacgcaggacgccatcggcgcggcgcagcgagccatcgcgttcaaggacacgggccccgcgaagatcatgctgcagctcgccgtccaggacttcgactcgtgtgaccgtcccttcacccatgccggcggtgtccccaaccccatgggtaagttcgataaggagctcagccagatggccaacaactgcatggcgcttgcaaacatgatatgaatcatatatatgcggccggggacagtttggcatgtgcttacactcctgcgctagcgtgaggtggcggcgcgccgcatgcaagggaatgcttggacatgaggagcacttggttttcatttaagaattcatttgaatataattacaattaagttgaacc

SEQ ID NO: 259315 - DNA, 490 bp, Zea mays
cccacgcgtccgcccacgcgtccgcccacgcgtccgcccacgcgtccggaagggcatcaccgcgccgcagatgaaggtgtgccaagaggcgtgcgacaaggactacgtggtcaaggcggctgaggtcaccaaggcctgcaacaccacctgcgccaaggagaagcagcctctgctcagcgagaactgcaggaggtcctgcacccctcctccttcctgaacgcagagcacgcccgccggtcgtcgtcttctgcctgcttgcgtgacactgaatcactgatacatcatatatacatgcatgcatgggatgcgatgacgatttgatgcatgcatgcatgggtatacctaccaatttgatgaccgacgatgtatagtttcgtcgactgcttcatacacatatatagcagcccaattaatgtaacgtcacgcaaataagcatttgcggtaattttttgtctcgttgattcgatgaataaagggcatgcttgagagt

SEQ ID NO: 259316 - DNA, 211 bp, Zea mays
tttgttttctttctttagtagtaactgccagcatgcctttttattattatccattcaatcgatgaaaaacacacattttctaagctaattgtgttttttccaaatataccgtcgatggaactccaaatgtaatgtcacgcaaatgtgtgtttttcatcgattgaatggatagtagtaactgccagcatgcgttgacgtttgacgcggcctc

SEQ ID NO: 259317 - DNA, 769 bp, Zea mays
cggacgcgtgggccggcagcagccaaaacctacctagccgccgccgcaggcggccccccatcgccgccaagatgcagatctttgtgaagactctgacggggaagaccatcactttggaggtggagtcctcggacaccattgacaatgtgaaggccaagatccaggacaaggagggcatccccccggaccagcagcggctcatcttcgccggcaagcagctcgaggacggtcgcaccctcgccgactacaacatccagaaggagtccaccctccacctggtgctccgcctccgcggtggcgccaagaagcgtaagaagaagacgtacaccaagcccaagaagatcaagcacaagcacaagaaggtgaagctctccgtgctgcagttctataaggtggacgacgccactggcaaggtgacccgcctccgcaaggagtgccccaacacagagtgcggcgcgggcgtcttcatggccaaccacttcgaccgccactactgcggcaagtgcggcctcacctatgtctacaaccagaaggcgtaattgcttgccccgatttgctttatccgcctacctatcaagcattcagctgttggttactcgaattgtatctcatgtagatctgtctgaggttgaaacttaaatggagcagtagtatctgtcatattggtacccctgttactgaattgatgtgatgctgagtttaattttgttttcaaaactattaaacgcagcggctcatcttcgccggcaagcaactcgaggaccgtcgc

SEQ ID NO: 259318 - DNA, 561 bp, Zea mays
cccacgcgtccgcccacgcgtccgcccacgcgtccccgcgcgcgcgggggcgccggcgagcagctcgaggacggccgcaccctcgccgactacaacatccagaaggagtccaccctccacctggtgctccgcctccgaggtggcgccaagaagcgcaagaagaagacgtacaccaagcccaagaagatcaagcacaagcacaagaaggtaaagctcgctgtgctgcagttctacaaggtggacgacgccaccggcaaggtgacccgcctccgcaaggagtgccccaacaccgagtgcggtgcgggtgtcttcatggccaaccacttcgaccgccactactgcggcaagtgcggcctcacctacgtctacaatcagaaggcgtaatcccatgcgccgctttgcttcacccgcctacctatcaagcattcacctgttggttactcgatttgaatatcccctcgccctgtttgaggttgccccacaaatgcagcagtagtttttgttttaaaaaaaaaaaaaaaaaaaaaaaaaaaaaaaaaaaaaaaaaaaagggcggccgca

SEQ ID NO: 259319 - DNA, 652 bp, Zea mays
cccacgcgtccgcggacaccatcgacaacgtgaaggccaagatccaggacaaggagggcagcccgccggaccagcagcgcctcatcttcgccggcaaacagctcgaggatggccgcaccctcgccgactacaacatccagaaggagtcgacgctgcacctggtgctccgcctcaggggaggcgccaagaagcgcaagaagaagacgtacaccaagcccaagaagatcaagcacaagcacaagaaggtgaagctggccgtcctccagttctccaaggtggacgccgccaccggcaaggtcacccgcctccgcaaggagtgccccaacaccgagtgcggtgcgggtgtcttcatggccaaccacttcgaccgccactactgcggcaagtgcggcctcacctacgtctacaatcagaaggcgtaatcccatgcgccgctttgcttcacccgcctacctatcaagcattcacctgttggttactcgatttgaatatcatttagatctgtttgaggttggaacataaatgcagcagtagtttctgtcttattatattggtacctctgttactgagttgatgtggtcctggctcctgagcttaattttgttttcgaaaaaaaagggcggccgcacgggaattcggacggtactgcagg

SEQ ID NO: 259320 - DNA, 500 bp, Zea mays
cccacgcgtccgtcgacgctgcacctggtgctccgcctcaggggaggcgccaagaagcgcgagaagaagacgtacaccaagcccaagaagatcaagcacaagcacaagaaggtgaagctggccgtgctccagttcccccaggttgacgacgccaccggcatggtcacccgcctccgcaaggagtgccccaacgccgagtgcggcgcgggggtcttcatggccaaccacttcgaccgccactactgcggtaagtgtggcctcacctacgtctacaaccagcacgcgtacgatgcccctactttctggcgggaaggaaaatgggaagtcttgctaggtgataatcctttttgctttggtttggtttggtgcaatggtagtatgttcttggaacataacacctgtatctctttttacgactcgttacttgggtttaattatatcaatgatgttatgggtccctgtcaaagcacttgttgaatttccaatggtttttaaaatta

SEQ ID NO: 259321 - DNA, 316 bp, Zea mays
aggtgacccgcctccgcaaggagtgccccaacacagagtgcggcgcgggcgtcttcatggccaaccacttcgaccgccactactgcggcaagtgcggcctcacctatgtctacaaccagaaggcgtaattgcttgccccgatttgctttatccgccaacctatcaagcattcagatgttggttactcaaattgtatctcatttagatctgtctgaggttgaaacttaaatggagcagtagtatctatcatattggtacccctgttactgagtataattttgttttcatatccatccttacagacgattgcactttt

SEQ ID NO: 259322 - DNA, 319 bp, Zea mays
ggtgcgggtgtcttcatggccaaccacttcgaccgccactactgcggcaagtgcggcctcacctacgtctacaatcagaaggcgtaatcccatgcgccgctttgcttcacccgcctacctatcaagcattcacctgttggttactcgatttgaatatcatttagatctgtttgaggttggaacataaatgcagcagtagtttctgtcttattatattggtacctctgttactgagttgatgtggtcctggctcctgagcttaattttgttttcgtgttctatccttaaaaagaaaaaaaaaaaaaagaaaaaaagaaaa

SEQ ID NO: 259323 - DNA, 632 bp, Zea mays
cccacgcgtccgcccacgcgtccgcccacgcgtccgatcggattgcatccagatggtcgtgcgaaaagaatggtatattgggaatctgtatcaaacttggttgagcctggtggcattgtggtcataacgtcatgtaatcacacaaaggatgagcttctgcatgaagtagaagatttcaccaagagaaaatttggcaaggagaacgtggatgaaggtgcacgagatgcgtctgagatcttccggtacatagaccatgtccgaacatatcctaccataatgtttggaggaattgagggctctcaagtctgcactgtggcctttcagcgggtgtgactgaaagctgaggcacacatagttcttggcctgacgtgtcacgttgggtccagaagaaatggataaaaaattttgtgcttcgcctgtgggactgttcctaccgtattaaggaacagtccaaactgtgtcttcttctgttgttagctcatctatccaggatggtcgtgtaattttagatggaccagactatgagacgaatcagtcctgtattgttgtcaccgtgaacatttccttgtatttccgttcctcttatacatactctagccttaatttaaaaaaaaaaaaaaaagggcggccgc

SEQ ID NO: 259324 - DNA, 400 bp, Zea mays
ggacaacagaatgtggtatctgcattgaaccataatgaaaactccattggagtgggaaacgacagccctgcagagccagtaaaacagcaaggtgatgacatccacagcagtgaagcttcatgagataattgctcctgtcaagagatctatgagccaactgactcgataccaagggaggtcagtctggttgcttgcctacattgcttttgtaacatcctggccgctgcttggctccctagctttcatcaccttccggaaaaagtccaggaatccgttgcgagctaaatgaatcatacttatattatgttattacaattacatcatgcaacatcctctgagctaaaaaaaaaaaaaaaaatgcaagaacaaaaaaaaaaaaagaaaaaacattaacaagctt

SEQ ID NO: 259325 - DNA, 469 bp, Zea mays
tccacagcaataagcttcatgagataattgctcctgtcaagagatctatgagccaactgactcgataccaagggaggtcaggctggttgcttgcctacattgcttttgtaacatcctggccgctgcttggctccctagctttcatcaccttccggaaaaagtccaggaatccgttgcgagcctaatggatcatacttatattatggtattacaattacatcatgccacatcctctgagctacgaaggccatttttccccgggtcgtcacagctcctgtgtacagtatcatcaccgatcatcagcaaacattgggggcgcctggataaactgatactttgtaatttgtattgtatttacaacaaaataatacgctggataagcatctgtgtaattttactcggtaaatctggcttgatttgctgtttggcatctgtcgagcttaacattatttttaatcggacgcgtggg

SEQ ID NO: 259326 - DNA, 675 bp, Zea mays
acaagcctcaagtatgagtctttataaataaacagggttccatggcgcgtccgcccacgcgtccggtgatttgaaataattgggaataaatagttcgtgaatccctgaagcgtgcatatatatattcctgccaagataaaggtaatggagtcgtcacgcaggttccagccggccgtcatcctgcttctcctgctcattgtgtccaccgatatggcacaggcaagggaatgcgagaagtacagtgagcgatttgttggggcatgcatgatcgcagacaactgcgccaatgtgtgccgcggtgagggcttcttggccggcaggtgcagcaccttccgccgccgctgcatctgcactaggcagtgctaaacaagatcgctcgatcgctcgccatgcatcgacaacctattcttaataacgttcattatctcgttcttatttatgacgaatgtcatgtatgttctggtgactgtcatgtatattctgatgactgtcatgtatcttgttcatgtatgctcaaggttcattatcttgttcatgtattaagtatgttatgaataactcaatatttattattttgttcatgtatgaattatcttctaatgagctcaaggttcattatcttgggcaaggactcaagggtcattattttattcatggatgccaggtattccaaaa

SEQ ID NO: 259327 - DNA, 612 bp, Zea mays
cggtgggcgcgtgcgcggacgcgtgggagccatatttgaaacagttaagaattcatatataagagtgcatatatatatatataattctgccaagacaaaggtaatggagtcgtcacgcatgttccagccggccatcatcctgcttctcctgctcattgtgaccaccgatgtggcgcaggcggcgagggaatgcgagaaggacagcgagcgattccttggggcatgcatggcgtcggacaactgcgccaacgtgtgccgcggtgagggcttctccggcggcaggtgcagcaccttccgccgccgctgcatctgcactaagccgtgctaaattaacctactcccggcagttcgatggtggacgtttattctatttattggcttacttgattttttttcccctaacaataagaaaacgcacgtgctggcatgtacgttgtgttgtatatgcttttcttgctggcttcatttgctgattactgatgagttgtaaggtccctgcacgatccatttcacatggatatgatgcttaattgtattcctgcttatatggtatctatatttaattaattaatgatggaccatcgagtttattttgtatttttgacatattcg

SEQ ID NO: 259328 - DNA, 985 bp, Zea mays
tctgaaaaaacccttgcgccgctgagctgagtctccttcctttctcccgtcgcctccgcctccgccttcagtttagcctccaagcaggggcgccgcgcggggtattctgtccgtcgttgagggtagagagtcacttgcaccgggggagcggagatgaagccggttgtggggatcgtggtgtcgaacaagatgcagaagtcggtggtggttgcagtggaccgtctcttccacaacaaggtatacaaccgctacgtcaagcgcacctccaagttcatggcacacgacgatgacgactcctgcaacattggcgaccgggttaggctggatccttctaggcccttgagcagacacaagcactgggttgttgctgaaattctccgcagagctaaggtgtacgttccaccagctgcaacagcgtccagtgaacgtggtagcaaatctcaacaagctggtggtgctaccaaatgatccatctgaagttactcagaacaagatgcagtcacggcttgtttttctttcgctgtatgtttgtttccttgtggaatgtggttgccatgtttagcatgggagaaaaaatagcaagcagccagcatctttgcttaattactgttgttcttctgtggtgtccttcgtttaacggtactagccattaaggatgtagttaccagattcaacaagaccaatggattcatattgtattggttgacttccgatacccgcttgcatttgcatgtatggttggcagctgtctttgcaaaaaaaaaaaaaaaaaaaaaaaaaaaaaaaaaaaaaaaaaaaaaaaaaaaaaaaaaaaaaaaaaaaaaaaaaaaaaaaaaaaaaaaggacgaacaatctaaaaagatccaaagctaacatacacaaacatgcaacgtcataactttaatataagtgtcacggaaattcaattaaaatggccgtacttttacaaattcgtgcctggaaaaacctatgcgtttcccaactt

SEQ ID NO: 259329 - DNA, 593 bp, Zea mays
cccacgcgtgcgatcggtcaaagacaaaagatgactgttgtgagcatcatgtggtcattagtgcaggtgcaggtgctggtggcggtggcactagcatttctggtaggcggtgcctggtgtggtcctcccaaggttcccccgggtaagaacatcacagccaactatggtagtgattggctagatgccaaggcaacatggtatggcaagccgacaggtgccggccccgacgacaatggtggcggatgtgggtacaaggacgtgaacaaggcccctttcaacagcatgggcgcatgtggcaacgtccccatcttcaaggatggtctaggttgtggatcctgcttcgagatcaagtgcgacaagccagcggagtgctctggcaagcccgtggtggtgtacattacagacatgaactacgagcccattgcggcgtaccacttcgacctagcaggcaccgcgttcggtgccatggccaagaagggtgaggaggagaagttgcgcaaggcgggcatcattgacatgcagtttcggagggtcaagtgcaagtatggatctaaggtcaccttccacttggagaaagggtgcaacccaactac

SEQ ID NO: 259330 - DNA, 2229 bp, Zea mays
gactactccgtttctcttcctagtacattgccgcgtcgaaggcgaggtcctcagcagcgccggcggactccgctcgcacgccatactcagcctactccgtcttcccctgtctcgcagcagccacccttctctcctctccgctcccaatcttatcgtcgcctccctcgaagtcgccgctgccttcattccaccatggcgcttcacgccccggtcctcgtgatgaaggactcgctgaagcgggagtctggcgcgaaggttcaccaagccaacatccaggcggccaaggctgtcgctgacatcatacgcactacattgggtcccagatccatgctgaaaatgcttctggatgctagtggaggtattgtggttactaatgatggtaatgccattttgagggaaatagacattgcacaccctgctgccaagtctatgatcgaactaagtcgtacacaggatgaagaagttggtgatggcactacatctgtcattgttctagctggagagatgctacatgttgcacaggcattcatcgacaagaactaccatcctactgttatttgtcgagcatacaccaaagcgcttgatgatgctattgctgtacttgacaaaattgcaatggctgttgatgtgaatgatcgtggggcaatgctaggccttgtgaagagctccattggtacgaaattcactggccagtttggtgaccttattgctgaccttgctattgatgctactacaacagcaggtgttgaccttggtcagggtatgcgtgaagttgatatcaagaaatacattaaagttgaaaaggttcctggtggtcagttggaggattctagagtccttaaaggagttatgatcaataaggatgtcgtggctcctgggaaaatgaggagaaagatagtaaacccccgtatcatcctgttggactgccctgttgagtataagaaaggagaaaatcagaccaacgctgagttgatgaaggaagaagattggcaggttctgttagagatggaggaagaatacataaagaacctgtgcggtcaaattctaaaattcaagcctgatttagtcataactgagaaagggctcagtgatctcgctatccattatttgagcaaggctggggttagtgcaatccgtagacttaggaaaactgacaacaacaggattgctaaagcttgtggagcagttatagtgaacaggcctgaggagctccaagaatctgatgtgggaacaggagctggcctgtttgaggtcaagaagataggtgatgaattctttgcctttattgttgactgtaaagatcccaaggcatgtactgttctgttgaggggagcaagcaaggatgtattgaatgaagttgagagaaacctgcaggatgccatgtccgttgcaaggaacattttgaaaaatccaaaactccttcctggaggtggcgctacagagctgactgtatcagcaacactgaagcaaaagagttcttcagttgaaggtgtggaaaagtggccctatgaagctgctgctctagcatttgaggcaattccaaggactttggcccaaaattgcggtttgaatgttattaggataatgacacaacttcaaggaaagcatgctaatggtgaaaatgcgtgggttggcattgatggaaggactggtgatattgtcgatatgaaagagcgaaagatctgggattcctacagtgttaaagcacaaacgttcaagacagcaattgaggctgcttgcatgcttttgagaatcgatgacattgtcagcggtatcaagaagaagcaggctcctggagcctcagctccaaagcaaccccaaattgaaactgagggcgatgctgacaatgagcagatgattccagagtagaggctgtggcgaacctgcactggcaaagttatttactagtgtcaaggtagcacttcgagcagagttcattttggtggttagccttagcttaaagatgcaccttgttttatatagtttgatgagtggtacgagggttttgggatccaggttttgagtgtggttgctgctcgttttgatttggactgatgaaaaagcagtgaaactagcctttatttatggctaactttgcctgttgtatgccgcaaatctactttttttcttggcaacgtctcgtttcgcacgatccaaaaaaaaaaaaaaaaaaaaaaaaaaaaaaaaaaaaaaaaaaaaaaaaaaaaaaaaaaaaaaaaaaatggaaaa

SEQ ID NO: 259331 - DNA, 462 bp, Zea mays
ggtaaccctactcccggcgacggggatcctgcactcttgggttcttgcatcccgcataccctcgaaagctcgaaagatcccgcggcgcacagccacccttctctcctctccgctcccaatcttatcgtcgcctccctcgaagtcgccgctgccttcattccaccatggcgcttcacgccccggtccacgtgatgaaggactcgctgaagcgggagtctggcgcgaaggttcaccaagccaacatccaggcggccaaggctgttgctgacatcattcgcacgacattgggtcccagatccatgctgaaaatgcttctggacgctggtggaggtattgtggttactaatgatggtaattctattttgagggaaatagacatcgcacaccctgctgccaagtctatgattgaactaagtcgtacacaagatgaagaagttggtgatggcactacatctgtcattg

SEQ ID NO: 259332 - DNA, 432 bp, Zea mays
atctgggattcctacagcgttaaagcgcagacgttcatgacagcgattgaggctgcttgcatgcttttgagaatagatgacattgtcagcggtatcaagaagaagcaggctcctggagcctcagctcccaagcaaccccaaattgaaactgagggtgatgccgacaatgagcagatgatcccagagtagaggctgtgaccaacctgcactgtcaaagttgtttactagtgccggaatagcactttgaatagagttcattttatttgagtgttggtggttagccttaggttttatatatagtttgatacactcgtccgagggttttttgtagtgtggttgctgcgcattttgctttggacagatggacgaactttgcctgttgtatgccgtaaatctacctaatacatggtaatgctgttgtttccttcttgg

SEQ ID NO: 259333 - DNA, 658 bp, Zea mays
gcccgcacgaaccggtccggcattaccggggcgacccacgcgtacgcacaaattgggattcctcggcctaacatgtttccaatggagctcaaacaagtgtctggtgggacacctgagcttgacgggggggcgatagcacagattaagtccggcaacattaaagtatttcctgcaattcgaagtttccaagaatatggtgtagagtttacaaatggtaggattgaatcatttgatgttgtgattcttgccacaggttataagagtaatgttccttattggttgaaggagaatgaatttttttcacagcaaagtggatttccaaacaaaccaaatgaatggaaaggaaaggatggactctatgctgctgggttctcaaggcgtggtctacttggtgtgtctatggatgccaccaaaattgcggaggatattgcgcagtcttataataatatatataagctacaaagatcataagaacaaatgatatttaactatttatcaataatttagctatcaccatttgagagttttgtaaatatatgtactagtctatttgcataaattataagagatggatatgctagataacaaatactaggctagcttatctatcaacgcactcatcatataattgacatatgctagtacatgtctcattttt

SEQ ID NO: 259334 - DNA, 1851 bp, Zea mays
atgtaacgatagaacatgcatacccaatgacttgttggtgtaaataaatggtgagataaagttatatataactcccattacaatgatttttttgagaaccccagtacagtgatttgagagggcatgcatctcaagattacatatatccattcatttgttccccttcactacgcttctttcgtatttgttcttttgagtttggattggatggtcagaccacgaggagaaaacgaggccttcgtcgtcttagcgcgcgggggcgtaggacggcggcagcggcagccccacgaccttgccgcagcggagggcgttgtcgggcatgttgtactcgtcgcgcagtgatcgcgccggcgagacgacgctgatgtagaactgctccccgaggtagtaccgctcccagatgttggaatgcacgctccacatgcccgcgttgtcgaacgtcagcatgatcgccgtccatgaccgcgggtacacctggatcgtgtgccggctcaccgtgtccagtaggttgtacgtcttcctcatctccggcgaccacgtcccaggccccatcccgacgccgaagaaggcgtagccgtcgaggtggagggagtctatgctcttctcggggttctcgaagacgatctcgatgaaggtccggaactcggcggtgatgacgttggggatgacatggagtggcccgttaacggcggggggcacgtcgcccatctggttgtagctgaacaccccgtcggtgacgttgaagtactcggcgagcttgaggggggtctcggtgtccctgtgggagatgccgttgaagccgtagcggagcttgccgtcgatgtggccgcgggagaccatgaccttgatggtgcgggtgatgttgatctggccgtagtggtaggagccctgcgggttggggcgcgcggcgctggccgtcaggttccagcggaacgacctggcctggttgatggaccaggcccagccggccggtggctcggtcatgttgggcgccggcggggcgccgctggagccggcgtagcggatgacggcggaggcggacttggcgtcgtggatgaaccgcgtggaggccaccatgtagtagtcgccgggcgcctggtcggcgtcgaccagcacggagaggcagtggccgacgtggacgtcgagcgagtcgtacgtgttctgcagggtgtgggagccctccagctcgaccagcttcatgtagtggccctggatgcggaagttgagcgacgccttgatcccggtgttgcagacgcggaggcggtacgtcttgccggcctcgaaggtgaaggcaggcgcggcctccaggtccttgccgcccttgccgttgatgagcacgcccgcggggcggcccacgcccttgccggcgtcgatctggcgggctagcacctcgtggtccttggtgtaccagtctccgatgagcaccacgtggtcgttctccggcgggggctggtcgaacgggaccgggatgaggaggcggctgaccacgctgatggccccgtagccgcccgccgcccgctgcatgccgatggacgggaagtagaagaagctgccgatctggtccttgggctgccacttgtacgtgaagttggtgttgggcaggatcgggcactgcgtgcctggcatcccgtccatccacgagttcttcctgtgctggatcccgtgccaggtgaagaggagcggctggtcgagcatgttgaagacattgatgacgatgttgttgttggatgtgcagttgatggtagggccggggaacatgtcgttgatgaggatcaccttctgaggcgtccccactcatggtcttcgtcccgtacgcggaagcgtgggcggacgcgtgggcggacgcgtggg

SEQ ID NO: 259335 - DNA, 2050 bp, Zea mays
gttatgcatgcatgcatgatgaagtcttgaccccctttgttttttttgtttgggtattattcctcggaagcgaacgaaaaaaaagagagagagagaataaacgaggaggggacagacaaggctggctagagaaggaaacgcgagaaaaagtcccctctcgctctcctttagttgtgtacagcaccgtgcgcgatcggtcgacgctctagacggcgcggtaggacggtggcatcggcaggccgacgaccttgccgcagcggaggctggtctccggcatgttgtactcgtccctgagcgaccgctccggcgagatgacgctcacgtacagctgctcgccgaggtactgcctctcccagatgttggagcggacgctccacatgcccgcgttgtcgaacgtcatcatcaccgccgtccacgaccttgggtacacctggatcgtgtgccggctcaccgtgtccaggaggttgtacgtactccgcgacgctggcgtccatttgccgggccccatgccgacggcgaagaaggcgtagccgtcgatgtggatggtgtcgatgctcttctcggggttctcgaagaccacctcgatgaacgtgcggaactcggcgctgatgacgttgggtgccatcttggtgggggccgtgttggagggcggcacgtccccgatgaggttgtacttgaacacgccgtcgctggcgttgaagtactcggcgagcttgacgggggtttccgggtccacgtgcgacacgccgttgaagccgaacctctccttgccgtcgaccttgccgcggcccatggcgagcttgatggtgcgggtgatgttgatctggccgtagtggtacgacccctgcgggttgggccgcgccgcgctggccgtcaggttccagcggaaggacctgcactggttgatggaccacgcccacccgctggggccctccggcagcttggccggcggcggggcgctggagcccttgtagcggatcacggccgtggtgctgctcctctccttgatgaaccgggtggacgccaccagcaggtagtcgccgggcttctggtcggcggtgacgaggaacgacaggcactggccgatgtggaggtccagcgagtcgtagtcgttctgcatggtgtgggagccctccatctccaccagcttcatgatgtggtcctggatgcggatgttgaaggacgccttgatgcccacgttgcacacgcggaaccggtacgtcttgccggcctccacgttgtacatgggcgggttcgacgcggtccttctcgttcttgccgttgatcaccagccccgccggccgcccgatccccttgccggcgtccaggttcttggccagcacggcgtggtccttggtgtaccagtcgccgacgagcaccgggaagtcgtcggccggcgtgtcgaagggcaccgggatcaggtcacggctgtggacgctgatcagcccgtaggcgcccgccgcccgctgcatgccggtgctggggtagtagaagaagctgccgatctggtccttgggctgccagtggtacgtgaagttggtgttgggctggatcgggcacatggtgcccggcatgccgtcctgccacgagttcttcctctgctgcatcccgttccaggtgaaaaggagcggatggtcgagctggttgaagacgttgacgacgatgttgttgttggaggagcagttgatcctggggccggggaactcgccgttgatgaggatgaccttctggggcacgcccagcagggacttggtcccgtacgtcaccttccactcgaagaacaggtacgggtcctcggcccgcgccagggtcgccaacgccgacaggaccagcagcacgccggtggcggcggcggcaacacgcgtcgtcgtcgccatgtctctcgttgctctgctccacccgagtacgtatctaccaatcgatcagcctctcataaaggatgtaatgaggagttgttgcggtgagatagaactattctactacgaggaggccatggaagacgtcccgggtggtgataggtggaggccgaaggggtaaccggacgcgtggg

SEQ ID NO: 259336 - DNA, 688 bp, Zea mays
ccgggccgatacacgactctagatcgagatctcgaatggccgcccttttttttttttttttaatctgatcgcggtggcgcggacccgtccgccagtgtagtgttcactagtaaacacggtacagcatgcatacaccaggacttgctggtgtaaataaatgttaagataaaagtatatataactcccattacaatgattgttttttaaaccccattacagtgatttgagagggcatctcaagattacatcaatagatatatccgtgcgttctcatttggctcacccccacccaacgtcccttctcccttccctaggcttccttcgtctttgttctttttgatgattttatttcgccgagcagcacaggaatggattagttagactggatggtcagaacacgaggtgaaaacggcgccttcgtcgtctttagcgcgcgggggcgtaggatggcggcagcggcagccccacgaccttgccgcagcggagggcgttgtcgggcatgttgtactcgtcgcgcagcgaccgcgccggcgagatgacgctgatgtagaactgctccccgaggtagtaccgctcccagacgttggaccggacgctccacatgcccgcgttgtcgaatgtcagcatgatcgccgtccatgaccgcgggtacacctggatcgtgtgccggctcaccccacgcgtccgt

SEQ ID NO: 259337 - DNA, 896 bp, Zea mays
cggacgcgtgggcggacgcgtgggtttttttttttttttatagtgaataacaatctatggatccatatatcaacttacacagagaagttcagtacgaaagcgaaagagacaataaacatcaaagttgaatcaggagacatatgcatgtacatatacataaatataaaagaacaattttacggcgtctcgatgtgtttacgcatgcatatatccgcatgcatgcattgcagcggaccatcgcctcttaatctccctggtcgcccgcccctggcagtgagtgactgctggtgcccacatgaatgaagtcttcttgagatagagcagagcccctttggttgattattattcctcggaagcggaaatgaaccggacgacgggacgagagaacaaacgagctaggggggacaaatagctagagaagaaggaaacgagagaagccgctgccctcacgctcctttaaattgtgtatacagcaccgtgcgcacgtgtgatggaaggaaggaagggcaaaccgagcatgctgcatgctctagacggagaggtaggacggcggcattggcagtccgacgaccttgccgcagcggaggctggtctccggcatgttgtcctcgtccctgagcgaccgctccggcgagatgacgctcacgtacagctgctcgccgaggtactgcctctcccagatgttggaccggatgctccacatgcccgcgttgtcgaacgtcatcatcaccgccgtccacgacctagggtacacctggatcgtgtgccggctcaccgtgtccaggaggttgtacgtgctccgggacgctggcgtccatttgcccgggcccatgccgccggcgaagaaggcgtagccgtcgatgtggatggtgtcgatgctcttctcggggttctcg

SEQ ID NO: 259338 - DNA, 561 bp, Zea mays
tgtacgtgaagttggtgttgggcgcgatggggcactgcgtgcctggcatcccgtccatccacgagttcttcctgtgctgcatcccgttccaggtgaaaaggagcggatggtcgagctggttgaagacgttgacgacgatgttgttgttggaggagcagttgatcctggggccagggaactcgccgttgatgaggatgaccttctggggcactcccagcagggacctggtcccgtacgtcaccttccactcgaagaacaggtaggggtcctcggcccgggccaaggtcgccagcgccgacacgaccagcagcacgccggcggcaacgcgcatcgtcgacgtcgccatgactctcctcgaccgatcagcagctagctctcggcgggccggcggatcggaggaggggcgctcgacctctctctaatgtagtgtagtgtagtgctgctctcttgaaggattgtaatgaggagttgttgcggtgagatagagcttattctatgaggaggccatggaagacgtcccgggtggtggtagcggtcaggtggaggccgggggataaccgg

SEQ ID NO: 259339 - DNA, 460 bp, Zea mays
catggtgcccggcatgccgtcctgccacgagttcttcttctgctggatcccgtgccaggtgaagaggagcggctggtcgagcatgttgaacacgttgacgaggatgttgttgttggatgagcagttgatggtagggcccgggaacatgtcgttgatgaggatcaccttctgcgccgtccccatgatggtcctcgtcccgtacgtcaccttccactcgaagaagtggtaggggtcctccgcgcgcgccacggcggcggcgagcgccagcaccagtagcgcggcggcggaggcgcctcgcattgttgccatcccagccgaccacaccatccctcgccggggggggaggccctcgcctatgcgcgccctgcgtgtcgccggtgtgtgagagccgccgcgcgcagacggtcagggtgatcggtgctgtcgatccggccggtggcgggggccagaagtgtgggta

SEQ ID NO: 259340 - DNA, 659 bp, Zea mays
cccctttttattgttcaggcgcttttggacgaatgccatttgtgacaggcatggccaattttttttttaatcagcagctgcaagaagccatagtatatatagtgaataacaatctattgatccatatatcaacttacacacagaagttcagtacgaaagcgaaagagacaataaacatcaaagttgaatcaggagacatatgcatgtacatatacataaatataaaagaacaatttttcggcgtctcgatgtgtttacgcatgcatatatccgcatgcatgcattgcagcggaccatcgcctcttaatctccctggtcgcccgcccccccccctgagtgactgctggtgcccacatgaatgaagtcttcttgacatagacctgagcccctttgggtcattatgattccgtgtaagcgggtattgacagctccacgatgctgacagagcaggtcgatgctagcttggcacattatagctagataggtagctatcgacataagcatgtgccctcacgctcctttaaagtgtgtatacagcaccgtgcgcacgtgtgatggaaggaagcaaggggaaacccagatgcatgctctagacggagaggtaggacgccggcattggcagtccgacgaccttgccgcagcggaggctggtctccgac

SEQ ID NO: 259341 - DNA, 1170 bp, Zea mays
gaggcgtacgacgtacgcggacgcgtgggcggacgcgtgggcggacgcgtgatctgtgggtacagcaccaagaaggttcacactatcctgacaaaggatggcaagaaccacttgatcaagaaggatgtgccttgtgagactgatcagttgactcatgtttacactttgatcatccgtcctgatgcaacatacagcattctcattgataatgaagagaagcaaactggcagcatctacgagcactgggatattcttccccctaagaaaatcaaggacccagaggctaagaagcctgaggactgggatgacaaggagtacattcctgaccctgaggacaagaagccagagggctatgatgatattcccaaggaaattcctgaccctgatgctaagaagcctgaggactgggacgatgaggaagatggtgaatggactgcccctaccattcccaacccagaatacaagggaccatggaaacaaaagaaaatcaagaacccgaactaccagggtaaatggaaggcacctatgattgacaacccagattttaaggatgatccatacatttacgccttcgacagcttgaagtacattggcattgagctgtggcaggttaaatcgggcactctgtttgacaacatcatcatcactgatgaccctgcgttggccaagacttttgcagaggagacatggggcaagcacaaggaggcagaaaaggctgctttcgatgaggctgagaaaaagaaggaagaagaggaagccgccaagggtggcgatgatgacgatgatgacctagaggatgaggcagacgatgacaaggcagacgatgacaaggccgactctgatgccgaggatgacaaggactctgaggagcacgacgagctctagatgatgagtatgatagaggtggccactgacattggtgccgttggcctggatttatcagctcttccattttgttctccttttctgttatcagaaactttaggacattgttaagaagctgagggacagtatgggtcgtagcgcttagtcatttttcccattaaaatcgatagcactgcaggaagatcttttcccacaattgttatatttcatcctgatgtgtaaatggcagctgtgttagtttattgagaactgtttaattagtcaaaaaagaagaataatacaagc

SEQ ID NO: 259342 - DNA, 1147 bp, Zea mays
cggacgcgtgggcggacgcgtgggcggacgcgtgggcacgacctggggggttcagatcggatcggaagcttccataagtttccatcgggcttcgccggtatggcgatccgcaaggggtcttcgtacgccgtcgcggcacttctcgcgctcgcctctgtcgccgccgtcgcaggggaggtcttcttccaggagaagttcgaagatggctgggaaagtcggtgggtcaagtccgagtggaagaaggatgagaacatggctggtgaatggaaccacacctcgggaaaatggaatggagatgccgaggacaaaggtattcaaacctccgaggattacaggttctatgccatttcagccgaataccctgagttcagcaacaaggataagaccctggtgctgcagttctctgtgaagcacgagcagaagcttgactgcggtggtggctacgtcaagttgctgggtggtgatgtagaccagaagaaatttggtggagacacatcttacagcattatgtttggaccagatatctgtgggtacagcaccaagaaggttcacactatcctgaccaaggatggcaagaaccacttgatcaagaaggatgtgccttgtgagactgatcagttgactcatgtttacactttgatcatccgtcctgatgcaacatacagcattctcattgataatgaagagaagcaaactggcagcatctacgagcactgggatattcttccccctaagaaaatcaaggacccagaggctaagaagcctgaggactgggatgacaaggagtacattcctgaccctgaggaccaggaagccagaaggcttatgatgataattccaaggaaaattcctgaccctgatgctaagaagcagcctgaggactgggacgatgaggcagatggtgaatggactgcccctaccctaccattcccaacccagaatacaagggaccatggaaacaaaaggtatggcagttccttttaacctataaactgacagcaattcatattctgatatctgacagcatgttgtttcacttgccagaaaatcaagaacccgaactaccagggtaaatggaaggcacctatgattgacaacccaggtatgtttgcctgaaacggatccttatatcttcttactgtttggc

SEQ ID NO: 259343 - DNA, 548 bp, Zea mays
  unsure (1)..(548): unsure at all n locations
tggctgcttttgatgaggccgagaaaaagaaggaagaagaggtatatatttaaacaccatatagtgtttttgtgacgggtgtatgcatgagtgtcccgtatattgggttttgctgtatgttgtgtctttgccatgcatcctggtttatgttgacgtaggggaatatctttgttaggttgaactgaatgaactataaccagtggcaagtgcatgtgagtttaacagataaaactatcgagtttaaccgtccgttgtgtttttttgtgtcctgcatatcaacagtttattactaatcctgggtggctgaactaatctttatgaaccacaacgtctgtgcttttctgttggaggtttgcgcgtcgctgattgtgaatcgctttctcttgtcaacaggatgccgccaagggtggggatgatgaggatgatgacctagaggatgaggaagacgatgagaaggcagacgaggacaaggccgnctctgatgccgaggatggcaaggattctgatcatccgaagcacgacgagctctagataacaaaagtgatgtt

SEQ ID NO: 259344 - DNA, 723 bp, Zea mays
gtttgggacagcatgggacaaaagaaagaagttggttatagaaagcagaagtttcatggattcacggtaaactgaaactgtcgctacaacaattcttcttgtgatcgttgctccttgccaattcatcgatctgagatgcaaactgacatcatctatgagcactgggatattcttcccccctaagcaaattaaggacccagagactaagaagcctgaggactgggatgacaaggagtacattcctgaccctgaggacaagaagccagagggctatgatggtattcccaaggaaattactgaccctgatgctaagaagcctgaggaccgggacaatgaggaagatggtgaatggactacccatttgctcgtaccattcccaaccaaaatacaagggaccatggaaacaaaagaaaatcaagaactcgaactaccagggtaaatagaaggcccatatgattgacaacctagatttcaaggatgatccatatatttacgccttcgacagcctgaagtacattggcattgagctgtggcaggtcggtgttggatagtcggatcttctctctcttgttcagaaggacataacagttatgcctctttttttgtttttctatgtacaggttaaatcgggcactctgtttgacaacatcatcatcactgatgaccctgccttggccaagacttttgcagaggagacctggggcaagcacaaggaggcagaaa

SEQ ID NO: 259345 - DNA, 1161 bp, Zea mays
tctcacgcgttcgaccacgcgtccgcccacgcgtgcgcctacgcctggggccgcggggtgggccgcgctcccatccagccgccaccaggtgcagagtctttcgtcatctcttctccggcgaagaacccccagtcgcccaccagatcacttgttaaactttgttgaggggtgatggcggtttctttcgcaaacctcaactccgaggcagggcttaaaaagcttgatgagtaccttctcactcgcagctacatcactggctaccaagcttccaaggatgacttggctgtctacacttcgttttcgtctgctccctcgtccaagtatatcaacgtagcaaggtggtttaatcacattgatgcgctcgtgaggctgagcggaattactgcagagggccaaggtgtgaaggttgaatcctcagcagttccttcagccccaactccagatgttgctgaagcacaggccccagttgctgaggaggacgacgacgatgatgttgacctttttggtgaggagaccgaagatgagaagaaggctgctgaagagcgtgctgcagctgccaaggcttctggcaagaagaaagaatctgggaagtcatcagttttacttgatgtgaagccatgggacgatgagactgacatggccaagctcgaggaagctgttaggagtgtccagatggaagggctgctctggggcgcatccaagcttgtcccagttggatatggtatcaagaagctgcaaatcatgatgaccatcgtcgacgaccttgtctctgtcgacactctcattgaggactatctgtgcgctgagccagttaacgagtacgtgcagagctgcgacatagttgccttcaacaagatctaggcgtgactttcgatcagtccttcccctggggtgctggcgatggtggtggctgggcaatgcaccagcctaatttatccatagctatatgtctgctttgtgtggccagtgatattgccgtgagtatttttggatcctattcgagtcgaatgtaccagtaccagagttaatttgctttaattcgaaacaccgttccagttggaattcaaaaaaaaaaaaaaaaaaaaaaaaaaaaaaaaaaaaaaaaaaaaaaaagaaaagaaaataaaaaaaaaaagggcggccgcccgggaatcggaccgg

SEQ ID NO: 259346 - DNA, 938 bp, Zea mays
tccggaattcccgggtcgacccacgcgttcgcccacgcgttcgcccacccggccgatcaatgtagcaaggtggtttaatcacattgatgcactcctgaggctgagtggagttaccgcagagggcctaggtgttaaggttgagccatctgcggttccttcagcttcaattcttgatgttgctgatggacaggccccagctgctgacgaggatgacgatgatgatgttgacctttttggcgaggagactgaagaggagaagaaggctgctgaagaacgtgctgcggctgccaaggcttctggcaagaagaaagaatctgggaaatcgtcagttttacttgatgtgaagccatgggacgatgagaccgacatggccaagctcgaggaagctgttaggagtgtccagatggaaggactgctttggggcgcatccaagcttgtcccagttggatatggcatcaagaagctgcaaatcatgatgaccattgtcgatgaccttgtctctgttgacactctcatcgaggaccatctctgcgctgagccagtgagcgaatacgtccagagctgcgacattgtcgccttcaacaagatctaaatttccttgtgatggtggcaatggtggttggtgggcactgtaccagcctaatttataattttccatgagcatcttcaagagtttttctaaattatcatttggagtcatttacataaaaagcactttctatatctttttaatctcaacaacttttctatatcttgtttgcaccctggagagctatttacgttttctatctttagctagcgagaaacctggatggctggaatagaagataactatatttagacaatactttaaataagctgttggaagatagtaattcttgtgtgatcggatgcataatgccttggtctggctggttggaggtgtatcactctggagc

SEQ ID NO: 259347 - DNA, 545 bp, Zea mays
  unsure (1)..(545): unsure at all n locations
aaaaaagattacaaaacaaaattacaatagacatagaaacaggtaaattagaaaattataataaagaactttctagccaataagcaatttaacaagacagtccaagatttacgacaattgttacatttctacaaaattctagggatacctttcgacaagtccttcccatggggtactgacaattttggtggatggacaatgcacaagcctaatttttcgatagttatatgacagctttgtgaggccagtgatattgccgtgagtatttttggatcctattcgagtcgaatgtaccagtaccagagttaatttgctttaattcgaaacaccgttccggttggaattctgttacccgtgttctttgcttgcagttcctctatttcttttttgcatcggatggtggcggttccttttttttacattggctgttgtggttctggtcagactgtgttggtctagattcttgctttgtgtgatcggaaacatgctatcgcgcgtggcagagctgttgggtgaaaaaaaaaataananatatagtgttgaac

SEQ ID NO: 259348 - DNA, 649 bp, Zea mays
ataaaatccaaatttctcccagcgaaggcacacagccgccgccatttcttcatcctcccatctcctgatctccatctccatcttcttcgcagcgccggcgatccatcttccgctgcctcccttcctcgcgctcgggctctcagtgacggcatcagcggtttcccctcccgcctctcgccagtcgcatcacgcccccgcctccggtccaccgcacaccggccggtgaccctacattacttgctaatctttcttgagggcagatggccgtttcttttgcaaatgtcaacgccgaggcagggctgaaaaagcttgatgagtaccttctcactcgcagctacatcactggctaccaagcttccaaggatgacctggctgtctactcttcatttttggctgatccctcatccaagtatatcaatgtagcaaggtggtttaatcacattgatgcactcctgaggctgagtggagttaccgcagagggcctaggtgttaaggttgagccatcagcggttccttcagcttcaattcttgatgttgctgatggacaggccccagctgctgacgaggatgacgatgatgatgttgacctttttggcgaggagactgaagaggagaagaaggctgctgaagaacgtgctgcggctgccaa

SEQ ID NO: 259349 - DNA, 626 bp, Zea mays
  unsure (1)..(626): unsure at all n locations
gtcctccgagttacgttttgatatggctgcgctcgataaggggtacgatgaggtcggtgctgagtctggcaagaatgatgtccgaaaccatgagtgactacgtgctgtacactcttgtgacgatgagactgacatggtcaatctcgaggaagctgttaggagtgtccagatggaatggctgctctggggcgcattcaagcttgtcccagttggatatggtatcaagaagctgcaaatcatgatgaccatcgtcgacgaccttgtctctgtcgacactctcattgaggactatcgtgggcgctgagccaggggacgagtacgtccagagctgcgacatcgttgccttcaacaagatctaggcgtgactttcgatcagtcctttccctggggtgctggcgatggtggtggctgggcaatgcaccagcctaatctttgcatagctatatgtctgctttgcgtggccagtgatattgccgggagtatttttggatcctattcgagtagaatgtaccagttccagagtgaataggctctaattcgaaacaccgctccggttggaattctgctaaaggacanaacaagcttgattatgttcttgccctcaccgctgagaactttctcgcaag

SEQ ID NO: 259350 - DNA, 782 bp, Zea mays
ccgggtgcgacccacgcgtaacggttgaatgcacatgcacccagtcgactgtattttgacgacgactgatgatgtatgacacttattcggggatggagtaccagaatattgataatgaaggactacttgaaagagacgtgtctgcagcatgccaattgacttctggctttgacagacaagaatcatgggaatgtcatacagttgttacttagatgtgcaaaccattgggactgatgagactcgacatgtgccaaaaatcgacgaagtctgttaagagtgtccagatggaaaggctgctctggggcgcatccaaacttgaaccaattggatatggtttcaataagctgcaaatcatgatgaccatagtcgacgatcttgtctctgtcgacactctcattgaggactatctgtgcgctgagccagttaacgagtacgtccagagctgcgacatcgttgccttcaacaagatctaggcgtgactttcgatcagcccttcccctggggtgctggcgatggtggtggctgggcaatgccccaccctaatttttccatagctatatgtctcctttgtgtggccagtgatattcccgtgagtatttttggatcccattcgagtcgaatgtaccagtcccagagttaatttgctttaattcgaaaccccgttccggttggaattctgttacccgtgttctttgcttgcaaccaaaaaaaaaaaataataaaaaaaaaaaaaaaaaaaaaaaaaaaaaaaaaaaaaaaaaaaaaaaaaaaagggcggccgc

SEQ ID NO: 259351 - DNA, 259 bp, Zea mays
cttgttgaaggcaactatgtcgcagctctgcacgtactcgttcacctggctcagcgcacagatagtcctcaatgagatctaggcgtgacttccgatcagtccttctcctggggtgctggcgatggtggtggctgggcaatgcaccagcctaatttatccatagctatcacgtctgctttgtgtggccagtgatattgccgtgagtatttttggatcctattcgagtcgaatgtaccagtaccagagttaatttgcttta

SEQ ID NO: 259352 - DNA, 474 bp, Zea mays
taaaaatcaaggctacacaccaacttactttctaggtctcaaattaaatggcctcctcgtcctcctccttgctgctggcgtcgatggcggtggcggcactctttgtcgtcggctcgtgtggcggcgcgctcaccttcacgatcggcaaggactccagctccaccaaactatccctcgtcactaacgttgccatctccgaggtgtccgtcaaggagaagggcgccctggactggtcggatgatctcaaggagtcgccagccaaaaccttcaccctcgatagcaaggagccgattaagggccccatctccggccgcttcgctgtgaaaggtggtggctaccgcgtcgtcgatgacgtcatccctgccgacttcaagcctggctctgtttaccagacaggcgaacaaatctgagtaatggattctgctgcgtgcagattatattgatctctaaaataaatgttgacagagactaatt

SEQ ID NO: 259353 - DNA, 1566 bp, Zea mays
cgctgtcgtcctcgctcacctcgtccgtcctcgtgagctccgcctgccttccctctggacggctccagcctccagccatctcgccccacctgtacacagttacaaagcttggcacttcgcagttcgcactcgcatgctcttcgccccctcgcgcttaccgctgccgcgcctcccgactcgccgcctccgcctagctccgggctctccaatggcctccatgctcgccatcctcaggccctcggcgccggccccgctcgcgggacgccgggccagggctgccgcgccggcgaccgcgagggtggcgctatctaccagatctaggtattcgtcagccagggtgtcgctcggctccgaggttgcagtgggcgccgacgcgctcttcgccgactataagcccaccaccgctttcctcttccccggccagggtgcccaaaccgttggaatgggggcagaagctcagagtgttccagcagctaccaaattgttcaaccaggcaaatgaaatccttggatatgacttgctggatctttgcaccaatggaccaaaagaaaagcttgactcaacaatgatcagtcagccagctatatatgtcaccagccttgcagcagtagaggtactacgtgcacgcgatggaagccaagatgtgattaactctgtagatgttacatgtggtctcagtttgggagagtataccgctcttgcatttgccggtgcttttagctttgaggatggactgaagcttgtcaagctaagaggagaagctatgcaggatgcttcagatgctgccaatagtgcgatggttagtgtgattggtctggattcagaaaaggtgcaagaactatgtgatgctgctaatgacgaagtagatgaaaacgatagagttcaaatagcaaactttctgtgccctgggaattatgcagtttctggtggtgtaaaaggtattgaagtagtcgaagccaaagcaaagtccttcaaggccagaatgacggttcgcctagctgttgctggcgctttccatactagcttcatgcaaccagctgtttcaagattggaatctgcgttggctgccactgagattagaacacctagaattccggtcatctccaatgttgatgcgcagccccactcagatcctaacaccatcaagcagattttagctcagcaggtaacctctccggtgcaatgggaaaccactgttaagaatcttatgggcaaggggcttgagaaaagttatgaactcggacctggaaaggttatagcaggtattctcaagaggatcaacaaaggcactagcattgagaacatcggggcttaaacgtctgggatctgaagaactcttgatggaaccaagttacacagcagaggattgaaacatgccattattgtggaacgatgtttccactcagagttaccgtttttttaccttagtggttgaattttgatcttgatgtaaaattgacatgaaacacatatggttaatgattttatgaacagtgtagttttcacagtttgaataagggtgtgtctgttttctaaggactaatttttagtaccctcattttattc

SEQ ID NO: 259354 - DNA, 766 bp, Zea mays
ggattcttttaaagtcgaccaacccgtccgcaaatccccaaagcctccgacccccttcctctctccctccgccgccgctgcgcacgcagggaacaagcgacatgggcgtctacacctttgtgtgccgcaacaacggcggcgagtggaccgccaagcagcactccggcgagatcgaggcttccgccgctaccccatacgagctgcagcgccgcctcgtcgctgccgcctccgcggccgactctgcctacggcgtccagtcgtccttctccatggtcacccccagctccgccgtgttccaggtgatcgtcggtgctgtcggtggtggtgcaatgatggtgagcggaggtggcggcggcggtgctgctgcatctggtggtgctgctgccgaggctcccaaggaggagaagaaggaagaggagaaggaagagagcgacgacgacatgggattctccctgttcgactagagttgtgtgtgtcatctggatctcagaagtggtggtttggtcctgttgccgtagttaattttgctgtcctgtctgtgaacctgaagaactcttggtaattgttacaagcgacctgttccagtttatgtgagaatttgatatgttgtttggaatcatatattctccctgccatttgttgtgattttcggggccaaaaggttactgtttcctgtaatgataatatgtagctaggacttgttcaagaaattgaacagcaccagtactacttgttcaagaaattgaacagcaacagctcgtcatgc

SEQ ID NO: 259355 - DNA, 739 bp, Zea mays
tcgtgacgtgcagtatgactcctctcgctccttccattcacgcaagcgcaagtgcgcaacttgctgctctcgctgtctcagattccctgctacgccgcctcctccgcggctccgccaccagtctcccctgcaaccgggaatccgggataagaggaagagaaaccgcgcggcaaaaggaaaggagtacaggagcgagaaaagaatctctgaccggagtcctgccaggctgatagaatcctggcagccatggatatactgctaggttctgggagattcttggcgcgacggactcccctcatgctcgtccctcgctgctctcgaggctcccgggacagaagcggcagcgacaaaggtgaaacctctgctgactgggacaaggcatgggctaagttcaagaagaaagggaagaggaccctcttttctgatttctcaccagacaagtatgtgacctggaacccacggcgcagcgagtatccgttgtcagaagaggttgatccaatcaagagaactgaaagatctaacttgatgctttggacgagtccccagttcacgttggtgggggcgattatcatcgtcttgacattactaatctacacactagtcgttcctcccaagtaactgcacaagtgacagctaggaagtgagttgtaaatcaatattatttcaaatgggaagtctggattgtacaatttttacgtgcattacaccaactacagtagtattgcctccattgcaacct

SEQ ID NO: 259356 - DNA, 435 bp, Zea mays
cccacgcgtccgcccacgcgtccgggaaaaccatccgccggaggccggagggcagattctccaccaccgcctccaccccgccctcacgacgcgaatctgcggcgaacccccctctcgtattccttctcgccgccctgccccgagcgcaccgtttagaggccgccaggctccggcacccccgcccgcccgggctcgcctggggtcgggatgccctgctgcccgccgtcgctgctcggagtcggcccacggctgcgctccttcctccgcgactacgacgcgctccagtccctcgccctcgtactcatctaccttcagattgggtgtgcactgatcggatcacttggggcattgttcaatggggttcttgggatcaacctggtgattggtctattcgctggtgttgcaattgagagcagtagccagagacttggtcgg

SEQ ID NO: 259357 - DNA, 841 bp, Zea mays
acttagttagctcggctgagtacttgctttttgtttggttgtcttgatcattatgtgactttaattcttatatccttgaaatgggccttcattcggcagaagttgaatttaatgaagtcgtggtattcatgctcataattacttcatcaatttttgttttagattggttgtgcgctgattgggtcacttggggcattgttcaatggggttcttgtgatcaacctagtgattggtctattttctgttgttgcaatcgagagcagcagccagagacttggccggacatatgctgcccttctcttctttgctgtcgtccttgacgttgcttggtttatactcttctcccatgctatctggactattaatcctgatgagaagtatggtgaactttttcgttttctcactcagactagcattgtggatgcaaataattgggttttcagttaggtttttgtcttcattcttatggattcaaatgtatagattaggggcttcttccagcacgccaacatattttgaaaccaaccatgaagcaagaattagtttcttaagccctagatctgattcagttagacggagtcctacggcagatgatatattgggaggttcgatctatgatccttcttactactcgtcactgttcgaggatgtccgaaacaatgcatgcaatcatcagggtgataaacaaagtggtagtaatgacagtggttcaacatctgcaggccagacaccacgacttaaatcttttgctaatgatgtggaatgtggactaaaaagaccgttgaactcctaaggataaaacaacgggctcatcttggaacctaaatcctgaaccaacgtt

SEQ ID NO: 259358 - DNA, 530 bp, Zea mays
tggggttctacaatctcgctttgctatagtttgtgggtcggctcgtttgtggggtgaagggacgctccatgatattatgatggcttgcatcatactgcataatatgattgttgaagacaaacgggatgagtacggaggagaacaagtttacaacttcgacgatatgggacaatatctttgcaactacgacgacatgggacaaagggtgatagtgtcacacaattcttcacctgaactcgatgcattcattaaaaaaatacaaaaatatcaagaacaaggaaacccactatcagcttaaggcagacctgatcgagcacttgtggcaaaaccattctgaggtatataaaattgattaatgtgctatttatttatttttatctactttatgtaataagaacaaagttgggcagtaaacatggttactgtttatttccacttcaattgcctgcaatcaatgtgtggagttaccgtgttcacaaaagggggggataatttaataattaaatttttaagtttttaaggaattttcc

SEQ ID NO: 259359 - DNA, 1346 bp, Zea mays
ccgccatcgccgccgcgacaccctcctcaccctcagggggagcgtcacggcggcggggagatgccgtaccaggacgcggaccacaggctccgcgcgctggtcgggagcgtcgagggcttcggccgccacgccatcgggggcctctacggagccatccaccgcgtcacgtcgctccaagacgacgggcccgggagtctgagggaggcgtgccgggcggaggagcccctgtggatcgtcttcgaggtgtccggcaccatccacctccactcctacctccgcgtctcctcgtacaagaccatcgacgggcgcggccagcgcgtggtgctcaccggcaaggggctccagctcaagtcatgccatcacgtcatcatctgcaacctggtgttcgaaggaggccgcgggcacgacgtggatggcatccaggtcaagcccgactccaccaacatctggatcgaccgctgcaccctcgccgactacgatgacggcctcatcgacatcacgcgccagagcacagacatcacagtctcaagatgccattttatgcggcacgacaagacgatgctcatcggtgccgaccccacgcacgtcggcgaccgctgcatcagggtcaccatccaccactgcttcttcgacggcacgcggcagaggcacccccgcctccgcttcggaaaggttcacctctacaacaactacacgcgcagctggggcatctacgccgtctgcgcaggcgtagaggcccagatcgtgtcccagtgcaacatctacgaggcaggtggagggcccccaaagaagacaactgtattcaagtacatgccggagaaggccggcgaccgagaggacgtggtggcagggtcgatcagctcggaaggggacgccttcctcaatggcgcgctgccctgcctgatcgataaccctgggtctgtcttcaggccagaggagtactaccagcagtggaccatggagccagcgtcgccggcgctcaaggacataatacagctctgcgcaggatggcagccggtgccccgccccccggatgatcgctgactttcatcattctgatatgctgcagctcgcttctgtaagaatattcgtttcacggaagcactgcatttgtatgcatctcatcctaggtaattcaacatttgtttcatggtagagtggcatttgtatgccactcctcttcatctgccccctctctgaaatgtagtagaaaagttgttatggttttctatttgtgtctttatttatggtacatacaattcccaatgtaaagatatttctctcgtccatagcagtacaatagcttttagttgtgaaaaaaaaaaaaaaaaaaaaaaaaaaaaaga

SEQ ID NO: 259360 - DNA, 1278 bp, Zea mays
  unsure (1)..(1278): unsure at all n locations
gactagttctaggaaattggtgcttcaaaaacaagagagcttatccagtttgtcattgcaatgccacaacttgattgatgtggatcttactgagtgcgagtcattaacaaatgcggtttgtgaagtatttagtgatggaggtggttgccctatgctaagatcattgatccttgacaattgcgagaatttgagcattgtagaactgaacagcagttctttgtcctgcctctctcttgctggttgccgctcgatgacattgttaagactctcatgcccaaatctgcaacatgtcaatcttgatggctgtgatcaccttcaaagtgcagcattctgtccagtgggtctcgaatccctaaatctgggaatttgtccaaaattgagtgttcttcacattgaggctccaaatatgtctatattggagctgaagggttgtggtgtgctttccgaggcttccatcaattgccctcgcttgacatctttagatgcctctttctgcaggcagcttgtggatgattcactgacttgtatgaccgaggcatgtcctctgattgaacatcttatcctgtcatcatgcctatccattggcatcgatggattgtcttcattgcattgccttcataagttgaccttgcttgacctgtcttatacatttttgatcaacttgaagcctatttttgacagttgtccacagttgaaggtgttaaaactttcagcttgcaagtacctcagtgactcatcattagatgccctctacagagagggtgctcttccattgcttgttgagctagatctgtcctactcgcccatcggacagaatgcgatagaaggtcttcttgcttgttgtactaatttggttaatgtgaacttcaacggatgtacaaattttcaagaattggtgtgcgaatctggggatagcggttctgtggatatgccagttgactcttgtccacctagttcaccaatcaagaatgaagagatcagtgagcaacctggccgtctgcttgaagttctcaattgtactgggtgccctaatattaagaaagttgttattcctttgatagcaaacttttcacatgtgtccaaaattaatcttaatctttcaaccaacttgaaggaagtggattngacatgctccaatcttttaacgttaaacttgagcaattgtagctcacttgaggtgctgaagcttgattgcccaagattgaccaacctccaacttttggcatgcaccatgttgcaagaggaagaattagaatctgcaatatccctttggtgggc

SEQ ID NO: 259361 - DNA, 1188 bp, Zea mays
cggaatggaagtcccggcccgagcgacgcgtccgccacctttaccaccgaagagagaaacgcgagcaaccagcgatcgccccatggccgccatggctcgttccgtctccctcgtcgtggcgccccttctcctcctctccctcctcgtctccgccgcggccagtgcgcggaccgtgggcgacaccgtgcaggacgcgtgcagcaagacccagttccccaagatctgcgtggacagcctcgccgccaagccggagagccagaaggcgacgccgcgcaagctggcggagctgttcgtgaacatcgcggccgagaagggatccgggatggccaccttcgtgcaccgcaagtacagcgacaaggaggacagcgacatattcaagtgctacgacagctgctccgacgacgtggaggaggccgtcgcccacctcaacggcctcgtccgggagcccaccgacgccaagttcctcgagctcaagtcgtggctctcctccacgctcggcggcacctccacctgcgaggacgcctgcaaggacctgcccaagaccagcgacaaggacgacgtcgtcaacttcagcctcgacttcgagaagctgcagcgcgtcacgctcgacctcatcaccgaggcgtccggcaccatgtccgcaggcatcgccctgccaccctccaacgccggagcgccctcctacggcgcggcggcgccttccgggggctccgccgatgcccccgccggcgcctccgagggccctgcgagcgccagcggcccgtctggtgacgacgcgccggcgtccggtgctggtgccagcgcgtcggctgctgatgctccggcggcggcggcctcatccggtccctctagcgcaccagcgccatcgtcgtcgtctgagtcctccgccgcaccaggcccatcttctgatggcacctccagcgccccagcaccatcgtccggcgacgattctgattccgacgacgatgggtcagcttgagcctgaccgatgacgcgggtttgggttaccggtgccactcaaaatacgatcccttttattgtaaaagagggatcccttctttccattgcattcttgcaatccgtttcttcttgactatgtttcttcttgactatgtaacgataataacatgagataattatctgaatgacattatattttttctaaaaaaaaaaaaaaataataattat

SEQ ID NO: 259362 - DNA, 641 bp, Zea mays
cccacgcgtccgcgataataacatgagaaaattatctgaatgacattatcgttacatagtcaagaagaaacatagtcaagaagaaacggattgcaagaatgcaatggaaagaagggatccctcttttacaataaaagggatcgtattttgagcggcacctccacctgcgaggacgcctgcaaggacctgcccaagaccagcgacaaggacgacgtcgtcaacttcagcctcgacttcgagaagctgcagcgcgtcacgctcgacctcatcaccgaggcatccggatccatgtccgcaggcatcgccctgccaccctccaacgccggagcgccctcctacggggcggcggcgccgttcggaggcgccgcggacgcacccgccggcacctccgagggccctgccagcgccagcgggccatcggctggtgacgccccggcgtatggcgccagcgccagcgccagcggcccgactgctgatgctccggcgacggcgacggcggcggcgtcgtccgggccctctagcgcacccgcgccatcgtcgtctgagtcctccggcgcaccagggccgtcgtcgtctgatgggtcctccggcgccccggcgccatcgtcgtctgatgggtcctccagcgccccggcgccatc

SEQ ID NO: 259363 - DNA, 538 bp, Zea mays
  unsure (1)..(538): unsure at all n locations
cccacgcgtccgcccacgcgtccgcccacgcgtccgcccacgcgtccgcccacgcgtccggccacgcgtccgcgagagaggaacgcgaacaaccaacgatcgcctcatcgccatggctcgctctgtccccatcgccgtcgccgtcgcgcctctgctcctgctcctcctcgtctccactgcgtccgctgcacggaccgtgggcgacaccgtgcaggacgcgtgcagcaagacacaattccccaagatctgcgtggacagcctcgccgcaaagccagagagccagaaggcgaccccgcgccggctggcggagctgttcgtgaacatcgcggccgagaagggatccgggatggccacgttcgtgcacgggaagtacaacaacgccaaggacagcaccgtgttcaagtgctacgacagctgctcggacgacgtcgaggaggccgtcgcccacctcaacggcctcgtccgggagcccaccgacgccaagttcctggagctcaagtcgtggctcttctncacgctcggcggcaccttcacctgc

SEQ ID NO: 259364 - DNA, 464 bp, Zea mays
tacccacgcgtctgctaacgcgtccggagaggaacgcgaacaaccaacgatcgcctcatcgccatggcacgctctgtccccatcgcgcctctgctcctgctccccctcctcctcctcctcgtctccactgcgtccgctgcacggaccgtgggcgacaccgtgcaggacgcgtgcagcaagacacaattccccaagatctgcgtggacagcctcaccgcaaagccagagagccagaaggcgaccccgcgccggctggcggagctgttcgtgaacatcgcggccgagaagggatccgggatggccacgttcgtgcacgggaagtacaacaacgccaaggacagcaccgtgttcaagtgctacgacagctgctcggacgacgtcgaggaggccgtcgcccacctcaacggcctcgtccgggatccaccgacgccaagttcctggagcttaagtcgtggggtctcctc

SEQ ID NO: 259365 - DNA, 1817 bp, Zea mays
gcacaatctatcagtagtgcttctatcgacctgcaacggtggttcttcattacaggaagatgaagaggaacttctccaatcagtgattcaaaatcttacagctgccagttccaaaagaagcaaggttgaacaaaaaaatgatgatggattgagtaactccagccaaatgaaattcaaagatattaattatgtgaggaaaaacttttggaggtcaatgcatgaagactcagaacaggagaatgctgattcagaatttaaggccactgtttcacaggttcttactaatcaccaggaggataaggtgctcgacaacactgaagttcctcaggcatcaatctatagaaacttgtggattgaagcagaagcttcagcttgtaaactcaaatacgagcttcaacatgctctcctgaagctcgagacagcaaaaggcctcaacgacacaataaaagcccctgactcattggaagacagtaaaggctctaactcatacattttcagtaacaaaccacagaaccatgggaaaggaaccgttacatgcgctgcggcctttcagggcctccgaggagattctcgtgacaagcaatctcctgttgtaaataggagcattttcaatggtgttgatgctgatgtgtttgcccgatttgaagttttgcagtcccgtattgataatataaactccttgagtgagattgactgtggggagcagaaagaagcaagcaagagaccatatgcagtcgaagatactgttatggcgagactgaaagttttgaagtctcgtcctgacaatataacctctttgagtcaaggaagcactaaacaccagctagatggaagcacaaacagtgcagataatgttgatgacactgttattgctaggctgggaattttggagtcccatcctaataatgaagccctattgggacaggaaagcagcaagcgacaactggatgcgagaacaaatagagaagatgggattgatgctgctgttatggctaggctgagaattttgaagtctcgacctgataatgaaacctcaatgggcgatgccaacaaggagcagcaagacgcatgtggtgaacaattaaatggggatgaccttggtattgtgtccaatggagccattagcaacaccctgagtgagaagtgctctaagtttacgcactctgatgatcatttaggagaaaaaaactcagtaggtgtcccggacacatttggtgatggaaacagtgctagggagaaaaaggaggttggtggttcagcagatgttgctacccccatgaggtgcaaaggtacatctgatggagtgagcttcggaagcgcagtacatagtgaagataatcttggtgaaaaccatgtgtggcttcaaactgctggggactcccatgtttgcacagaagggtctcaggaagcgcacccaatctcctctccagttgaccagtatggtggttcacctacagagtgggagcacgtgctgaaggagaatttcttccatccaggcaaattggcgaattctgacccataaactggaaagcttttgtttcagctcatgttgcctcaaaatgctgatgcttcttgtaaatatatgatacgatattatacatcccctcccccgaacctttgtctctatgttcaataatctgcatatctggtgatcaaggaaacgcactgtgcccccgatggtgctatatggaactagtctggtttgtctgcttgggtctatcatgccatagtctatctgtaaatggcacatgtatgttctggaccgagagtgaattattgtatatatttacttccagcaaatttggatattgtggact

SEQ ID NO: 259366 - DNA, 445 bp, Zea mays
gttctcatgatccatattgttatggatatatttgagatcatgatttctatgattaattatcttttatatgtcatcatcataatgttaatttatggaattaaaatgatatggaaaatgcctataattttaacacaccaaaaacctaatgttaggcatttttctgtcagtggttttgctgctgtgctaaagcctgatccatttgatggtaaaaacttcttgatttggaaagctaaaatggtattgtggcttactgtaatgtcttgttttcatgccgctgagggcaagcctgccaacttacctcctgaggatgaggctaagtttaaggctgaagacaacctctttcgaggtgcagtgattagcgcactggatactaaattccagaaaagctatatcatccttcccacagggaaagagctgtgggatgcacttgtcggaaagtttggag

SEQ ID NO: 259367 - DNA, 599 bp, Zea mays
agttcggctcgaggcagctttgaacaagtgtcagagtactgttagtggtctggagaagctacagagagatatagaggatgctagcaccatgggtgatccgcctgcctcaacaaggatttctgacctacaagaacaggaaacaatcctgaagcactgcattgcacaacttggaagtgtggatgcggtgaggatatgcattgataaatcaattaaaagaagctctcaccgaacaggagtcaaagtcagaggttcttcgcagccagttgcaagttgctcgagcagaggctgaacatgccattcaacttaggcaacggtttggtggtgccgttgtcgcaaatggcacaggatctagttctagtccgctgctgatgtctcctcagttacagtcgctgaatccagcaccctcactcgcccctccaatcggtgcagccggagatgagcccaagagaacggcagcagcaatggctgacaagctggcatctctgtcagcgccggtgcatgtcctgagctccatcttctcatctttcgtctgcacacactgcgcttcggtatctttcatggaccggggaatttcctccaaaggcccacctttccgggga

SEQ ID NO: 259368 - DNA, 372 bp, Zea mays
cacaccttgttggcctctttattgtgatgtaaccgatataaaaaccttatttgtgggttcaataaacatatcatgtagttcaattattgtggagattaacgtttttggctaatgttcactattctttgttgcaatatgttgtgtgtttgcttatctacaaggaaaatatgataggcatattacatgcccataaatgcgtagttgaagactatgtgtttgctcattttcatgcaactagaatggttcatactcatgaggattctcatgcaccggatcacctcatatgcgacacttacattgattattcagttagttaattacacataatcttttgatatgttagtcatttttactaaattgtgaatagtgcta

SEQ ID NO: 259369 - DNA, 571 bp, Zea mays
cccacgcgtccgcccgtgcgcgaagccccacacacacaaaagcaaaaagcatcatcacaataatggcccgcgcgtgtgtgttcctcgtggtgctcctcctggccgccgtcgcggtggcgccgtttgcgggggctgcgcgtgtggatgtcgtggagggcaggtccatggcgtccgccgacgcgcctgaggcggcggctgacgcgcccgctcccggtcccgactccgcctcatccccggactcgccgtcggaggcgccctccagcagcagctcatccgactagccgcgcacaacgcagttcttgtcatgatctatctagcaaataaaaagatcatatgtctcgtttgattctctggaataactaatagtatatatgctgcgcccggatgatatataaatatgtgcatcaaatgcgtgcggcaaacgcatggaatgtgcttgcctagctagctaattgttggtttttttttctttacttttcttcatacctgtctctctctctcggaggtttaatttttcttcaggcatgtaatataatgtgatatacccaatttatccaacgcgctttaattc

SEQ ID NO: 259370 - DNA, 1693 bp, Zea mays
ccccccctcactgtccggctgtccctgtccctgtccctgcgcatcaatcaatcccacggtcttcctgccgcttcctcggctgcccccatcctccgaatcctgcctcgcctcgatctccccgttcctcgtgttccgacggagggtggcgggcgactaatggggacgggggcggggagcgcgcgggctctggccgtggcgttcgccgtctcgcttctcgcctgctctggcgccgtcgctgtcgccagggcgcaggacaccgagcggatcgaaggaagtgctggtgatgtgctcgaagacgatcccgttgggaggctcaaggtgtatgtctacgagttgccgaccaagtacaacaagaagatggtggctaaagactctaggtgtctcagccacatgtttgccgcggagatcttcatgcaccgcttcctactgtctagcgcgatccggactttaaatccagaagtagccgattggttctatactccggtatacaccacgtgtgatctcacaccgtggggtcatcccttgcccttcaagtcaccacggataatgcggagcgcgattcagttcatttccaaccggtggccatactggaacaggacagagggagcagaccacttctttgtcgtgccacatgactttggcgcatgcttccactaccaggaagagaaggccatcgagcggggcgtccttccgttgcttcgccgtgctacgctggtccagacctttgggcagaagaaccatgtctgcctgaaggatgggtccatcaccatcccgccatatgctcctcctcagaagatgaaaactcacctcgtccccccagagacccctcggtcgatcttcgtgtacttccgcggtctgttctatgacactgcaaatgatcccgagggtggttactatgcaaggggcgcccgtgcatcagtctgggagaacttcaagaacaacccgctgttcgacatctcgacggaccacccacccacgtactacgaggacatgcagcgcgccgtcttctgcctgtgcccgctgggctgggcaccgtggagcccccggctggtggaggccgtggtgttcggctgcatcccggtgatcatcgccgacgacatcgtccttcccttcgcggacgccatcccgtgggaggagatcggcgtcttcgtcgccgaggacgatgtcccgcggctggacagcatcctgacgtccatccccacggacgtcgtgctgaggaagcagcggctcctcgcgaacccgtcgatgaagcaggccatgctgttcccccagcctgctcagccaggagatgcgttccaccagatcctgaacggcctagcgcgcaagctcccgcacggcagcaatgtcttcctgaagcctggtgagagggccctgaactggaccgctggaccaccaggcgacctgaaaccttggtagcgtcctgtggatctgagatggatacgacttgttctgaaaggaaatatggagaacatgattatatatatacccgtgcctttgagttaccatgggtgcatagtgctgacaagaagccaaatgtacatcgttctatgttctttttctataactgttatatccatataaatatcttcgtttcttcttcttctttcttccatttcttcactagatgataagagtgccaagccttgtcggtcatatgtggatatatcataaatgaaattcacaagattgtact

SEQ ID NO: 259371 - DNA, 1686 bp, Zea mays
gggatctcctcttccttccccgccctcttccgccgacagcgggagagtacgcggcgcagcggctacaccaccgtctccaggctcccaaacacgtccctgccatccttttttgactccggagtccctcccctccttgcctacctggcgaggatcccatacccaatcccatccaactagcttcctactacttcccccccgtcctctcgatccctctccccgttcccctgaccagccgggcgtcaagtggcagggaggagaggcggcaccgcgtgtgaggctcaatggggaaggggagcgcgcgggcgctggccctggcgctcgccgtgattctcgcctgctccgacgtcgccgtcgtcacggctcaggaaaccgagcggatcgaaggaagcgctggtgatgtgttagaagatgaccctgttgggaggctcaaggtctatgtctatgatctccccagcaaatacaacaagaagctgctcaagaaggatcctaggtgcctgaaccatatgtttgccgctgagatcttcatgcaccggttcctgttgtcaagcgctgtccgaacttttaatcctgaggaagcagattggttctacacgcccgtatacacgacatgcgatctcacccccaagggtcttcccttgcctttcaagtctcctcgaatgatgcgcagcgcgatccagctgattgctacgaattggccttactggaatagatcagagggcgctgatcatttctttgtcacgccccatgactttggtgcttgctttcattatcaggaagaaaaagcaatcggacggggaatccttcccttgcttcagcgtgctacgctggttcagaccttcggacagaagaaccatgtctgcctgaaggatgggtccatcaccatcccgccatacgcgcctcctcagaagatgcagactcaccttatccccccggacacccctcgatccatcttcgtgtacttccgaggtctgttctatgacaccgggcatgaccccgagggcggatactacgcaagaggtgctcgtgcatcggtgtgggagaacttcaaggacaacccgctgttcgacatctcgacggagcacccggcgacgtactacgaggacatgcagcgcgccatcttctgcctgtgcccgctggggtgggcgccgtggagcccgcggctggtggaggcggtggtgttcgggtgcatccccgtgatcatcgcggacgacatcgtgctgccgttcgcggacgccatcccctgggaggacatgagcgtgttcgtggcggagcgggacgtgccgcgcctcgactccatcctcacctccatcccgctgcccgacatcctgcggaggcagcgcctgctggcgagggactccgtcaagcgggcgctgctgttccaccagcccgccaggcccggggacgccttccaccaggtgctcaacgggctggcgcgcaagctgccgcacggcgagggcgtgttcctgcagcccggggagaaggcgctcgactgggacgccggactcgagagcgacctcaagccgtggtagtgggccagtacctagcggttgacttcttcatgttccttctttcttttggtctctctgatttgattggcattggcatcgatggatggatcacagtatcacacattagtttttgtataccacggcccgtttacatgcagcagcgctatactgtatactc

SEQ ID NO: 259372 - DNA, 920 bp, Zea mays
  unsure (1)..(920): unsure at all n locations
cgtccggattcccgggtcgacgacgcgtccggcacgcatctcgggaccatggcacctttacttatcacacaccaacatactacgaatagcgttgatctctctgtgttctgcctctgcccgttgggctgggcaccgtggagtcccaggctagtcgaagccgtggtctttggctgcatcccggtgatcatcgcagacgacatcgttctccccttcgccgacgccatcccgtgggaggagatcgccgtgttcgtggccgaggacgacgtcccgaggctggacaccatcctgacgtccataccgatggaggtgatcctccggaagcagaggctgctcgcgaatccgtccatgaagcaggccatgctgttcccgcagcccgcccaggctggggacgccttccaccagatcctgaacgggctggcgcggaagctgccgcacggtgaggacgtgttcctcaagcccgggcagaaggtgctcaactggaccgagggcccccgcggcgacctgaagccatggtaggtgtactggaaaaaaatgccatggcaccgtcagcgtgtccgctgttcttgtgtacgctacacagcacaaccagatgggaagctgatcgacgacgaggacgatgagtactcccatgtcactgatgtaaatgtaaagcgtcttccagcccaccaggcactgtgcttcttcaggcgacgtgtctggtttgcttgtgttgtgtctgttctgaactttactttagcgttaacctattaacgatcggagatcatgtaatttatggctgttgtattctccctatagtatcaagtttagttcgagtaatgagttagtctatcattgtcttaaaagagacnctgagaaaagaagacaaagctgcaaacagcaattattctgttggtgcaacttaaaacaaaaaaaaggggggc

SEQ ID NO: 259373 - DNA, 404 bp, Zea mays
ccggtcctgaattcccggtcgagcacgcgtccggcgccatggagcgggccttcctgccgctggctccgccgcgccaccgcttggtgcagaacgttcggccggctgcaaccacgtgtgcctgcaggacggctccatcaccgtgcccccctacgccgacccgcgcatgatgcaggcgcacctcatcagccccggcacgccgcgctccatcttcgtctacttcaggggcctcttctacgacatgggcaacgaccccgagggcggctactacgccaggggcgctcgcgcgtcggtgtgggagaacttcaaggacaacccgctgttcgacatctcgacggagcacccgtcgacgtactacgaggacatgcagcgcgccatcttctgcctgtgcccgctggggtgggcgc

SEQ ID NO: 259374 - DNA, 506 bp, Zea mays
gaatcccgccagttgccttccacttccgccagactccgcgttcctcctgagtcctgagcaggtgccgccggcccgagagtcgagggggaggcaggcgcccaggctgtcaatgggtgggacggggagcgcgacggcggcgcaggccctggcgctcgccgccttgctcctcgcctgctccggcgtcgccgtcgtcacggcgcaggacattgagcggatccaaggaagtgccggcgacgtgctggaggacgaccccgtcgggcggctcaaggtgtacgtgtacgagctgccccccaagtacgacaagaacgtggtggcgaaggactcgcggtgcctgagccacatgttcgccacggagatcttcatgcacggtttcttgcttgcgaacgcggtccggaccctgaacccggacgaggcggactggttctacaccccggtctacaccacgtgcgacctcacgccgtggggccatcccctcaccgtcaagtccccgcggatgatgaggagcg

SEQ ID NO: 259375 - DNA, 1114 bp, Zea mays
acccacacctacgcgttttattagctgttaagttaacgcatatactatgagcttggtgaatttgtcctaggcaaccagtccaacgtcttctacctcaagatgaagggtgactaccacaggtaccttgctgagttcaagtcaggtgcagagaggaaggatgctgcggagagcaccatgaatgcctacaaagctgctcaggatattgctcttgctgatctggctccaacccaccccatcaggctcgggcttgctctcaacttctcagtgttctactacgagatcctcaactcccctgaccgtgcttgcaaccttgcaaagcaggcctttgatgaggcaatctccgagctagacagcctgggagaggagtcctacaaggacagcactctgatcatgcagctcctgcgtgacaacttgaccctatggacttccgacaccaacgaggacgccggagatgagatcaaggaagcagctgctgcccccaaagaatccgcccccgagggccagtaagacggatccgatctcccgacctgatgcgtgtctgctgatgtcggggagtttaccaggactgtgccgttcttgatttctgatagcttatcttctagtacacctcgtgttgttctcttcgtcacggcgccggtgcgtgtgcgctgaagctgcctgccattgccattgccgctgtttttaattaagcacacactctagatgttatgcccgcatgctatgtttcgattctcaagttgataaatgatggctggatgctggttttcgtgctccaagcctgctgcttcttccagggaaaaaagacctgcccttgttgcagcgttgttgtttagaatgacctatatttgactggtattctgttacggtggctttgcaaagctgtttgtttggtttaatgtctcggaataatatgaattggctgcattggacgtgtattggaagtgttcaaaaaaaataaaaaaaaaaaaaaaagaaaaaaaaaaaaaaaaaaaaaaaataaaaaaataaaaataaaaaaaaaaaaaaaaaaaaaaaaaaaaaaaataaggggcggccgccttaggggacccatgtttcctaccgcgtgcattcaactcaatactttttttttggg

SEQ ID NO: 259376 - DNA, 1101 bp, Zea mays
aaggaattggacgcgaggagactcgagtactcgacagggaaaagtcgaggcctcggggccatcgactcgtgaagatgtcctcgcccgccgagtactacaaatcacttccacctataagcaaggcatatgggacattgtgtttcttcaccactgtgctagttcggctccatatcctgaatccgctgtttctgtacttatattaccctcgggtgttcaagaagtttgaggtatggaggatatttacaagtttcttcttcctgggaccattttccatgaactttggtattcgccttctgatgatagcaaggtatggtgtcatgttggaaaagggtgcatttgataagcggactgcagatttcttgtggatgatgatatttggtgccatctcactattggtgttgtctattattcccctattcaattcttttttcttaggaatacctatggtcagcatgctcctttatgtctggagccgagagaatccaaatgctcagataaatatatacggcctcgtccaattgaggtccttttatcttccatgggctatgctcttattggatgtgatatttgggtcatcattaatgcctggacttctgggtatcatggttggacatctctactacttctttgcagtgttgcaccctcttgccaccgggaagaactacctcaagactcctaaatgggtacataagattgttgctcgattcaggataggcatgcaagcgaactcacccgtccgtccaccagccaatggcaacagcgggtctggtgtgtttagaggaagaagctataggctcaatcaatagattcacccacctcgtaatgtgatccatggtcggagtggcaatgtagaagcaaagaccagaacgcatagtagggtcaatcaaaattaagggttacccgtcagagcttttcttaaaaaacctggacggacggaatggagaacccttccatttgctcatttagttgctaacaatgttcatcgtccatgtttacacatgaatataattctgtaatgacaatttgtgtacacttatgctggactaaacaaaaaaaaaaaaaaaaaaaaaaaaaaaaaaaaaaaggttagaagaaaaagaa

SEQ ID NO: 259377 - DNA, 1442 bp, Zea mays
cccacgcgtccgcccacgcgtccgcccacgcgtccgcccacgcccccgccggcgcaaacgcgtcgcatccgctccacaggatcctctgcgccaccgcaaccgtgtgaccgcccgtgccgccggcgatcccgatccgccgacccgtcccagccccgctcgcagccatgtcgccgtcggagccgacgcgggaggagagcgtgtacatggccaagcttgcggagcaggcggagcggtacgaggagatggtcgagttcatggagcgcgtcgcgcgctacgccgggggcgccggcggcggggaggagctctcggtggaggagcgcaacctgctgtccgtcgcctacaagaacgtcatcggcgcccgcagggcctcgtggcggatcatctcctccatcgagcagaaggaggaaggccgcgggaacgaggcgcacgccgcatccatccgcgcctaccgctccaagatcgaggccgagctcgcccgcatctgcgacggcatcctcgcgctcctcgactcccacctcgtcccatccgccggcggcgccgagtccaaggtcttctacctcaagatgaagggtgactaccacaggtaccttgctgagttcaagtcaggtgcagagaggaaggatgctgcggagagcaccatgaatgcctacaaagctgctcaggatattgctcttgctgatctggctccaacccaccccatcaggctcgggcttgctctcaacttctcagtgttctactacgagatcctcaactcccctgaccgtgcttgcaaccttgcaaaacaggccttcgatgaggcgatctctgagctagacagcctgggagaggagtcctacaaggacagcactctgatcatgcagctcctgcgcgacaacttgaccctatggacttccgacaccaacgaggatggcggcgacgagatcaaggatgctgctgccccgaaagaatctgcggagggtcagtaagatggattcagtctcacgacctgctgctgctgatgttgaggagtgaccagaaccagaaccgtcgtcctcgattctgatagattatcttctagtataccttgtgttgtcgttgtcgtcggcgcgacgatcgtcgtcgtcgtcgcgccggtgtatgcgatgaagctgccattgctgctgttttaattaagcattctagatgttataccgcatgctttgtttcggtttctaatgtcgataaatggtggccggatgctggttttcgtgctccgagccggcccccaggaagaagacctgcctgcccttgtgggtgcagcgttgttagaatgacctacggtgtatttgacttcgacaggcctgctgcctagtggactgatattctgttatgcgcaaagctatttggcttgatgtctcagaatattattaatttgcgtcgtcttttaagtctatcacgatgacgcagcccccatttatttttcc

SEQ ID NO: 259378 - DNA, 846 bp, Zea mays
cgccgatgtgctggaggcgctcggggtcaacatcgagcttggacccgagggtattaaacaatgtgtcaatgaggtgggtgttggattcatgatgtctgcaaattatcatcctgcaatgaaaattgtcagacctgtgaggaagaagcttaaaataaagacagttttcaatatccttggtcctctactgaatccagcaagggtgcctcatgctgttattggtgtttaccatgagaatatagttaccaagatggctaaggctgctcagaaatttggaatgaagagagcattggtcgtccattcaaagggtttggatgaaataagcccacttggtcccggatatatccttgatgttactccagagaagattgaaaaaatgttcttcgatccattggattttggcattcctcgctgcacattggaagatctgaaaggaggcgatccagcgtttaatgcaaaagttctccaggatgttcttgctggtcaaaggggggcgattgcagatgcccttgttctaaatgccgcggcgtccctacttgtcagtggtagagtgaaaaattacatgacggtgttgcttagcccaggagacacagcggtccgggaaagccatcaatacacttgagtcttggataaaaacgtggatcgcctcctttcagatcttccaatgttcttcgatccattggattttggcattcctcgctgcacattggaagatctgaaaggaggcgatccagcgtttaatgcaaaagttctccaggatgttcttgctggtcaaaggggggcgattgcagatgcccttgttctaaatgctgcggcgtccctatttttcactttaccactgactagtag

SEQ ID NO: 259379 - DNA, 459 bp, Zea mays
aggaccggccgtaattctgtttgacccacgcgaataacaggcgcggcgaccggcttcaaccccaactcttcttcttcttcctcgcaaacttcgaacgggacgagaaggaagcggacgcgagaggagactaaccgacctcggatccatcgacgcgtgaagatgtcttcgcccgccgagtactacaaatcacttccacctataagcaaggcatatgggacattgtgtttctttaccaccgtgctagttcagctccagattttgcacccattatttctttacttagattaccccttggtgttcaagaagtttgagatatggaggctattgacaagtttctttttcctggcaccattttccatgaaatttggtattcgccttctgatgatagcaaggtatggtgtcatgttggaaaagggtgcatttgataagcggactgcagatttcttatggatgatgata

SEQ ID NO: 259380 - DNA, 519 bp, Zea mays
ccctccccacgcgtccgcccacgcgtccgctaccctccctcccctgcacctcttctccctacctttcccctcccataccctttcatccaagtaccctcttagggttggtcacatctaccttcgtcgatgtccgttctagttgttattataagttgtatctagctagtgcctaaggttggcggatgcatttttctcaatggaggtcgtttctgattggttacattggtagctggcatatttgtatgattattatcaagtgctcttctctggatttagtaagggaaaagaaagagaaaaggaacataaaatgtaatgcatcaataatagtaaataaatattcttgctctcactaacgccccgtttggatcctcggaatcgaattccattctaataatagtaatttaggcaaatatcaattaagctagtatagttttatgcaaaatatatttggatactattattaccttaatagcaatatgtgggagatatttatgtgctgcatttttactacagaggagt

SEQ ID NO: 259381 - DNA, 1659 bp, Zea mays
  unsure (1)..(1659): unsure at all n locations
tcgtgtcgcatactcgtcgcttccgctccacaggatcctctgcgccacccacaaccgtgtgaccgtccgtgctgccggcgaccccgatccgccgacccgtcccgtcccaccacaccctaccgccgctcgcagctatgtcgccgtcggagccgacgcgggaggagagcgtgtacatggccaagctggcagagcaggcggagcggtacgaggagatggtcgagttcatggagcgcgtcgcgcgctccgccggcggcgccggcggaggggaggagctctccgtggaggagcgcaacctgctgtccgtcgcctacaagaacgtcatcggcgcccgcagggcctcgtggcggatcatctcctccatcgagcagaaggaggagggccgcgggaacgaggcgcacgccgccttcatccgcgcctaccgctccaagatcgagaccgagctcgcccgcatctgcgacggcatcctcgccctgctcgactcccacctcgtcccatccgccggcggcgccgagtccaagggcttctacctcaagatgaanggtgactaccacaggtaccttgctgagttcaagtctggtgcagagaggaaggatgctgcggagagcaccatgaatgcctacaaagctgctcaggacattgctcttgcagatctggctccaacccaccccatcaggcttggccttgctctcaacttctcagtgttctactacgagatcctgaactcccctgatcgcgcctgcaaccttgcaaaacaggtttgcttcttctccttctatccccactttgtgatttgctttcattttgagaccctttgtgatttgttttaattttgagacatgatgtctcctggattgtgtgtagcttctgggcaacggattgagtgtgcataaacagctcctgtctccatcagcttatgtagggttttggttgattaaattaaaaaaagatggtgcaagggaaatagttcacttgcctcccatctgcatgcctattcactgaaacaatttttttcttacattaggcaccgtgtaagtgatgggtctaattactctgggtgctaacaaaatgcttcttttgctaccacccacggaggctgttgtttttttttcactcaatctgtcatgtcttcttgcatacatgttctactacatattgaacattgacaagctacaacctaatcattacaagtcacctacgccctgtttggatcaccggaattgaattccattctaataatagtaatttaggcatatatcaattaagctaattcggttttatgcaaaatatatttgtatactattattagcaagatgtcggagatatttatgtgctatatttttactatagaggagtgagacgaagagtgtcatgtaagtgatacagattagaaacaaattctaataatgcataaaatcatttcccatcctccaccctatgaatttgagataggcttatatctgaactttggaaagtggtggaatgtcaaattccaaactaaataagttactttattgagtgaattccaattcctttaaaatgaagggatccaaacgccccgtaaaggaatttgctatgaagacttaagtatattgtatcatttgtagaggacgaatttcacaaggcatttgatgatctttttgtactctaaatatcaccgag

SEQ ID NO: 259382 - DNA, 916 bp, Zea mays
cccacgcgtccgcccacgcgtccgcccacgcgtccgcggacgcgtgggctcgcccgcatctgcgacggcatcctcgccctgctcgactcccacctcgtcccatccgccggcggcgccgagtccaaggtcttctacctcaagatgaagggtgactaccacaggtaccttgctgagttcaagtctggtgcagagaggaaggatgctgcggagagcaccatgaatgcctacaaagctgctcaggacattgctcttgcagatctggctccaacccaccccatcaggcttggccttgctctcaacttctcagtgttctactacgagatcctgaactcccctgatcgcgcctgcaaccttgcaaaacaggccttcgatgaggcgatctctgagctagacagcctgggagaggagtcatacaaggacagcactctgatcatgcagctcctgcgcgacaacttgaccctatggacttccgacaccaacgaggatggcggcgacgagatcaaggatgctgctgccccgaaagaatctgcggagggtcagtaagatggattcagtctcacgacctgctgctgctgatgttgaggagtaaccagaaccagaaccgccgtcctcgattctgatagattatcttctagtataccttgtgttgttgctgttgttgtcgtcgtcgcgccggtgtatgcgatgaagctgccattgctgctgttttaattaagcattctagatgttataccgcatgctttgtttcggtttctaatgtcgataaatggtggccggatgctggttttcgtgctccgagccggccaccaggaagaagacctgcctgcccttgtgggtgcagcgttgttagaatgacctacggtgtatttgacttcgacaggcctgctgcctagtggactgatattctgttatgcgc

SEQ ID NO: 259383 - DNA, 707 bp, Zea mays
ttctctcgtacgcccacgcgtccgcccacgcgtccgcccacgcgtccgcccacgcgtccgcaggatcctctgcgccaccgcaaccgtgtgaccgcccgtgccgccggcgatcccgatccgccgacccgtcccagccccgctcgcagccatgtcgccgtcggagccgacgcgggaggagagcgtgtacatggccaagctggcggagcaggcggagcggtacgaggagatggtccagttcatggagcgcgtcgccgctacgccgagtccaaggtcttctacctcaagatgaagggtgactaccacaggtaccttgctgagttcaagtcaggtgcagagaggaaggatgctgcggagagcaccatgaatgcctacaaagctgctcaggtttgaccattgtgttcatactgataggatgacagtgcatatattgttaattgtggttctttcttgttggcttttggattgtaggatattgctcttgctgatctggctccaacccaccccatcaggctcgggcttgctctcaacttctcagtgttctactacgagatcctcaactgccctgaccgtgcttgcaaccttgaaagcaggccttggatgaggcatctccggctagacactcgggaaggagtctacaaggaagcattgatcatgagtctggtgcaattactatggatcgaacacgagagcgggataataggacagtg

SEQ ID NO: 259384 - DNA, 243 bp, Zea mays
cggttcggcagatccgggatgttctacgcgtccgtgaataagtccgcccacgcgtccgcccacgcgtccgcccacgcgttcgcggacgcgtgggccgttccagccccgctcgcagccatgtcgccgtcggagccgacgcgggaggagagcgtgtacatggccaagcttgcggagcaggcggagcggtacgaggagatggtcgagttcatggagcgcgtcgcgcgctacgccgggggcgcctga

SEQ ID NO: 259385 - DNA, 1115 bp, Zea mays
cccacgcgtccggacgccagcagcagggaacatcgtccatccgagctaagtaattaggtcgaaaatgacccgtgccagcagcagtagcagcagccggcgtgtgacgctggtactgctcggtctccgcctgctgcttctggttggtgttgcgcaggcggtagtggagttggtgcctgctgatgataatatcgccgccgccgctgctggcacggcggtggacgatggcgagccgcctcagcagtgcgcgaccccggtgagcgtggaggaggcgtgccgcggcgcgtccgagacgcacgccggcgtggcctacgaccactgcatggcgtcgctgggcgccgacccgcgcagcaaggaggccggcaacaagaacatgcacgggctggcggtgctggccaccaggatggccatcgaccacgccgtcagcaccgagtccaagatcgacgacctcctgcgcgacgcgctggacaaccttaaggcgaagatctacggcaaggccatggagcagctgaccgccgcaatgggcgcctccgagagctgcgaggacgcgtggaagggcgaggaggaggatgtccccgtcgccgcgcacgacagggagtacggtcggatggcgcacatcgccttcggattcacacaccacgccgccgtcgccgccgccgccgcatgaatcgattaattattatatatatatatgcatgctatctactatgatcgatcgcttctcgaccttcttgcatcgatctgcatgcatattataatttatattatattgatgccacgccgcatgcaggtctttccaaggcgtacgtactatatcaaattattttaatttccttacatgtatatgtatgtgctgctgttggatacgtacgtatatatatatgttctagggtttccccgtcccgaaaagttggataggaaagaaacagcacctcggaagaaacttgagacaaattggttgcaaagtgttactgggcagccaagaactcaagaaccaagctgtcggttatcacttaacgagaaattttctaattgggattctcctactttccgttcaaagagtactactggactaactgataaatcgagttgcaccatgttgcataaggataaatctt

SEQ ID NO: 259386 - DNA, 957 bp, Zea mays
cccacgcgtccgcccacgcgtccgcccacgcgtccgcccacgcgtccgaccattaattatccgctctctctctctctttcatttctatagccagcaggtagcaggcaggcaaccggccggtatattagtagatcttcgatcgttcatccaagctaataagtcagtaagcagcagtaggtcgaaaatggcgatgaggtcgctagcgctactggtcctcctcagcctgctggttgttggtgtggcgcaggcggtggagttggagatggagttggtgcctgctgatgcaattgcgatgactatggatcatgagccgccgcaggagtgcgcgaccccggtgagcgtggaggaggcgtgccgcggcgcgtcggagacgcacgccggcgtggcctacgaccactgcatggcgtcgctgggcgccgacccgcgcagcaaggaggccggcaacaagaacatgcacgcgctggcggtgctggccaccaggatggccatcgaccacgccgccagcaccgagtccaagatcgacgacctcgcggagctggaggcggcgtcgtcggatccgcaggcgcgcgcccgcttcaaccactgcctggagcagtacggcggcgccgccgacctcctccgcgacgcgctggacaacctcaaggcgaagatctacggcaaggccatggagcagctgaccgccgcaatgggcgcctccgagagctgcgaggacgcgtggaacggcgaggaggaggatgtccccgtcgccgcgcacgacagggagtacggtcggatggcgcacatcgccgtcggattcacacaccacgccgccgtcgccgccgccgccgcatgaatcgattaattagtatatatatatatgcatgctatctactatgatcgatcgcttctcgaccttcttgcatcgatctgcatgcatattataatttatattagattgatgccacgccgcatgcaggt

SEQ ID NO: 259387 - DNA, 719 bp, Zea mays
tctctctctttcatttctatagccagcaggtagcaggcaggcaaccggccggtatattagtagatcttcgatcgttcatccaagctaataagtcagtaagcagcagtaggtcgaaaatggcgatgaggtcgctagcgctactggtcctcctcagcctgctggttgttggtgtggcgcatgcggtggagttggagatggagttggtgcctgctgatgcaattgcgatgactatggatcatgagccgccgacctcctccgcgacgcgctggacaacctcaaggccaagatctacggcaaggccatggagcagctgaccgcggcgatgggcgcctccgagagctgcgaggacgcgtggaagggcgaggaagatgtccccgtcgccgcgcacgacagggagtacgggcggatggcgcacatcgccttcggattcacacaccacgccgccgccgccgcatgaatcatcatgtcatatgcatgcatcgcttctcttccttgtcgcattaattttcatgcgtccaatgattcatatctctatatgcatatctctctgctctgccttgttggctggctcttctcatcattccctagcagatcgcatagtattagttgcatgcattatattgatgatgcaggtatttcgtcgagcaacaaggcgtactatcaattgtttttgtaatacccaaaattagtgaataaagggaaactggttataaaaattt

SEQ ID NO: 259388 - DNA, 460 bp, Zea mays
ctgtggcaagaatgctggtctcagcagcagttcactcaagctccacttgcagaaggcacacaagaagatatcctctgggagcgtagacagtgcaatgactctggagatacaaaaagcattagaggcaatcaaagctggctggggcggcagtgacagcccagtgcataaatcacaatcacacatagaaggattttgacgtttaatcttacgttcctacggtcctattaatatatcaacaaggctggtagtcggcgaccgctttaagagtgaagcctcagctctagacttcatgacacttgtaagtagcacatttttggaacatttggtttttattctatagttcatgagcttggattgacaagaaccatccatagagggaatgtagtttctgttataaaattgtgcgattcttttttcatgaaacttgtacgagatgagcattcagattctttggatatac

SEQ ID NO: 259389 - DNA, 756 bp, Zea mays
atccagattccagcagcaacatctgcatcgaggattgctacatttctactggtgacgattccatcgccatcaagagtggctgggatgagtatggaatcgcctatggccgcgccagttctggcatcaccgtgcggcggatcacaggctcctccccgtttgctggcttcgcggtcggaagcgagacatcaggtggcgtggagaacgtccttgcagagcacttgaacttcttcaactcagggtttgggatccatgtcaagaccaacacaggcaggggcggcttcatcaggaacatcactgtctcggatgtgacgctggataacgtccggtacggcctgcggatcgttggcgatgtcggcaatcaccccgacgacagctacaaccggagtgcgctcccgatcgtcgacgcccttacggtaaagaatgtccagggccagaacgtcagggaggctgggctgatcaagggcatccccaactcggccttctcccggatctgcctgtcgaacgtcaagttcactggtggcgcacctgtctggccgtggaagtgcgaggctgtcagcggtggcgctctcgacgtgcagccgtcaccatgcacagaactgacttcaacgtcttggaccagcttctgtacaaattcgctttgatgctttggcagctagcttaacctgttgtaatcctccggatttaccaagatggattccggtgccttaaagcttgggcacccaaggatttatcttcccgaaaattaatttggtttta

SEQ ID NO: 259390 - DNA, 454 bp, Zea mays
  unsure (1)..(454): unsure at all n locations
tacggtaaaaaatgtccagggcaaaaagttcaggaaggttgggctgatcaagggcatccccaactcggccttctcccggatctgcctgtcgaacgtcaagttcactggtggcgcgcctgtccggccgtggaagtgcgaggctgtcagcggtggcgctctcgacgtgcagccgtccccgtgcacagaactgacttccacgtctgggacgagcttctgtacaaattcgctttgatgctttgccagctagctgagcctgagctgctgctatgcttctgtatctacgagtatgtatactggtgctttaaagcttgggcacccaagtatttatcttccacaaccctaatttggttttactcacttatttgaacctctctatacgaagagaataattcttgactcgtataggactgaaaaaaaaaaaaaaaaaaagcgcggccgccccgggtnttccggt

SEQ ID NO: 259391 - DNA, 997 bp, Zea mays
tacacacgcgtccgcccacgcgtccggcttgttagcacaaataaacagatcgatcgattacagcaatggcggccaaggtgttcctcctcctccgactcagcatggtcgccgtcgtcctggctgccatcgccacagtagcgctcgcggaggaagccgatccgcgggcactgccggcacagtggaccaccgcgaagaagtacaaggccacgatggacgccaagacgcggcaggctttcgacggcgtggtggccgccgctacggcagagaagcggtcccaggcggtggaggccgtgctgcagcagcagctgaacatggacgtgtccctgtccaaggcgacgtcttccggggacgagaacaactacgtgagcgtggccgccgcctacgagaaggccgcgggcgccgtcatcgcggcgacgccggacaacaagctccgcgctatggcgttcgcgttcgacggcgcggtggcgccggacccgggccggtgccccgccgtcgacaagcccttctgcgagacctacgccaagacggagaaggccttcagcggaaccatcgcctacggggacacgcccaagagcaagctggggatcacggacgccgtgctcaagctgaggctcgccaccgacgccaacatcaacaaggcctacgcggagggggacaaggacaagatcgcaaaaatccttgctgcatacggccaggcggacgacgcggtcgctgcggccccgcctcccgagaagctcaaagtcatggagaagaccttctcggcggtcgccgccgccgctcatcaggaggcggcggcggctgctgctgctgctgcagtgattaaggtttaagggagagctcctgcatgaaattaaccacacgtccacacgtatacactacggaacaagtgtttccatcagacgaccatcagtgaaaaaaaaccatccttctctgtgtgtgtgccgtgtttttgtcatttcttctttccattggcaaagaaaccgggtaaccttttttt

SEQ ID NO: 259392 - DNA, 549 bp, Zea mays
cttacgcgtggctttgtttgcaaagctcctcctcgatccatcgatcactgcaccggccggcggcaccgcgctcgcaggggctagccaacgagacggcagcaatggcggaccgtgaccgcagcggcatctacggcggcgcccacgccacctacgggcagcagcagcagcagggaggaggcgggcgcccgatgggtgagcaggtgaagggcatgctccacgacaaggggccgacggcgtcgcaggcgctgacggtggcgacgctgttcccgctgggcgggctgctgctggtgctgtcggggctggcgctgacggcctccgtggtggggctggccgtggccacgccggtgttcctgatcttcagccccgtgctcgtccccgccgcgctgctcatcgggacggccgtcatggggttcctcacgtcgggcgcgctggggctcggcggcctgtcctcgctcacgtgcctcgccaacacggcgcggcaggcgttccagcgcaccccggactacgtggaggaggcgcgccgcaggatgccggcgccggggtgagtgc

SEQ ID NO: 259393 - DNA, 1899 bp, Zea mays
ctggtcgcctgcgggtgccgccccggcttctggccggccaccccgccttctccacgcgtccgggctccctcctcctccctgcaaatcctgcagacaccaccgctcgtttttctctccgggacaggagaaaaggggagagagaggtgaggcgcggtgtccgcccgatctgctctgccccgacgcagctgttacgacctcctcagtctcagtcaggagcaagatgggtgccggcggcaggatgaccgagaaggagcgggagaagcaggagcagctcgcccgagctaccggtggcgccgcgatgcagcggtcgccggtggagaagcctccgttcactctgggtcagatcaagaaggccatcccgccacactgcttcgagcgctcggtgctcaagtccttctcgtacgtggtccacgacctggtgatcgccgcggcgctcctctacttcgcgctggccatcataccggcgctcccaagcccgctccgctacgccgcctggccgctgtactggatcgcgcaggggtgcgtgtgcaccggcgtgtgggtcatcgcgcacgagtgcggccaccacgccttctcggactactcgctcctggacgacgtggtcggcctggtgctgcactcgtcgctcatggtgccctacttctcgtggaagtacagccaccggcgccaccactccaacacggggtccctggagcgcgacgaggtgttcgtgcccaagaagaaggaggcgctgccgtggtacaccccgtacgtgtacaacaacccggtcggccgggtggtgcacatcgtggtgcagctcaccctcgggtggccgctgtacctggcgaccaacgcgtcggggcggccgtacccgcgcttcgcctgccacttcgacccctacggccccatctacaacgaccgggagcgcgcccagatcttcgtctcggacgccggcgtcgtggccgtggcgttcgggctgtacaagctggcggcggcgttcggggtctggtgggtggtgcgcgtgtacgccgtgccgctgctgatcgtgaacgcgtggctggtgctcatcacctacctgcagcacacccacccgtcgctcccccactacgactcgagcgagtgggactggctgcgcggcgcgctggccaccatggaccgcgactacggcatcctcaaccgcgtgttccacaacatcacggacacgcacgtcgcgcaccacctcttctccaccatgccgcactaccacgccatggaggccaccaaggcgatcaggcccatcctcggcgactactaccacttcgacccgacccctgttgccaaggcgacctggcgcgaggccagggagtgcatctacgtcgagcccgaggaccgcaagggcgtcttctggtacaacaagaagttctagccgccgccgctcgcagagctgagaggacgctaccataggaatgggagcaggaaccaggaggaggagacggtactcgccccaaagtctccgtctacctatctaatcgttagtcgtcagtcttttagacgggaagagagatcatttgggcacagagacgaaggcttactgcagtgccatcgctagagctgccatcaagtacaagtaggcaaattcgtcaacttagtgtgtcccatgttgtttttcttagtcgtcgctgctgtaggctttccggcggcggtcgtttgtgtggttggcatccgtggccatgcctgtgcgtgcgtggccgcgcttgtcgtgtgcgtctgtcgtcgcgttggcgtcgtctcttcgtgctccccgtgtgttgttgacttgttgtaaaacaagaagatgttttctggtgtctttggcggaataacagatcgtccgaacgacaacctttttataagaaaaaaaaaaaaaaaaaaaaaaaaaaaaaaaaaaaaaagggcggccgc

SEQ ID NO: 259394 - DNA, 624 bp, Zea mays
ctcaaccgcgtgttcctccacatcacggacacgcacgtcgcgcaccacctcttctccaccatgccgcactaccacgccgtggaggccaccagggcgatcaggcccgtcctcggcgagtactaccagttcgacccgacccctgtcgccaaggccacctggcgcgaggccagggagtgcatctacgtcgagcctgagaaccgcaaccgcaagggcgtcttctggtacaacagcaagttctagccgccgcttgcagagctgagggcgtgctttttccctaggaatgggaggagaaatcaggaggagaagatggtaatgtctccatctacctgtctaatgggtagtcaccagtctgtagacaggaagagagcatttgggcttcagagaaggaggcttactgcactactgcagtgccatcgctagatctgccactgccatcgagtacaagtaggcaaatttagtgtgtctgtgcccatggctgtgagctttgggtactctcaagtagtcaagttctcttgtttttgtttttagtcgtcgctgttgtaggcttgccggcggcggtcgttgcgtggccgcgccttgtcgtgtgcgtcttgccatctcttcgtgctcccttcgtgttgttgt

SEQ ID NO: 259395 - DNA, 608 bp, Zea mays
ttggattcgtgggcggacgcgtgggcggacgcgtgggcggacgcgtgggcggacgcgtgggcgcgaggccagggagtgcatctacgtcgagcccgaggaccgcaagggcgtcttctggtacaacaagaagttctagccgccgccgctcgcagagctgagaggacgctaccataggaatgggagcaggaaccaggaggaggagacggtactcgccccaaagtctccgtcaacctatctaatcgttagtcgtcagtcttttagacgggaagagagatcatttgggcacagagacgaaggcttactgcagtgccatcgctagagctgccatcaagtacaagtaggcaaattcgtcaacttagtgtgtcccatgttgtttttcttagtcgtccgctgctgtaggctttccggcggcggtcgtttgtgtggttggcatccgtggccatgcctgtgcgtgcgtgcccgcgcttgcatgtgtgcgtcagtgaggtgttgatgttgtctctttgtgctaaagcccatgcatctccgctgttgttgtcctctctatagatataagaccttcaaggtgtcaattcagcatagagttttcgttaaaaaaaaaaaaaaag

SEQ ID NO: 259396 - DNA, 712 bp, Zea mays
cccacgcgtccggtgggactggctgcgcggcgcgctcgccaccgtcgaccgagactacggcgtcctcaaccgcgtgttccaccacatcacggacacgcacgtcgcgcaccacctcttctacaccatgccgcactaccacgccgtggaggccaccagggcgatcaggcccgtcctcggcgagtactaccagttcgacccgacccctgtcgccaaggccacctggcgcgaggccagggagtgcatctacgtcgagcctgagaaccgcaaccgcaagggcgtcttctggtacaacagcaagttctagccgccgcttgctttttccctaggaatgggaggagaaatcaggatgagaagatggtaatgtctgcatctacctgtctaatggttagtcaccagtctttagacaggaagagagcatttgggcttcagaaaaggaggcttactgcactactgcagtgccatcgctagatttaaggcaaattcagtgtgtctgtgcccatggctgtgagctttgggtactctcaagtagtcaagttctcttgtttttgtttttagtcgtcgctgttgtaggcttgccggcggcggtcgttgcgtggccgcgccttgtcgtgtgcgtcttgccatctcttcgtgctcccttcgtgttgttgtaaaacactagtctggtgtctttggcggaataacagatcctcgaacgacaacgttttcgtgc

SEQ ID NO: 259397 - DNA, 667 bp, Zea mays
ttccttcaaatcctgcagacaccaccgctcgtttttctctccgggacaggagaaaaggggagagagaggtgaggcgcggtgtccgcccgatctgctctgccccgacgcagctgttacgacgacgtggtcggcctggtgctgcactcgtcgctcatggtgccctacttctcgtggaagtacagccaccggcgccaccactccaacacggggtccgcccgacgcgtccgcccacgcgtccggtgcccaagaagaaggaggcgctgccgtggtacaccccgtacgtgtacaacaacccggtcggccggctggtgcacatcgtggtgcagctcaccctcgggtggccgctgtacctggcgaccaacgcgtcggggcggccgtacccgcgcttcgcctgccacttcgacccctacggccccatctacaacgaccgggagcgcgcccagatcttcgtctcggacgccggcgttcgtggccgtggcgttcgggctgtacaagctgcgcgcggcgttcggggtctgtggggtggtgcgcgtgtacaccgtgccgctgctgatcgtgaacgcgtggctggtgctcatcacctacctgcagcacacccacccgtcgctcccccactacgactcgagcgagtgggactggctgcgcggcgcgctggccaccatggacc

SEQ ID NO: 259398 - DNA, 290 bp, Zea mays
cggctcgagtgcctgcaaagctgcttgatccatcatcgatcacatcactccaccagccgcagcgcacgaacgtacgactcatggcagatcgcgaccgcagcggcatctacggcggcggcgcctacgggcagcagcaggggggcggccgcccgatgggtgagcaggtgaagggcatgatccacgacaaggggccgacggcgtcccaggcgctgacggtggcgacgctgttccctttgggcgggcagctcttggtactgtcgggcctggcgctggcggcctccacggttggg

SEQ ID NO: 259399 - DNA, 415 bp, Zea mays
ccaccaaggcgatcaggcccatcctcggcgactactaccacttcgacccgtctacctatctaatcgttagtcgtcagtcttttagacgggaagagagatcatttgggcacagagacgaaggcttactgcagtgccatcgctagagctgccatcaagtacaagtaggcaaattcgtcaacttagtgtgtcccatgttgtttttcttagtcgtccgctgctgtaggctttccggcggcggtcgtttgtgtggttggcatccgtggccatgcctgtgcgtgcgtggccgcgcttgtcgtgtgcgtctgtcgtcgcgttggcgtcgtctcttcgtgctcacccgtgtgttgttgacttgttgtaaaacaagaagatgttttctggtgtcaaaaaaaaaaaaaaaaaggggcggccgccg

SEQ ID NO: 259400 - DNA, 820 bp, Zea mays
  unsure (1)..(820): unsure at all n locations
cccaagtanccgctgcagacaccaccgctcggngcagttgcttttcaaagaaaaggggctgagagtgcagaggcgcggtgtccgcccgatctgctctgccccgacgcagctgttacgacctcctcagtctcaggagcaagatgggtgccggcggcaggatgaccgaaaaggagcgggagaagcaggagcagctcgcccgagctaccggtggcgccgcgatgcagcggtcgccggtggagaagcctccgttcactctgggtcagatcaagaaggccataccgccacactggttcaagcgctcggtgctcaagtccttctcgaccgtgggacacgacctggtgatcgccgcggcgctcctctacttggcgctggccatcataccggcgctcccaagcccgcttcgatacgcctggatcgcgcaggggtgcgtgtgcaccggcgtgtgggtcatcgcgcacgagtgcggccaccacgccttctcggactactcgttcctggacgacgtggtcggcctggtgctgcactcgtcgctcatggtgccctacttctcgtggaagtacagccaccggcgccaccactccaacacggggtccctggagcgcgacgaggtgttcgtgcccaagaagaaggaggcgctgccgtggtacaccccgtacgtgtacaacaacccggtcggccgggtggtgcatatcgtggtgcagctcaccctcgggtggccgctgtacctggcgaccaacgcgtcggggcggtcgtactcgcgctttgcctgccacttcgaccccacggccccatctacaacgaccgggagcgcgcccagatc

SEQ ID NO: 259401 - DNA, 1343 bp, Zea mays
agacacgcgtccgggacgcgtggggaagaaactccaatgctgtgtctttggaagcaaacaaggggactaattcaatgccattccagaaatctagtgggtcaaatgattgccatgtgaaacttagaattaagtcttttaacgtgcctgaacttcttgttgaaatcccagaaagtgcaactgttggctcactaaagaaaactgttctcgaggcagtgactgcgattctcggaggtggtctacgtgttggtgttcttcaccatggaaagaaagttagagatgataataaaacgttgattcaggctggtattggtcaggaggatatgctggacaaccttggcttttcacttgaacccaactgtacacaaaacccacaagtccaagctcctgaagatatcagtttcctggaaaccattgatactgctgaacccctcgcaaggattgcacctgctgactcgtcttctaagcttggtgaagttgacgtatcacaggagcttgcattaaccccattagcaatgaactaccagggcagtgatcatgattccgtgcactcccctggggctgtctcgtcgcgcgataaagactcgcgagccttatttctggttccagctgcagatcccaatgcaggagctgtagttccagcaaataagactaagaggtcaccagagcagggacaccgcagaatcaggcggccgttctctgttgctgaagtagaagcacttgtgctcgcagtcgaaaagcttggaaccggaaggtggcgagatgttaaacttcgcgcttttgacaatgcaaagcaccgtacctacgttgaccttaaggacaaatggaagacgctggtgcacaccgcgagcatctcgccgcagcagcggcgtggcgagccggtgcctcaggagctgctcgaccgggtcctggcggcccaggcctactggtcccagcagcaagccaagctccagcctaagacgcccccgctgctggctgaggctcgcttgctcacctaataaattcgatgatcctggctgatggcctcctccgaggccgttgcagcccttgtataaagtcagtaagtcagtcagtcccttcacaggaggtttaaggaagatataatattaggggaaaaaaagaatgcatatataaggtacaagaagcattgaccgatttgttgtaatatctactcaccaccggttattctttaagccaggattctctctccttgtgaatttaaccaaaggaaagggcatttctttggcaattgtacattttgatgatggaagaagaagatgatccttgaactgagatctgcagtgtctacctactaaaaacaaacaacaaaaataaaaaccaggtcc

SEQ ID NO: 259402 - DNA, 1103 bp, Zea mays
  unsure (1)..(1103): unsure at all n locations
gtcacggactcgcgtccacaaaccacaaccagctcactcaagaacaaagaacccaacccatggcttctcccaagccgctcctcctgctcgccacctcgttcctgagctgcggcctcctggtggccgccgactacgccccaatgaccctgaccgtggtgaacaactgcccctacccggtgtggccgggcatccaggccaactccgggcacgacgtcctggagggcggcggcttcttcctcccgccgctctcccacaagtccttcccggcgccggcccacccctggtccggccgcatctgggcgcgcacgggctgcgcgggcgccggcgcgcagctccactgcgccacgggcgactgcggcgggcggctccagtgcggcgggctcggcggcgcggcgcccgcgacgctggcgcaggtgaacctccaccacggcaacgaccagacctcgtacggcgtgagcgtggtggacggcttcaacgtgggcctgtccgtgaccccgcacgagggccgcggcaactgccccgtcctcgcctgccgcaagaacctcaccgagacctgccccggcgagctgcagctgcgctccccggccggcagcgtcctcgcgtgcaagagcggctgcgaggccttccgcaccgacgagctgtgctgccgcaacatgtacaacagcccgcacacctgccgcgcctccaagtactcggagttcttcaagcgagagtgcccgcaggccttcacctacgcgcacgacagcccctcgctcacccacgagtgcgccgcgccgcgcgagctcaaggtcatcttctgccactagagctcggagggctgggctgggctgggcgcgccgcgcccgcccgtgcgccgccgccgccaacaagtgtcgctagtagaggtagtaggatgcctggaatagctgtgggcctgtgggctgtggctgtgttcccgtcgtgtctgtggcggtgtggcctgtgtaggctgtctgtactctgtagtatactgggttgttggatgcatgcgttctggccgcaagactgatgtcatgctgttgctgcttactacagtttgcagtctgaaataaaaacttgtttgatgagcaaaaaatgagngaaaa

SEQ ID NO: 259403 - DNA, 523 bp, Zea mays
cacaagtccaagctcctgaagatatcagtttcctggaaaccattgatactgctgaacccctcgcaaggattgcacctgctgactcgtcttctaagcatggtgaagttgacctatcacaggagtttgcattaaccccattagcaatgaactaccagggcagtgatcatgattctgtgcactcccctgggggcgtctcatcgcccgataaagtctccacaaactcgcgagctttagttccagttccagctgcagatcccaatgcaggagctatagttccagcgaataagtctaagaggtcaccagagcaggggcaacgcagaatcaggcgcccgttctctgttgctgaagtagaagcacttgtgctcgcagtcgaaaagcttggaaccggaaggtggcgagatgttaaacttcgcgcgtttgacaatgcgaagcaccgtacctatgttgatcttaaggacaaatggaagacgctggtgcacaccgcgagcatctcgccgcagcagcggcgtggcgagcccgtgcc

SEQ ID NO: 259404 - DNA, 358 bp, Zea mays
gagctcaaggtcatcttctgccactagagctcggagggctgggctgggctgggcgcgccgcgccgcccgtgcgccgccgccgccaacgagtgtcgctagtagaggtagtaggatttgcggtgcgtgtgttgtctagtgtgtgctggaatagctgtgggcctgtgggctgtggctgtgttcccgtcgtgtctgtggcggtgtggcctgtgtaggctgtctgtactctgtagtatactgggttgttggatgcatgcgttctggccgcaagactgatgtcatgctgttgctgcttactacagtttgcagtctgaaataaaaacttgtttgatgagcaaaaaaaaaaaaaaaaaaaaaaaga

SEQ ID NO: 259405 - DNA, 1102 bp, Zea mays
ggacggcccgctctcgcgcccgatctcggggtcagacgcatacgcacccaggagatacagcgagcgagcgaccaaagccatggctctccgcaccctggcatcgaagaaggtcctatccttcccgttcggcggcgcgggccggccgttggcggcggcggcgtctgcgaggggggtgacgacggtcacactccccgacctctcctacgacttcggcgcgctggaaccggccatctcgggggagatcatgcgcttgcaccaccaaaagcaccacgccacctacgtcgccaactacaacaaggcgctggagcagcttgacactgccgtctccaagggcgacgcctccgctgtcgtccagctgcagggcgccatcaagttcaacggcggcggtcatgtgaaccattcaatcttctggaagaacctcaagcccattagcgaaggtggcggggagccgcctcatgggaaacttggctgggccatcgatgaggattttggttcgtttgaggcacttgtaaagaggatgaatgcagaaggcgctgctttacaaggatctggatgggtgtggttagctttggataaagaggcaaaaaagctttcagttgaaactacagctaatcaggatcctctggtgactaaaggtgcaagcttggttccgctgttggggattgatgtctgggagcatgcgtactacctgcagtacaagaatgttaggccggattacctgaacaacatctggaaggtgatgaactggaaatatgctggagaggtgtacgaaaatgttcttgcttgaattgtcttaacggacaatactcatctgcgcgcccgggtttcggctgtttgatcatgtgaaataaagatggacctgtctagcggctggaccttgtgtacatttcactgagatagactaatgcacggcctgccgattttgttcgtcctgcttgcgtgctactctgtctctgctcctagtttttggcatcatgtttatgttgagcaaggtgatgcccaagggaagccattcccactcttgtctccattaataaaatcagctgagcttccgatgtttgcttgaatttgttgccatgcgtttccaaaaaaaaaacggacg

SEQ ID NO: 259406 - DNA, 514 bp, Zea mays
cacgcaggttctctccaccaaaccttaacctccccttccagaaaccctccaagaggcagctcaaaggaatagtgagccgccccgccgctcctcagccatcctctccatctcggtgtcacacactccgcatacgcacctacgagagtcgagtgacagcgagcgagcgagcgagcgaagccatggctctccgcaccctggcatcgaagaacgccctatccttcgcgctcggcggcgcggcccggccgtcggcggcgtccgcgaggggggtgacgacggtcgcgctccccgacctctcctacgacttcggcgcgctggagccggccatctcgggggagatcatgcgcctgcaccaccagaagcaccacgccacctacgtcgccaactacaacaaggcgctggagcagctcgacgctgccgtcgccaagggcgacgcctccgctgtcgtccagctccagggcgccatcaagttcaacggcggcggtcatgtgaaccattcaatcttttggaagaacct

SEQ ID NO: 259407 - DNA, 1515 bp, Zea mays
gcgctcgggccctcgtaccctccttttcttccttgcgcgcggtcctccgatcgaactggcggaggcgagcggaggagagcagggcccccctgagggccctcccgcgcggcgaccccgtggcgttcctgcgcggctgctgctcgttcgggtcggcggcgcggaggcggcccaaggcctcgcccttgccctccccgccgcgcctgtccgccgctgcggcggcagcggacgacggggccaagatgaagggcctcttcaagtccaagccgcggacgcccgtggacatcgtgcggcagacgcgcgagtgcctcgtctacctcgacctccactcggactccaggagcggcgatgccaagcgcgaggagaagatgacagagctaagcaaaaatatcagggatatgaagtctatcctttacggcaatggtgaatcagagcctgtaactgaagcatgtgtacaattgacccaagaattcttcagggagaacactttacggctattaatcatacatcttccaaaactaaatttggagactaggaaagatgctactcaagttgttgcaaacttgcaaagacagcaagtatcctcaaagatagtagcgtctgagtacctagagtcaaataaagatctcttggacattttaattttagggtatgagaacatggacatcgctttacattatggtgctatgttgagggaatgtattcgccaccaaagcattgcaaggtatgttttagagtctgaacacatgaagaagttctttgactatatacagcttccaaattttgacatagcttctgatgcttcggctacctttaaggaactgttgacaaggcataaagcaaccgtggctgaatttctctccaacaattatgattggttctttgaagaatttaactctaggttgctgtcatcaaccaactacataacaaaaaggcaagctatcaagttgttgggagatatgctgctggatagatcaaatgctgcagtcatgatgcgctatgttagctccaaagacaaccttatgattttgatgaatctcttaagggattcgagtaaaaatattcaaattgaagcatttcacgtgttcaagctgtttgctgcgaataaaaacaaaccgcctgaggtcgtgaacatactggtcaccaatagaagcaagctacttcggttttttgctggattcaagattgacaaagaggatgaacagtttgaagcagacaaggagcaagtcataaaagaaatatcggcactttgagtatgcttgaggttgtaattagtttttgtgatgaattttcttttgctaagaaagtgcatgtgaaataataaacttctgtgtaatattctgttggaccaagaggaacaatgttactcattgactctagtacttggatactgccagcaaatgtgataattttaatagattttgtggttatccatgcccttattttatgggcgtgttccactgatacaaaatattgaaggatttagagacaaaaaaaaaaaaaaagggcggcaactaa

SEQ ID NO: 259408 - DNA, 852 bp, Zea mays
  unsure (1)..(852): unsure at all n locations
cccacgcgtccgcccacgcgtccgcccacgcgtccgcccacgcgcccgcggaccgtgcgatcttttggaagaacctcaagcctattagcgccggtggtggggagccgccacatgggaaacttggctgggccatcgatgaggattttggttcatttgaggcacttgtaaagaggatgaatgcagaaggcgctgctttacaaggatctggatgggtgtggttagctttggataaagaggcaaaaaagctttcagttgaaactacagctaatcaggatcctctggtgactaaaggtgcaagcttggttccgctgttggggattgatgtctgggagcatgcgtactacctgcagtacaagaatgttaggccggattacctgaacaacatctggaaggtgatgaactggaaatatgctggagaggtgtacgaaaatgttcttgcttgaattgtcttaatggacaatactcatctgcgcgggtttgttttcggctgtttgaccatgtgaaataaagatggacttgtgtacctgctggaccaagtgtacatttcgctaagatagactaacgcacaatggcctgccgattttgtccatcctgtattcctgcttgcgtgccactccactttctgctgctcgtagtggcaggcacatagtatgtgcttaacgttagactacggcacggccctttcagagttcgagcatggtgatgcccaaaagaaccatttctactcttgtctccattaataaaatctgccgaggtgccgatgtttgcttgaattaaaaaaaagaaggaaagatcccacaaaggaaaaacgnngnncgcgggggaaaaaaaaaaaaggggggccccccaatt

SEQ ID NO: 259409 - DNA, 597 bp, Zea mays
  unsure (1)..(597): unsure at all n locations
aggacgcgtcgcggagcatgggaaaatatcacattgaattaaattgtggaggcttctgggaaaaaaatttcggcagcatccttcgaactccatcttctcttggccggtctttctcncaccgccgcattaatagtttaccttccttcgatcggtcattctttcaagaccgtactggtagtttcacggagtgttctatagcagattcagagccacagttcgaaaacttgcagcttgaggacgaggactggttagtcaagccaccactgtccgcaggagcatatgctgccaatttcaatgatgaagaatggctggtcacaccactgaagcgctcccgtgtcatgaatggtattgaccatgaggatgaagagtggttagttaaggcgacgaaactgtctggtgccaaggatgctgatcttgaagctgaagagtggttagtcaagtcagggcagcctaacgatgctttggattcggacttccgcttcatacacgaattttctgaacaaggtgctgcagaacccttgcacatctatgtcagtgacaagaacgaggctgatttccagtatgtcaaggacatcctcaagaaatcagggttcagct

SEQ ID NO: 259410 - DNA, 1620 bp, Zea mays
  unsure (1)..(1620): unsure at all n locations
cggaccgtggagcggacgcgtgggtgctataactaccctcgttcgctctatctcctcctcacaaacctcccctggcacgagagtacgagaccacgcttctcgtgggatcgaacagctagggtttccaagatgttcgggcgcgcgccgaagaagagcgacaacacacggtactacgagatcctcggggtctccaaggacgcgtcccaggatgacctcaagaaggcctaccgcaaggccgccatcaagaaccaccccgacaagggcggcgatcccgagaagttcaaggagctagctcaggcttatgaggtcctcagtgatcctgaaaagcgagagatttatgatcaatatggtgaggatgccctcaaggagggaatgggaggtggtggagggatgcacgatccctttgacatattccagtcattctttggtggtggaagcccttttggaggtggtggcagcagtaggggcagaaggcagcgaaggggagaggatgtggttcatcctctgaaggtttctctggaggatttgtacaatggcacatcaaagaagctctctctgtcccgcagtgtcctctgctccaagtgcaatggtaagggttcaaagtctggagcttcatcgaggtgtgctggttgccaaggttctggctttaaggtccaaatccggcagttggggcctggaatgatccagcaaatgcagcatccttgcaacgagtgcaagggttctggagagacaatcagcgacaaggatagatgcccacagtgcaaaggtgataaagttgtgcaggagaagaaggttcttgaagtgtttgtggagaaaggcatgcagaatgggcagaagatcacattccctggtgaagctgatgaagcgcctgacactgccactggagatatcatctttgttctccagcagaaggagcatcccaagttcaagagaaagggcgatgacctcttctacgagcacaccctgaccttgactgaatctctgtgtggcttccagtttgttgtgactcacttggataacaggcagctgctgatcaaatcaaatccgggcgaagttgtgaagcctgctgggtggatctgaacatgaatgactctgncttggtgcatctggccaatacttactgtttaactacgaacttgcgcagattctttcaggcgatcacgacgaagcatgcccatgtaccagaggccgttcatgaagggcaagctgtacatccacttctcggtggagttcccggactcgctgagcccggagcagtgcaaggccctggaggctgtgctcccgcccaagccggtgtcgcagtacaccgacatggagctggacgagtgcgaggagacgatgccctatgacgtgaacatcgaagcggagatgcggaggcggcagcagcagcaccaggaggcctacgacgaggatgaggacatgccgggcggcgcgcaaagggtgcagtgcgcccagcagtaggcagcagtttggtagcggtgataaaatatttgacggcggcggaaaaatttgtgcgactactgttaggtccaaccgtccaattttacacgcgcgtattaatgttatgatcatacttgtctttgtttattaaaaaaaaatagtaacaaacaactacacagc

SEQ ID NO: 259411 - DNA, 1120 bp, Zea mays
ctggttgtcaaggttctggcttcaaggtccaaatccggcagttgggacctggtatgattcagcaaatgcagcatccttgcaacgagtgcaagggttctggagagaccgtcagcgacaaggatagatgcccacagtgcaagggtgataaagttgtgcacgagaagaaggttcttgaagtgtttgtggagaaaggcatgcagaatgggcagaagatcacattccctggtgaagctgatgaagcgcctgacactgtcactggagatatcatctttgttctccagcagaaggagcatcccaagttcaagagaaagggcgatgacctcttctacgagcacaccctgaccttgactgaatctctgtgtggcttccagtttgttgtgactcacttggataacaggcagctgctgatcaaatcaaatccgggcgaagttgtgaagcctgattctttcaaggcgatcaacgatgaaggcatgcccatgtaccagaggccgttcatgaagggcaagctgtacatccacttctcggtggagttcccggactcgctgagcccggagcagtgcaaggccctggaggctgtgctcccgcccaagccggtgtcgcagtacaccgacatggagctggacgagtgcgaggagacgatgtcgtacgacgtgaacatcgaagaggagatgcggaggcggcaacagcagcaccaggaggcctacgacgaggatgatgatgtgccaggcggtgggcagagggtgcagtgcgcccagcagtaggcagcttgcggtaagtctacccgcttgtattggcctgatgatacttcggttacacgagtgcagttatcggtctgttagttcaagttctgcgtttggggtgttagatccaccagaattagatttgttcggcaagctacgctcgaatacatctcaatggtgacaccttaatggtgctctgaaaacgtttgctagcttctcatgaagttgacaactcacggcttgtttgtgttcggttgtgtctgcattgaaatggattgaatccctcactaatcaaaattgattagaaggggttttagtcctctttctcttgtaaccgaacaaggcttaagggtgttgtgcaatatgaatttctttgatct

SEQ ID NO: 259412 - DNA, 506 bp, Zea mays
gcccaagccagtatcacagtacactgacatggagctggacgagtgcgaggagacaatgtcgtacgacgtgaacatcgaagaggagatgcggaggcggcaacagcagcaccaggaggcctacgacgaggatgatgatgtgccagacggtgggcagagggtccagtgcgcccagcagtaggcagcttgcggttgcagatcgtgggctgagccaaaccaacttatgagttgacttagcatcgagccttctttacctcgttgggtgggcgagctgagttcggttagctagcttgaatggtttccgcctcagttgttggcacaaagacacatgtttgaagtatctttatgggtgctctaaagacgcatctcatagaagacatactctaaagttgtatcttatagaagaaatttttcgggtgtttggtgtagctctagaggctagaactaatatttgctatatgaactttgggtctaaacttggcctatgaagatgtccatgtagcttgggg

SEQ ID NO: 259413 - DNA, 674 bp, Zea mays
gtgagagtggtgtttcactctgcacttgcgagggttacatcggtttgtaacaaaccctgagtacttgtgtaacccccacttgttcctgaggaatggaatcagattgcgtcaaaaaaaaaaaaaaaaataaaataaaaaagtaaacacaaagaggaaaaaagttagttctaaataaaatgaaataacaggcagctgctgatcaggtctgctccgggcgaagttgtgaagcctgattctttcaaggcgatcaacgacgaaggcatgcccatgtaccagaggccgttcatgaagggcaagctgtacatccacttctcggtggagttcccggactcgctgagcccggagcagtgcaaggccctggagcctgtgctcccgcccaagccggtgtcgcagtacaccgacatggagctggacgagtgcgaggagacgatgccctatgacgtgaacatcgaagcggagatgcggaggcggcagcagcagcaccaggaggcctacgacgaggatgaggacatgccgggcggcgcgcagagggtgcagtgcgcccagcagtaggcagcagtttggtagcggtgataaaatatttgacggcggcggaaaaatttgtgcgactactgttaggtccaaccgtccaattttacacgcgcgtattaatgttatgatcatacttgtctttg

SEQ ID NO: 259414 - DNA, 484 bp, Zea mays
atttcctaggatgagctgaaggcatggtggtctgctgctatgaagggtgagtggaagctaccgtcgaaggaagaactgggtgtgagactgggagaaaaagagctacttcgcgcgtagaatggaacggttgcgcagtactaaaatatggaggcttctattgtacccatcctactaggaaattatgagccagttgatgaggcatgaattatttcacgacttggccgcggttagtgtgaaaaggcgacgctgctatatatggtcatcacccttggtttgtccgttcgccagatatcacgattatcatatttatcggttgtaatataagcttcttgtattagcatatggtttaatattttttttcagatgggatgaggtcctgcgtgatatcctatctgtaaataggaaggcactagcagatctcgacaaatgtacaactggttttttttttttgagaaacttgaaataagatttatcgttccccccc

SEQ ID NO: 259415 - DNA, 801 bp, Zea mays
cggtctggggccgaccgacgcgtccacccccgcaatcaaaccatagcatcaatcatgtctggtcgttcgtggacaataatggcgcctctcctggcgtcgatgctgctcgtcgggctcgccgtgggctccgaggaggaggaggacggcggcggcaaaaagaagccccacgtcaaccacggcaagtttaaggcggagccgtggacggacgggcacgcgacgtactacggcgggcgcgacgggttaactgacaccacggacggcggcgcgtgcggctacaagggcgagctggggaaagactacggcaccctgacggcggccgtgggcccgtcgctgtacaccaacggcaccgggtgcggcgcgtgctatgagctcaagggccccaagggcaccgtggtggtgacggccaccaacgaggccccgccgccggtgagcgggcagaagggcgagcacttcgacctcaccataccggcgttcctcaagatcgccgaggagaaggccggcatcgtgcccatcacctaccgcaaggtggcgtgcgagaggaaaggcggcatccggtacacgatcacagggaaccagcactacagcgaggtgaaggtgaccaacgtgggcggcgccggggacgtcgtggcgctgtgggtgaagggcaacaagcgcgtcaagtggacgccgatgaagcgcagctggggccagctctggaccacggaggtcgacctcaccggcgagtcgctgacgttccgcgtcatgaccgccgaccaccgcaaggctacctcctggcacgtcacgccccgcgactggcagttc

SEQ ID NO: 259416 - DNA, 1319 bp, Zea mays
cccacgcgtctcttctcgcgtccgggcatcgccacaaagcccatctcacagccccgcagcctcttctcctcgtccatctcttccgcctccctccccgcgccgccgttcgccgaagccccgcgtcgcgtcgcgtagagtgcttgatggctgccgcaaggggcattaaccagcttctgaagagaattctccacaaccagtccgctggtccatggctgctttcttcatttcggggaaatcatgaagagtcctctgctggattgagagcattggcgcttcttggagttggtgcctccggtcttttgagttttgctacaatagcatctgctgatgaagctgagcatggtttggcagccccagattatccgtggccacatgctggcatcatgagctcttatgatcatgcatcaattcgccgagggcatcaagtttacacacaagtttgtgcctcttgtcactccatgtccttgatttcataccgtgatttggttggcgtggcctatactgaagaggaaacaaaggcaatggctgctgagattgaggtagttgatggtcctaatgatgagggtgaaatgttcacccgccctggtaaactgagcgatcgcttcccacagccttatgcaaacgagcaagcagcccggtttgctaatggtggtgcataccctccggaccttagtctcatcacaaaggcaaggcacaatggtcagaactatgttttcgctcttcttactggatatcatgatccacctgctggtgttcagattcgtgagggtctgcactacaatccctacttccctggtggtgccatagccatgccgaagatgcttaatgatggagctgttgagtatgaggatggtacacctgcaactgaagcccagatgggtaaggatgtcgtatcattcctttcgtgggcagctgagcctgagatggaagagagaaagctgatgggagtgaaatggatctttctactatcactagcgcttctccaagctgcctactaccgccgcatgaggtggtcagtcttgaagtcccgaaagctggtcctggatgtcgtcaactgaggactatcattaccctttttttattgaaatatgttgagccgttaaggagcattcaaaataatgagttggtggtgtacaattttgccactggggctaggttccatgcctagaaattattttgttttctttactctgctgagctgcaaaagcatttcaccaagggagtacatttcacggttttttttggtttgcaatgcctcaatgttatcagcaaccttgtaacttaacagctgatgagagttgataaattcttgtgctatg

SEQ ID NO: 259417 - DNA, 525 bp, Zea mays
caaacccaaagaccggcaccccgacgggtccgagcccgcggcgcatcgcggcatcggcatcgccacaaggccctctcacgctcacgcccccggacccttctccccgcgccgccgctcgccggagctccgcgtctccgcccgcgccacaccctgtagaatcctcaatggctgccgcaaggggcattaaccagctcctgaagagaactctctacaaccagtctgctggttcgtcgccgcttttctcatttcggggaaagcatgaagaatcctctgctggactgagagcattggctcttcttggagttggtgcctctggtcttttgagtttttctacaatagcatctgctgatgaagctgagcatggcttggcagccccagattatccctggccacatgctggcatcatgagctcgtatgatcacgcatcaattcggcgtgggcatcaagtttacacgcaagtttgtgcctcttggcactccatgtccttgatttcataccgtgatttggttggcgtggcctatactg

SEQ ID NO: 259418 - DNA, 1162 bp, Zea mays
acggacgcgtggggttctttgaaacccacagatattttggtttggagcctaatcaagtgacatttttccaacagggtactattccatgtgtatctcatgatggaagatttattatggagacaccatataaggtagcaaaggctcccgatggcaatggcggagtatatgctgctctaaaatctaaaaggttgctcgatgatatggctgcaaaaggtgttaagtatgtagattgctatggagttgataatgtattggtccgtgttgcagatccaacattcctaggatacttcattgacagaggtgtatctgctgctgctaaggttgtcaggaaggcatatccacaagagaaagttggagtatttgttcagcgtggaaagggtggacccctctctgtagttgaatacagtgaaatggatgcagctatgacaactgaaatcaatcaaactactggccgccttcgttattgctggagcaatatctgcttgcatatgtttactttggattttctgaaccaagtgacaaacagtcttgaaaaggatagcatttaccatctagccgagaagagaattccttcagttcaagggtacacatcaggattaaagcttgaacaatttatatttgatgtatgcaactattctccttcaacagctctttttgaggttttgcgtgaggaggaatttgcgccagtgaagaatgctaatggtgcaacttatgacactcctgacagtgccagattaatgctgcttcggctacatagccgctgggtggttgctgcaggtggcttcttgactcattctgtgcccttgtatatgacaggagttgaagtttctccgctttgctcttatgctggagagaatctagaagctatatgcagtggaagaacattccatgcaccaagtgagatttcattctaggcatagtagttgttgcaagcaatctgaatacaggaagatgagatcaggccaattttgattacaacatgactactcttgcaaatagaatgttgatattagtaaactattgtatgttatgcaaggatcaaatattgtaacgcagcacctgaagttgcctcctttctcccctagcattaatgtgtatctgcctttcgaatgtagattatgacatgctttagtgtaatatttttttttgaaaacagcatatg

SEQ ID NO: 259419 - DNA, 1025 bp, Zea mays
gcgagctggcggacggaacgacgacgatggcgaggagcggcggcgggatggaaggcaacaagtgggcgcgcatcttcaagcacctctcacgaaggacggacaacgagatcaagaactactggaacacgcgcttgaagcgccggcagcgcgcgggcctgccgccctacccgacggacgtcgagcggcagatcaagctgctgcgcgcgcagaacgtcaacccgttcgcagacgcagacgccgacgccggccacgccaacgccagcgccggccttccggggccgccgctcctgtacgacgtctgaaacccgttcgcgttgctctccagcataccgtcactgtcgcagacggcctcgcactcgcactcgccactgatcaaccagaactacccgcttctgaaccagatgcaggtgttccaccacctcggcggcagtcagcagccgtcgttccaccaggacggcagcgcggcggctttcggtgacatcgtctcctctcgcctgccgccactgccaaccgccagaacgcaggcggagctacattcgaaccaattcgacacctccatcagcggcgggctggtggatcagtcgatgctgatcggcgacgaacacctgctgcggcctaacccgagtatggtcaaggtctcctccatgcccgcgctctcctaccgtgagccggatgggtccaggatgctgccagcccatggcgccgggagcgacggcgacgtctcctcgctggggcaatgccctccgggacaggacctccaccgtggtgcgacatgggacttcaccttcgcggccgcgaagccggcgaagaggaggacggcgagcgaggtggggttctccgacatgttcgccgtcgcaccgccgggggattggttcggcggcgggtcgacggcgccatcgccggggccgtcatcggccgtcaccgacgaagagtttaacctggagatgcatcagttcatgtcaatgctaccactgtctgacgagcacggctggaacgcataatgcggccgggtaaaatggaaatcg

SEQ ID NO: 259420 - DNA, 1322 bp, Zea mays
cccacgcgtcctcgcgactggcattattcatgtggaacaaatcactacaaagtgctgatggataagtttcacctcgtatccactgccttcctggagcttggtcaaggctaccaaaaggcaatcgaagaagtcactaggcgaatgggtgcaggaatggcaaaatttatatgcaaggaggttgaaactgttgatgactatgacgagtattgtcactatgtagccgggctagttggttatggactttccaggctcttttatgctgctgggacagaagatctggctccagattcactatcaaattcaatgggtctctttttacagaaaactaatataattagggattatttggaggacataaatgagataccaaagtcccgcatgttctggcctcgagagatatggagtaaatatgcagataaacttgaggacttcaaatatgaggagaactccaaaaaagcagtacaatgcttgaacaatatggtgactgatgcactgattcatgctgaagagtgccttcagtacatgtcagccttgaaggatcatgccattttccgtttttgtgcaataccccagataatggcaattggaacatgtgctctttgctacaataacgtgcatgtctttagaggagttgtgaagatgagacgtggtctcacggcacgaataattgacgagacaaactcaatgacagatgtctatactgctttctatgagttttcttcattgatagagtcaaagattgatgacaatgatccaaatgctgctctaacacggagacacgtgaattcaataaagcaaacttgcaagtcatctggtttggtaaagaggagggggtaccatttggacacatcaccttacaggcctatgctgatcatgattgtcctcctgctggtggctatccttttcggggcactgtataccaagtgatgcacttgtagctggcctttttcccctatggagacgagacaaactctgccaatctgatccttttcgtactctgtagtccccaatggctgcaggaagttcgaaattactggctgtagaagtgtagatcatacggcagcatgctactgcttccatgactccgttactgctctcgattcgtttcttcattatgttttctcgcgcgttgtatcgtttgaagctgttttaagcaacggaaaaaaataccatgtgacacgtgtatcctacgaacatgggtttctgtttagttagcagtgggcgcactgtattatgttgtcttgttgacatgtcatgttttcaaagctgacgtgtttgtgtttaccagaattgtgtagtggagaacaacatttgccgccctg

SEQ ID NO: 259421 - DNA, 830 bp, Zea mays
catgtgctcttatctggggtattgcacatgttccaattgccattatctggggtattgcaattggaacatgtgctctttgctacaataacactcatgtctttagaggagttgtgaagatgagacgtggtctcacggcacgaataattgacgagacaaactcaatgacagatgtctatactgctttctatgagttttcttcattgatagagtcaaagattgatgacagtgatccaaatgctgctctaacacagagacgtgtggattcaataaagcaaacttgcaagtcatctggtttggtaaagcaaagggggtaccatttggagaagtcaccttacaggcctatgctgatcatgattgtcctcctgctggtagctattcttttcggggtaatgttctagctggccctttcttttccgcgatggagacttgagagaaactatgccaatcagatcctttttgtactgtgtattctccaaaggctgcagcaaattcggaagtactgactgtagatcgatacggctgcatgctactgtttccatgactccgttgctgctctcaattcgtttgttcattttactttctcgcgctttgtgttgtttgaagctgttttaaggcagaaaatactatcgtgacatgtatgatgtatcctacgaacatgtgtctcagtttagttagcaatggctgcactgtagttattctatgtgttgtcttgttttctgatatgtttgtgtttatcataactgcgtactctcccatggcgctaattatatttaatattatatgtatgtttagctaaattttaaaacatctaatgataatagttatgtact

SEQ ID NO: 259422 - DNA, 630 bp, Zea mays
aggttgaaataattatgtatgcaaggcatgctatccgcaccgccttctgtctgtacaaaattcttgagtacaaagaacgtgatatacacactaccggttgcgctcatcctgtactcaacccactagcctggcaccatcagtcttcatggttgcaagtgtcctcaaggagaatagagaaaatctgttacaagaagccagaggactggatgatcttatcaggatattgaacgatgtaaatgggaacttagatgctaagaaagcttgcgctggagcattgaaacttcacaaaaaatacctgaaaaaggtacaagcaaagaaaccttaaacgtgccatggaacacacgtccccaatggggctatcgttaccatttcaacatacacgaccattttctacacacaactttgagtgaagatttatcggacacaggtggtaatcgtctgacatgtcctgagatacacggagactgatggtgccaggctagtgggttgagtacaggatgagcgcaaccggtagtgtgtatatcacgttctttgtactcaagaattttgtacagacagaaggcggtgcggatagcatgccttgcatacataataatttcaatacaggttgaaaacttgaaatcaacacaa

SEQ ID NO: 259423 - DNA, 1178 bp, Zea mays
atggaaatgatattgatgaatctgcagaacgcattaccgataaacaaattatcgagtggaagctgacattgcatcaaattgggcttgacgttctacggactgatcgcaccatggtattttatgagaacaaagaaaacctttccaaattatgggatattctagccgtgtatgcatggattgacaaagatgttggttactgccaaggaatgagtgatttatgctcaccaatgatagttctactaaaggatgaagcagatgccttttggtgctttgagaaattgatgcgtagattgcgaggaaatttcagatgcacagatcaatctgtgggagttgccaaccaacttcaacaccttgcgtctattattcaggttcttgacccaaagctacatgaccacctagaaactcttggtggaggtgactacctttttgcgttccgtatgttcatggtgctttttaggcgtgaagtatcatttggagactccttatacctctgggagatgatgtgggctctggaatacgaccctgacattttcttcgcaacatgcgaagaacaaggtgcagtacataaaaataaagtttctaaatccaaactgaaaggactgcgccattttggcaagtgggataaggacaaggataaggaagatgataagaatggggctgaggacggtgaagatggtccggttccgatttcagtcttcatggttgcaagtgtcctcaaggagaagagagaaaagctgttacaagaagccagaggactggatgatcttatcaggatattgaacgatgtaaatgggaacttagatgctaagaaagcttgcgctggagcattgaaacttcacaaaaaatacctgaaaaaggtacaagcaaagaaaccttaaacgtgccatggaacacacgtccccaatggggctatccttaccatttcaacatacacgaccattttctacacaccacttttgagtgaagatttacaggacaaaggtggtagacgactgacatgttctcagatatggtaccaggctagtgggttgagtacaggatgagtgcaaccggtagtttgtattgtattgtatctcacgttctttgtactcaagaattttgttggctgtacaggcagaaggcggtgcgggtagcatgccttgcgtacataattatttgaatacaagttgaattgaaca

SEQ ID NO: 259424 - DNA, 1870 bp, Zea mays
aagtcgcattccagatctcccctgcctccgctgtataaatagaccctcaagctccctgcaacatccatcaaggcccaagctcagcgaccaccaagcagagcaagccagtgaggtctctcagagcgtagccagccagctacaatggcggggaacgcgctagccaactatgtccaggtctacgtcatgctcccgctggatgtcatcactgtcgacaacacgttcgagaaggaggacgagacgagggcgcagctgaagaagctgacggaggcgggcgccgacggggtcatgatcgacgtctggtgggggctggtggaagggaaggagccgggagtctacgactggagcgcctacaggcaggtgttcaagctggtgcaggaggccgggctgaagctgcaggccatcatgtcgtgccaccagtgcggcggcaacgtcggcgacgtcgtcaacatcccgatcccgcagtgggtgcgggacgtcggcaaaagcaaccccgacatcttctacaccaaccggagtgggctgacgaacatcgagtatctcacgcttggagtggacgaccagcctctcttccatgggagaactgccattcagctgtatgctgattacatgaagagcttcagggagaacatggcagacttcttggatgctggtgtcgttgtggacattgaggtgggacttggccctgctggcgagatgaggtacccatcgtatccccagagtcagggatgggtgttcccaggcgttggagaattcatatgctatgataagtacctgcaagcagacttcaaagcagcagcagaagaggctgggcatcctgagtgggatttgcctgatgatgctgggacgtacaatgacactcctgagaagacccagttctttgcggataacggaacataccagaccgacaaggggaagttcttcctcacatggtactcaaacaaactgatcaagcacggtgataagatcttggacgaagcaaacaaggtcttcctgggatgcaaggtgcagctggcaatcaaagtctctggcatacactggtggtacaacgttccaaaccatgcagctgagctcactgccggatactacaacctagatgacagagatggctacagaaccatagcacacatgctcacaaggcatcgtgctagcatgaacttcacttgtgctgagatgagggacagtgaacagagttcagaggcgaaaagtgcacctgaggaactggttcaacaggtgctgagtgccggatggagagagggcctaaatttggcatgtgaaaatgcactcaaccgatatgatgcaacagcttacaacaccatcctcaggaatgcaagacctcaaggcatcaacaagaatggccctccagaacacaagttgcacggattcacctacctccgagtatctgatgaactgttccaggaacagaactacaccactttcaaaacttttgtcaggagaatgcatgctaacctggattataatccaaatgtcgatccagttgcaccattggaaagatcaaaggcagagataccaattgaagaaatcctagaagtagcacagccaaaattggagccatttcccttcgacaaggacaccgacctaccagtttaaacactccaatgatgcaatctacaggaagaatcacagagacacttcaaaaatcaagacaaatagtaagcctattgtcgagcagtagtctattaactaaataaaatgctgtgtggagcatattataatcgcatattgccccaataatattgtgttgttaaacctgaggcttggtgattatctgatgagttgtaataatagccttggtcttcctgttgtatgtatgtatttgagctaaggaataaaaattgtggctttgtgggtt

SEQ ID NO: 259425 - DNA, 719 bp, Zea mays
tcgtcgggcgccacgcgtcgccaagaacctcctcgcctcctccattgaccaacaattaagcctccccgaccgccacatctattaggtgcagccatgggtgcctgtgcaacgaagcctaagacgcttgaggggaaagccccagctgaggccaccatctccacacccaaggttgcacctgagaccactaccatccacattgaggttgcggcaaaacatgcagtagttgagaaggtggaggaggacaaggaggaggcactaacagtggcggcgaaacaagagccagcagccaccattgagcctcagcagattgctagtgaggtgaccacttcggaagtggcggtcgtcgttgtcgagcctgagaacaaagaggaggaggaagttgtggagaagaccgtcatcgagaaggagaagccatcagcagtccatgcagaggaaaatattgccaccaacaaggtggcagccgagcccacgacagaattgaagaaagacaccgaggaggagatatagatggagaaggagaagccatcgctaagctaattgactgcatgtcaattggctgatgcctgatgatcaatgtgcaagaaagagatcgaccactaattggcatacatgtttaagtcgggagagagactcggtcaccttgtaaacaaaacaaacctttgatgtctcccgttttccctccatggggttctgataatacaacatcctggggcttattg

SEQ ID NO: 259426 - DNA, 1079 bp, Zea mays
accaagcgtccgcccacgcgtccgcccacgcgtccgcccacgcgccccatccgatccatcttgggcgggcgccgcgcgtcgagggccagccaaagcttgccatggcggccgtccggtccgacagggtccaccaccaccaccgccgctccgaggcgtcgtgtccggcaacctccgcggccgtggcggcggcgagggccgatgacgccctgcgccagcgcccgcgggggctcgtgcaggtccgggagcgggaccagggcccgctgtcgacggggcaccagcacctgcaccaccatcaccaccagctgcggcggtcggcggcgttcccaccccgccgcccggggccggggcgccgccctcctcagcgctgcgaaagcgacctcaacatcagggagcaccgctcctgcagcgaggtggccggcggcaccgcggcgggctgcgccgctgtgtgctgctgcttcccctgcgtcatggtggaggtcgcggtgctcgccacggtgcgcgcgcccgcggcgctgtgccgcaaggccgcccgcgtgcgcaagggccgcaggcgctctgcctccgcgggccaggccacggagatatacgagctcctcgtggacgacaccggcgtcgtcgaggtggatgccggcgccgccaatgcggtggcgctgcccgtgaagcccgccttgcagctggaggaaaagggggagctggagaaggaggtgtgggcgaggttctacggcaccggcttttggaggagcccgtcgcagctggacgacaacgacgacaggtgatcgggacaggcccgcgagcgagctatccacaagctcctccggcgatgcgtgggcttccttcgttttccgcgggaagaagagaggatcgaggaaagggaaacatgattgtgtgttcgatactacgattacgaacttcgttttcccttcttttttgtttgtttggaaggggaaatacttctcttctattctacaacaatgtcacgtacatgcaatgtaataataaaaaatgtatgtgatatatttaacaatgtgattgatgattgataaaaaaaaaaaaaaaaaagggcggcccggacgcgtggg

SEQ ID NO: 259427 - DNA, 2202 bp, Zea mays
cgcgggctgacacacgccccacgccgccccccctctccgcctcaaggctctcctctcggaggtctgataggcaacccaataatggcagaagtcctatcaggatctcatgaacaccgtctaagctctgccttagatggacactacgacgagaagaggaaatccaatgtggaatacacagaggacgagaagaaagccgtgatcgcggctctgaaaaagaaggctttgagcgcctcacagaagtttaggcattccatgaagagggggaggaagagcagcaaggtgatgtccatctcgattctggatgagcgtgaacctgaggaggtgcaggctgtggatgccttccgccagcttcttgtacttgaagagctgctaccatcgcagcatgatgactaccacatgatgctaagatttctcaaggcaagaaagtttgatatcgagaaggcaaagcaaatgtggtctgatatgctgaagtggagaaaggagttcggtgcagataccattctcgaggaattcgaattcgaagaagctgataaggtggcagaatgctaccctcaaggttaccatggggttgataaggaaggcaggcctgtctactttgaacggcttggacagatcgatgtgaataggctaatgcaggtcactacaatggatcgctttgtcaagaaccatgtcaaggagttcgagaagaactttgctgttaagttcccagcttgctcaatcgccgcgaagcaccatattgaccagagcacaacaattcttgacgtgcaaggagtggggatgaagcaattcagtaaagctgcaagggagctcattggcatgcttcagaagattgatggtgacaattatccagagaccctgtgccgcatgttcatcatcaatgcaggccagggattccggcttctatggggcaccgtcaagagctttcttgacccaaagaccactgcaaagattcatgttctgggtaacaagtatcagagcaagcttctcgaggtgattgatgctagtgagttgccagaaatttttggtggaacctgccgatgtgaaggtggttgcatgaaggctgacaaaggcccttggaaggaccccgaaatcatgaagatggttcaaagtggtgatgggaggtgtggatcactcggtacggcctctttcgaggctccggagaaaatgatttgtgaagacgacacgtatcctaagaaacaagctttgtttgatggggaaacacaattagctggagacgagcattctcagtcacagaaaatttcccgtggccggattgaacatcctcacgtgtcacctcttcacgaggaacttatccccacttcaattcatacccctggatcaccctattcttgtgatgtcccgatggttgaagaggccatagacgccatctgcaagagccacggaacaccaccagatgagaagattgccatcaccaaagctattataaatgtatcgaatggatccaagcccccactctttgctggcatcatagcacttgtgatgagcatcgcaacgatggtccgtctgacccgcagcatgatgcctgggaaggttctcggtgctgccataggtggagctaccctctcagaaggtaaatcaaaagtacaagagcgccagcggtccaagctatcagaagaggctgtggaggaagctgaagacgccgtctctgcaaagcgcctctcggagcttgaggagaaggtcattgcactcctgacaaaacccgcatcaatgcctgctgataaggaggaggttctgcaggctgctgtctcccgcgttagtgcactggaagaggagcttgcagctacaaagaagaccttgcaggagactcttgagcgtcagttggagatcgttgcatacattgagaagaagaagaaaagcaagcgtttctttcgttggtagaagcaaacagcagtgaattgttcacgcccacgagaaaaaaggttttgcgtgtgatggaagcgagctggtgcttgcgtatgccagcaagctgcgattctgagtgtaacacataaggatgttctttcattcttcttttttgttcccttgttgcatcaaattgtgccttaaccacgtcgatgtgctgccatattgtcaatccctgaaacggtcaatcatggatggaccgaatgcaatacaaatatattatactacacaataacgctacctttgctaaaatactggactcactcctaacaaataaat

SEQ ID NO: 259428 - DNA, 313 bp, Zea mays
cggacggtgggcggacgcgtgggttctaatcgtgttctaggactagtttttagggtcttgatggattggggtgagaaagagcatgggatgtacaatattgaccacctggatgtacttcctgaagtcttcaagcctggtcttatgtcaaagaagacccgtcaagaagcaggcaatttattttcatgcttggatgcttttctgaaggacgagcctctagggccagaggatatgtggtactgtcctgggtgcaaggaacacaggcaagctagcaagaaactggactcgaggaggttgcctgagatattggtagttc

SEQ ID NO: 259429 - DNA, 492 bp, Zea mays
gccacgcgtgcggccacgcgtgcgcttgtattctagcagcaaagcaaagaggatcggatcagaagaaaagaatagttaggtcccggtggtcgatcgaacgaagctgctgctgctaccggccggccgggcatgacgatgacacggacgatgtgcctaggcctgctgcttctactactggcggcggcgtcgacagcgacggcgcatttcacggtcggcgatgtggatgagtacgtgtccaagcgcacgcaggagtcccgccacaggaacaacggtggcgcgggcatcgatgacctcatctccagtgcggcgcgcttccacgccaacgtggatgcacgcgcctatggccgtagatccgacctgcaggaggaggcaacagctaccgtaataaccaaagcggaagcacaagaggcttcagctgaaggtggcgattaacctacctaaccatattatttattcattcatatgcatgcatccttgttgctatgccagcca

SEQ ID NO: 259430 - DNA, 444 bp, Zea mays
acgcccacgcgtccgcccacgcgtccggcaaattaaagagggatcggattggaactcgatcggaaggaaggtcctgcaggccggctggccggtcgtcgatcgaggaaccaagctgctgctgctgctaccggacgacaccaaccatgatacggaggacgacggtgtgcctaggcctgctgcttctactactggcggcgtcgactgcgacggcacatttctcgatcggcgacgtggacgagtacttgaacaggcgcacgcaggagtcccgccacaggaaccacggcggcgcgcagatcaatgacctcatctccagtgctgcgcgcttccacgccaacgtggatgcacgcgcgtatggtcgccgctccaacctgcagctgcaggaggaggaagcagcagctaccgcggtgcgtgtaaccaaagcagaagaacaggaggcttctactc

SEQ ID NO: 259431 - DNA, 628 bp, Zea mays
cccacgcgtccgcggacgcgtgggagatcccatagtgcaactggcagcctgcatgtaccccagcttaacccaatagcagctgatgtacttcgaaaggagcctgcacatgaaaccttcagtaaaagcaacatcacagctgttgagactccttctcctgatgaaattgaggcatacaaagttcttcagaaatgccttgagctgcgtcagaggtacatattcagagaagaagttgctccttgggaaaaagagatcataactgatcctagtactccaaagcctaatccaaatccgttcagttatgaacatcaggctaaaaccgatcaccatttcgaaatggttgatggcgtcattcatgtgtaccccaataaagattctaaagaaagactctatccagttgccgatgcaactaccttctttactgatatgcactacgtccttcgtgtgttggctgctggggatatccgaaccgtgtgtcatcaccgtttaaatcttctagagcaaaaatttaatcttcacttgatggtcaatacggatagagaactgcttgctcagaaagctgcacctcaccgggacttctacaatgttaggaaggttgatactcatgttcatcactcagcatgcatgaacc

SEQ ID NO: 259432 - DNA, 869 bp, Zea mays
  unsure (1)..(869): unsure at all n locations
ggaatttcccgggtgcgaccgcacgcgtnctcgcggacgtcgtgtgagtcgactccaagcgcgtccgtcggaccgccgtgggctggactgccgtgggtcctggaggacggtgagcaccatgtagtgctcgtatcggtagcaatggcttgagaggggcttgctgactggacataggcacatttgcaaacagctgtttgccttacactgggctgtatttgcttgggaactctctctttgggtggaactgccttgccccatggttctctcatcccactcgtactgctattcgacaacgctacaatcttgagggtagctttgaggctttcaccaggcaatgtgggtgctgcggcgatctggtcgaggacgaggagaggcgtgagcacctagaggccgcctgtgaccttgcaacccactacctctgccacccctgcgccctctgccaggagggtcgcgagctgcgccgcagggttccccaccctggattcaacaatgggcactccgtctttgtcatgatgccgcccatggagcagaccatggggcgtggcatgtgagctattccaccaccttccctgccctagttttatctgtgcttcccgtggtttatcatctgctgctgttggccttgatgtgtgatgtgtcgtttgttcgtcagtaaatacgagtttgtgatatgaggtcgtgctgggaactttggattgtttgcttcttatcgactgcagtttggattctggacagtcacttatctcctgtgttactgtgtttgtacggtggtcctcgatgggcctgtcaatgtgaaatgcatttcgtcgtaaaaaaaaaaaaaaaaaaaaaaaaaaaaaaaaaaaaaaagaaaaaaaaaaagaaaaagt

SEQ ID NO: 259433 - DNA, 1308 bp, Zea mays
attcgccggccgacgacgcgtccacacaccgtcaaagaaacaagcacacaagaacaaatacctcgccaccaacaatggcctccaggtcctccatcctgctcgccacggcgatgctggctgcgctgttcgcggttggtttgtgcaccaccccgctcaccttccaggtcggcaagggatccaagcctggccacctgatcctcacccccaatgttgccaccatatccgacgtggagatcaaagagcacggtggcgatgacttctcctttacgctcaaggagggcccgaccggcacctggacgctcgacaccaaggccccgctcaagtaccccctttgcatccgctttgctgtcaagtccggtggctaccgcatcgccgacgacgtcatccccgccgatttcaaggccggcaccacctataagaccacactcagcatctaatcagcctctgatgatgaattatatttcaaaagagctcatctggcgcacgtgttagcaagacaatattattttttctatggttattttgtggcaccaaaccacccaagaaataagtgatgctacatgtcccttctgacgccttgttgtgttgggttgatattattacataaactaaatacattatttatttaagattttaggagaaatatgttgatctggtccaccttcattacccttcgtcgtccccttccctcgcctcgcgttagtagcctgcttccgacccgcacatctccctccggttctcgccatgggcgccggcgccaacaaccacgaggagtcgagccccctcatcccagctgcggtcgccgcccccgcgtacgagaagcccccgcaggctccggcgccggaggcgccaattactatgccgacggggtcccggtcgtgatgggcgagcccgtgtcggcccacgccttcggcggcgtcccgcgggagagctggaactccgggatcctctcctgcctcggccgcaacgacgagttctgcagcagcgacgtcgaagtgtgtcttcttggaacggtagcaccatgtgtgctctatggtagcaatgttgagaggcttgctgctggacaaggcacatttgcaaacagctgtttgccttacactgggctgtatttgcttgggaactctctctttgggtggaactgccttgccccatggttctctcatcccactcgtactgctattcgacaacgctacaatcttgaggcaagtgttctgtgcacccagctttttgtacggttttcattcgtcagtatgtgggtatccatctctgtttgaaatttgtacatggtagtaattgaattgagactag

SEQ ID NO: 259434 - DNA, 644 bp, Zea mays
cggattatcggcacgaccacgcgtgcgacatccgtcaaagaaacaagtgcacacaaataaatacctggctcgctagattgccaagagcaatggcctttaggtcatccatcctgctcgccatggtggcgctggctacgctattcgcggtcggttcgtgcaccaccccgctcaccttccaggtcggcaagggctccaagcctggccacttggtcctcacccccaacgttgccaccatctctgacgtggagatcaaggagcacggtggcgacgacttctcctttacgctcaaggagggtccgactggcacttggacgcttgacaccaaggccccgctcaagtaccccctctgcatccgctttgctgtcaagtctggcggctaccgcatcgccgatgatgtcatccccgccaatttcaaggccggcaccacctacaagaccaccctcagcatctgatcagcctctgatgaggagaataatattttgaaagagctcatctgatccacgtgccagcgagccaatatttaatttttgtgctatggttattctgtggcaccacaccatccaatctcttcctgtgccttgttgtgttggttgattttattacatgaattgaaatacactgcttatttaagattcttttgggtg

SEQ ID NO: 259435 - DNA, 628 bp, Zea mays
atccatcagggatacaagattagacatcactacctctctagctcgccaccatcaatggactctatgttctccatcagtgctcgccaccacggcactgggtacatggtttgtgattggttcgtgcactaccccgctgcggatcagcgtctgcagacgttccaaatttttcaccctggtatttacccccaacattgccaccatctccgaagtggagatcaaggagcacggtggcgatgacttctcctttgagctcaaggagggcccggccggcacctggacgcttgacacaaatgccccactcaagtaccccctctgcatccgcttcgccaccgacgctcgcggctaccgcatcgccgatgatgtcatccccgccgatttcatggccggcaccacctacaagaccactctcagcatctgatgagcctgtgatgagtgatgacgaataatatttccagtccacgtgtcaacgagccaatatttaatttttttcctatgtttattttgtggcacaacaccatctcttcatgtgccttgttgtgttggattgattttattacatgaattgaatacactgtttatttaagattcttttgggtgaaatatagtgttcgggtctattttcaaaagg

SEQ ID NO: 259436 - DNA, 569 bp, Zea mays
tttatttggagccgaggaagccctcccctctgggcgcagccgcaccaccagaccgacaaccggccggcttccctcgcccccggcgaggagtgaagacaagccgacaaggcaaaaccatcgcctgtacggtatccaaccgccgtcccgccgcacaaccaaggatagggcgggagagggggatctcgctttcgctccgctgccgcatgcgcaccgcccctcctcatgacaccaactagggcaccaccagcccccttctcgtcgacctccgcgcggtgactctgctgagcatcatacccttatagggcccgacccatggatgtaacttcgaccgctgccgcctccgcctcaggcgggggtagggtggtacacgggcatgtccgcggataacatcaagggcctggtgctcgcgctctcctccagcctcttcatcggcgccagcttcattatcaagaagaagggactcaagaaggccgcatcctccggcgtcagagcggatacccacgcacatgacatctctgacttatgcccaaaatcgagaaggcttatgtcatgttatatctcggacgccc

SEQ ID NO: 259437 - DNA, 884 bp, Zea mays
ggacctggcggaccgtggtggtaccgggcatgtccgcggataacatcaagggcctggtgctcgcgctctcctccaacttcttcatcagtgcagttcattatcaagaagaagggactcaagaaggccgcatcctccggcgtcagagcgggggttggtggctattcttatttatatgagcctctttggtgggttggcatgataacaatgattgttggagaagttgcaaatttcgcagcttatgcatttgcaccggctattttggtcactcctctcggtgctcttagcattattatcagcgctgtgcttgcacatgtaatgctgcgggagaagctgcacatatttggaattcttggatgcgcgctatgtgttgtgggatccaccacaattgtccttcatgctccaccagagcgtgaaatcgagtcagtgacagaagtgtgggatctggctacggaaccagccttcatgtgttatgcagcagtggtaattgctatagctgccatacttgtttatcggtttgtcccactttatgggcagacacatgtcatggtctacataggtgtttgctctctcgttggttccatctcggtcatgagcgtgaaagctcttggtatagcattgaagctgaccttttcaggaacgaaccagcttatttacccacagacatgggcttttagtctggctgtcatctcatgtatcattacccaaatgaattacttgaacaaggcacttgacacgtttaatacagcagttgtgtcacccatttattataccatgttcacatctttaactatcttggcacgtgtcatcatggtcaagggcactaaatagtgattgagccactgtttcaaattcaccttcaaatggggacttccttggattgcatt

SEQ ID NO: 259438 - DNA, 1189 bp, Zea mays
  unsure (1)..(1189): unsure at all n locations
ctgaagattgggatggtactcgtgagtctaagagcaaaggaagtggctctaagaagagtgcctcaaggaaagggaaaaataggagcaaggtgtatggggctgataacgattttgttacttcccgatctggcaagaaaagatctagagaatcagctgatgatgataatactgaagaagaaccaacctcagacagtgaacctgacgttgaagacactgaacagaaaacaacggcgactgaatcacctgtcaatattagaagtgaacctctcacgacacgtcgccgcgcccttcaatcatggatggatggcagcagcatcagtactgtcgagttccctgatgggctacctccagctccttcgagaagcaagaaggacaagctttctgaagaggaaatgcttgcgaagaaggccgaagctgctcagaggcgcatgatgcaagtggaaaaggccactaaagaaagtgaggcggaagctataaggaaaatattgggcatcgactctgagaagaagaaagaagagaggaagcagaaggagcgaggagagaaggagcgagctagcagagcacaaaacatggcggcaaactcgatccgctgggtcatggggcccaccggaacagttatttcgtttccacacgcagtagtgcctccccagcatcttcgactccaagccacacagctatcctcctccacgggagaaatgcgctgggccatcgtgcacgaacgattacaagtacaggcactccaagctgaacctccccctctgcagcctcaagtgctacaaggccgtccaaggaaatgcttgatagggctcacggaacataatggtggggactggggagtttgtgctgtctccattggcatgccatctatggctggaaataaggcatgaagatgatgtgcatctatggtgggagttctaaaggatgcaatgcaataagggtctgcctgcaaatgtatagaaatggatatctatctacatgtagatttgtggggtagagatgtagaagatctttttgctgaacctgtgattaaagatgccggatgttattgctatcccacaatacgcatcctgtttttagttcttttgagagaaaaaggtgtttttgttgtagatactgcacgtacgtttcatatgtataataaaaagcaaactaagtttttgtaaaaaaaaaaaaaaaaaaaaaaaannaa

SEQ ID NO: 259439 - DNA, 1755 bp, Zea mays
ctctgccacatgcgtatgtatacatcacggccacgttcacgcttcccccttctgcaagcaaacctaaccaagcctctgcggctcttcttcgaatccaactcctccccgatccccaaaatcgaacccaagccgataccctaaccctcgcccttctcgatgtcggccgccaccaccggcccagccccttcagtagccactccgatggcgccccctccgtcctacccggcctcctccacggcctcttcctccatctccgcgtccgccgaggaggaggaggacctctatggccgcctcaaatcgctccaacgccacatggagttcgtcgaaatccaggaggagtacgttaaagacgagcagaagaacctgaagcgcgaactccttcgtgcgcaggaggaggttaagcggatccagtctgtaccgctcgtcattggccagtttatggagatggtcgacggcaacaacggcatcgtgggctctactacgggcagcaactactatgtgcggatcctcagcaccatcaaccgcgagctgctcaagccgtcagcgtccgtcgcgttgcatcgtcactccaacgctctagtcgacgtgctgccgccggaggccgactccagcatctccttgttgggatcgtcggagaagcccaacgtcacttacaacgatattggaggatgtgacatccaaaagcaagaaatacgggaggcggttgaattacccttgactcatcatgagttgtacaagcagattggtattgatcctccaagaggggtgcttctgtatggtcctccgggtactggcaagaccatgcttgccaaagcagttgcacatcataccactgctgcttttatcagggtcgtcggttcagagtttgttcaaaagtacttgggtgagggccctagaatggtgcgtgacgtgttccgtttggccaaggagaatgccccagcaatcattttcattgatgaggttgatgctatagccactgctcgttttgatgctcagactggtgctgaccgagaagttcagcgtattcttatggagctactcaatcagatggatgggtttgatcaaacagtcaatgtgaaggttataatggcaactaatcgggcagacactctagatcctgctttgttgcgtcctggtagacttgacaggaaaattgagttccctctgccagaccggcgtcagaagaggcttgtttttcaagtttgcactgccaaaatgaacctgagcgatgaggttgatttggaagattatgtttccagaccggataagatcagtgctgctgatattgctgctatctgccaagaggctggcatgcatgctgtccgcaaaaaccgatatgtcatcctccccaaggactttgagaagggctaccgaaccaacgtgaaaaagcctgagacggacttcgatttctacaaatgaggcaacctgagtgttgagctcgtttcttgtttatcaattgaatatgttttagcataaagatgagtttcaggatagttgccaatatcaaatgtcgaagttgatggctgtaatgcttgagtcaatctttttacttgaaggtacagcggtgttatggaagttatgattatgtagggtggattaaccttttaccgacacggtggggcttggatttggcattaagccaatcttaccaatcaatcaccagatgtgatgtctcattggtgatactaatacctgcagatctaggtctgtctcaaccaaattatgccgaagccaataaaaaaactacgtttgcgc

SEQ ID NO: 259440 - DNA, 458 bp, Zea mays
aaattgagttccctctgccagaccggcgtcagaagaggcttgtttttcaagtttgcactgcccaaatgaacctgagcgatgaggttgatttggaagattatgtttccagaccggataagatcagtgctgctgatattgctgctatctgccaagaggctggcatgcatgctgtccgcaaaaaccgatatgtcatcctccccaaggactttgaaaagggctaccgaaccaacgtgaagaagcccgagacagactttgatttctacaaatgagtcaacccagagtgttgaactcgtttctttctgcaaatgagtcaacccagagtgttgaactcgtttcttgtttatcaattgattatcttttaccatcagctgagtttatggatagttgccattacaaatattcaagttcctcaatgatgatgtgtgttctgtaaaaaaaaaaaaaaaaagggcggccgc

SEQ ID NO: 259441 - DNA, 267 bp, Zea mays
agttgatggctgtaatgcttgagtcaatctttttacttgaaggtacagcggtgttatggaagttatgattatcaattgaatatgttttagcataaagatgagtttcaggatagttgccaatatcaaatgtcgaagttgatggctgtaatgcttgagtcaatctttttacttgaaggtacagcggtgttatggaagttatgattatgtagggtggattaaccttttaccgaaaaaaaaacgggcatcaccttcctcccgacgccgatg

SEQ ID NO: 259442 - DNA, 689 bp, Zea mays
ccgacgcgtccggcccgtgcacaggtgggcgcccgccgccacctgcggctcggtggactccggcatcgacacccctggcccccagcgccgcagatcgcaagctctcagcaacgcgtgcttggtaggaacccgtgccgaccgactcttcctctgcgggacggtctcgagtttggtcgggagatgggtgacgggagctgctgcgtctgcaaggaggcgccgcccaagtacaagtgcccttcttgtcgcacgccctattgctctgtcacatgctttaaaaagcacaaagaggaatcttgtcaaaagatattgcatcaggaagaaattagcaagtcagcattgcaggaggaagttacactgcacaccacatgcactgcagaatctccaaatacagcgtgccctacaaaagctcttgaagttgaggacctaagctggcttgttgacaacaatagactaaggtccttagcggaactgaaagggatccacgacgctctcagggatcctgaactgcagagaatgatacttcaaattgatgggtcttccgaaccagaaaaagaattggagaaagtgatggaaggtcaagcttttcgcgagttcactgataagattcttgacattgtcaacccacaagaataaccgtctaccctgtttggtgggattctgatgctggagtaaacagaagcatccgggca

SEQ ID NO: 259443 - DNA, 568 bp, Zea mays
ggcatgtcgcccaaccacgtcacgccgtgggcgtgggccgccgacggcggcatcaagtgcgccatggagacgcagcccatcagcaacaaccggacggggcgactggacatcggcacggattggcgcctgcacggcgtggcgcgcggcgtgctggcgcgctacctccgccgcgtgccggtgcacttcgtcgacatcacggggctgtcggagctgcgcaaggacgcgcacaccttcgtgcacacgctgcggcaggggaagctgctcacaccggagcagcaggccgaccccaagacctacgccgactgcatccactggtgcctcccgggactccccgacacctggaaccacttcctctacgcgcacatcctctcgctctcctcgtccgcccaggatcactaaccatttttgcccagcctcacaatgtcaagcgcttcctttcaactcctctccctagaccacccacccaccctggatacctattactactgctgctgctgtagatcttcgtttcattttgacaaatgcatgcaggtcttctcttgtaatttctataaaaaacatccctgat

SEQ ID NO: 259444 - DNA, 655 bp, Zea mays
ccacagcatggccaagatccgcggccacgccgaaggggagctcgacggctccggggtcgtggggctcacccccaccgaccaggtccttcttgcgcgacacctcctcgaggcgtcactcatgggatactccttattccttgctttagtcattgaccggctgcacaactatgtcaaagaaaatcgaaggctcaggaagaaattggaagaggtgttgaaacagaataaggcactagaagaagcaacaaatggaaagctagaagagaacaggcctgaccagaaagacctttcccatgccaaggataattaacaatgacatgcgctcaagaaactccctgccatcactgcctatgcctgaataggatgccggtcactgatgttctccctgttgagaattagcattggtaaatgaatgctcggttacaacgtgctaaatcctttgcatctggccaaatttgtaaataagcactgggtgatgcccatcagtaaacacatgatgctactgctgttaaactaaatgtggcaaatttcataatgctaggtattgttctcggtatctaaggtgttgtttggttgctcagtatggtggaacgaagtcgctctgctcacattcaattgttgtttggagctctcaaaaaaaaaaaaaaagggcggccgc

SEQ ID NO: 259445 - DNA, 563 bp, Zea mays
ctctctcgtagtcgtatctgcgttgcgccgctgcttaaacaaacgccggacaggggagggccgcggcacgcgtctccagtctccaccctccacggctccacccatctcaaaaccctagcaaccgcgcctccatcggtccatccctaccccaaatcccaatccaagttcggtccccaggcggcgaggaccctcccgcgccgactcgtccccgcagatcggcgggcggggcagattcagattcgggtccgtggttcgctcggctagcctcgccggggtcccaccgcggcggtcggggagcatggtgggaggggggaggcggggaggagcggccgcggaggaggtgaagctcaacaccggcaacgtgttcgcggcgctcgagtccctcaagaagaagaagaagggcgacaagggcagggcggccgggccgtcctccaggaagaagcacggcgcgggggccgcgcagcagcagcaggagccgccgcagaaggatgtcttctgggctcccgcgccgctcaccaccaagtcctgggcagacgtcggcgacgacgacgaccacgactact

SEQ ID NO: 259446 - DNA, 411 bp, Zea mays
attcattacaaactgcttatggccaattcgattctggagacttctcaaaagtcggggaatacatcaacaaaattgtgctggctttttctccaggttgcttaaaggctaagcttctcaaggctaaagcattgctagcactgaaagactactcaagtgttatttcagagaccggattcattctaaaggaagatgaagacaacttggatgcactgctattacgtggtcgtgcctactattaccttgctgatcatgatgtggcctccaggcactaccagaaagggcttcgtcttgatccagagcattccgaattgaagaaagcgtatttcggcttaaaaaatcttttgaagaagaccaagagtgcagaagataatgctgcctacggtaagcttcctgtgtctgctgaggactaca

SEQ ID NO: 259447 - DNA, 1278 bp, Zea mays
cacagatagaggagggtttgcccctgcacaccgctgcgctactgggaggagcacaagtgtatcgctgtggctgcggcgcccggcagtccgccacaagcacacgcgcacacaggggccaagcgcctacacctacagaggagagacaaggtctgccgtccgcgcgtgcgcggaagaggggacggaggaagaaggctgccagcaatcagagatggaggtggggttcttgggtctgggcatcatgggcaaggcaatggcgaccaacctcctccgccacggcttccgcgtcaccgtctggaacaggaccctcgccaagtgccaagagctcgccgcgctcggcgccaccgtcggggagacgcctgcctccgtcgtctccaagtgcagatacaccatcgccatgctctccgaccccagcgccgccctatcagtcgtcttcgacaaggatggcgtgctcgagcagatcggtagcgggaagggctatgtggacatgtccactgttgacgctgcaacttcgaccaagattagcgaggcagttaaacaaaaagggggagctttccttgaagctccagtttcagggagcaagaagccagctgaagatggccaattggtcattcttgctgcaggggacaagccattgtatgatggtatgattcctgcatttgatgtactggggaagaagtcattctttctgggagagattggaaatggggcaaagatgaagcttgtggtcaacatggtcatgggaagtatgatgaattctttgtccgagggactctgtttggccgacaaaagtgggctgagcccccaaacacttcttgatgtactggaccttggtgccatcgcaaacccaatgttcaagctgaaggggcctacaatgctgcaaggcagctacagccctgcgtttcccctgaagcatcagcagaaggacatgaggttagcgcttgctctgggagatgagaacgccgtcgccatgcccgtctcagcagctgccaatgaggcgttcaagaaggcgaggagcctggggctgggagaccaggatttttcggcggtctatgaggttgtgaagggcgcgggtggttctggatctggccagccgtgatagaaggaccatttgtgactgtgttagcccatttccatgccgatttgcaacatagcgacgtacgagtacgtgtgtattcgagatttggaaccagaccatacgttgcaaaagaaataataaatcacacagatggtgctagctaaaacaacatgaacataatatactcgctcaagcgccatggc

SEQ ID NO: 259448 - DNA, 1273 bp, Zea mays
ccccctccctcccgatcttaaccacccgccacccggcttcctctcccccttcttcctccctcaaaccagacgctcgccccctttcctccacctatcttcttcagacgaccagcaggaggtacgagcaagaccacctaggaggcctctctctctctctccccagccacccccgtagcgagagggagggcggaagaggatgagcgcgtccaggttcataaagtgcgtcacggtcggggacggcgccgtcggcaagacctgcatgctcatctcctacacctccaacaccttccccaccgactatgttccgacagtgtttgataacttcagtgccaacgttgtggttgatggtaatactgtcaacctcggcctctgggacactgcaggtcaagaggattacaacagactgagaccactgagctatcgtggagctgatgtttttcttctggctttctcactgatcagtaaggccagctatgagaatgtttcgaagaagtggatacctgaactgaagcattatgcacctggtgtgccaattattctcgtagggacaaagcttgatcttcgagacgacaagcagttctttgtggaccatcctggtgctgtccctatcactactgctcagggagaggagctaagaaagcaaataggcgctccatactacatcgaatgcagctcgaagacccaactaaacgtgaagggcgtcttcgatgcggcgataaaggttgtgctgcagccgcctaaggcgaagaagaagaaaaaggtgcagaggggggcgtgctccattttgtgatctaatcatcggtagatgaagaaacaagggcgaaggtgccatggctttatcatcgtcgcgtcttgcttcagtggaacggcatgaatggtccccaccccctctaggtttactggcggctcggctgcagcgagttctcatctctttgtcgaggcattgagcgatatgtttgtttcattttcctccttcctgccttgtgattatctggtgtgtgtgtgtgtgtgactgacgaagtcgcggcgattaggtaactcgcttagaaggtatttcccgtgtttgagcaaaagaaagtatccctgttatctctgttccataagttagacatgatgtaatcgtactaagtttatttttacttatttcacttgaatggaaaagtatgcttcccatttaaaaaacacagacctaatcctgtactaggaccatggtaattggatcgagattctacgcgtggataacctggtcataaccggcaagggaaaccttgac

SEQ ID NO: 259449 - DNA, 873 bp, Zea mays
gtagaaggtgtaggaaatgagcatgcaggtcttgaggattacaacagcctgagaccactgagctatcgtggagctgatgtttttcttctggctttctcgctgatcagtaaagccagctatgagaatgtttcgaagaagtggatacctgaactgaagcattatgcacctggtgtgccaataattctcgtagggacaaagcttgatcttcgagatgacaagcagttctttgtggaccatcctggtgctgttcctatcactactgctcagggagaggagctaagaaagcaaataggcgcgccatactacatcgagtgcagctcaaagacccaactaaacgtgaagggtgtcttcgatgcggcgataaaggttgtgctgcagccgcctaaggcgaagaagaagaaaaaggcgcagaggggggcgtgctccattttgtgatctaataatgatcagtagacaaaagaaacaagggcgaaggtgccatggttctattatcgccgcgtcttgcttcagcgaaacagcaatggatgatcccaccccctcccccctagattttactggcggctgcagcgagtcgaggcattcgagagcgatatgtttgtttcatttccctccttcccgccttgtgattatctggtgtgtgtgactgacgaggtcgtggcaatttaggtaactcgcttagaaggtatttcccccgtgtttgagcccccacccccaccaaaaaaaagaaggtatcatgctatctctgttccataagtagacatgatgtaatcgtactaagtgtttatttttattttttttacttatttcacttcaatcaatggaaaattatgcttcccaattatatggtgggtcatggaagtccccctccctctt

SEQ ID NO: 259450 - DNA, 753 bp, Zea mays
  unsure (1)..(753): unsure at all n locations
ggtccggattcccggggcgacgccacgcgtccggcttggacagggtgacaacagtgtgaagcccgctaaagagagtggttgcaaaaatcgctacgccgaccctcacctaaggcaccgactcgccggggacagagagagagaccgacgcgccggcagatcccaagctcaccggagagggggaagagggcgaccgaaggcggcgatgggtttcatcatggacttcgcggagaatctgatcctccgtctgatggaggacccggacaagcgcgaccaggttcggcgggagcatgtctacaagatgaaggagcggtgcgagcgcactaaggcggcgtggagcctccctctgcgcccctacggcttctggaccttcgaccgcttcaactcgcagctctcctgggatccccagatcagccaggccgccggccgtcgggacccctacgacgacctcatcgcccgccactctggctcgccgccgtcttcctgaacacccgttccgatctttgcccagaaggtctacttgggcatcaataagaaactctttcccctcaaactgattgtggttccatcctcttctgtctggaaaatgttgtcaccaaactaccctatttcctgttccagtttggcatggaagtataagttgtgtacttctattctcaagttgttgtctttgtattatgaaattatccaatattccatttttcatttggagcactcgtttgcctttactattcagtaaattctccgagtgnctac

SEQ ID NO: 259451 - DNA, 747 bp, Zea mays
  unsure (1)..(747): unsure at all n locations
cccacgcgtccgcccacgcgtccgcccacgcgtccgcccacgcgtccggcggccgtagagaggccgacgcgcaccagcagatcccaaactcaccggggaggagggagtgggcgaccggcggcggcgatgggtttcatcatggagttcgcagagaacctgatcctccgtttgatggaggacccggacaagcgcgaccaggttcggcgggagcatgcctacaagatgaaggagcggtgcgagcgcaccaaggcggcgtggagcctccctctgcgcccctacagcttctggaccttcgaccgcttcaactcgcagctcttctgggacctgcagatcagccaggctgccggtcgccgggacccttacgacgacctcatgacccgccactccggcttcccgccgttttcctaaacgcccgtgttgatctctgcccagaaggtctacttgggcatctataagaatctcgttcccctcaaactgacttgtggttccatcctcttctgtctggaaaatgttgcccccaaactaccctatttcctgttccagtttggcatggaagtataagttgtgtacttctattcccaagttgttgtctttgtattataaaatgtttccaataatcaccagtttttaatgtatggtcgtggatccaaaggtgattctgtgctaagtattcccccgtccttnnntnnnnnnnggaaaaatntaccnagggtaaaaaaaaaaaaaaaaaaaaaaaaaaaagggcgg

SEQ ID NO: 259452 - DNA, 981 bp, Zea mays
  unsure (1)..(981): unsure at all n locations
acgcccacgcgtccgcccacgcgtccgactacttatctgtcgccccacggaagtttcggcggcgccggcgtgctcgtgatctcaacccaaggcgtgcctccgctccggtcacccgtcgctccacgcaaccatgtcgaggaggaagaccagggagcccaaggaggagaacgtcacccttggacccactgtccgtgaaggagagtatgtctttggtgtcgctcacatctttgcatccttcaatgacaccttcattcatatcactgatttgtctgggagggaaactctggttcggatcaccggtggcatgaaggtgaaggctgaccgtgacgagtcgtcaccttacgctgctatgcttgctgctcaagacgtcgcacagcgctgcaaggagcttggcattactgcactgcacattaagcttcgtgccaccggaggcaacaagaccaagacccctggacctggtgcccagtctgccctcagggcgcttgctcgttccgggatgaaaatcggacgcattgaggacgttaccccggtccccacggacagcactcgcagaaagggcggtaggaggggaaggaggctgtaggcgtctcttctgcgtgccatttgctggctcttggcgggtggccatcatgaagctagtcctctctgggtggtgttgctgttttctgtgtttgtcaagacgagctttaattttgctctatgtggatgaccgtttaccgttagtcgaacctgtatgatgttgcatggataatgttttttggctgaggaattggctcgtcatatttatgtatgcattttcactctctctataaagtgtactagagtaatcttccctagcgaaagggcctatagcctagtggttaaggactttcgaatagcatctccaaatcttgggttagatttctctcgggaacaaatttttaggcttgttaaaaaaatcctctcgctatgtctcatccgcttttgggttatgaaaaanaa

SEQ ID NO: 259453 - DNA, 777 bp, Zea mays
ttggccggcggcgtaggtagcggcggtgtgctggggatctcaatctcaagccgaggcgagctcggctccggtcacccgtcgatccacgcaaccatgtcgaggaggaagaccagggagcccaaggaggagaacgttacccttggacccactgtccgtgaaggagagtttgtctttggtgttgctcacatctttgcatccttcaatgacaccttcattcatgtcactgatttgtctgggagggaaactctggttcggatcaccggtggcatgaaggtgaaggctgagcgtgacgagtcgtctccttacgctgctatgcttgctgcccaagacgtcgcacagcgctgcaaggagctcggcatcactgcgctgcacattaagcttcgtgccaccggaggcaacaagaccaagacccccggacctggtgcccagtctgccctcagggcgcttgctcgttctgggatgaaaatcggacgcattgaggacgttaccccggtccccacggacagcactcgcagaaagggcggtaggaggggaaggaggctgtaggcatctctggcggctcttggcggcatgaagctagtcctctctgggtggtgttgctgttttctgtgtttgtcaagacgagctttaattttgctctatgtggatgaccgtttacagttactcgagcctatatgatgttgcatggataatgttttttggctgaggaattggctcgtcatatttctaaaaaaaaaaaaaaccacgcgtccgcggacgcgtgggcggacgcgtggg

SEQ ID NO: 259454 - DNA, 835 bp, Zea mays
cccacgcgtccgcccacgctccggacccactctttcgcggacgcgtgggcggcgtgcttgggatctcaacccaagtcgtgcctccgctccggtcacccgtcgctccacgcaaccatgtcgaggaggaagaccagggagcccaaggaggagaacgtcacccttggacccactgtccgtgaaggagagtatgtctttggtgttgctcacatctttgcatccttcaatgacaccttcattcatatcactgatttgtctgggagggaaactctggttcggatcaccggtaccatcctaaaaccttggctgtgcacgacctaggtggcagctgtatatggttttaactgagatgtgctaaacctgaaccctgtaggtggcatgaaggtgaatgctgaccgtgacgagtcgtcaccttacgctgctatgcttgctgctcaagatgtcgcacagcgctgcaaggagctcggtatcacagcgctgcacattaagcttcgtgccactggaggcaacaagaccaagacccctggacctggtgctcagtctgctctcagggctcttgctcgttctgggatgaaaattggacgcattgaggatgttaccccggttcccactgacagcactcgcagaaagggtggtaggaggggaaggaggctgtaggcgtgtatccttgctatttgccatcactttgcactggcctctgggtagcgttgctgtttattagcttgccaaaaggagttttaattttgctcattttgctctatgtcgaggatcatttactgttagccgaatctatgatgtgcattgataatgttttggttccggaattgacaattatgct

SEQ ID NO: 259455 - DNA, 581 bp, Zea mays
tcgctcgagataatgccaccacgcgtctgtcgtccttctgaagcttcggcggcggcggcgtaggtagcggcggtctcaaccccaggcgagctcggctccggtcacccgtcgatccacgcaaccatgtcgaggaggaagaccagggagcccaaggaggagaacgttacccttggacccactgtccgtgaaggagagtttgtctttggtgttgctcacatctttgcatccttcaatgacaccttcattcatgtcactgatttgtctgggagggaaactctggttcggatcactggtggcatgaaggttaaggctgatcgtgatgagtcgtctccttatgctgctatgcttgctgctcaagatgttgcacagcgctgcaaggagctcggcatcaccgcgctgcacattaagcttcgcgccaccggaggcaacaagaccaagacccctggacctggtgcccagtctgccctcagggcgcttgctcgttccggaatgaaaatcggacgcattggtaaggaggtcctggatctttcaagaggacgttaccccggtccccactgacagcacttgcagaaagggcggta

SEQ ID NO: 259456 - DNA, 566 bp, Zea mays
cagtacggtcggaattccgggtcgagcacgcaacgcacacgcgtccgcgacctgggagtggcgtgcgggtccggccgccggcgtgcgcgtgatctcaacccaacgggtgcctccgctccggtcacccgtcgctccacgcaaccatgtcgaggaggaagaccagggagcccaaggaggagaacgtcacccttggacccactgtccgtgaaggagagtatgtctttggtgtcgctcacatctttgcatccttcaatgacaccttcattcatatcactgatttgtctgggagggaaactctggttcggatcaccggtggcatgaaggtgaaggctgaccgtgacgagtcgtcaccttacgctgctatgcttgctgctcaagatgtcgcacagcgctgcaaggtactcactcatttgtccgtctgtgtatccaaagaagacgttgtcttaataattacattgaagcctaggattacgtagctctgctttagtgttgctgtatatccggataagtgatctgtggccggtattttgtcttaggagcttggattactgcactgcacataagct

SEQ ID NO: 259457 - DNA, 2693 bp, Zea mays
ttctttcacacgccttctcaccggctcacgacgtcgccacctcagatccggcgaccgatcccctcctcctcggcgaggcgtagcccgcagagccgagccggacaacacagccacgaccacgaggcgtcgtcgcggagtagtcggagccgtttctgctgcccccctccttcccgccaagtttgtcaagttacgtccgatgctccagacatagtagaaaaccatgggagaagttagtgatgacaattccaacctgtcctttctaaaaagaatcgcaacaagtgacgtaccgctgttgaaagagtatggtgtaaatggagttgtcgtcgctctgcttcttgctgtagttactcccgtcttgctttccatgatgtttggcaagaaaacaaagcagagggcggtgcgagctaatgtgggtggagaggaaggatttgccatgcgaaacagtaggttttcctccttagttgaagtcccatgggaaggcgccaccacgatgtcagctctgttcgagatggccagcaaaaagtactctcgacggaggtgtcttggcacgaggaagctaatcaagagggaatttgtggaatcttctgatggtaggaagtttgagaaactgcaccttggtgaatacgaatgggatacctacgccgaggcatttaaccgcgcatgtaattttgcttctggacttgtcaagatgggccacgacctagatagtcatgctgctatcttctctgatacaagagctgagtggatcattgctgctcagggatgcttccgacaaaatttgacggttgtaacaatatatgcatctcttggtgaggatgcattggtgcattcactaaatgagacacaggtttcaactctgatatgtgattcgaagcaacttaagaaaatacctgcaatcagctctaaattgcagagtcttaggcatattatctatattgaggatgaacctgtcgaggctgagacactgaaccaagtgaagcatctgacaacattgtctttcactgaagtagaggagttaggcaagacatctagtgttgatgcaaggttaccttcaagctctgatactgcagttatcatgtatacaagcggaagtactggtcttcccaagggtgtaatgatcacacatggcaacatggtggccacaactgcagcagtcatgacaatagtcccaaaacttggcatgaatgatgtttatctggcttaccttccattggctcatgtctttgaactagcaggagagactgtcatgctagcttctggtactgccattggatatggttcaacattgactatgactgatacatcgaacaagattaagaaggggacaaaaggagatgtttctgtactgaatcctactcttatgatttcagttcctgcaattttggatcgtatcagagatgcagtgtttaagaaagttggtgagaagggtggcctgacaaaaaagctgtttgatttttcatataagcgaaatattgcagcaattgaagggagttggtttggatcttgggcaccagagaggatgttatgggatcacattatttataaaccaatacgggcaatgcttggaggacgtctaagatttgttctttgtggtggtgcacctctgtcaagtgacacacaaagatttatgaatatatgtctaggtgtcccagtgggtcaaggctatggattgactgaaacttgtgctggagcagctttcactgaatgggatgatacaagtgtgggtcgtgttggtccaccacttccttgctgctatgtgaagcttgtctcatgggaagaaggtggttacaagatttctgattctccgatgccgagaggagaggtcgtggttggcggacacagtataacaaaaggttatttcaacaatgaagcaaagacgaacgaagtatacaaggttgatgagaggggcatacgctggttctacactggtgatattggtcagttccatcctgatgggtgccttgagattattgacaggaaaaaagatatagtaaagcttcagcatggagaatatgtgtctcttggcaaggttgaatcggctctagcaacaagcaactatgtggagaacatcatggtttatgccgatccatttcataactactgtgttgccctggttgttccagcgcaccaggccttggagaagtgggctcagaattccgggataaactatgaaggctttgcagagctttgccaaaacgaccgagcaattaaggaggttcagcaatcactatcgaaggccgcgaaagcagcgaggctggagagattcgaggtgccggcgaagatcgagctgctgcctgagccgtggacgccggagtccgggctggtgacggcggcgcttaagctgaagagggagcagataaaggccaaattcaaagacgatctggacaagctctaccactgaagaaaagcggggcttgcacccacgcgttcaggagcttgcgctgccaaaacgctgcctggatgcggaatggaacctactgacctgcacgagaccacgagtggtgtgtgtgtgtgtgtggatgtgtgtcggcgtcggtacagcaggagctgcttcttgtgtgatgaaaaataagccaaagtgttggttggaacgatcttgatttgtatagcttcacttaacttgcatgaaccctagctcgaaatcagttgaatctggaagaaccaaaaaaaaaaaaaaaaaaaaaaatacaaaa

SEQ ID NO: 259458 - DNA, 784 bp, Zea mays
gtttgcggaagccccagtggccagtgcccaccaccttcacgcctcctcgcgtcgtcgcaaccgcagatctggccaacggcccccgaccgatcgacccccctccccctcggcgcggcgaggcgcagtcaaatttgtcaagctactgttgatgctccagatatagtagaaaaccatgggagaagttagtgatgataattccaacatgtcctttctaaaaagaatcgctacaagtgacgtgccgctgttgaaagagtatggtgtgaacggagttgttgtcgccctgcttctggctgtagttactcctgtcctgctttccatgatgtttggtaagaagacaaagcaaagggcggtgcgagctgatgtgggtggagaggagggatttgcaatgcggaacaacaggttttcctccttagttgaagtcccatgggagggcgccacgacaatgtcagctctgttcgagatggccagcataaagtactctcgacagatgtgtcttggcacgaggaagctaattaagagggaatttatggaatcttctgatggtaggaagtttgagagactgcaccttggtgaatatgcttcgggatacctacactgatgcatttaatcgtgcatgtaatttgtcttctggacttatcaaatgggccacgacctagatagtcatgctgctatcttctctgatacaagagctgagtggatcattgctgctcagacacaggtttcaactctgatatgtgattcgaagcaactttagaagatacctgcaatcagctataaattgcag

SEQ ID NO: 259459 - DNA, 791 bp, Zea mays
ttttagctttgccaaaacgtccgagcaattgaggaggttcagcaatcgctatcaaaggccgcaaaagcagcgaggctcgagaaattcgaggtgccagcgaagatcgtgctgttgcctgaaccgtggacgccggagtccgggctggtgaccgcagcgcttaaactgaagagggagcaaataaaggccaaattcaaagacgatctggacaagctctaccactgaagaagcgacagaggacggtttaatttgcacctaccgcttccagacgcttgcggtgccaaaagctgcctggatggaacttttactgacctgcacgagtggtgtgtgtgtgtgtgtgtgtctcccagctgccgatacacaggactacaggagcttcgttcttctgtgatgactgaggaaaaataaacccagtgttggaatgatcttgatttgtaatagcttcacgtcatgggattttaattttgttatagcacagaggatgctcaatttcacgtccgttacgggtcagttatgacactaagcatattgtaaatgatgttttttttatatagacacacaataaataggccctgggcacatcacctaatggtactctatatcgccatctattgatttgtaatgggaagacggacgaggttggttagttttgaggttaaagtaggatgaggcggaggcgatcccctcgattttttagaccacgtcatcactaaaagtagctttggtgttcaccttgttctcatgtgacttgtatctaaacactaaagaaaatatgactaactatttctatcctt

SEQ ID NO: 259460 - DNA, 705 bp, Zea mays
ggctcgagaaattcgaggtgccagcgaagatcgtgctgttgcctgaaccgtggacgccggagtccgggctggtgaccgcagcgcttaaactgaagagggagcaaataaaggccaaattcaaaggcgatctggacaagctctaccactgaagaagcgacagaggacggtttaatttgcacctactgcttccagacgcttgcggtgccaaaagctgcctggatggaacttttactgacctgcacgagtggtgtgtgtgtgtgtatcccagctgctgatacacaggagcttcgttcttctgtgactgtgactgagggaaaataaacccagtgttggaatgatcttgatttgtaatagcttcacgtcatgggattttaattttgtcatagcacagaggatgctcaatttcacgtccgttacgggtcagttatgacactaagcatattgtaaatgatgtttttttatatagacacaataaataggccctgggcacatcacctaatggtactctatatcgccatctattgatttgtaatgggaagacggacgaggttggttagttttgaggttaaagtaggatgaggcggaggcgatcccctcgattttttagaccacgtcatcactaaaagtagctttggtgttcaccttgttctcatgtgacttgtatctaaacactaaagaaaatatgactaactatttctatccttt

SEQ ID NO: 259461 - DNA, 520 bp, Zea mays
tggacgcgtgggcgcggagcggaagccccagtggccagtgcccaccaccttcacgcctcctcgcgtcgtcgcaaccgcagatctggccaacggcccccgaccgatcgacccccctccccctcggcgcggcgaggcgcagcaattcaagtgcatcaccgttgttacttccataacgtgctaacagtcaaatttgtcaagctactgttgatgctccagatatagtagaaaaccatgggagaagttagtgatgataattccaacatgtcctttctaaaaagaatcgctacaagtgacgtgccgctgttgaaagagtatggtgtgaacggaagttgctgtcgccctgcttctggctgtagttactcctgtcctgctttccatgatgtttggcaagaagacaaagcaaagggcggtgcgagctgatgtgggtgaaaggagggaatttgcaatggcggacaacaggttttcctccttagttgaagtcccatgggagggcgccacgacaatgtcagctcttgtcgag

SEQ ID NO: 259462 - DNA, 337 bp, Zea mays
ccagtgttggaatgatcttgatttgtaatagcttccagacgcttgcggtgccaaaagctgcctggatggaacttttactgacctgcacgagtggtgtgtgtgtgtgtatcccagctgctgatacacaggagcttcgttcttctgtgactgtgactgagggtaaataaacccagtgttggaatgatcttgatttgtaatagcttcacgtcatgggattttaattttgtcatagcacagaggatgctcaatttcccgtccgttacgggtcagtttttccccccccaaaaaaaaaaaaaaaaacacaaaaaaaaaaaaaaaaaaaaaaaaaaaacaaaaa

SEQ ID NO: 259463 - DNA, 996 bp, Zea mays
cgccggccgcccgcggtcaccctcgcgctctcccgtcacgccggatcggacggactccggccccctccttcacaactccaacgttggcaagagaggatggcgttcctaaccaccataacctgcagcatggcccgcctgcccaccagcagcggcatggcagcactgctcctcctcgtcgccttcgtcgtcctcccctccgccgccctgtcctcctcgtcctcgcttctgcactcacctcctgagagtgatgagacaagcggcggcagcgagcagcaagccccgccggaagacgagaacaaggagaaagagcggcagctggccaaggagaaggcgtacgcggcggagaaggtcgtccagcaggagatgctcaagtacgccaaggagaagggtctggtgtccccgaccaacggcacggggtggtacaggggcatcgcccgggagttcgtggacgcccacaacgagctccgcgcgcgctacggcgtgccgcccatgaagtgggacaaccagctggcgcggcaggcgcggcgctggtccaacgccatgcgcaaggactgccagatcctccacagcggccacgagtacggcgagagcgtgttcaggagctacgacgactggaacgccaccgccagggaggccgtcttctggtggggcaaggaggaggccatctacgacaaggacaaggagaagtgcaagtacggcaaggtcttcaaggagtgcggccacttcgcgctcatggtcggcaagaggagcaccaaggtcggctgcgcacgagccgagtgcttcaagggcggcgtcttcatcacctgcaactactatgcaacggacctggacaagaacaagaacaaaacaccaaacgataactgactctatccacccatctgttcgtttctatgtacgtacgtacgtagtagcgctgacttatttactgagtgatgattggattgttaattaactactactgaagcaattgcctgattccgaggttggagatgatga

SEQ ID NO: 259464 - DNA, 610 bp, Zea mays
gggtcgagcacgcgtccggcgacgttggcaagagaggagggccggcgtcggcgtgcctagctcgatcttgaaccatagctagccagcatggcgcccagcagcagcatagcagtactgctgctcctcgtcgtcgccgtcgtcctctccaacgtcccctcctcgggcgccctggcctcctcgtcgtcgtctctgctgcaccagtcgtctccgtctgagagtgagactgagaccgacagtagcagcggagaatcttcgtcgtcgtcgtcgtcggaggaggaggaggccggcgagaaggagaaggagaaggagcaggagatggagaaggcggtcgcggcggagaaggctgcccagcaggagctgctcaagtacgccaaggagaagggcatcgtgtcaccgaccaacggcacggggtggtacaagggcatcgcccgggagttcgtggacgcccacaacgagctccgcgcgcgctacggcgtgccgcccatgaagtgggacaggaagctggcgcggcaggcgcggcgctggtccaaccgcatgcgcaaggactgcgagctcgtccacagcggccacaagtacggcgagagcctgttcaggagccacgacgactgga

SEQ ID NO: 259465 - DNA, 686 bp, Zea mays
cgctcatggtcggcaagaggagcaccaaggtgggatccccacgagcagagtgcttcaaggggggcgtgttcatcacatgcaactactatgccacggacctcaagaagaagaacaagaagaagaagaagagcaccaccaactgaactcatgatttccagctagcttcttccagttttgagccaagcatggatcttgtacaattaattgatctcagtataccttcaaaattatcatcactacaatatataattcgcccaagcatagatatataataatcaatcagttcatccatagcttgaggacccgatccttgccaccagacgccaccttttcaccgtcagggctccaatccacggtgtacacctcatccgcgtggcccggcaagtccattttcaacttgtgtgttcgaatatcccagatctttagagtggaatccttgcttccacttagtagaagcctactgtcggcagaccagctgatctggtagacatctgcaacgtgccctctgaatgctgcaacaaatttacctgtgataccattccacaacttgacagatttatcaaaggatgcacttgccaaccattgtccatcaggggaaaagtaaacatggtttacaagcttctgatgaccagtcatgcgagctttaggttgtttactaattgcggacgcgtgggcggacgcgtggg

SEQ ID NO: 259466 - DNA, 826 bp, Zea mays
actcgcgggtcgatacaagactctagagcgccacgcgtccgcacattcaagcacctcctcttcccccgccgggcaacaactcagccgccgcaaccgccacatcagccatgggcgcctgcgcaaccaagcccaagacgcttgaggggcaggccccagctgaggccgccgtctccacacccaaggttgcgcccgaggccactccaatctccgttgaggttgcggctgatgaacaggtagctgagaaggtggtggtggaggagccggctgcggcggccgacgttgagcatcagaaggctaatgaggtgctcgctccagaggcggccgtcgccgagcccgaccacaaggaggaggaagccgtggagaagaccgtcgtcgaggaggagaagccagcggcagcagcccatgcagaggaaaaggtcgccaccgccgccgagaccacgacgacggtggaggcgaagaagaacgccgaggaggccgggaaggagaagctggcgcagcaaagctgatcgactgtccgtgcatgcgtgccaattaatataattggctgatgatgcctgatgttcagtgtgtgatactgtgatcgagcaaggagacgacacttgaattctctacagtttggcataggtcgggagagacactctcgaccggccacaccatgtaacaaactaaccttctcgatgtctcccattattttcctccacggagttcttctgatgaaacaacatgttctaattgggcaaaaaaaaaaaaaaaaaaaaaaagaaagaaacacaaaaagaaacaaaactaaagtggaagtaaatgaaaagggataaaatcttacgat

SEQ ID NO: 259467 - DNA, 714 bp, Zea mays
cggacgcgtggacccacgcgtccgcggacgcgtcccgtcccctaccctcgtcgtcgtctcactcaccccgccttcacgcctccctcaccaaataaggtcccgcccttttccgacattcacaggggggacaggaaatcagcggccatggcctcgattccggcgacgaccttcgccgtcatcttatccgtcctcttctgtgccgcggctggcaccgccgtcgacaacgacctccccgactacgtcatccagggccgcgtctattgcgacacctgccgcgccgggttcgtgaccaatgtcaccgagtacatcgcgggcgccaaggtgaggctggagtgcaagcacttcggcaccggcaagctcgagcgctccatcgacggggtgaccgacgggaacggcacgtacacgatcgagctcaaggacagccacgaggaggacatctgcgaggtggtcttggtggagagcccgcgcaaggactgcgaccaggtgcaggcggacagggaccgcgccggcgtcctgctcaccaggaacgtcggcatcagcgacaacctgcgccccgccaacccgctcggctacctcaaggacgtgccgctgcccatctgcgcctcgctgctcaaacagttggactcggacgacgacgacgatcagtaatagcacatcgacgacgacgatcgatatgtaatagcatcgcggacaggctgcacaaaactataacga

SEQ ID NO: 259468 - DNA, 873 bp, Zea mays
tacaacaccctaaactgacgccgccccccacgcgtccgcaccctcgtctcaccctccctccctcacacaaataataaggaaaggtcccgcccttttcctccgacatccacaaggggggaggggaaaacacgtacattcacccggcggcaataatggcctcggttccggctccggcgacgacgaccgccgccgtcatcctatgcctatgcgtcgtcctctcctgtgccgcggctgacgacccgaacctccccgactacgtcatccagggccgcgtgtactgcgacacctgccgcgccgggttcgtgaccaacgtcaccgagtacatcgcgggcgccaaggtgaggctggagtgcaagcacttcggcaccggcaagctcgagcgcgccatcgacggggtcaccgacgcgaccggcacctacacgatcgagctcaaggacagccacgaggaggacatctgccaggtggtgctggtggccagcccgcgcaaggactgcgacgaggtccaggcgctcagggaccgcgccggcgtcctgctcaccaggaacgttggcatctccgacagcctgcgccccgccaacccgctaggctacttcaaggacgtgccgctccccgtctgcgccgcgctgctcaagcagctggactcggacgacgacgacgaccagtaaactataccacggcggcgtcgcggacatgctgcacaaaactacaacgatacagagcgaacgcatggcatggatagcagtatctacggaaagaaaaggaagaaaaggaaaataaaaaatgtatcagagtgcttgattcacttgctgctgtcacccattccccgttcttaacataacatgtgggccggcttggcccaggcacaagcccatc

SEQ ID NO: 259469 - DNA, 932 bp, Zea mays
ctcggacgacgacgacgatcagtaatagcacatcgacgacgacgatcgatatgtaatagcacgtcgtcgacgaccgaccgcagtcgtcgcagactggctggcactaaaccacaaatcctcttcacctggattacaaatatgtaactgagaaaggaaaggttgacagaacggtcactgcgtgacaatagcaagagtccagcactcagaatttgggacagccacgcagttacattttcggtgtcctttcctttctcagttacatatttgtaatccaggtgaagaggatttgtggtttagtgccagccagtctgcggtcgtcgacgatgtgctattactgatcgtcgtcgtcgtccgagtccaactgcttgagcagcgaggcgcagatgggcagcggcacgtccttgaagtagccgagcgggttggcggggcgcaggttgtcgctgatgccgacgttcctggtgagcaggacgccggcgcggtccctgtccgcctgcacctggtcgcagtccttgcgcgggctctccaccaagaccacctcgcagatgtcctcctcgtggctgtccttgagctcgatcgtgtacgtgccgttcccgtcggtgccggtgccgaagtgcttgcactccagcctcaccttggcgcccgcgatgtactcggtgacattggtcacgaacccggcgcggcaggtgtcgcaatagacgcggccctggatgacgtagtcggggaggtcgttgtcgacggcggtgccagccgcggcacagaagaggacggataagatgacggcgaaggtcgtcgccggaatcgaggccatggccgctgatttcctgtcccccctgtgaatgtcggaaaagggcgcgactttatttggtgagggaggcgtgaaggcggggtgagtgagacgacgacgaggtaatacgacgtcacctcagaggctt

SEQ ID NO: 259470 - DNA, 863 bp, Zea mays
agctcgtttgattctgattgccagtacttattttaacagtaaaacctttgtctattgagcggttcaaccttcgtattcggaatctcgacctgtcacataaattaccacaacaatatctggctatcctctatcaagcctttattgtgacgatgctttctcatccttatatatctacttttactattattgttatccataactcatctactgttacatttgtcacccaccaatttagaaccaaatctccgtatacacctttgtcacacatgttagatttacattactgctcacctgaccctgatagttatagcgcttaatactccaggatatcgacgcgaacggcacgtacacgatcgagctcaaggacagccacgaggaggacatctgcgaggtggtcttggtggagagcccgcgcaaggactgcgaccaggtgcaggcggacagggaccgcgccggcgtcctgctcaccaggaacgtcggcatcagcgacaacctgcgccccgccaacccgctcggctacctcaaggacgtgccgctgcccatctgcgcctcgctgctcaaacagttggactcggacgacgacgacgatcagtaatagcacatcgacgacgacgatcgatatgtaatagcacgtcgtcgacgaccgaccgcagtcgtcgcagactggctggcactaaaccacaaatcctcttcacctggattacaaatatgtaactgagaaaggaaaggaaaacaaaaatgtaactgcgtggctgtaccaaattctgagtaaaaaaaaaaaaaaagaaaaaaaaaaaacaggaacaaataaaaagaaaaaaaaaactacagggagaaaaaataaaaaaaaaaaggggcggccg

SEQ ID NO: 259471 - DNA, 377 bp, Zea mays
gccaacccacgcgtccacccacgcgtccgcaagcacctcctcttcccccgccgggcaacaactcagccgccgcaaccgccacatcagccatgggcgcctgcgcaaccaagcccaagacgcttgaggggcaggccccagctgaggccgccgtctccacacccaaggttgcgcccgaggccactccaatctccgttgaggttgcggctgatgaacaggtagctgagaaggtggtggtggaggagccggctgcggcggccgacgttgagcatcagaaggctaatgaggtgctcgctccagaggcgggccgtcgccgggccccaccatcaagagccggggaaaggggcccccccccccccgggggaaaaaaaccccccccc

SEQ ID NO: 259472 - DNA, 656 bp, Zea mays
aattcccgggtcgaccgacgcgtccgcaatgttttagccctcaatcttctttctattctattttatatctcacaactaaaaaattagtctgcaaccttgctgttagtgccttttcttatcttgtcaatgtgtccttccatcttgtattagtttgctttcgtttttacattaactagaacacatgctctggttgtggtttcctctttttatgctacaggtttggttagctaccatatcactcgctatctacaaggttagttttccgcatcgagaaatattatgtgatattgattgtcgagttcttttttctgtttcaaaaaatttagtacttgtattcatagtaacatttgatgcattaatgtatacattcttattttcatatataggtttttgatcatctcggcatgttaaagaagaagaaatgcatctagctgtaaagaaaaggaaggcaaatatcatcttatgcaattatttgtgtgctgtcggcggcgcgctatggctaccggcaaagaactacctgatccccatggacggagctggaacctaatgcctggcaaacacactggtgaacacagtcatgttaatcattgggaacgtgcagcagcagggcacccgtgtcagactgtcagctttgacaccgtcaagggcgccatcgt

SEQ ID NO: 259473 - DNA, 523 bp, Zea mays
cggacgcgtgggcccggctgcagtcccccgccggcggccacccaggaggatgaccaccggcctcggggtggggagaagcaagccgggctgcggcctccctcccgccctcagcttcaaggatgttcatcatcctcgctggggcggaaggcgcgtcgagccggggttctgcctcccgcgtgggccagcggcccgcttcttcctccagcattcgagggaggagaggggttcaccagccacgcgaaggaggcgaacttcggctacgcggggccggccaggtgcaggcgctgacagctgccgcgtgcctggctcttggcctgggtggccctgccgtcgcctccgacgttgccttctgccgtttggccagggcatggctatccgtccaccacacgggcgacggtcacgccgtacgtgggtccgccacatccacggcttctcccgcgccgtcggccgtacggggggaccgtccaagatgtcgtacgctgcgggagtggcggcgacgttcttggatggtcttgtcctcgct

SEQ ID NO: 259474 - DNA, 646 bp, Zea mays
tgttgaaacagaacaaagctttgcccgccgtgtcttagctatagtggactatgatgaagatggaactctttccttatcagaatgctcagacttgatgaaagcttttggtaataaattagcagttgcaaagattgaagagcttttccgtcaagcagatacaaatagtgatggcatagttgacatagatgaactggcagccctactggctgctcaacaagaagaagaaccacttataagtaactgccctgtctgtggtgaagatcttggaaaatatgataacataaatgatatgatacatatgacactttgcttcgatgagggaactggtaatcagattatgactggtggatttctaactgacaaacaggcatcttatgggtggatgttcaagctcagtgaatgggcacatttctccacgtatgatgttggtttgcactctggctctacagcttcacatattctgtgtaaggttttcgaccggcgaacaaagaggatagtcgaagaagttattgacggaaaaattgtattgtccatgagggctttataccaatcaaaagtaggactcactcttatcaatacaggtgttaaagacctcttgaagaacctatctgagaagcaaggaaaaaagatgaactcgctggaatct

SEQ ID NO: 259475 - DNA, 1291 bp, Zea mays
ttcccggtttttcccattcgtccgccttttcttctcgcccacgcgtccggttttcttcaggcgaagctggtgcatccggacaagaatcccgggaaccctgacgccgcactcaagttccaggaacttggagaggcctatcaagttcttagtgatcctgggaaaaaggaggcttatgataagtatggaaaggagggtattccccaggataacatggtggatcctgctgctgtctttgggatgatttttggaagtgactattttgaagattacgttggccagcttgctctagcatctatagcctcagtagaggttgatgaaaactcaaacagtcaagaagcaagagcaaaggttcaagaaaagataaaagagttacaaagagagagagaacaaaagcttacccagagcctgaaagaccgacttcaaccatatgtagatgggagaaaggatgaatttgtgagctacgcaagcacagaagctaggcgtttatctgaagcagcatttggtgaggctatgcttcacactattgggtatatttatgtccggcaagcagcaagagaactcgggaaaagtagaatttacatgggtgtaccgtttatagctgagtgggttagagacaaaggacaccacattaaatcacaggttaatgctgcttcaggtgctatttctctaatacaacttcaagaagggatgaaaaagatggaggggagtgaggacagcgaggagcaacttatgaagagttttgaggagaaaaaagatgccatgctcagctcgctttggaaaatcaatgtggttgatatcgagtccacgctctcacgtgtctgccaagcagttctgagagatagcatggtctccaaagatgtcctgaagctgcgagccaaagcgttgaaaaagctcggaacgatattccaaggcgcagagtctatgtaccgtcgtgaaaacagcctgcgcgttgaaacgagcacagaccaacaagccgcttcgtcacactgaagccacctgtggaccaccgtgtaggaatggatttggtgttttgtgtgtgtgtgtggctttcttctttgtttgtaattgtgtatgctatattaattttcttgtagaagatgtgaaacatttaacacaaagattttaactgctattgatgcagaaatataacctgcagctgccttttttctttcttgatggtagaattgtatttggacccttatttgccaagtgtgttggcttcattgttcacaagacaaatcgctcccaggaaacgctcagggaactgattattacaccttaaaatactctg

SEQ ID NO: 259476 - DNA, 673 bp, Zea mays
cccacgcgtccgcccacgcgtccgcccacgcttccgcccacgcgtccgagaagatttgattgggttccccaaatccggtgactccattcctgttgttcttcacgtcgaccccgggaacctcccagaaggctctagcgaccccgggcgcccggcgctctgagggctgtgctgccggcggcgagatccaggagctgcctgccatggtgaaggacagcgcctactacgacgtcctaggggtcagcgtcgacgcgtcctccgccgagatcaagaaggcgtattacatcaaggcgaagctggtgcatccggacaagaatcccgggaaccctgacgccgcactcaagttccaggaacttggagaggcctatcaagttcttagtgatcctgggaaaaaggaggcttatgattagtatgggaaggagggttttccccaggataacatggtggatcctgctgctgtctttgggatgatttttggaagtgactattttgaagattacgttggccagcttgctctagcatctatagcctcagtagaggttgatgaaaactcaaacagtcaagaagcaagagcaaaggttcaagataagataaaagagttacaaagagagagagaacaaaagcttacccagagcctgaaagaccgacttaaccatatgtagatgagagaaaggat

SEQ ID NO: 259477 - DNA, 463 bp, Zea mays
gcgagggcccagctcacggacctgtcctgtgtcctccgcagcacagcacgaccccatcggcgtcaccccggcgacttctgcgtcctctgccctccacgctcccccgctctgccaggcttcccagaagatttggttgatttccccccaatccagtgattccatccctgttctccacttccaccggaacctcccagagacttccagaaggctctagcgacccccgccgctttagagctacccgcggcgagattcaggagctgcctgccatggtgaaggacagcgcctactacgatgtcctggggctcagcgtcgacgcgtcccccgccgagatcaagaaggcgtattacattaaggtgaccccaaccccctcatctcctcccgcctcggccgcgccccctacggttgcatgctgtgacgcgcataggtagctattgaactcgccttcctcaattgttttggttgg

SEQ ID NO: 259478 - DNA, 354 bp, Zea mays
agaagatttggttgatttccccccaatccagtgattccatccctgttctccacttccaccggaacctcccagagacttccagaaggctctagcgacccccgccgctttagagctacccgcggcgagattcaggagctgcctgccatggtgaaggacagcgcctactacgatgtcctggggctcagcgtcgacgcgtcccccgccgagatcaagaaggcgtattacattaaggcgaactggtgcatccggacaagaatcccgggaaccctgacgcggcactcaagttccaggaacttggagaggcttatcaagtcctaagtgatcctgggaaaaaggaggcgtatgataattatg

SEQ ID NO: 259479 - DNA, 1643 bp, Zea mays
gtagtaagtccgaattgccccgatcgtccgccgcgttcgctcttcctctcctccatctctcaacgcctgaagctcaccgcacctcccctcctcgccgcggatcccccactactccggtagaaaatggctgacgctgaggatatccagcccctcgtctgcgacaacggaactggcatggtcaaggctgggttcgccggcgacgacgctccgagggccgtcttccccagcatcgttgggcgcccgcgccacaccggtgtgatggtggggatggggcagaaggatgcctacgtcggcgacgaggcgcagtccaagaggggtatcctgaccctcaagtaccccatcgagcacggaatcgtcagcaactgggacgacatggagaagatctggcatcacaccttctacaacgagctccgtgtggctcccgaggaacaccccgtcctcctcactgaggcgcccctgaacccaaaggctaaccgtgagaagatgacccagatcatgttcgagaccttcaacacccccgctatgtacgtcgccatccaggccgtcctgtctctgtatgccagtggtcgtaccacaggtatcgtgctcgactcgggagatggtgtcagccacactgtccccatctacgagggatacgccctcccccacgccatccttcgtctcgacctggctggccgcgacctcaccgactacctcatgaagatcctgactgaacgcggctactccttcaccaccactgctgagcgggaaattgtcagggacatgaaggagaagctcgcctacattgccctggactacgaccaggagatggagactgccaagaccagctcttctgttgagaagagctacgagctgcctgacggacaggtcatcaccattggtgctgagcgcttccgctgccctgaggtcctcttccagccatccttcattgggatggaagctgctggtatccacgagaccacctacaactccatcatgaagtgcgacgtggatattaggaaggatctgtatggcaacatcgtcctctccggtggtaccactatgttccctggcattgctgacaggatgagcaaggaaatcaccgccctggctcctagcagcatgaagatcaaggtggttgctcctccagaaaggaagtacagtgtctggattggaggatccatcctggcatcgctcagcaccttccagcagatgtggattgccaaggctgagtacgacgagtctggcccgtccatcgtgcacaggaaatgcttctaattctttgggcccaagagatgcaaagccgagaggagccattatcgccagcctcccgccccgtttctttctccttttgttgctgtttcttcattagcatgaacaaagttttctgccggtctgtcggcagccgctttctcctattcatcaagactgtaatgtctattgttgctacctaatgcttctcacttgtcattttggacacatgttcgacctattcaattttaatgagatgcctgatgaggctacttgcaaaaatacatgtggtgttctcaatgaataatatcaattgttgagctctcaaaaaaaaaaaaaaatataaaaaaaaaaaaaaaaacaaaggggggaagcactaaaagatccaaacttaacatattgctgcatgcgac

SEQ ID NO: 259480 - DNA, 1639 bp, Zea mays
cccacccatgcgcataaccacaacctcttctcccctgtttcctctcgtgcgctctccgtgggagcgaggactcgcggccggcggcagcggcaggttctcctagatctccggcatcatcagtaacaaatggctgacggtgaggacattcagccccttgtttgtgacaatggaactggcatggtcaaggctggttttgctggtgacgatgcgccaagggctgttttcccaagcattgttggacgcccccgtcacactggtgtgatggttggcatggggcagaaggatgcgtatgttggtgacgaggcccagtccaagaggggtatcctgactttgaagtacccgatcgaacatggcattgtcaacaactgggatgatatggagaagatctggcaccacaccttctataacgaactccgtgttgcgcctgaagagcaccctgtgctgctgaccgaagccccactcaacccaaagctaacagggagaagatgacccaaatcatgtttgagaccttcaatgttcctgccatgtatgtcgccatccaggctgtgctttccctgtacgccagtgggcgtacaactggtattgtgttggactctggtgatggtgtcagccacaccgtgccaatctacgaaggttatgcccttcctcatgccatcctgcgtcttgaccttgctgggcgtgacctgactgacagcctgatgaagatcctcaccgagagaggttactccttcaccacctctgctgaacgcgaaattgtaagagacatcaaggaaaagcttgcatatgtggctcttgaatacgaccaggagctcgagaatgccaagagcagctcatctgtggagaagagctacgagctgcctgatggtcaggtgatcaccattggggcagagaggttcagatgccctgaggtcctcttccagccttccttcattggtatggaagctcctggcatccatgagaccacctacaactccatcatgaagtgcgatgtcgacatcaggaaggacttgtatggtaacattgtgctcagtggtggcacgaccatgttccctggtattgcggaccgtatgagcaaggagatcactgcccttgcgccgagcagcatgaaaatcaaggtggtggcaccgcctgagaggaaatacagtgtctggataggaggatccatccttgcctccctgagcaccttccaacagatgtggatctcaaaggctgagtatgacgagtcaggacctgcgattgttcatcggaagtgcttctaagctctgggtcccccttcggctccattttatttattccttgagtgtttttcatataagctactatgtttgggattgcatgcctttgagcaggcaatgttgttgaatttatattttgggatttatattttgtggctcactacaatgcatgcattgctccagctcctttccatgccaaatttgttgctagtggtgaaaacatcaaccacaaaaaagagaggatggaaattaataaagtacctaggatcgtattgtaactgtacttgtgcgagtaacattattggttctctttgtatatccatcgctgagacatgcaattctttttgattggtttgctacttctgtgaatgatttctgggcactagtggagcttttgaatggcc

SEQ ID NO: 259481 - DNA, 1746 bp, Zea mays
ccccctcgtccgcccacgcgtccgcagacgagcaggcgcacggcgcaccgcacacctcactgccgctcccttctcgtctcgtctcctctcctctcctcggcggatccggcaccgacccaccgcccctctgctcgctccttccgccggaatcgctgctcctctctgtgtgctgtcgatttgtgcggcgactgttagtttggttcggtcccatccttctgttgatcaatggctgacggtgaggatatccagccacttgtgtgtgacaatggcactggaatggtcaaggctggctttgctggcgatgatgcgcccagagcagtgttccctagtatagtcggccgccctcggcacacgggtgtgatggttggaatgggccagaaggacgcctatgtaggtgacgaggcacagtcaaaaagaggtatcttgaccttgaagtaccccattgagcacggtatcgtgaacaactgggatgatatggagaaaatctggcaccacaccttctacaatgaactgcgtgttgctcctgaagagcacccagttctgctgacagaagcacctctgaacccaaaggcaaacagagagaagatgacccaaattatgttcgagacattcaatgcaccagcaatgtatgttgctatccaagctgtcctttccctgtatgccagcggtcgcactacaggtattgtgctcgattctggtgatggtgtgacccacaccgtgccaatctacgagggatacgcgctccctcatgccattcttaggctggatcttgctggccgtgatctgactgactgcctaatgaagatcctcacggaaaggggttattccttcaccacgacggcagaacgggaaatcgtgagagacataaaggagaagctggcctttgtggccctagactacgagcaggagctggagaccgctaagagcagctcctccgtcgagaagagctacgagctgcccgatgggcaggtcatcacgatcggcgcggagaggttcagatgcccagaggtgcttttccagccgtcgctgatcgggatggaagctcccggcatccacgagaccacctacaactcgatcatgaaatgtgacgttgatatcaggaaggacctgtacgggaacatcgtcctcagtggagggacgaccatgttccctggcatcgctgacaggatgagcaaggagattactgccctcgcgccgagcagcatgaagatcaaggtcgtggcgcctcctgagagaaaatacagtgtttggattggtggctcgatccttgcgtcgctcagtacgttccagcagatgtggatatccaaggatgagtacgatgagtctggccctgctatcgtccaccgaaaatgcttctgagctagctatctgccgcgcctttcatagcgtgtcaagctgttgagatctgcgttgttgagttgagtgtctctatggagtatcacatactttctgcatgaggggggaagagtatacccaactaagcgcatgcctttcggatgccctgcttcgtgattcagatgctgctttctttcaagtgatatgtcgatgtagtgtgcgagcaatgtatttggtttggctacagctgttcctgtcgtctgtgcgtaaaacattagctatgtatctatccatatctgcatatttgaatgtatggtcgttttctcatatgaaaaaaaaaaaaaaaaaaaaaaaaaaaaaaaaaaaaaaaaaaaaaaaaaaaaaaggataacatctaaagtacccaagctt

SEQ ID NO: 259482 - DNA, 1561 bp, Zea mays
accgttcggaattccggtcgaccagcgtccgcatggcgccctggtgtaggtagaaaatggccgatgccgaggatatccagcccctcgtctgcgacaacggaactggcatggtcaaggctgggttcgctggcgacgacgccccgagggccgtcttccccagcatcgtggggcgcccgcgccacactggtgtcatggtcgggatggggcagaaggacgcctacgtcggtgacgaggcgcagtccaagaggggtatcctgaccctcaagtaccccatcgagcacgggatcgtcagcaactgggacgacatggagaagatctggcatcacaccttctacaacgagctccgcgtggctcccgaggagcaccccgtcctcctcaccgaggcgcccctgaaccccaaggctaacagggagaagatgacccagatcatgttcgagaccttcaacacccccgctatgtacgtcgccatccaggccgtgctctctctgtatgccagtggccgtaccacaggtatcgtgctcgactcgggagatggtgtgagccacaccgtccccatctacgagggatacgccctcccccacgccatccttcgtcttgacctggccggtcgcgacctcaccgactacctgatgaagatcctgactgagcgcggctactccttcaccaccaccgctgagcgggaaatcgtgagggacatgaaggagaagctcgcctacatcgccctggactacgaccaggagatggagaccgccaagaccagctcttccgtggagaagagctacgagctccccgacggacaggtcatcaccatcggcgccgagcgcttccgctgccccgaggtcctcttccagccatccttcatcgggatggaagctgccggcatccacgagaccacctacaactccatcatgaagtgcgacgtggatattaggaaggacctgtacggcaacatcgtcctctccggtggcaccaccatgttccctgggatcgctgacaggatgagcaaggagatcactgccttggctcccagcagcatgaagatcaaggtggtcgctcctccagagaggaagtacagtgtctggatcggaggatccatcctggcatccctcagcaccttccagcagatgtggatcgccaaggccgagtacgacgagtccggcccatccatcgtccacaggaaatgcttctaattctttgggcccgagaaatgcaagccgtgggggagccgttaccgccgccagcctctcctgcccccgttttcgttgccgtttcttcattagcgcgaacaaagttttgtgccggtctatcggccgccgctttcctcccctattcatcaagactgcaataactgtcgctacctatgcttctcacttgtgatttttggacacaatatgttaaggtccattcaattctaatgagacgcctgatgaggctacttcggattgtcattggttattgatgtcttatgaatgaataatataatttttttttgtccctttgagctctctggatctgcactgttgttacatttttcccttgagaattgaaattgagaccctgt

SEQ ID NO: 259483 - DNA, 620 bp, Zea mays
atagttctcagaggtggcacaaccatgttggctggcatcgctgaccgtatgagcaaggagatcccccgcccttgccccgagcagcatgaaaatcaaggtggtggctccacccgagaggaaatacagtgtctggataggagggtccatccttgcctccctgagcaccttccaacagatgtggatctcaaaggctgagtacgatgagtcaggaccagcgattgttcaccggaagtgcttctaagctcaagggcccccttcgtccccattctatgtattcctttccttgagtgcttttcttataagctactatgtttgagattgccggcctttgagcaggcaatgttgttggatctgtatcttgtggatcactacaatgcatgcgttgctccatcttcttttcatgccaagtttgctgtcatacttgctagtggggaaaacaacaatgacaacagtggtgagaacagcaaccacaaaaaaagagaggatgtaaattattgaagttcctaggatcgtattgtaactgtacttgtgcgagtaacattattggttctctttgtatatccatctctgagacatgcaattctttttgaaaaaaaaaaaaaaaaaactggagatagttc

SEQ ID NO: 259484 - DNA, 416 bp, Zea mays
gcagatgtggatcgccaaggccgagtacgacgagtccggcccatccatcgtccacaggaaatgcttctaattctttgggcccgagaaatgcaagccgtgggggagccgttaccgccgccagcctctcctgcccccgttttcgttgccgtttcttcattagcgcgaacaaagttttgtgccggtctatcggccgccgctttcctcccctattcatcaagactgcaataactgtcgctacctatgcttctcacctgtgatttttggacacaatatgttaaggtccattcaattctaatgagacgcctgatgaggctactagcaaacaacaccatgtgttcggattgtcattggttattgatgtcttgtgaatgaataatataaattttttttggtcaaaaaattatcggacgcgtggg

SEQ ID NO: 259485 - DNA, 418 bp, Zea mays
taagcgcatgcctttcggatgccctgcttcgtgattcaggatgctgctttctttcaagtgatatgtcgatgtagtgtgcgagcaatgtatttggtttggctacagctgttcctgtcgtctgtgcgtaaaacattagctatgtatctatccatatctgcatatttgaatgtatggtcgttttctcatatggtgtcaagttaaaattcttatgttctcttattaaattttagttacccatatgtggccataatagccatgatatcttgtgaaagggtctttagctgggttggttggttggtctaataagtataatattctgccaaaggggatttagctctcggtcggttggatgatctgaataacacttctcctcccctgagtttaaaaaaaaaaaaaaaaaaaaaaaaagggcggccgc

SEQ ID NO: 259486 - DNA, 1470 bp, Zea mays
  unsure (1)..(1470): unsure at all n locations
cccacgcgtccgcggacgcgtggnggttgccaccctagcacgcgctcgccgtcgccacgctctatatctcgcgcatctcgccttccgctctttctagccccgcccgctcgcctccctggtacgcttcgtgccgccgccgcaacctcctcctccccgtcacagattgcagatcatttaacataaatggctgactcagaggacattcagcccctagtctgtgacaatggaactggaatggtcaaggctggctttgctggagatgatgctccccgtgctgttttcccaagtatagttggtcgtccacgccacactggtgtcatggttgggatgggacagaaggatgcttatgttggtgatgaggcccaatccaagaggggtatcctgactttgaagtatcccatcgagcatggaatcgtaagcaactgggatgacatggaaaagatctggcatcacaccttctataatgagcttcgtgtagcaccagaagagcacccagttcttcttacagaggctcctcttaaccctaaggctaacagggaaaagatgacacaaatcatgtttgaaactttcagtgttcctgctatgtatgttgctattcaagctgtcctttccctttatgctagtggccgtaccactggtattgtcctggattctggagacggtgtcagccacactgtcccaatctatgaaggctatgccctcccgcatgccattcttcgtctcgatcttgctggtagggacctcactgattccctcatgaagatcctgactgagaggggttactctttcacaaccactgctgagcgggaaattgtccgtgacatcaaggaaaagcttgcatatgtcgcgctcgactacgaacaagaactcgagaccgccaagagcagctcatcagttgagaagagctatgaactgcctgatggacaagtgatcacaataggcgcagagcgcttcagatgcccggaggttctcttccagccatccttcattggtatggaagctccaggaatccacgagacgacctacaactccatcatgaagtgtgacgttgatatcaggaaggacctgtatggcaacattgtcctcagtggtggatccaccatgttccctggcatcgccgaccgcatgagcaaggagatcactgcgctcgcgccaagcagcatgaagatcaaggtcgtcgctccgccggagaggaagtacagtgtctggattggaggatcaatcctcgcatccctgagcacattccagcagatgtggatctcaagggctgagtatgaggagtctggtccagctattgtccacaggaagtgcttctagacgtcacctagccttgttctcctcgtggaaatgcctttgtttcatgacatatctatgggtggtcgctctgctacagctcgcagttttttgtgtatgccacaagccgcatatatatatatatatatatatatatatatatatatatatatatag

SEQ ID NO: 259487 - DNA, 1261 bp, Zea mays
gatacgggatatattttgttaacactgtccaacagtatattacacgtttgagcgaagtcgtgtcgtcagcaaaatttcacaatatttatacttccgtaacatactaactatttacagcaaaagggttctttatctaagttttttttcctcctttttctagattttcctttttttttttgcttttcagaattttctatggagaagggggacgcactgtaagctaaaataaaagaatcatatatattttgcctatttattggctaaacaaactatggtaaaatttttcaccacagcaaattgaatcttgtactcaacccaaccaccgaaatctccatccccatccgatgaatatcagcgttcaagccttccagtggtcacaaccataccgatgcgagactttttccacgcccaccatctctgcatctagccatgtcatctgctcgcatccatttcctgcggtcacagattctaccgagttgtcaagcaagacaaaagtccatggccttttaccaaagcatgcctccatccgcgacccagtgcgcaaaccggtcagaatagtcccgaacgtctgagacctggctgcttgaacgggaaagatccatgtcatcccttccctcatcagtgtgtccttgttcactgtacgacgtagatgattcaacgctgaccacatccataggtgaattgatcagtgatgacctctcaaaaacttcctcgtcacaggaattcccagaagacgacaacaaatcaaggtcgaggaaatttgaagaatgcaattcagggtaacctaatcttttcaaataactctgccgctcttctgacatggagtgtcttccaggcactgtgccgtagttcacactggagcacgggttaggttcgcatatggagatctctggcgcagaatcagaagcttctctaatatcatccagctgttgcactgggagcaattctgtgttgtctgtttcattgttacagatagttacaggcaagctgctctccaacagtatgttaccatctgatagtgacctctttatgaatgatcttccaatctcttcttttaaagttccttgcctcccaatgttgtaatgctgatctgagtccagcttccacaatgcaggtttcccttgctgaggttggaaatgacctaagaacatgtttatagcatcctgcttctcgtgatcagtgtaggcgttattgtagtagcgttgaagggttcgaaggaactcctgagattgggttgttgccttccattggccccattcga

SEQ ID NO: 259488 - DNA, 731 bp, Zea mays
gctcttgatattccagccccgccgccgccgtccccgcccccatccgtgacaccccaccatcaccgccgcgccacgcgcgacaactccatcccccgtccgcacccctaccccgagcatcgcagcgcctcccgcacgaggtcgttgcgcttgtcgatctgatggcggcccatggcaaaggagcaggcggtgatggcagccacagcagaaagccgacgctcggcgtgattcccacccgtcgcgagccaagaggttcgaggtcatttttgagccaagaggttcgcggccacgggagcaaccctacagaaccatcaccaccaccgctctctcttcctctgctcttctctgcctgcctgagctcaccgcacctcgcctcctcaccgcgtttcctccgttaatccggtagaaaatggccgatgccgaggatatccagcccctcgtctgcgacaacggaactggcatggtcaaggctgggttcgctggcgacgacgccccgagggccgtcttccccagcatcgtggggcgcccgcgccacactggtgtcatggtcgggatggggcagaaggacgcctacgtcggtgacgaggcgcagtccaagaggggtatcctgaccctcaagtaccccatcgagcacgggatcgtcagcaactgggacgacatggagaagatctggcatcacaccttctacaacgagctccgcgtggctcccgaggagcaccccgtcctcctcaccg

SEQ ID NO: 259489 - DNA, 680 bp, Zea mays
  unsure (1)..(680): unsure at all n locations
attaaaagacatacggggtttctttcagctttttcacagaaacaattatgaaacagacaccgccaagaaacccaacaagtaccagatatttatacttctgtagcaaactaactatttacaacagaagtgttctttacctatggtttgtttggtttttccttttcctaatagattttccattgtttttccttttgatacttttctatggagaagggaaacgcaaggtaagctaaactaaaagaacagatatattttgcctatttattgtctaagctacggtccaaattttcaccatagcaaattgaatcatgtaccccaccgaaagttgcatccgacgaatatcagcgttcatcgttcnaagctttccagtgaccacaagcatgccgatgcgagacttctcccatgtccacaccttcttctgctgtacgccgcctttctgcaggtagatgcacggcacctagcccggctagtcgtcagccatttcatctgctctatccgtcagacttccatttcctgccgtgtcacatctactgagctgtcaccaagacaaaagtccagggcctagtagcaaagcgtgtctccattcacgacccactgcgcaaagtggtcagagtagtcccgaatgatctgagagctggctgctagaacgggaaagatccgtgtcatctcttccctcatca

SEQ ID NO: 259490 - DNA, 573 bp, Zea mays
  unsure (1)..(573): unsure at all n locations
gcgtccgatcgcagcgacgctcccttcggctccggcacaccacatcaagtcgcgatggaaatgaagaaggtccctggccccgtcttccccgccgccgccctcggccaaggctggtccacgcgggggcgagcgcttccgctggccccaagtcctcttccatgcatccttcatcgggctcgtagctgccggcatccaccagaccacctacaactccatcatgaggtgcgacgtggatattacgaaggacctgttcggcaacatcgtcctctccggtggcaccaccatgttccctggcatcgctgacaggatgagcaaggagatcaccgccctggctcctagcagcatgaagatcaaggtggttgctcctccagaaaggaagtcaccgccctggctcctagcagcatgaagatcaaggtggttgctcctccagaaaggaagtacagtgtctggattggaggatccatcctggcatcgctcagcaccttccagcagatgtggattgccaaggctgagtacgacgagtctggcccgtccatcgtgcacangaaatgcttctaattctttgggcccaag

SEQ ID NO: 259491 - DNA, 257 bp, Zea mays
gttatgatatcaacgtcacatttcatgattgaaatctaggtggtctcgtggatgccgggacgttccatcccgatcagcgacggctgggatggcacctcccggcatccacgagaccacctacaactcgatcatgaaatgtgacgttgatatcaggaaggacctgtacgggaacatcgtcctcagtggaggacgacatgttccctggcatcgctgaagatgacaagagattatgctcgccgacacaagatcaagctgcg

SEQ ID NO: 259492 - DNA, 508 bp, Zea mays
gcggtagagcccgaacccccttcggcgccgcgcgtgggaaccttaacccaaccgcgctggctatcctcctcctccctttccgcacttggtccggcgatcctgatcgaattggaaccgccttcacccccacccagtgcagtgctcgcgtgctccgctctgcgccggcagcccgcccggaccggaccaggccgtctctgcatttgcgcggatccgccggcgcggtccctgattcgggccgcgctctcgcagatgatggtggcggagaagcccgcgctggggttccaggcgcacggggacggggacgacgagctggagctggagctagcgtcgccggcgccgccgccccggaagatgcactcgctggaattcgagcacatcggctcgctcgccgccgtggccgagtcgctcgcgcccgggagcaggtggcagagggcgctcaccagcgtgcgcgtcgtcatctttcatgccaagatcaacgtgcctcttccctttgggccggtcggcatca

SEQ ID NO: 259493 - DNA, 806 bp, Zea mays
ctcaaaggcatggttgactcattggctccgcagaaaaaatgctggtatcctttctgatgctgataatggaccaacgagtgctttaagatgtcgccatgggtatctcctgccggagcatgctccaggagcaaagcgggtatccgtaccagagagcctgtggttatttctctatcaaaccatcagcgagaaggttgatgatgttgttacttttccatcagactgtcaaccatgcaaaatctgtagtcaggaattgtctgatgttgcttctgctgagggtaatcttagagcagtaaaacttgagcaacgacacaaacatgaaaagttaatatctgggaagagctttgcacttcgtcctggtgaaaaatattatttggttccttcatcttggttgtcagagtggagagcttatattacaacgacgggaaaaaatatttcttcactaccagaacctcagagtcttgaagctgttgtcagttcacttatatgtgaaaagcattcgagattgctgcaaaagcctttggatcttgtttgtaagcgcggaagcatcactcagaaaacatcaaataacgatggtttaacaatcatcccagagtatgattggaagttattctctgaggagtggagtgcgacgcctggaaaaggtatatctgctgaaatcgcttttagcaaggacgctcaagataaaatgcacggttcctctgaagcaatgccgattacggatggaaatttggaccagtctctttatggtgcaaatgacgattttggtgccagagagccctatgtcagaactgatccttgaggttgtg

SEQ ID NO: 259494 - DNA, 565 bp, Zea mays
agttattgagctcatgccaaaattgggacaacactttgttgaagaaatgataaacccaagcatgtatgcaagtcaatggtgttatcacagttttctcatattccttcccatttcatctaactcttagagtttgggatgtgtttctttatgagggtattaaggttgtattccaagttggattggctctattgagactctgtcacgatgatttagtcaaattaccttttgagaaactgctctatgccttgagaaatttccctgaggaagcgacagatccagatgtattattgccgcttgccttttcatttaaggtatcgagtcgtctagaggagcttcagaaggagtatcagaagcgacaggagggcaccagtgaaacttcaagcggcgagcggcttcagcccctcgcatcgaagacgatgagcagggtcggtagccgtgtggtgtcgaacttaacgaccgctgacagaaaatgacagacacgttctcttgtttgtttgtaactcgcatgtaccctgtacagaaagaacggccttataatccatccatctaacagtatttgttttgc

SEQ ID NO: 259495 - DNA, 802 bp, Zea mays
cccacgcgtccgcccacgcgtccgcccccacccacccacccactcgcttcagccgcctccgccgcgcgtacaagcaggtggagacaggatgccggctggccacgggctgcgctcgcggacgcgcgacctgttcgcgcgccccttccgcaagaagggctacatcccgctcaccacctacctccgcacctacaagatcggcgactacgtcgacgtcaaggtgaacggcgccgtccacaaggggatgccgcacaagttctaccacggccgcaccggtcgcgtctggaacgtcaccaagcgcgccatcggcgtcgagatcaacaagcaggtcaatgggcgcatcatcaggaagcgtatccatgtccgtgtggagcatgtgcagccgtcccgctgcacagaagagttccgcctgaggaaggcgaagaatgaccagctgaaggcggatgccaaggagcgcggcgaggttatcagcaccaagaggcagccattgggtcccaagcccggcttcatggtcgagggcaccaccattgagaccgtaactcccatcccatatgatgtggtcaatgatctcaagggtggatactaggttgtttggtccatctacctgcagtacccagttctacatctgtgttactctagtgcgtgcaactttgctcactctgagcagtagtatgaacctgttgtctgttcctgttgaaagatttcccattttaggtgcaaacctgagtttctccgaacgcgttataccctgaccttgcttctgagaacgaagatgtgctatttttgcaaaaaaaaaaaaaagaaa

SEQ ID NO: 259496 - DNA, 819 bp, Zea mays
  unsure (1)..(819): unsure at all n locations
gataagggcgacctccaggcccttgcgaaccctggcgccgcgccctcccgcccaccgccgtcgccgcccagccgcagtaaggaggaaggagcaggaagatgccggcggggcacgggctgcggtcgcggacccgcgacctgttcgcgcggcccttccgcaagaaggggtacatcccgctcaccacgtacctgcgcacctacaagatcggcgactacgtcgacgtcaaggttaacggcgccgtgcacaagggcatgccgcacaagttctaccacggccgcaccgggagcgtctggaacgtcaccaagcgcgccatcggcgtcgagatcaacaagcaggttaatggccgcatcatcaggaagcggatccatgtccgcgtggagcatgtgcagccctcccgttgcacagaggagttccgcttgaggaaagccaagaatgaccagctcaaggcggatgccaaggcccgcggtgaggtgatcagcaccaagaggcagcctgtgggacccaaacctggcttcatggttgagggtgctacactcgagacagtcactcctattccttatgatgtggtcaacgatctcaagggcggttactagagagaattcttgtaccttcagcagttcaaacgagctggcaaacttatctgaatctttttgataattggctagttcttctgttctggtgttatgaactcatgtggctattgctgttggcgtcaaaagattttttttattgccatggttgattgcaacctgttattttaccttctgatattaagtttgtagattttcctgnaaaaaaaaaaaaaaaaagggcgcccgc

SEQ ID NO: 259497 - DNA, 853 bp, Zea mays
cctcgcgaaccctagagccgcagcagcacactcccgcagtagcagcagccgccgccgccgccgcccagccgcacgaaacaggaggaagatgccggcggggcacgggcttcggtcgcggacccgcgacctgttcgcgcggccgttccgcaagaagggttacatcccgctcaccacgtacctgcgcacctacaagatcggcgactacgtcgacgtcaaggtgaacggcgccgtgcacaagggcatgccgcacaagttctaccacggccgcaccggtcgcgtctggaacgtcaccaagcgcgccatcggcgttgagatcaacaagcaggttaatggccgcatcatcaggaagcgtatccatgtccgcgtggagcatgtgcagccgtcccgctgcacagaagagttccgcctgaggaaggtgaagaatgatcagctgaaggcggatgcaaaggagcgcggcgaggtcatcagcaccaagaggcagccgttgggccccaagcctggcttcatggttgaggggactaccatcgagaccgtcactcccatcccgtacgatgtggtcaatgatcttaagggaggatactaggttgtttgtttggtctttctacctgttctacatctgtgttactctagtgcgtacaattttgctcacactgagcagtagtatgaacctattgtgcgttcatgttgaaagatttcccgttctgtgcaaacctgagtttagaagaatgctatgccttgatctttgcttctgacaacaaagatttgcctttttcaacctcatacggtgctaattatgtatttatgttgtttgaaccgtgaagtggaaattgggaaagtatgtccccccagttcg

SEQ ID NO: 259498 - DNA, 931 bp, Zea mays
cccacgcgtccgcccacgcgtccgcccacgcgtccgcccacgcgtccgcccacgcgtgcgctttcagccgccgccgcgcgtagcaagcaggagcagcaaggatgccggctggccacgggctgcgctcgcggacgcgcgacctgttcgcgcgccccttccgcaagaagggctacatcccgctcaccacctacctccgcacctaccagatcggcgactacctcgacctcaaggggaaccgcgccgtccacaaggggatgccgcacaagttctaccacggccgcaccggtcgcgtctggaacgtcaccaagcgcgccatcggcgtcgagataaacaagcaggtgaatggtcgcatcatcaggaagcgtatccatgtccgggtggagcatgtgcagccctcccgttgcacagaggagttccgtttgaggaaagccaagaacgatcagctcaaggctgatgccaaggaccgtggcgaggttgatcagcaccaagaggcagcctgtgggacccaaacctggcttcatggttgagggtgctacacttgagaccgttactcctattccctatgatgtggtaaatgatctcaaggggggttactagagagaattatgtatcttgagcagttcaagcgagctggcataaatacctatctgaatctttttgacaactgtctagttcttttgttctagaagggcaggcatggtacattggtgatatttgtctcaggcattcgaaccagactccacatttctaggggcggtttgtcccttcttgagtatcgtcttgagagcctcgtgcactgggtcggcctctctggttctttttgttctggtgttataaacctatgtggctattgctagttaatgctaaagattttgccatcgtttataaaaaaaaaaaaaggccgcccgggaatccggacggtacgtgcggc

SEQ ID NO: 259499 - DNA, 529 bp, Zea mays
ccacgcgtccgcggacgcgtgggcggacgcgtgggtagtgcttcccaccgatccatttcagccgccgccgcgcgtagcaagcaggagcagcaaggctgccggctggccacgggctgcgctcgcggacgcgcgacctgttcgcgcgccccttccgcaagaagggctacatcccgctcaccacctacctccgcacctacaagatcggcgactacgtcgacgtcaaggtgaacggcgccgtccacaaggggatgccgcacaagttctaccacggccgcaccggtcgcgtctggaacgtcaccaagcgcgccatcggcgtgcgagataaactagcaggtataccacacggatcccttttcgctagctcgctgatgggttgctgggcgcacgcagttgaaatcgtttgtgcacggcgcttacgtttagtgcggggacgtatcctctgttcgtgccattctaggaaatcgaatgtttagagtgacgacaatttgctggtgtgttgtttgatttggatctctgtagaagttgtgga

SEQ ID NO: 259500 - DNA, 713 bp, Zea mays
  unsure (1)..(713): unsure at all n locations
cgagtctcgaccaacccatacgcacctaccctccgccaccgttccccccctccgcatctcgcccgccgttctcgtccttgtagatctcctcgcacctcgcccattcgcttcaccaagggtttaagaccggcggcgatggcggcgaactggcgcactgcgcacacaggtaacgcgtgcggcggagttcgcctcgaagcacggctgctcctactacaaggaggtaatggagaagaacaagcagtacgtcgttcagccccccaccgtcgagaagtgccaggagctctccaagcagctcttttacacccgcctcgcaagcctaccaggtcgctatgagtcattctggaaggagcttgattgtgtcaagcaggtatggaagaacaggaaggacctcacggtcgaggaccttggcattgcgagtttatttggagttgagctctatgcatggttctgcgtaggcgagattgtcggcagaggtttcaccttgaccggctataaggtctagatgatttccactggtcaagacctgctttataattgatactcttagctgatgcttgtcgaaacgacgacgatggtacctgccttggttcacaattttgtttctttgtaagagtttacctagtgctgaatgccagcaaagacgggcacatcgttgcaacattgcctcaataatttgcccgcgcaattgttgattaaaaaaaaaaaaaaaanaa

SEQ ID NO: 259501 - DNA, 886 bp, Zea mays
cccacgcgtccgcccacgcgtccgcccacgcgtccgcccacgcgtccgccccatctcgcccgccgttttcgtccttatcgatctcctcgcacctcgtggcggcacctctccccttcgatccaccaagggtttaggatcggcggcgatggcggcgaggctggcacagctgcgcgctcaggcggtgcaggcggcggagttcgcctcgaagcacggcggctcctactacaaggagctcatggagaagaacaagcagtacgtcgtgcagccccccaccatcgagaaatgccaggagctctccaagcagctcttctacacccgcctcgcaagcctaccaggtcggtatgagtcattctggaaggagcttgatggtgtcaagcaggtatggaagaacaggaaggacctcaaggttgaggaccttgggattgcgactttatttggagttgagctttatgcatggttctgcgtaggcgagattgttggcagaggtttcaccttaaccggctataaggtctagttgatttccagtgatttaagacctgctttataaatcgacactttagctgatgcttgtcgaaacgacgatgatacctgccttccttcacaattttgtttcttgtaagagtctacctagtgctgaatgccagcaaagacgggcacatggttgcaacattgcctcaataatttgcccgcgcaattcttgattttgatgcatgtaattctttgtcagttgcatgtgctgcagtccctgcgtgcagactcatttcgtgtctttcgttctgcccacaaaataaattctttctgcgttaaaaaaaaaaaagaaaaaaaaaaaaagaaaaaaaaaaaaaaaaaaagaaaggaaaacaaaaaaaaaaaaaagtagagtaac

SEQ ID NO: 259502 - DNA, 968 bp, Zea mays
  unsure (1)..(968): unsure at all n locations
gctatcacctgacttccagaagccnatgttttaatggntgatagcatttcaggttttcttcatctcactgaaggataagccacatatgtcnaatcacttgcagcacactgaatatgggatcatcagtctgatggagaagatgtacagttaaatcgctccagttaacccacttattcagaagaatagactgctacggagcaccgatctgtgagccagagacgagagaggccaccatttataattgatcaagtatctgtctctctcttctttgaaagggggctaaatgcagctgcaggatccgaggtagaaccaccatttatctggcccagactgccggctaccactgagtcactcaccatgtcgaaatttaatcgactgtttactttccggccattataatttaggcggctatttatagcagccaaatccttagatgggctctgataagcatgggtgccttcaccaatgcatgcataaaaactcctggaacttggtgacagcagtagatccaacttggtttgccgcaaaggagacacatatacattatgagatgctgaaactttcttcggggacatatctggtaaatttgggaaaggagatggcttgggtgatccaagaatttggccactagcattcttcttgtcttctggatgagtaccagatgatattagtgacaccaggaaaggcttcgctgctggaacaaatacctcattgtaaaaagtaatgataccaacatggcgcgatactaataccccattacggttcgtactcccaatatagatacttgaaaaaacttctggcttgcattgtgcttctcttttgtaattgttgagtatctccctgaatgtgagttctaattgacaaacctttgcaacaccatanagacagcaaaggataagttgatcgatgtgtctattaaaaantaatgttgtctgttgctcaagaatctccttgcagacattatagac

SEQ ID NO: 259503 - DNA, 622 bp, Zea mays
catctcacttgcagaaagagatgcgatgtcagattgtttggaataaccagatgaacatctatcagcatgactgattcatattcattcactgttgctgagaactaatagaataaaacaaggtagacttctggattaattgcaatttgggaagtgtagcatacaaaaatatcttgtcctaaaaaagattgattgatgcagaaaaccaatcatcctggctgtgcaagccaaaattagtagaacaatataaagcagtaaaggctgattgtaaccagaaatgaactcaacagtaccattacaaaagcaatcagcaatgaagtcacaacatgagacatacctgaaggataagccacatatgtcaaatcacttgcagcacactgaatatggggtcatcagtctgatggagaagctgaaaatatacagtacaaaagtagcagaaacagagaagtacttaaaaatgagaatataaaaggattcatatagtttagagttggcatgcttatacctgtaaagaatatgttcctagtcaggaaagcaatttggggctgctattgctagtgaaaaatgtgaaagatgtgaattaagtacagtactttttgacaaccaaatataaccctgatgaatg

SEQ ID NO: 259504 - DNA, 637 bp, Zea mays
gcccaatgaaaactaaagattcattagcactgtacacagcggatatgttcaatcagcagagaaatggtgatagctcaaaagctaacttgaaacagtttgctgcctataaactgctgcttctcactaacacatacatgtgcagttaaatcgctccagtcgacccacttattcagaagaatagactgctacggagcacggatctgtgagctatatacgagagaggccgccatttatatttgatcaagtatctggctctctctactttgaaagggggctaaatgcagctgcaggatccaaggaagtagaaccaccatttggctggcctagactaccagctaccactgagtacgtcaccatgtcaaagtttaatcgactgtttactctccgaccattagtgcatatttaacatgaaacggagtggtatctattagtgttgtagacatgacatcatgatgtacaaaagatagtgtcgttttcagattcatactaatttaggcggctatttatagcaaccaaatcattagatgggctctgataagcatgggagccttcaccaatgcatgcataaaaactcctgaaacttggtgacagcagtaaatccatcttggtttgccgcaaagcccaaaagtccacgcat

SEQ ID NO: 259505 - DNA, 512 bp, Zea mays
ggaaaacccggcgggacccacgcgtccgccgacgcgtccgcccacgcgtcaccgagaggtgaaccagcagcctccaataaaagccagcacatccaaataaaaccgagagacctcagccctcaggcaagccgaccgccgacgtaccaccgcgccaacccgagagaaagatggagatgatcaagaggatcctcatcgccgcgctcctcgtagtcgccgtctcggccaccgcagtgctggcctccaccgaggccgccgccgccggcgccccagccgcctccgagtcgtcggcgtccgccgaagcccccgctggcgccgccggcgccggcgccggcaccggcaccgccgcggggccctccgccagcggcgccgcgcccgccctcgccgccgcgcccgccgcgctcctcttctccctcctcgcctactacctgcactaagcggacggacggacggacgcgcgcatggcattggcatgcatggactgttgaacatctatgcatgcatggacgacgtca

SEQ ID NO: 259506 - DNA, 1369 bp, Zea mays
gaagcttaaatcctctagatttaacccacgcctactcgagtcatccgcagttcccccgcgcccgagacgcaaccccgcgccaggagtaagtttgttcttttatcgatattatcgatatggcgagggaggagaatgtctacatggccaagctggctgagcaggccgaaaggtatgaagagatggttgagtatatggagaaggtggctaagactgtagatgtggaagagctcactgttgaggagcgtaacctcttgtcggtcgcatacaagaatgtgattggggctcgccgtgcttcatggcgcattgtctcttctattgaacagaaggaggagtcccgtaagaacgaagagcatgtgaaccttatcaaggaataccgtgcgaagatcgaggctgaactgagcaatatctgtgatggcatcttgaagctgcttgactcccacctagtgccttcttctactgctgctgaatcaaaggtcttctacctcaagatgaagggtgactatcacaggtatcttgcggaatttaagactggtcctgagaggaaggaatctgctgagagcacaatgatggcctacaaggctgctcaggacattgctctggctgagctggcacctacccatccgataaggctggggcttgctcttaacttctcagtgttctattatgagattctgaactccccagacaaagcttgcaaccttgcaaagcaggcgtttgatgaagctatctctgagttagacagccttggtgaggagtcatacaaggatagcactctgatcatgcaactcctgagggataacttgaccctttggacatccgacctcacggaggatggtgctgatgagggcaaagatgccccgaaaggtgatgcaggcgagggacagtaatcttcggagggggtgcaaagttgttcgagccccaatgttttagatgctctatgctgtcgaagctgtgctgtgccattattgtagctgatttcgtctccattcacttcttttttcttgttagtaggctggtagtggtcgaattaatttgctttgtgttgccgctagtccatgtggactggtattgttcccctggatttatttggcaagcgtgtccgtgctcgctctagcgttttattgagcttttaaagtcatcgcattcttttttgattgcaatcagttattggctggatatgcggtggctgtttggatcagaagtaccgccggggctcccctgccggagtttcttcaccggagcgtgtaacaatgtggaaattggaaaccacgcaaacgtctcttatttgtacccctgagtatacagggcttgtttggttcggttttttttaacagcttttctgaaaaaaaaaaaaaaaaagggcggccgc

SEQ ID NO: 259507 - DNA, 577 bp, Zea mays
  unsure (1)..(577): unsure at all n locations
cccacgcgtccgcccacgcgtccgcccacgcgtccgcccacgcgtccgccgcagttccccgaccacaccgttcctccgagcccaggagcagccccgcgccaggaggaagtttgttcttttaacaatatgtcgagggaggagaatgtttacatggccaagttggctgagcaggctgaaaggtatgaggagatggttgagtatatggagaaggtggctaagactgtagatgtggaagagctcactgttgaggagcgtaaccttctgtctgttgcatacaagaatgtgattggggctcgccgcgcttcatggcgcattgtttcttccattgaacaaaaggaggagtcccgtaagaacgaagagcatgtgaaccttatcaaggaatatcgtggcaagatcgaggctgaactgagcaatatctgtgatggcatcttgaagctgcttgactcccacctagtgccttcttctactgctgctgaatcaaaggtcttctacctcaagatgaanggtgactattacaggtatcttgcggaattcagactggtgctgagaggaaggaatctgctgagagcacaatggt

SEQ ID NO: 259508 - DNA, 1153 bp, Zea mays
caagcccaagccttatcggatgggtaggttccaggttaacccgggcaatttccttgagcacctttgtaggccatcatcgtgctctcagcagattccttcctctcaggaccagtcttaaattccgcaagatacctgtgatagtcacccttcatcttgaggtagaagacctttgattcagcagcagtaaaagaaggcactaggtgggagtcaagcagcttcaggatgccattacagatattgctcagtttagccttgaattttggaacgttttcccttgttaagtttaaattgtttttgtttctaacgggattctcctttctttggccttgttaacccagtttgcccatttgaacattttccttcccccgcgcccgagacgcaaccccgcgccaggagtaagtttgttcttttatcgatattggcgagggaggagaatgtctacatggccaagctggctgagcaggccgaaagaaggaggagtcccgtaagaacgaagagcatgtgaaccttatcaaggaataccgtgcgaagttcgaggctgacctgaccaatatccgggatggcatcctgaagctgcttgactcccacctagtgccttcttctactgctgctgaatcaaaggtcttctacctcaagatgaagggtgactatcacaggtatcttgcggaatttaagactggtcctgagaggaaggaatctgctgagagcacgatgatggcctacagggccgcgcaggacattgcgctggctgagctggcacctacccatccgataaggctgggacttgctcttaatttttcagtgttctattatgagattctgaactccccagacaaagcttgcaacctggcaaagcaggttggaatcacatctacttttctactacatatgtacattcattgtaccgtgtttagggtgagggttgtttgtgcatttgaagcttgggcagaaagaaaatatccaaaaatgccttttaactgtaaattgtaggatacttgccctaaattgttcagtatatcaggagctttttaatgtttatatggcaaacttctgcccttttaggttcacatgcaatttgactgctagatatcttgatccctgtgtatgaggtcagatagtttcttgatagtaatggtactatgatatgatgata

SEQ ID NO: 259509 - DNA, 712 bp, Zea mays
  unsure (1)..(712): unsure at all n locations
ccgcccacgcgtccgccgacgcgtgggaggaacgaatctgctgagagggcggtggtggcctataaggctgctcaggacattgctctggctgagctcgcacctacccatccgataaggctgggacttgctcttaatctttcagtgctctattatgagactctgaactccccagacaaagcttgcaacctggcaaagcaggcgtttgatgaagctatctctgagttacacagccctggtgaggagtcatacaaggatagcactctgatcatgcaactcctgagggataacttgaccctttggacctctgacctcacggaggatggtgctgatgagggcaaagaagccccgaaaggtgaggctggtgacggacagtaatcttgggagagcgcatattgttcgagcccattgttttagatgctctatgctgtcgaagctgaagctgtgccgtgctattattgtagctgatttcctgttccctcacttctttttttatattagtaggctggtagtgttcgaattagttccccattgctttgtgttgccgctagttggcattaagtccgtgtggactggtattattcactggatttgagaagcatgtcagtggttgctctagcgttttattgagttttgaagtcatctccctcatttcggtttcaatcattcaaaaaaaacaaaaaaaaccaggtccgcacggtccgcggacctnggt

SEQ ID NO: 259510 - DNA, 1705 bp, Zea mays
cccacgcgtccgcccacgcgtccgccctctcctcgcgtctcgttgtcccatctagcccatctgctatcagcgaggacgaaggcacaaacccctcacctccctcaaaccctagccctcgctctcccgcttgttcccgtcaccgccatcatgggctcagatgcggacatggaggactacgggttcgagtactctgacgaagagccggaggagcaggatgtcgacattgagaaccagtattacaactccaaaggtttggtcgagacagacccagagggtgcacttgctggttttgatcaagtggtcagtatggagcctgaaaaggctgaatggggatttaaagctcttaaacaaactgtcaagctttactataagctggggaaatacaaagaaatgatggatgcatatagagagatgttaacatacataaaatctgcggtcacccggaactacagcgagaaatgtataaacaacataatggattttgtttctggatcagctagtcagaattttactcttctgcaagagttctaccagacaacactgaaagcgcttgaagaagcgaaaaatgagagattatggttcaagacaaacttgaagctttgcaaaatttggtttgatataggcgagtacggtcgcatgaacaagatattgaaggaactgcataaatcttgccaaagggaagatggttctgatgatcaaaagaaaggcacacaacttttggaagtctatgctattgaaatacaaatgtacactgaaacaaagaataataaaaagcttaaggaattgtatcaaagggctctttccatcaaatcagcgatacctcatccaagaatcatgggtataattcgcgagtgtggtggaaagatgcatatggctgagaggcagtgggctgaggctgccactgatttctttgaagctttcaagaactatgatgaagcaggcaatccgcggagaattcaatgcctaaaatatcttgtccttgccaatatgttgatggagtctgaagtgaatccttttgatggacaagaggccaagccgtacaagaacgatagtgaaatccttgcaatgacaaacctgattgcagcgtaccagaagaacgacatcatggagtttgaaaagatcctgaagagtaatagaagaacaataatggatgatccttttatccgtaactatattgaggatctgttgaagaacatcagaacccaagtgctgctcaagcttattaaaccgtatacacgaatcaggattccattcatttcacaggaactcaatttcccggagaaggatgtggagcagctgttggtgtcactcattctggacaaccgtatccaaggccacatagatcaggttaacaagctgctagaacgtggagaaaggtccaaggggatgaggaagtacaatgctatcgacaagtggaatactcagctgaagtccatttaccaaacattgtccaacagagtttgatgagaaggatcgctgctgctgcgtgcattgcacacctagcattgttgatagcctgttttgcggatttgagggcaactgcaaagaactgtctggtgacgcttgcgatagaatcctggatctgggtaaagttaatattgactacgaggtcgtctctgaattgaatctggtgttttgatagtgcaagactacttgactggtcaaaagccaaatatacgaccatgcccttctggttggtcccccc

SEQ ID NO: 259511 - DNA, 347 bp, Zea mays
cggacggtggggtcgagcctgggtctggtttccagacctacccaaactgaaaaaattgttcttgcttcccgatttccagtcctctgtcgtttgttgtcccatactcccatctgttctccgcgaggcgcaacgaaggcacaaaacccttacctccatcaaaccctagcgctcgtgtccccgtttagctcccgtcgccgctaccatgggctcagatgcggatatggaggactacgggttcgagtactcagacgaggagccggaggagcaggatgtcgatatcgagaaccagtattacaactctaaaggtttggttgagacagacccagagggtgcacttgctggttttg

SEQ ID NO: 259512 - DNA, 628 bp, Zea mays
cggacgcgtggcgtgacgcgtgggcggacgcgtggcgtccgactcccagccgtcgtctgctgcggactccgcctccagtttggtctgtttcttgcaagttgctcttgcggtagttcccccaactgtcaccatgcagaacgaggagggtaagactgtggacctctatgtccccaggaagtgctcggccacaaacaggatcatcactgccaaggaccatgcctctgtccagatcaacattggccacttggatgcgaatggcctgtatgatggtcacttcacaacgtttgctctctctgggtttgtccgtgctcagggcgacgcagacagctccttggacaggctgtggcagaagaagaaggctgatatcaagcagtagattttacatctagtttaccaagaattggacactgccttagctatgttttgaattcatgtcactatatgcaatgttgtgatttcagctggtaccttaaatctgaagatttagtatctttgttgggttccttctgagtttgatgtgtggtgttcaattcaaccgtccagtctccagtggcaccgaaatatgctgctggtgtagtttcattcaaaaaacgtgccattcaattcaactgcccagcgccattcaatg

SEQ ID NO: 259513 - DNA, 601 bp, Zea mays
  unsure (1)..(601): unsure at all n locations
cgcacgcgtccgcggacgcgtcggccgcagttgtcttcggtcttccgtgctcaccttcgagagatcaagttgctgctgcggtagtccccaaccatcatcatgcagaacgaggagggtaagacggtggacctctacgtccccaggaagtgctcggccacgaataggatcatcactgccaaggatcatgcctctgtccagatcaacattggccacttggatgcgaatggcctgtacgatggtcacttcaccacgtttgctctctctgggtttgtccgtgctcagggtgatgctgacagttcgttggacaggctgtggcagaagaagaaggctgagatcaagcagtaggtctttgcacgtagttccaccggtaatggactcttgagggatactgctctagctaatgctttagctggcggggggggagtgattctgatgtttggctgttcgtttgttggatgaccaggttttagtttgtctggccatgcttgggtcgcagcaatctgtggcaccatgaatatcattttgtcaacttattcttctcacatatttgaatgcttagtatttactaaaaaaaaaaaataananaaaaagggcggccgct

SEQ ID NO: 259514 - DNA, 609 bp, Zea mays
tcggctcgagctctcccaccccgcagccgccgcgcaggtagccctagcacccgcgacgagcaggatctgcccagttgctcttgcggtagttcccccaactgtcaccatgcagaacgaggagggtaagactgtggacctctatgtccccaggaagtgctcggccacaaacaggatcatcactgccaaggaccatgcctctgtccagatcaacattggccacttggatgcgaatggcctgtatgatggtcacttcacaacgtttgctctctctgggtttgtccgtgctcagggcgacgcagacagctccttggacaggctgtggcagaagaagaaggctgatatcaagcagtagattttacatctagtttaccaagaattggacactgccttagctatgttttgaattcatgtcactatatgcaatgttgtgatttcagctggtaccttaaatctgaagatttagtatctttgttgggttccttctgagtttgatgtgtggtgttcgtttaattcccttgtacaaccccatttagtatcattgtgatgattttggattcaatcttgctcgagtcagggtacgattccaataaaaatataaagaggaagaaa

SEQ ID NO: 259515 - DNA, 1423 bp, Zea mays
ggaagctccatttagatctggcggctattgctgctagtagttctgatgctccttcaataagaaaccattctcagcatcacagctgaggtctggactgaggaagttccagacctcatctgtgatgctgagaatgggctcttatgagaagctccatttagatctggcggctattgctgctagtagttctgatgctccttcaattttggaattccttcagagacgaaagtctgacccaagcatggttaagactctatgcctagctatagttcggacaatcatcctggaaaggaggtcagtgcccacagttgctaaggcgatggatgttgtccttgattcctacacgcgtttgatgaaaatgggaggggcttttcctggggttaggcgaatacatgagcaaaatcagcagtcaggtagtcagcctattgatggctcccatgtggtttctcaggaatccagtcctggaacaacagttagtcctgctgtgaacccagaccacggaagtgaggctgtggatatatatgtgcagtcaaatccaggagttgagcatacaatagacaggggattactaaatataaacatatcttctgattctgtggacaatacatctgatgctgtcgacaaacgacagcaagctgtaggcgaagctagccgaccattgtcttcaggcacaatgacgcaacatggacaacatgctggaaccgtggcaatttctccaattgagatgttccagtctgtctttacacttgttgaagatgaaatgatgggtgatcctgcatatcttattgctgtcatcatagagtttctacggagtgtctcaaaggctgggcttaaggctcctcacaacctttatgtgatgacggcgacactactagctcgtagcaaccgttacgctgaaatagcattgtttgtgtcaaacaagattcttgagccgtgtaaagaactggcaatgcaacttatggagctgggtctgcagcacccgccaacgaggaagctgggcatggacatgctgagggagcgaggcctgcatcacgactacgtgactgcgatgctgcaagatgggtactacttggaggccctgcgctatgccagaaaatacaaggtgatcaccgtgcagcctgccctatttctggagaaagccctggcgaagaacagcgcccacaacctggctgcagtgctgagcttcttctgcgagttcactccgagcttcaaggccacatcggactttgtcagataccggcatattctgtctgaaatggtttgaacagctttccgttgtgcaaacttgttgtcccgaaatgacttggcacgtcctctgtaacaagcaacgtcacctcggagggtacttttatttaattcttttggtccctcttgcagaaaataatattttattgttgtgaataaaaaaacgttgcaattaccgatg

SEQ ID NO: 259516 - DNA, 1455 bp, Zea mays
  unsure (1)..(1455): unsure at all n locations
ctcgccgctgccgcctccgcccccaccgtcctccgcgccacgctttcccatcgcgttcgctgctcctctctctgcctttccctcggggtcgtgctgccagaaatatgcttggcgcggcgaggtcgatctcttcggccgccccgtcgcgagtcggaggccgtgcggctatggaggtccgggcggctcagtccggcgagatccatgtcatcgcgggccccatgttcgccggcaagaccaccgcgctcctccgtcgggttccgggccgaggccggcaccgggaggagcgtggcactaataaagttcgacaaagacaaccgctatggattggattctgttgtgactcatgacggtacaaagatggcgtgctgggccttgtcagaactgtcaagttttcatgacaaattaggaattgaggcctataataaggtagatgttataggtatcgatgaggcccaattcttcgacgatctttatgatttctgctgcaaagctgcagatcgtgatggaaaaattgtagttgttgctggcctagatggtgactacaaacggagaaagttcggttcaattcttgatattgttcctctggctgactcggtcaccaagctaacagcacgctgtgagctatgtggtcgccgggcgttctttacactgaggaagacgcaggaaaccaagactgaactaattggaggagcagatgtgtatatgcctgtgtgcaggcagcactacatggatgggcagattgttattgaggccacaaggattgtgttggaccttgacagatccaccgtgacggcgaaagccttgaaataggccaatacctgacttctgcatgcagatttgcagtgtgtaacgatttatttatgatgacattggttgctgtcgagtgttgaagacgcacaccagttggtgaaaagctgttggccttgagatgctgccaccagcgagggaagccaaatgagttgatcccacaaagtactgttgagaagtttgtaaatatctaacagtgtttgggttttaaatgcggacatgtatcgcttttcttatgcaattggcattgtcatttttattaagcaatcagatgcttggaatcagctgtacgaatttgtaccacaaagggatagccttagtttactttcaaacctggaaccgtggcaatttctccaattgagatgttccagtctgtctttacacttgttgaagatgaaatgatgggtgatcctgcatatcttattgctgtcatcatagagtttctacggagtgtctcaaaggctgggcttaaggctcctcacaacctttatgtgatgacggcgacactactagctcgtagcaaccgttacgctgaaatagcattgtttgtgtcaaacaagattcttgagccgtgtaaagaactggcaatgcaacttatggagctgggtctgcagcacccgncaacgaggaagctgggcatggacatgc

SEQ ID NO: 259517 - DNA, 1182 bp, Zea mays
gtcgatccggcgctccaacccgaccccagccttaccctcgaagccgaaggcctcgtgccttctcttcctccctggcatggaggaagtagctgtttcgcctatgatcgttgccgccgtagtgctggacaacaatggcgctgacgcggtctcctgcactgccatccctagcgtaacaataagcctagaggagaaagaaaatatcaatggggatgttcccacgatcacctcggccgcaagcaacgaggaggaggcgttgttcagtgtcggagaatccaccaaggacgatggccatcgcttgacgatggaatgctccactcccgtctcctccagtagcccttccactcgcaagaagcgcggggcgttcagcctcttcagggcgatgttcctgtccttcggccggagcgacgacagcatgaagaagacagacgacgacaccacgagccccaagaagagagccatcgcggctgctgatgacgattgcaagcctgccggtgacgagtcaacgtcgtggaagcgcctcgtggacggtatgcgcccgctccgcctccgcgggcagctggagtactacccgccgccaccgccgccaccgccgctgggccacgccgatgtgtaccatgacgtgatcctcccgccgccgtcgcaggcacggttcggcttcgagatcaaggaggtgggcatgaccagccgctacgcgtccgctgaggatctgcaccagatggacagcgaccaggaagagggtgctgagggtggcgatgacggtgacagcagttgcccacacgccatcgacatgcaggcggaggagttcatcaccaagttctatgagcagttcaagtcagaatcgttcaacggccgtgcctccgagtgatccattgatccatccgcttgcggcatgtatgtaatcgttctgatcttacaccgaaattgcattcgtgtcagagacgactctacccaatatggatcaggaagaaatgtatcagtgatcgcatcgataaacacagtttgtctgaactctaaacttctctgtgacaccattctattcttcaacaaactaaactcccttcactaattttaggatgtactcgcatcaatctgttatattttctcagaaatattaggctgtgtacacctcacgatagagatgcacagggtggagtgtatattatattaaaaagttctttgtct

SEQ ID NO: 259518 - DNA, 767 bp, Zea mays
  unsure (1)..(767): unsure at all n locations
tcacgggtcgacacaagcgtccacacacgcttctggaatttggtgctgcttggtcaacaacattaaagttcaaggtcaatgaatcgtacagctgcagatatatgctaggtagtaacaaggctgatattcactcgaacaagctattcaattgtactgctgaggaaccttcgactggggagcttttcaaaaggatacttatactgttttcagagatgtatgtgtcagaagatttcagttcagggcgaatgcttggatatgtggcagcaggtgttgtgctgggcatgctgagttcgatgttcattacggccttattcagaggtatgtatgggttgttgctcgctgccgccaggtgggctgtgaggaagcattgcatcagagtatttgccagccggttgaagcgtgcctgccttcttgtcgcctatgtatccgctgttggctggatcaccttgcagtacagcaaatttatcgggttgaaagaactcttgtcggattctgaagtcatggagaggttcttttaggctgtagatgtattccccggtgtatattgtacttgtaaataccattcggttatttaggaaggtttcttcttcttctttttgatgtgaaaccaatgctctgttgtacgagtatgtacatgccagttgccagctacgcttctgctctgtcacaaacgtgttgttcattccacattttatcagggtcagctagctcgcgtcctgagtcccaaacgcccctgtcgatgcataaaacaaaaaaaantaggaaaa

SEQ ID NO: 259519 - DNA, 836 bp, Zea mays
gtcttgcaaagtccaaggaaacgacgggttcacagccgctgcgctcaattgaccctcccctcgccggcgtccggcgatcgccggcatccgagcgatggatcacccatccacgtgatggatccgacagctccttccccggccccccctgcgggcgatggggcacagccatcggaccagaaccggcagcgaccaaggtctgcactccgtggcgccctcggggtggccttccccatcgtggtatcgttcctcttctccttcctcgttgggctcgctgggctcgcgcttggtggcctctcgtccactgcatcggtctccatgccctccacctgccgcatcctctccagtggcgttgaccttaggtcatcaaaagtttgcgagcttgggttattgaactatagagctaagcatgtcttctacccatcgagtaagaggagattccgctgccatgatgactactactgggcttcagttttacaggttgaatatacagaatatttttctggccaattatcttatgcagtggccgaggccccgaaagaggctcttcctcataattgtcgacctgattttggtgctgcttggtcaacaacattaaagttcaaggtcaatgaatcgtacagctgcagatatatgctaggtagtaacaaggctgatattcactcgaacaagctattcaattgtactgctgaggaaccttcgactggggagcttttcaaaaggatacttatactggcactttcactgtgtatagtttaagtgacactacctgcagtcgataagttgtgacgttcagacatcccttgctggtctattggttttcagagatgtatgtgtca

SEQ ID NO: 259520 - DNA, 812 bp, Zea mays
cccacgcgtccgtccacgcgtccgtccacgcgttcgcccacgcgtccgcccacgcgtccgctggaaaccctagccgccatatctcacgatccactcgagcaccaagccgagggaaggtgaggagcgatggcgcgcggcgtggtgtcggcgaagggcggcgcggtcgcgggcaagaagaaggggtcggtttccttcacgatcgactgcaccaagccagtggaggacaagatcatggaggtcgcctcgctcgagaagttcctgcaggagcgcatcaaggtcgccggcggcaaggctggcaacctcggcgactccgtcaccatctctcgcgagaagaccaaggtcaccgtcacctctgacggacccttctccaagaggtacctgaagtacttgaccaagaagtacttgaagaagcacaacgtgcgggattggctacgcgtggttgctgccaacaaggaccgaaacgtctatgagctccgctacttcaacattgctgagaacgagggcgaggaagaagattagattgcactacgcttatattttagtattgaactcgttgcattttgatacctgtacccgtagtttcgcaaatgtcccatgttatggtgtggtatggttaatttgaagaatccttatgtactgaatctctgcaaaaagctatgttgtggacagaagtgtaacgtgccggatttcttgcatttcttagggctattttgagaaccctattttcttaaggggtttttatttttaagtgaaattagtttagttttaaaaaaaaacccacgcgtccgcccacgcgtccgaccacgcgtccg

SEQ ID NO: 259521 - DNA, 625 bp, Zea mays
cccacgcgtccgcccacgcgtccgcccacgcgtccatcccaccagcaaatccccaattcctccgagttcgagcgaccatgtcggggcgtggcaagggcgggaagggtctgggcaaaggcggcgccaagcgtcaccgcaaggttctccgcgacaacatccagggcatcacgaagccggcgatccggaggctggcgaggaggggcggcgtgaagcgcatctcggggctcatctacgaggagacccgcggcgtgctcaagatcttcctcgagaacgtcatccgcgacgccgtaacctacacggagcacgcccgccgcaagaccgtcaccgccatggacgtcgtctacgccctcaagcgccagggtcgcaccctctacggattcggcggctgagaggcgctaccgccgctggtggccgtggcaaaagtcttgggtcgcggtcaagaaatcgagagtattctggatgacgtgcttagtttcgtagtattattatcactagtgcttattgttagcggttgttgggttcgaccactctaagccactgtcaaacagtaatatatgagtaccgcatttccgtgtttcgaacttctggtgtttcttaatcttatggccctcgggttaattcgctt

SEQ ID NO: 259522 - DNA, 575 bp, Zea mays
ctgacgacccacacgagcacttagccgttgggaggggcgatggctagaggtgtggtgtgagcgaagggcggcacggccgcgggcaagaagaaggggtcggtcgccttcacgatcgactgcaccaagcccgtggaggacaagatcatggagatcgcctcgctcgagaagttcctgcaggagcgcatcaaggtcgccggcggcaaggccggctacctctgcgaatccgtcatcatctcccgcgagaagaccaaggtcaccgtcacctgcgactggcccttctccaagaggtatctgaagtacttgaccaagaagtacttgaagaagcacaaggtgcgagattggctccgtgtgattgcagccaacaaggaccacagcgtctatgagctgcggtacttcaacattgctgagaacgagggcgaggaagaagattagactgcattgcacttatatctcagttttgaactcattggatttgatacttgtacccgtagttttgcaaatgcccccatgttatgctctgggcttcgccgcgcgcgtctctccctcccccacactccgccaccagcgccgaagca

SEQ ID NO: 259523 - DNA, 685 bp, Zea mays
ccattacaataatttataaagaaaccattttttctccaaacacataggaaggggaggagcgttggttcgcggcttggtgtctgcgaagggcggcgcggttgccggcaataagaaggggtcagtttccttcacgatcgactgcaccaagcctgtggaggacaagatcatggaggtcgcctcgctcgagaagtttctgcaggagcgcatcatggtcgccggcggctttgctggctaccttggcgactccttcaccatctctcgcgagaagaccaatgtcaccgtcacctctgacggacccttcttcaagaggtacctgaagtacttgaccaataagtacttgaagaagcacaacgtgcggtgattggctccgcgtggttgctgccaacaaggaccgcaccgtctatgagctgcggtacttcaacattgctgagaacgagggcgaggaagaagattagactgcattgcacattgctgagaacgagggcgaggaagaagattagactgcattgcacttatatctcagttttgaactcagtggatttggtacctgtacccgtagttttgcaaatgcccccatgttatgctctggtgaattttggatggtctatttatctgtaaagtctttgcatttggctgctcctatatgcacaagaaatttaacagaagctcttaagcgaattttaag

SEQ ID NO: 259524 - DNA, 350 bp, Zea mays
aaagcccaacgtgcggaattggctacgcgtggttgctgccaacaaggaccgaaacgtctatgagctccgctacttcaacattgctgagaacgagggcgaggaagaagattagattgcactacgcttatattttagtattgaactcgttgcattttgatacctgtacccgtagtttcgcaaatgtcccatgttatggtgtggtatggttaatttgaagcatccttatgtactgaatctctgcaaaaagctatgttgtggacagaagtgtaacgtgccggatttcttgcaaaaaaaaatatattatatgttgggcggccgcccgggaattcggacggtacgtgcaggcgaac

SEQ ID NO: 259525 - DNA, 285 bp, Zea mays
gtacttgaccaagaagtacttgaagaagcacaaggtgcgagattggctccgtgtgattgcagccaacaaggaccacagcgtctatgagctgcggtacttcaacattgccgagaacgaaggcgaggaagaagattagactgcattgcacttatatctcagttttgaactcattgaatttggtacctgtacccgtagttttgcaaatgcccccatgttatgctctggtgaattttggatggtttatttatttgaaaagtctatgcatttggctgctcctatatgaac

SEQ ID NO: 259526 - DNA, 784 bp, Zea mays
cggacgcgtgggcggacgcgtgggcggacgcgtgggcggacgcgtgtgctgatcgacaaagtgacggtcaaggcccccggcgacagccccaacacggacggcatccacatcggcgactccagcaacgtgaccatcagcagcaccaccatcggcgtcggcgacgactgcatctccatcggccccgggagcaagatgatccgcatccatggcgtcaagtgcggcccaggccacggcatcagcgtcggcagcctggggcgctacaaggacgagaaggacgtggaagacgtgcaggtgacggggtgcacgatcgccggcaccacgaacggcctgcgcatcaagtcgtacgaggactccaagtcgtcgctcaaggccagcaagttcctgtacgagggcatcaccatggacaatgtctcctaccccatcatcatcgaccagaagtactgccccaacaacatctgcgtcaagtccggcgcctccaaggtggccgtcaacgacgtcgtcttcaagaacatccacggcacctccaacacgccggaggccatcacgctcaactgcgccaacaacctgccatgccagggcgtgcagctcgtcaacgtcgacatcaagtacaatggatccggcaacaagaccatggccgtctgcaagaacgccatcggcaagtccatcggcttggcaaaggagctcgcctgcattctgaacaattgactaacatgcatataatatatactaggtaaaatccccgtgcattgcaacggaaaacacttgtgtatacacaggtcatttt

SEQ ID NO: 259527 - DNA, 1671 bp, Zea mays
cggacgcgtgggcggacgcgtgggcggtacgcgtggccacgcgtccgcacgaatctgccatcctctccaacacgaagatggcgttcatcagcaatgtcgcagtgaaggcggcggccgtggccgcgctgctgctggtcgcagcggtgtcgcctgccgcgcgcgcggcggcggtggcggtggcgggaggggcgccgtcggtgccggcgggtccgctggacatcgcgcagctgggcgccaagggcgacggcaagtcggacagcaccccgatgatcctcaaggcgtggaagaacgcgtgcgaggcgacgggggtacagaagatcgtcatcccgccgggcaactacctgacgggcgggctggagctgaagggcccctgcaagtcctccatcatcatccgtctcgacggcaacctgctcggcaccggcgacctcagcgcgtaccaaaggaactggatcgagatcgagaacgtcgagaacctgtccatcaacggccacggcaccatcgacgggcagggagccctggtgtggagcaagaaccagtgccagcattcttacaattgcaagatcctcccgaatagcttggtgctggattttgtgacgaacgtccagatccgcggcatcacgctgctcaacagcaagttcttccacctcaacatcttcgagtgcaagaacgtgctgatcgacaaagtgacggtcaaggcccccggcgacagccccaacacggacggcatccacatcggcgactccagcaacgtgaccatcagcagcaccaccatcggcgtcggcgacgactgcatctccatcggccccgggagcaagatgatccgcatccatggcgtcaagtgcggcccaggccacggcatcagcgtcggcagcctggggcgctacaaggacgagaaggacgtggaagacgtgcaggtgacggggtgcacgatcgccggcaccacgaacggcctgcgcatcaagtcgtacgaggactccaagtcgtcgctcaaggccagcaagttcctgtaccagggcgtcaccatggacaacgtctcctaccccatcatcatagaccagaagtactgccccaacaacatctgcgtcaagtccggcgcctccaaggtggccgtcaacgacgtcgtcttcaagaacatccacggcacctccaacacgccggaggccatcacgctcaactgcgccaacaacctgccctgccagggcgtgcagctcatcaacgtcgacatcaagtacaacaggtccgacaacaagaccatgtccgtctgcaagaacgccatcggcaagtccattggcatggcgaaggagctcgcctgcgtctgaacctacttgcatccatcactcactcttcgtcacctctctctttctcactctcgccagtctttttttaggcctctggcaatctgcgaactttcttattcattctactagtgtggatctataattccattcaaaatatatacatgatctaaatttcatgccaaaaaaaaaaaaaaaaaaaaaaaaaaaaaaaaaaaaaaaaaaaaaaaaaaaaaaaaaaatgaaagaaaaaaaaggaggtcgctcaaaaggttcgatgcttacttaagcttgcatgcaacgtaatagctctccaataatgtcacccagattcatttcattggccgtcgtttaaaaacaacttcattgggaaaaa

SEQ ID NO: 259528 - DNA, 454 bp, Zea mays
ggactagcaggccgaggccatcgcgatggcgttcatcagcagtgcggcgatgaaggcagccgtggccgctctgctggtgttcgccgcggtgtcgcctgccgcgcgcgcggtggcggcggaggcggaggcgaaggcgaaggctgtgggaggcgcgccgtcggtgcccgctggctcgctggacatcgcgcagctgggcgccaagggcgacggcaagtcggacagcaccccgatggtgctcaaggcgtggaagcacgcgtgcgaggcgacggggcagcagaagatcgtcatccccaagggcaactacctgacgggcgcgctggacctggtgggcccctgcaagtcctccatcatcatccgcctcgacggcaacctgctcggcaccggcgacctcaacgcgtacaagaggaactggatcgagatccagaacgtcgacaacctgtccatcaacggccac

SEQ ID NO: 259529 - DNA, 749 bp, Zea mays
ccaacacgtccgcccacgcgtccgcccacgcgtccgggacgtggaggacgtgaaggtgacggggtgcacgctcgccggcaccaccaacggcctgcgcatcaagtcgtacgaggactccaagtcgtcgctcaaggccaccaagttcctgtacgagggcatcaccatggacaatgtctcctaccccatcatcatcgaccagaagtactgccccaacaacatctgcgtcaagtccggcgcctccaaggtggccgtcaacgacgtcgtcttcaagaacatccacggcacctccaacacgccggaggccatcacgctcaactgcgccaacaacctgccatgccagggcgtgcagctcgtcaacgtcgacatcaagtacaatggatccggcaacaagaccatggccgtctgcaagaacgccatcggcaagtccatcggcttggcaaaggagctcgcctgcatctgaaccaattgactaacatgcatatattatatatataatcactcttcgtaacctctctctttctcacgtactctcaagtctccaccgaatatataatccgctggtttgtattttctttcttctttggatcatcacaaaaccaaccgatgtaattattattagaccgacgcctcacaatcttggaacttattcattatgctagtgtatatctgtaatcccattccataatgttaatgttgatttgtggtcacgtttcacccacgcgtccgcccacgcgtccgcccgggaattc

SEQ ID NO: 259530 - DNA, 445 bp, Zea mays
gcgtcggcccaggcctccgctcacgcatccgcaacatctgcgtcaagtccggcgcctccaaggtggccgtcaacgacgtcgtcttcatgaacatccacggcacctccaacacgccggaggccatcacgctcaactgcgccaacagcctgccatgccagggcgtgcagctcgtcaacgtcgacatcaagtacaatggatccggcaacaagaccatggccgtctgcaagaatgccatcggcaagtccatcggcttggcaaaggacctggcgtgcatttgaaccaattgactaacatgcatatattatgtactaggtttgtgcccgtgcgttgacacggaagttaaaaattactataacacagagatacatagcgataagtatcactatgacattcacaatccatgtggcacaatatcactgtaaccatctatgattgtgcattgcga

SEQ ID NO: 259531 - DNA, 195 bp, Zea mays
ccggcaacaagaccatggccgtctgcaagaacgccatcggcaagtccatcggcttggcaaaggagctcgcctgcatctgaaccaattgactaacatgcatatattatatactaggtatatgcccgtgcattgcaacggaaaacacttgtgtatacacaggtcattttttagtaatgctatcaagaatcaactcat

SEQ ID NO: 259532 - DNA, 855 bp, Zea mays
gttggacctcgatattctggttctgtgccttccactgcaccaagaagtgtggaaaacagcaaagacaatggtggaagggcctccaaacccaaaccttgtgacatagttgttcaaaatggctcttcaaagcctgaaagggaaccaggcaattcgtcaaacaaaagagcaacggataaaatggacgactttggccacaaggatagtttctctgaagtgtcctatgaatactgtgtaagggtggtcaggtggctggagtgtgagggctatattgagacaaacttcaggatgaagtttcttacatggtttagcttacgtgccaccctgcaagagagaaagatagttagcgtatatgtggatactcttatcgaggaccctgtcagtctctctggccagctcgtcgacagcttctcggagaggatatatagcaaaaagcggacgccttctggtttctgcatggacctgtggcattgaagcaccacaagcacctaccgtttgctttgtagggagcacacattcgggcccattcttttgttgcagatcgttgcattgattcttcattggaaatttcgctgaagtatttgacttgcacatcttcattgaaacttaacttttcaatgacagtagtttaagttaatgggcaatttcttttttcttttttccgttctttacatttgctccatagtaggctaccgtgctatcatctgtaccgtccatgttaaccttagagcatcaatgagccgcatcgttcggtcagcctggggcatcgtggattttgtggcgggtggctgctcgaaggatgattgtcaggctggaccaggaatgcgcctttctgtgggatgaagcagatgcgggtgg

SEQ ID NO: 259533 - DNA, 492 bp, Zea mays
agcggtctagcccatactccgcatgcaaacaacctctcggcctcatcaggcccgctgccctccgtctccgcctccgccgatcccctccgctgaatcgaatagaagaatcgagcgccgctactggcgaggggctagcggtcggcgcacagcgcggtatggcgagcggcagcagcaacggggagccaagcacggcaccgcaggcgaaccggtggtacgacctccggctgggctcttcctgccgtgacccctcccccaccgccaagttctgcaccctccgttgtaagcccttcgccccgtttcttccactccttttttttggtatccaacctgcagctccgtagcctgggatccgcaccagagaattgacgagcgctagttagcaccacaggaggtagggtttttttgacacttgactgatggctcaccatgggaaaaccaggatttcactactccacagcatcgaaattaccagaagcatctgggtgattttac

SEQ ID NO: 259534 - DNA, 1092 bp, Zea mays
gcggtctagcccatactccgcatgcaaacaacctctcggcctcatcaggcccgctgccctgcgcctccgcctccgccgatcccctccgctgaaccgaatagaagaatcgagcgccgctactggcgaggggctcgcggtcggcgcacagcgcggtatggcgagcggcagcagcaacggggagccaagcacggcaccgcaggcgaaccggtggtacgacctccggctgggctcttcctgccgtgacccctcccccaccgccaagttctgcaccctccgttatgaatttaagccagcatcaattgacaagacacaagctgggtctctgcaaagcaccaaagataaccgggttactgtggaattccataataatcagcctggcaagccaaaggtgacatttgagggaagccaagaagagtacaaggataatgatggtgtcttattttttgatggtgagacctttcgcctagagaggttgcatagggctgtcaagaggttaaggcatgtccgagttccaggagagtctgcagcagttaatttggcagctacaactactggaatgggtgcagaatcacagtctcctccattacctaaagtcaacaagtcacagagcatgaacaaacctgctgttcactcagttccagttgaggttgagcgtattgacattggtgaaccagaaaatccaggcccaaaatacaacaacaggagtacatatcaatctgttaccgtagacccatttgccctttcacctgatccaaatgagcaagagaaccttgacatacttggtgacgatgatggcaatgcttcaccaaacaacttggctgcaggacaagaggcatctgttcgtggttttgacatcaacttaccaaatcaggacgatatggatgatgaaattgctgatgtagatgtaaatgatgacacggatctgtggatcaatgcagccgatgcgctgcgagctcaagtgaacgcagaggagcatcaggagcagcaggacagctcaagctctagtgggagcagcagcagcagcagcggaagtgagagcggcagtggaagtgggagcagcagcagtggtagcgatggtagtgatgctgattc

SEQ ID NO: 259535 - DNA, 1035 bp, Zea mays
tacagtggatgataataattaatcagcaggctttggggccaaaagaaacggagcggaggcgagcgggggcggcaagcaaccacgggcggagctcggagcgtcctcctcctcccgtctataaattcccctctttttcttcctccatatataggggccatcagatccaagaagagggaagagcaccaaggaccttcggcgcccgttcaggatccacatcttcccgagcgagttcttggttgacctcttcctcttcggaccacctccaaggctcttggtgtagcttgccactctcaccaatcaagttttcatgtctgatctcgacattcagatcccaactgccttcgatcccttcgctgaggccaatgctggggactctggtgcggcagcagggtcaaaggactacgttcacgtgcgcatccagcagcgtaatggtcgcaagagcctgaccaccgtccagggattgaagaaggagttcagctacagcaagatcctcaaagatctcaagaaagagttctgctgcaatggtacagtggtccaggacccagaacttggacaggtcattcagctccagggtgatcagaggaagaacgtctcgaatttcctcgtccaggccggcattgtgaagaaggagcacatcaagattcatggtttctgagcaaccgccgggtccatatcaaaccaaccctgcatgcagggcatcttattatatataatatctgaggtggagcatatctatctggctgtgtactgcaagcaggcctagtacgccgcctgcgcgttcctcctattacacatataggcccctccctgcgtgtatgcttgttaccgtcgtgtcgaaccttgtactacgaggctccatcgaacatcgatggcttgcttctttatcagaacatgtttgaataaacgctatttggtaaaaaaaaaaaaaaaaaaaaaaaaaaaaaaaaaaaaaaaaaaaaaaaaaaaaaaaaaaaaaaaaaaaaaaaaaaaaaaaaaacaaaaaaactataacagaaggaaagatgaaacagagcc

SEQ ID NO: 259536 - DNA, 1571 bp, Zea mays
  unsure (1)..(1571): unsure at all n locations
gtgcgccctcgcgaggtcgaacccccaaggcgaggcgacgaaaccctcgccagtccccaactcgaacctcagtcaggcagcgtgaggagggagagttcaaggaccgaggcggcgtcgggcgagatgaagcttaacgtcaagaccctcaagggcaccaacttcgagatcgaggcgagccccgatgcatcggttgctgatgtgaagaggatcattgagaccactcaaggtcagagtacctaccgggcggaccagcaaatgctcatataccaagggaaaattctcaaggatgaaaccactttggaaagcaacggagttgctgagaacagcttccttgttataatgttgtccaaggctaaggcatcatcgagtggagcttctaccgctactactgcaaaagctcctgcaactctggcccaacctgctgcccctgtggcccctgctgcatcagttgcaagaacaccaacacaggctcctgttgccacagctgaaacggcacctccaagtgtccaacctcaggctgctccagctgctacggttgctgctactgatgatgctgatgtgtacagtcaggcagcttcaaaccttgtatctggcaacaatctagaacagactatccaacaaattcttgacatgggtggtggtacatgggaacgtgatactgttgtttgtgctctacgtgctgcatacaataaccccgagagagctatagactacctgtattctggaattcctgagaatgtggaggctcagcctgttgcccgagcacctgctgctggccaacaaacaaatcagcaggccgcatcacccgctcagccagcagttgcattgccagtgcagccatcacctgcctctgcagggcctaatgcaaatcctctgaacctttttcctcagggtgtcccaagtggtggggccaacccaggtgttgttccagctgcaggatctggtgcccttgatgccttgcgacagcttccacagtttcaagcactccttcagttagtccaggctaatcctcaaatcttgcagccaatgcttcaagagctaggtaaacaaaacccacaaattctgcggttgattcaggaaaatcaagctgagtttctccgcttggtgaatgaatctcctgagggtggtcctggagggaacatactaggtcaactggcagctgctgtgccacaaacgctgacagttaccccagaggaacgggaggctatccagcggctcgagggaatggggttcaaccgtgagcttgtgctagaagttttctttgcatgcaacaaggacgaagagcttacagccaactaccttctggatcacggccatgagtttgacgagcagcagcaatagacgtggggtggatggaggaaaccgaggcagttgcagaacagcgagtgtcgttcttatgctatgctgctgactatcttttatttccatatatatttgttcggaatgctttctaagtacatattaattcaatatcaagcgttacaccgtgtatgaaagcctgtcaaatcgtggcctttggtttggaggaaaggactccgattgctccctaaaaaaaaaaaaaaantatnaaa

SEQ ID NO: 259537 - DNA, 537 bp, Zea mays
ccctctcgttcgcccacgcgtccggcttccccgtgcgctctcgtcgtcttcgcgaggtcgaaaccccaaggcgaggcgttgaaacccttaaccctcttccacctcgaagcggcgcgaggagggagagtgtgagtggactcaggaggcggcgggcgaaatgaagcttaacgtcaagaccctcaagggcaccaacttcgagatcgaggcgagccccgatgcgtcggttgctgaggtgaagaggatcatcgaaactactcagggtcagagtacctacccagcagaccagcaaatgctcatataccaagggaaaattctgaaggatgagaccactttggaaagcaacggagttgctgagaacagcttccttgttataatgctgtccaaggctaaggcatcgtcaagtggagcttccactgctactgctgcaaaagctcctgcaactccagcccaacctgctgcccctgccacatcagttgcaagaacacctacacaagctcctgttgccacagctgaaacggcacctccaagtgcacagac

SEQ ID NO: 259538 - DNA, 701 bp, Zea mays
ctcacaccctctgtccttatggtgtctcaagtgccgacagcaacagaggtgttgccgcaggtgtaggatctgatgattttgatcgcttgcgacagctttgtcagtggatacggctcgttgatttagtgcaggctaatcctcaatatgttgtaggtaaacaaaacccacatattctgcggatgattcaggataaatcaagctgagcttctccgcttggtgaacgaaactccggagggtggccctggaggaaacatattaggtcaactggcagctgctatgccgcaatcggtgacagttaccccagaggaacgagaggccatccagcggcttgagggaatgggcttcaaccgtgagcttgtgctagaagttttctttgcatgcaacaaggacgaagagcttgcagccaactacctccttgatcatggccacgagtttgacgagcagcagcaatagtgggtgatatggtgtggtggatgcaggaaaccgaggcagtagcagaacagcatagtgtcgttctgatgacctccgcctgatgagagatacttggttgtttatgctatgctgctgaccatcttttatttccatatatatttgttcggaatgctttctaagtacatattaattcaatatcaagcgttacaccgtgtatgaaagcctgtcaaaaaaaagactgtcggttggagggaaggattcgattgctc

SEQ ID NO: 259539 - DNA, 669 bp, Zea mays
tttactcgtccgcccacgcgtccgcccacgcgtccgcccacgcgtccgcccacgcgtccgtggggactctggtgcagcagcagggtcaaaggactacgttcacgtgcgcatccagcagcgtaatggtcgcaagagcctgaccaccgtccagggattgaagaaggagttcagctacagcaagatcctcaaagatctcaagaaagagttctgctgcaatggtacagtggtccaggacccagaacttggacaggtcattcagctccagggtgatcagaggaagaacgtctcgaatttcctcgtccaggccggcattgtgaagaaggagcacatcaagattcatggtttctgagcaaccgccgggtccatatcaaaccaaccctgcatgcagggcatcttattatatataatatctgacgtggagcatatctatctggctgtgggctgcaagcaggcctagtacgccgactgcgcgttcctcctattacacatataggcccctccctgcgtgtatgcttgttaccgtcgtgtcgaaccttgtactacgaggctccatcgaacatcgatggcttgcttctttatcagaacatgtttgaataaacgctatttggtaaaacacaatatactagacaatgtcagctaaaatgtggagaagtgggagcagaacaaggc

SEQ ID NO: 259540 - DNA, 404 bp, Zea mays
cactagtttgacgagcagcagcaatagtgggtgatatggtgtggtggatgcaggaaaccgtggctgtagcagaacagcatagtgtcgttctgatgacctccgcctgatgagagatacttggttgtttatgctatgctgctgaccatcttttattttcatgtgttcggaatgctttctaagtacatattaattcaatatctgttacaccgtgtcaaatcgaggcctttgatttggtgggaagaggtagattgctgatttgtttagtttgctccttttctattatgaattgtaaggcgtcttggcttttctagctaaatagttttttaaaaaagcatctaaatgtaacacatataggtgctttgtaaaaactatagtctacaaaagctaaaatgatttacaatatg

SEQ ID NO: 259541 - DNA, 756 bp, Zea mays
ttctatcttcactcgtccgcggtttcattgcgcggacgcgtgggcggacgcgtgggctggggacttttgtgcagcagcggggtttaatgactacgttcacgtgcgcatccagcagcgtaatggtcgcaagagcctgaccaccgtccagggattgaagaaggagttcagctacagcaagatcctcaaagatctcaagaaagagttctgctgcaatggtacagtggtccaggacccagaacttggacaggtcattcagctccagggtgatcagaggaagaacgttttgaatttcctcgtccaggccggcattgtgaagaaggagcacatcaagattcatgggttctgagcaaccgccgggttccggatcgttccaaccctgcatgcggggccagcttattatatattatatctgaggtggagcatatctatctggctgtgtactacaagcaatcctagtactccttcttctcgtttctactattacacattatacatattttctttttttttgcttatttcttttttcccttatttttttaatttattatttttattctttttatataattttatttttttaatctatcttattaatatttattatggtaggtatttatatttttttttatatattttatttatttttttatttttatatttataattttttatatttttcttttttattttaatttatatttttttttttattttttttttcttttttttttattattttattttattattattttt

SEQ ID NO: 259542 - DNA, 699 bp, Zea mays
  unsure (1)..(699): unsure at all n locations
cccacgcgttcgcccacgcgtccgcccacgttttcgcccacgcgtccgcccacgcgtgcggggagtggtggggccaatccaggtgttgttccagctgcaggatctggtgcccttgatgccttgcgacagcttccacagtttcaagcactgcttcagttggtccaggctaatcctcaaatcttgcagccaatgcttcaagaactaggcaaacaaaacccacaaatcctgcgtttgattcatgaaaatcaagctgagtttgtccgcttggtgaacgaaactcctgaaggtggtcctggaagaaacatattaggtcaactggcagctgctatgccgcaatcggtgacagttaccccagaggaacgggaggcctatccagcggctcgagggaatggggttcaaccgtgagcttgtgctagaagttttctttgcatgcaacaaggacgaagagcttacagccaactaccttctggatcccggccatgagtttgacgagcagcagcaatagacgtggggtggatggaggaaaccgaggcagttgcagaacagcgagtgtcgttcttatgctatgctgctgactatcttttatttccatatatatttgttcggaatgctttctaagtacatattaattcaatatcaagcgttaccccgtgtaaaaacaacaaaaaaaaaaaaaaaaaaaaaaaaantagtttaaaa

SEQ ID NO: 259543 - DNA, 714 bp, Zea mays
aacacaggctcctgttggtgttcttgcaactgatgcagcagggggcacaggggcagcaggttgggccagagttgcaggcacaccaacacaggctcctgttgccacagctgaaacggcacctccaagtgcccaacctcaggctgctccagctgctacggttgctgctcctgatgatgctgatgtgtacagtcaggcagcttcaaaccttgtatctggcaacagtctagaacagactatccaacaaattcttgacatgggtggtggtacatgggaacgtgatacagttgttcgtgctctacgtgctgcatacgataaccctgagagagctatagactacctgtattctggaattcctgagaatgtggaggctcagcctgttgcccgagcacctgctgctggccaacaaacaaatcagcaggccgtatcacccgatcagcccagcagtgcattgccagtgcagccatcacctgcctctgcagggcctaatgcaaatcctttgaacctttttcctcagggtgttccaagtggtgggtccaacccaggcgttattccaggtgcaggatctggtgcccttgatgccttgcgacagcttccacagtttcaagcactccttcagttagtccaggctaattctcaaaacttgcaggaaaatcaagctgagtttctccgcttggcgaatgaatctcctgagggtggtcctggagggaacatact

SEQ ID NO: 259544 - DNA, 624 bp, Zea mays
cggcaagcaaccacgggcggactcggagcgtcctcctcctcccgtctataaattcccctccttttcttcctccatatataggggcctaatgcaaatcctttgaacctttttcctcaaggtgttccaagtggtgggtccaacccaggtgttgttccaggtgcaggatctggtgctcttgatgccttgcgacagcttccacagtttcaagcactccttcagttagtccaggctaatcctcatatcttgcaggtaaacaaaacccacaaattctgcggttgattcaggaaaatcaagctgagtttctccgcttggtgaatgaatctcctgagggtggtcctggagggaacatactaggtcaactggcagctgctgtgccacaaacgctgacagttaccccagaggaacgggaggctatccagcggctcgagggaatggggttcaaccgtgagcttgtgctagaagttttctttgcatgcaacaaggacgaagagcttacagccaactaccttctggatcatggccacgtctattgctgctgctcgtcaaactcatggccatgagtttgacgagcagcacaatagacgtggggtggatggaggaaaccgaggcagttgcagaacagcg

SEQ ID NO: 259545 - DNA, 550 bp, Zea mays
actctttcttgagatctttgaggatcttgctgtagctgaactccttcttcaatccctggacggtagtcaggatcttgcgaccattacgctgctggatgcgcacgtgaacgtagtcctttgaccctgctgccgcaccagagtccccagcattggcctcagcgaagggatcgaaggcagttgggatctgaatgtcgagatcagacatgaaaacttgattggtgagagtggcaagctacaccaaggaccttcggcgcccgttcaggatccacatcttcccgagcgagttcttggttggcctcttcctcttcggactagctccaaggttatgtgaagccaaagacagtgacctgagcagatcaaaactaccaaggatgcatctataactgttcgttatgttgtttgtatcttggttatacaatacagtagtacaaaaaaacgaattggtgctcgttaaatagtacatgatgcatctagtcagctcaattcctgttttggatgttgggtggttgatttgatcataactccttgtttggaatgtggacctcatcat

SEQ ID NO: 259546 - DNA, 433 bp, Zea mays
caggtgatcagaggaagaacgtctcgaatttcctcgtccaggtacgcaccattcggtgaacaccttgtgcgcttagagacatgtagcaacgtatgctgattagagagactgctgatgtctgttcctgatgttgtcctggcaggccggcattgtgaagaaggagcacatcaagattcatggtttctgagcaaccgccgggtccatagcaaaccaaccctgcatgcagggccagcttattatatataatatctgaggtggagcatatctatctggctgtgtactacaagcaggcctagtacgccgcctgcgcgttcctcctattacacataacacatatagccccctccctgcgtgtatgcttgttgccgtcgtgtcgaatcttgtactacgaggctccgtcgaacctcgatggcttgcttctttatcagaacat

SEQ ID NO: 259547 - DNA, 495 bp, Zea mays
gcaatgtctaatacctgagtgagagagcttcctcagtccatggaggtgtcgtcgaggctccaaagcctcctcagacccttcctactctgccgctcccgcgccgcagggatgaccctccaaaccctagctctttgctccccgccgcctcctccgcgcatcccatcttccttcctcctccgaacgcgccgtctacctcctccctttccccatggcggcccatcccgtcttcttttccacagcaccttcgcctccgtctccccggcccccgcccctgctccagggagggaccacctcaactccaaggaacagggacccccgcccgcgcccttgcctccgccaccgccagaggagctcgcctccgaagacgagtcctactaccacgagcaccttctcgaagtggcgcaggagaaccagtcacgggtcgtccccgtcaaggcattctttctatgcaccagcatcgacctgcggagcctgcagtcccagaattccttcaat

SEQ ID NO: 259548 - DNA, 367 bp, Zea mays
caataactggcaccgacatgcggaagagaatgaacaggatccgatccgtcctatataatccctcgtctcccacctccgtctccgtctccgtccgtatataagaagccagatttcgaattccctcctcctccgcctctcccgcagtccctctcctcctttccctcccccgtcgcgatcgctctgtgctccgcctccgtccgtcaaggcctgctcttgcgccgttcctcctcgcccaatccgccaggggatggccacattcgagctctaccggaggtccaccattggcacctgcctcaccgagacgctggacgaagctcgtctcagcgggggccgtcagccccggaactcgccttccagtccatgactg

SEQ ID NO: 259549 - DNA, 730 bp, Zea mays
cgcccccatcccatcctccacccaatcgaaggacctagcgagcggcacggcggcggcgatcggagaagatggtgcgcaaggcgaaggttgagttcgacgagcagccgccggataacttcgacccgaagaacccgtatgccgacccggtggcgatgctcgagtaccgggaacacctggtgcgagagaagtggatccagatcgagaccgccaagatcatccgggagcgcctccgctggtgctaccgcatcgagggcatcaaccaccaccagaagtgccgccacctcgtcgaccaatacctagaggctacccgcggcgtgggttggggcaaggatgcccgcccgcctgaactccacgagcccaagaagaccgtcaaggcggagtagcggcgctgctgccttgcttctcgtgctgctgttcctggattggagaggtgatctgacccttccattgagttgaatgaagtagcctggaactgtggtagttcgtcttttacatcttaagctgctgatagacttcaaataaaatcttgtccaagaaaacattctgtgagcgtacatgttgtcgtcgagctgtgtaattgagcaaatcgtcagattgaaactcgttgtctgccttgttcttcaaataccgcttatccagacggtgcttttgttttcacttttccactgcatctttgctctgcaaggtaaaaaaaaaaaaaaaaaaaaaaaaaaaaaaaaagggcggccgc

SEQ ID NO: 259550 - DNA, 431 bp, Zea mays
agcagcaatggcgctgcttgcctccgactttcctcgcgtcatctcgtgcttcccaatccctatagatagaactggattgatccccatggacccatgattctctcagacgccactgcgcctgttcgacgacgcgaagccagaaggcctcgtggtcggggaggctgacgcagagagggacgatgggaacgggggtacccgcctacaacggcgctcggggcataatagttggtcaggcgtgatcataggggctcactagaggcgcgtgcatcggtccgtggggccgaagacggtcggtgcggcggcgattgctcgctgggatccgcaagaaccgccgtccgatcatcctgcgttgtcagcactctttccatcagcgccttcggtcacgaggatctgaagaatcaccctgggacctggaatttcaagtgccaagc

SEQ ID NO: 259551 - DNA, 2347 bp, Zea mays
cccacgcgtccgcccacgcgtccgggaaatcactccagaattttgaaaaggtgacggaaatagtgaggagcggagaacaccggaatgatccatcctctcgtgctatccctgccctcccccgctataatatcgcgccctcgtcgccatcgtcaccacaccaccactccctcactgccctctcactcccgatccctgcaccactaccgcctcctccgcgtcacccctctcgtcgcctcttgcggcgaccggcggcggatcgtccgcggcgcaacgcaaccatggggctcttcaccgtgacgaagaaggccaccacccccttcgaaggccagaagcccggtacctccggcctccgcaagaaggttactgtattccagcagcctcattatctgcagaactttgtccagtcaacattcaatgcccttcctgcagaccaagtaaaaggtgcaaccattgttgtctctggtgatggccgctatttctcaaaagatgctgttcagatcataacaaaaatggctgctgccaatggagtaagacgtgtttgggttggacaaaacagtctcatgtctactcctgctgtatctgctgtcatccgtgaaagaattggtgcagatggatcaaaggctactggtgccttcatcttgacagcgagccataacccaggtggtcctacggaggactttggtatcaaatacaatatgggaaatggtgggcctgctcctgaatctgttaccgacaagattttctctaatacaacgacaatctctgaatacctcatctctgaagacctaccagatgttgatatttctgttgtcggtgtcaccagcttcagtggacccgaaggcccctttgatgtggatgtttttgactctagtgtagattacataaagttaatgaagacaatttttgacttcgaagcaataaaaaagctgctgacctccccaaagtttacattctgttatgatgcgctccatggtgttgcgggagcttatgccaaacacatctttgtggaagagcttggtgctgatgaaagctcactgttgaattgtgtcccgaaagaggactttggaggtggtcatccggatcctaaccttacctatgcaaaagagttggttgaacgcatgggtcttggaaagtcatcctcaaatgttgagcctcctgaatttggtgctgcagctgatggagatgctgaccgcaacatgattcttggtaaaagattctttgtgacaccgtcggactctgttgccattatcgcagccaatgctgttcaatcaattccttactttgcttctggcctgaagggagttgccaggagcatgccaacatctgctgcccttgatgttgttgcaaagaatttgaaccttaagttctttgaggtgcctactggatggaagttttttgggaatttgatggatgctggaatgtgctcaatctgtggtgaagaaagctttggcactgggtctgaccacattcgtgagaaggatggcatctgggctgtgcttgcatggctttcaattattgctttcaagaataaggacaaccttggaggagataagcttgtcactgttgaagatattgtccgtcagcactgggccacatatggtcgccattactacacacgctatgactatgagaatgttgatgcaggggctgctaaggagcttatggcaaacctagtaagcatgcagtcatcactttctgatgttaacaagttggtcaaggagatccggtctgatgtttctgaagtagttgcagctgacgagtttgagtacaaggatcctgttgatggctctgtgtccaagcaccagggcatccgatacctctttggagatggttcacgactggtgttccgtctctctggaaccggttctgttggtgccaccatccgtgtctacatcgagcagtacgagagggactcctctaagaccggcagggattcacaggacgcccttgctccgctggttgatgttgcgctcaagctctccaagatgcaagagtacactggccgctctgcccccaccgtcatcacataaatttttgaagagtgttttagaatgagttgaggcgcttacacaaattttcattcaagcctcttgttctatagttctacttcctgttgcatctcaccaatgaataaaatgtatgtatcagactcgccccgtttttttttttgtccatgtactgcagtgcagcggactgagccgctggcacagcatgcggtaataatcttgtcacagtgacagtgctgtaatcgggagcgtgtttcttgtaatcttgttaggaagtgtttctggttttgtttgagcaaaaaaaaaaaaaaaaaaaagggcggcagatcgcgatctagaac

SEQ ID NO: 259552 - DNA, 711 bp, Zea mays
atggttcacgactggtgttccgcctctctggaaccggttctgttggtgccaccatccgtgtctacatcgagcagtacgagagggactcctctaagaccggcagggattcacaggacgcccttgctccgctggttgatgttgcgctcaagctctccaagatgcaagagtacactggacgctctgcccccaccgtcatcacataaattttgaagagtgttttagaatgagttgaggcgcttacacaaactttcattccggcctcttgttccatagtttttcttgcatgttacatctcaccgatgaataaaatgtatgtatcagacttgtctcgtttttttgcccatccaagcagcaaattagccgctggcacagcatgcggtaataatcttgtcacagtgctgtaattgggagcgtttttcttgttagaagtgtttctggtttgtttgagcatttacggatcgatttttctttctgaagagtatataaacattttactgagcttaaggccaaggcacagaagggcgcgattgtgggctcgggtctataaaaagtggaaagaaatgagactggtcacccggctccaatacctagaggatgatatggcagctgtctatctgggtggcgcttaactaattgtgattgtaacagatggacctcttgtgttctgtgttccgcaatgttgcaattgattgctggatcgaaagatgttta

SEQ ID NO: 259553 - DNA, 303 bp, Zea mays
caaatgaccatctggaacactgtttctgctaatgccagccttttcatcttctgcttgtatgcagctgtccggtcttagatgcatttgaaatttctctatgcactgaacactacttatgttattccattattgtaataacaggagcatgccaacatctgctgctcttgatgttgttgcaaagaatttgaaccttaagttctttgaggtgcctactggatggaagtttttttgggaatttgatggatgctggaatgtgctcaatctgtggtgaagaaagctttggcactgggtctgaccacattc

SEQ ID NO: 259554 - DNA, 349 bp, Zea mays
ttctacttcctgttgcatctcaccaatgaataaaatgtatgtatcagactcgccccgttttttttttgtccatgtactgcagtgcagcggactgagccgctggcacagcatgcggtaataatcttgtcacagtgacagtgctgtaatcgggagcgtgtttcttgtaatcttgttaggaagtgtttctggttttgtttgagcatttgcttatctttttttctgagtactaaaaataatttactcacatgtaaatataccatgtcactaatcttttgatggctgtttagtgaaaaaaaaaaaaaaaaaaaaaaaaaaaaaaaaaaactaaaagaagataatagatcaaata

SEQ ID NO: 259555 - DNA, 1349 bp, Zea mays
tttcgcgctcactcacccaggtctctcgtctcctccactccaagagaacaggcgccggcgaaaggcgggagcagcgcgctgcccattcaccgccccctgatttcttgggagttgcggatcggtctccggggcagcgtggaacggctgggcccctcggatcgccggagatgctgccctacgcgacggcggcggaggcggaggcggcgcttggccggcccatgacgcccgccgaggcgctgtggttccggtacaccgcgggggtgtccgactaccacctctactgctgcaacatcctcttcctcttcgtcgtcttcacggtggccccgcttcccatcgcgctcctcgagctccgggccccggccgcggtctcgccgtacaaactgcagccgcgggtgcggctctccagggccgagttcgtccggtgctacaaggacgtcctccgcatcttcttcctcgtcatcggcccgctccagctcgtctcttatccggcggtcaagtttgtgggaattcacacgaagttgcctttgccgtcccttgcggagttggcagcacagctgctggtgtacttcctggttgaggactacctcaattactggatccacaggtttctccacggggagtgggggtaccagaatatccaccgtgttcaccatgagttcactgcgccaataggattcgcagctccatatgcacactgggctgaggtgctgatactcggcatcccctccttcgtcgggccagccattgttccaggccacatgatcacattctggctctggattatactccgtcaggtggaggctatcgagacacatagcggctttgatttcccattcaccccgacaaagtatattccattctatggaggagcagaataccatgactatcatcattatgtaggaggccagagccaaagcaattttgcttctgttttcacttactgtgattacttatatggcactgacaaaggttacagattccacaaaacatacctagcaaagctgaaggatctggggcataatgatggccagaaaggagacggcagcggacccagctatgtgaaactggattagattgcaagatatagtgcatcttgagtgtttctatggtcatcgacttcactgtggcatttcgaaatgggatattgctgagttgggctggtcacgtgtgttctcatttctgtagcaggcatacagctttcagctctgccttcttctttcttttttttttctagcgtttatgaaattctatggaacttgtacgctgacgaataacaacgcaactctcacgaataacaacgccaattcttaaaaaaaaaaaaatgaaaataaaataaaatgatggtgtag

SEQ ID NO: 259556 - DNA, 1094 bp, Zea mays
actcgtgggtcgatgcaagcctctacagtgacgtcgtactaccgtgcgcgcgtgatggacgcccgtctccgcctcggcttcttcctcctcctcgtggccgcggcgttcgcgccgctggtctccgcgcagctctctgcagatttctacaagacgtcgtgccccgacgccgagaagatcatcttgggcgtcgtcgagaagcggttcaaggcggaccccggcaccgccgccggcctcctccgcctcgtcttccacgactgcttcgcaaacggctgcgacgcgtccatcttgatcgacccgatgtcgaaccaggcctccgagaaggaggccggccccaacatctccgtcaagggctacgacgtgatcgaggagatcaagacggagctggagaaggagtgccccaacgtggtgtcgtgcgcggacatcatctcggtgagcgcccgcgactcggtgaagctgacgggcgggcccgagtacgcggtgcccctgggacggcgcgactcgctcgtgtccaaccgcgaggacgccgacaacctgccgggcccggacatcgcggtgcccaagctcatcgacgagttcgacaagcagggcttcaacgtcgaggagatggtcgcgatgctgggcggcggccacagcatcggcgtctgcaggtgcttcttcatcgagaccgacgcggcgcccatcgaccccaagtacaagaagacgatcagcgacgcgtgcgacggcaaggactcgggctccgtccccatggactccacctcgcccaacgacctggacgggagctacttcggcctggtgctggagaagaagatgccgctcaccatcgaccgcctgatggggatggacaagaagacggagcccatagtgaaggccatgtcggacaagaccaccgacttcgtcccgatcttcgccaaggccatggagaagctcagcgtgctcaaggtgctcacggggaaggaaggcgagatcaggaagacgtgctccgagttcaacaacccgcagaacaccagcggcagcacgtcggtgatacggatcagctccatcgacgccgaccagatggccggcctgtcgcagccagggtcgacgtccaggaaggt

SEQ ID NO: 259557 - DNA, 2503 bp, Zea mays
aaggtgtaccaaaattcttgcgccgtattgacaccgctctgaaaaatattgggatcaatgaacgtctcccttacaatgctcctctcattcagttctcttcctggatgggtggtgatcgtgatggaaatccaagagtaacaccagaggttacacgggatgtatgcttgttggcgagaatgatggctgctaacttgtacttctctcagattgaagatttaatgtttgagctgtctatgtggcgctgcagtgatgaacttcggatccgtgcagatgaactacatcgctcttcaagaaaagctgcaaagcactatatagaattctggaagcaagttccgccaaatgaaccatatcgtgtcatacttggtgatgtcagggataaactgtactacacacgtgaacgttctcgtcacctattgacatctggaatttctgagattccagaggaggcaacttttactaacgttgaacagtttctggaacctcttgagctctgttatagatcattatgtgcttgtggtgacaaacctatagctgatggaagtcttcttgatttcttgcgtcaagtatcaacttttgggcttgcccttgtgaagctcgacatcaggcaggaatctgatcgacacactgatgtccttgattcgataacgacacatcttggaattggctcctatgctgaatggtctgaggagaaacgccaggattggctgttgtctgaactgaggggcaaacgtccattgtttggttcagatcttcctcagactgaagagactgctgatgttttaggcacatttcatgtccttgcagagcttcctgcagattgctttggcgcgtatatcatctctatggcaactgccccatccgatgtgcttgcggtcgagcttttgcagcgtgagtgccatgtaaaacatccactgagagttgttccactttttgagaaacttgcagatcttgaagcagctccagcagctgtagcacggctcttttcaattgactggtacatggataggattaatggcaagcaggaggtcatgattggatattcagactctggcaaagatgccgggcgtctctctgcagcatggcaaatgtataaagcacaagaagagctcatcaaagtggcaaagcattatggagtcaagttgacaatgtttcatgggaggggtggaacagttggcagaggaggtggtccaactcatctggccatattatctcagccaccagacacgatacatggatcacttcgtgtaacagttcaaggcgaagttattgagcactcctttggagaggagctcttgtgcttcagaactttgcaacgctacactgcagctactcttgagcatggcatgcatcctccgatttcccctaagccagaatggcgtgctctgatggatgaaatggctgttgtagcaactaaagaatatcgatcaattgtcttccaagaaccacgcttcgttgaatacttcagatcggctacacctgagactgaatatggtaggatgaatattggcagccgtccatcaaagaggaagcctagtgggggaatagaatcactccgtgcaattccatggatctttgcttggacacaaacaaggttccatctgcctgtctggcttggatttggtgcagcgataaagcacatcatgcagaaggacatcaggaacatccatatactgagagaaatgtacaatgagtggccattcttcagggtcacccttgatttgcttgagatggttttcgcgaagggagacccgggaatcgcagctgtgtacgacaaattgctagtggctgatgatttgcaatccttcggcgagcaactgaggaagaactatgaggagacaaaagagctactccttcaggttgctggtcacaaggacgtccttgaaggtgatccttatctgaagcagcgtctgcggctgcgtgagtcctacatcaccactctgaacgtgtgccaggcctacaccctgaagcggatacgcgacccgagcttccaggtgagcccgcagccgcccctgtccaaggagttcaccgacgagagtcagccggcggagctggtgcagctgaaccagcagagcgagtacgctccaggcctggaggacaccctcatcctgaccatgaagggcatcgccgccggcatgcagaacaccggctaggccaagatcttcggtgtgcaaataacctgtctcccatgagacggtggacgatatgtgtaggcctgtgagcagttagtacaccggcgccagtgtgttctggaggatttttcatgtcagagcctttctcttgtgtgcttgctgtagatgccaaggggagcttattggctgttgaagcctgatgcaaaataaagtacgaaactatgttttttgtttaactaataactagcaaacatgcttccgttgcattgaaactagcagcttcgtgcgtagtcatctgtggataataaaaggaaaaaaaacagaggaaaaaaaaggccgatcgaacgtaaaaggaaatactgttctatgggttt

SEQ ID NO: 259558 - DNA, 1794 bp, Zea mays
taccggtcgcactctcgggtggccccacgcgtccgctccacctcgctcatgtccgctcaccggggcgggctcagcatcctttcgaagaagtaacacttctccgtgaggcctgagcccctcgccgcggtgagccaagccggcgcacgtcgccccggggctcacgctcaccaccgagccccaaccaattaataatatatatatatagctaggatcgatcgtcagtaaaatggcaggctccgccgtcctgaggagccccctgtccgtcctcctctacatcctcgccgccgtgcccgccaccgccgcggcgacgccgaccgacgccgccatcgacgaggcgtacgcgcatctcgtcaacctcaccgctaaccaggagtactgggcggagcgcgcggaggcggcgcacgcgtacaaccgcgcggcgtaccagaccgaccccgtggccgtcgtgcagcgcttcaacgacggcgtgcacagggcgacggcgacgcggtcgcggtccctggcgcacagggcgcggggcccctgcacggcgaccaaccccatcgaccagtgctggcggtgccgccgcgactgggcccgcgaccgcaagcgcctggccaggtgcgccatgggcttcggccacaggaccaccggcgggctggccggcaagttctacgtggtgattgaccccagcgacgacgccgccgacctcgtcacccccaggaagggcacgctccggcacgccgtgacccgggcccgggcgctgtggatcaccttcgcgcgcgacatggtgatcgagctctgccaggagctcatcgtgagcagcgacaagaccatcgacgggcgcggagcgcaggtgcacatcgtgggcgcgcagatcacgctgcagaacgtgcgcaacgtgatcctccacaacctgcacgtccacgacgccgcggcgcacggcggcggcgcgatccgggactcgcagcaccactggggcgtgcgcggggagagcgacggcgacggcgtctccgtgatggggtccagcgatatctggatcgaccacctgtccatgagcagctgcgcggacgggctggtggacgcggtggacggctccaccgccatcaccgtctccaacggccacttcacgaggcacgaccacgttatgctgttcggggccagcgacgccgcgtccaaggacagggagatgcaggtcaccgtcgccttcaaccacttcggcaaggggctggtgcagcggatgccgcgctgccgtcacggcttcttccacgtggtgaacaacgactacacgcactggctcatgtacgccatcggcggcagccggaaccccaccatcatcagccagggcaaccgcttccgcgccgtcgacgacagcaggttcaaggaggtgaccaagcgggagtacacgcagtacagcgagtacaagaactgggtgtggaagtcgcaggacgacctgttcctcaacggcgccttcttcaaccagtccggcggccagaacgagcgcaagtacgacaggctcgacctcatccaggccaagggcggccagtacgccgagtcgctcaccaggtacgccggcgcgctcaactgccgcgtcggcaggaagtgctagtgcgtgtgcagctctaggctgcagctttcatcattggcgatcgatcgtaacaatgcaaggttgtgttgtatataactcttgtgtttggaatgccgcccgtaattaatggtcaactctaacactgcttgcctttgcctgccggccagcaaaaacaatgtcccttgtggttcctgagttcttccttgtttatccatgcatggaaaccg

SEQ ID NO: 259559 - DNA, 1776 bp, Zea mays
cccacgcgtccgcccacgcgtccgcccccgcgtccctcgctcctgcgccgcccgtccgatccggtcactggccggggagggctcagaaacctttcatccaatacatacatctatctgagccctttcccgcggtgaggcccgaccggagtccacacacacacggtgtcgatggcggccgtaataaggagccgccgccgcgtgtccgttttcttctacgtcgtcctcgccgcagctgcagctgcagccgcggcgcaggcatccaataacgtcacctccgacgaggagtactgggcggagcgcgccgaggtggctcggtcgcgcaacctcgccgcctacgtcagcgaccccgtggccgccacgaaccgcttcaacgcggacgtgctgagggccacgacgcggcgggcgctggcgaggtacgatggcccgtgcatggcgaccaaccccatcgaccggtgctggcgctgccgcgccgactgggcgacggaccggaagcggctggcgcagtgcgcgcgcgggttcggccacaggagcgtcagcggcgcggccggcaagctgtacgtggtgagggacccgagcgacgacgagatgatcatcccgcggaagggcacgctgcggcacgcggtgatccaggaccggccgctgtggatcgtgttcgcgcagatcacgctgcagaacgtgcagaacgtgatcctgcacaacctgcacatccacgactccaaggcgcactcgggcggcatgatccgcgactcgaagcggcactacgggctgcgcacgcggagcgacggcgacggcgtctccgtgctgtcgtccagcaacgtgtggatcgaccacgtgtccatgtccagctgctccgacgggctgatcgacgtggtgaacgggtcgacggccatcaccgtgtccaacagccacttcaccgaccacgaccacgtgatgctgttcggcgccagcaacgacagcccgcaggacgcggtgatgcaggtcacggtcgccttcaaccacttcggcaggggcctggtgcagcggatgccaaggtgccgctggggcttcttccacgttgtcaacaacgactacacgcactggctcatgtacgccattggcggcggcgacgcgccaaccatcatcagccagggcaaccgctacatagcaccaccaaacatcgccgccaaagtgatcaccaagcactacgcggaagaaggcgtgtggaagaactgggtgtggcacacggaggacgacctgttcatgaacggcgccatcttcaatccgtccggcggcgcccccaagcaggtcgacaccaacgagtgggtaaagcccaagccaggaacctacgttacaaggctcacccgcttctccggcacactgtcctgctgcacgggcaagccgtgctgaaggccggtgggcatcaggctgcttcttctagctcatggcctggccatgccaggtcgcgctggctgcgtttcatttcatggaagaaagcaaggatggatcacaggttgtcgttctgctaattaatctacatacgtttgccttcaagtactgtgttgtggcattgttacacatcacagtacagtttggtcaaattttttttccacagaggaagtagggattgatttaatcattgatttaatcccacacgcgtgtatctacgtatacagtttgtataacatgaaccacctctgtttgcgattggtctaaaaataaatataatactgatctattgaattagaatgcagaaaaaaaaaaaaagggcgggctctctagatgatccaagcttactta

SEQ ID NO: 259560 - DNA, 1436 bp, Zea mays
cgccacgcgtccgcccacgcgttcgcttacgcgtgggcggacgcgtgggtgcaaacaccagttttctaccctaaacacaagaacccagatgcataataaaaggtgaaagctagcagaagaggtacctaactctaccctactatagagaaaaagtcagcacattgcaagcaataataatggagacgacgacgaagctccggtggagccggcccggctccttcctcctcgtcgccgcggcgttcctggcgtccgccgccgcgtcgggcgtcaacgtcggccagttcgacgaccacttgcagaagcggaaggagctcgccgaggcgtcggcgagggaggcgtacaggcccgacccgtacaacgtcaccaacagcttcaacgccgccgtccacagagctgtcagcagcagtcggcgtgagatgcgggagaggccgaggaagcacaagaagaggggcccgtgccgggcgacgaaccctatcgacaagtgctggcgctgccgcagagactgggcgacggaccggcagcgcctggcccgttgcgccagaggcttcgggcacgcgaccaccggcggcctcggcggcaagatctacgtggtgaccgaccccaccgacctcgacgtggtgaacccgcgccccggcacgctgcgctggggcgtcatccagcccggcccgctgtggatcatcttcgcgcggtccatgatcatccagctctcgcaggagctgctcatgagcagcgacaagaccatcgacgggcgcggcgcgcaggtgcacatcgccaacggcgccgggatcacggtgcagctggcgcaaaacgtcatcatccacaacctgcacgtgcacgacgtcaagcacaccatgggcggcctcatgcgcgactcccccacgcacatcggctcccgcaccagggccgacggcgacggcatctccctcttctccgccaccaacgtctggatcgaccacatctccatgtccaactgcgaggacggcctcatcgacgtcgtgcagagctccacggggatcaccatctccaactgccacttcaccaaccacaacgacgtcatgctcttcggcgccagcgactcctggccgcaggaccagatcatgcagatcaccgtcgccttcaaccacttcggcaggggcctggtgcagcggatgccaaggtgccgctggggcttcttccacgttgtcaacaacgactacacgcactggctcatgtacgccattggcggcggcgacgcgccaaccatcatcagccagggcaaccgctacatagcaccaccaaacatcgccgccaaagtgatcaccaagcactacgcggaagaaggcgtgtggaagaactgggtgtggcacacggaggacgacctgttcatgaacggcgccatcttcaatccgtccggcggcgccccccagcaggtcgacaccaacgagtgggtaaaggcc

SEQ ID NO: 259561 - DNA, 1477 bp, Zea mays
cccacgcgtccgcccgtggccgccacgaactgcttcaacgcggacgtgctgagggccacgacgcggcgggcgctggcgaggtacgatggcccgtgcatggcgaccaaccccatcgaccggtgctggcgctgccgcgccgactgggcgacggaccggaagcggctggcgcagtgcgcgcgcgggttcggccacaggaccgtccgcggcgcggccggcaagctgtacgtggtgagggacccgagcgacgacgagatgatcatcccgcggaagggcacgctgcggcacgccgtgatccaggaccggccgctgtggatcgtgttcgcgcgcgacatggtgatcgagctgcggcaggagctgatcgtgaaccacaacaagacgatcgacgggcggggcgcgcaggtgcacatcatgttcgcgcagatcacgctgcagaacgtgcagaacgtgatcctgcacaacctgcacatccacgactccaaggcgcactcgggcggcatgatccgcgactcgaagcggcactacgggctgcgcacgcggagcgacggcgacggcgtctccgtgctgtcgtccagcaacgtgtggatcgaccacgtgtccatgtccagctgctccgacgggctgatcgacgtggtgaacgggtcgacgggcatcaccgtgtccaacagccacttcaccgaccacgaccacgtgatgctgttcggcgccagcaacgacagcccgcaggacgcggtgatgcaggtcacggtcgccttcaaccacttcggcagaggcctcgtgcagaggatgccaaggtgccgctggggcttcttccacgtggtcaacaacgactacacgcactggctcatgtacgccatcggcggcagcaaggcccccaccatcatcagccagggcaaccgctacatcgcgccgcccaaccttgccgcgaagcaggtcaccaagcagcatgacacgccggagtccgtgtggaagaactgggtgtggcactccgagaacgacctcttcatggaaggcgcctacttcaccgtcaccggcggccagatcaacagacagttcaacaagaaggacctcatcaagcccaggaacgggtcctacgtcaccaggctcacgcgctacgccggctccctcgcctgcacgcccggcaagccctgctagatcaagccaccagcgaggacggccgacgaccagaggcagacctgcatgcattcgccggctcgccatgtaagaaacaggggagttgaaagtgcgacacaccagagaacgtgtctgtgtatactgtgtaaaggtcctaaaggaaagagaagatgcacatattcaaagcctcggaactaattgctctgttgtccactatgttatccaagtatatatttgttcttcacttgtgttgagcaccgtttgtgtcactggacatggacaaacagtttagcctgcggacagtccgtctttagacacagactgtccacgattagatcataccata

SEQ ID NO: 259562 - DNA, 669 bp, Zea mays
acgcgtccgagagttcaaccacttcggccgcgggctggtgcagcggatgccgcgctgccgctacggcttcttccacgtggtgaacaacgactacacgcactggatcatgtacgccatcggcggcaacatgaaccccaccatcatcagccagggcaaccgcttcatcgcccccgacgaccccaacgccaaggaggtgaccaagcgggagtacacgccgtacaaggactacaaggagtgggtgtggaagtcgcagggcgacgtcatgatgaacggcgccttcttcaacgagtccggcggccagaacgagcgcaagtacgacaggttcgacttcatcccggccaagcacggccgctacgtcggtcagctcacgcgcttcgccggaccactcaagtgcatcgtcggccagccgtgctagtagacagcggcccggtcgggcacatactcctcttcctatatacatcggatttggatgggcggcatatatgtacgtgtgtgtaatatattattactacatcttgtactatatgcgacgattgcttgactgatgaatcacgctttttaggttagaccaatttagaagggaattagagtggattaaattcgctcccggtaaaaaatgactcgaagaaaatttagggactgtttggtttgtggttaaatgtgctacac

SEQ ID NO: 259563 - DNA, 1141 bp, Zea mays
tcgttggtccgcacgcgcctcggcgctcaccgccgtcctaccttcatatacctagcagtgtctctgcatagaaagataaaaggtaggaggaggcgcagtgcgtggtgggattatttgtgaggagatattggagttattatatatatatatatataggtagacgatagatagacagctagatctatataaccatggtggatgggttccgatggatcagaccgggctctttcgtcctgtacttggtcttcttcttcctgtccgcagccctgtcggaggccaatatcggcgacttcgatgaatactggcagcagcgcaagctcatggccgacgccgcggctgaggccacgtacaagcatgacccggtcgaggtcgccaaccaacttaaccgtgcagtccacagatccgtcgagaaggaggacattggcacgaggcgggagatgatggggacgacgacgaggaagtctaagttcagcgggccgtgcagggcgacgaacccgatcgaccggtgctggcggtgccggcaggactgggcgacggaccggaagcgcctggcgcggtgcgccaaggggttcgggcgcaacaccaccggcgggctggccggcaagttctacgtggtgacggacggcaccgacgacgacgtggtgaacccgcgccccggcacgctccggtggggcgtcatccagatcgagccgctgtggatcaccttcgccaagaccatgatcatcacgctcaaggaggagctcatcatccgcggcgacaagaccattgacggccgcggcgtgcaggtgcgcatcaccaatggcgcgcagctcacgttgcagttcgtcaacaacgtcatcatccacaacatccacatcaacgacatcgtctcctccaacaaggacggccgctacgtccgcgactcgccggaccacttcggctggcgcaccgtctccgacggcgacggcatcaccgtcttcggctccaccaacgtgtggctggaccacctctccctctccaactgccaggacggcctcatcgacgtcatcgccaagtccactggcgtcaccatctccaactgccacctcaccaaccacaacgacgtcatgctcttcagctccagcgacaagcatcccgaggaccagatcatgcagatcaccgt

SEQ ID NO: 259564 - DNA, 472 bp, Zea mays
cccacgcgtccgcacacgccttcttccgcgtagtgcttggtgatcactttggcggcgatgtttggtggtgctatgtagcggttgccctcaagtactgtgttgtggcattgttacacatcacagtacagtttggtcaaattttttttccacagaggaagtagggattgatttaatcattgatttaatcccacacgcgtgtatctacgtatacagtttgtataacatgaaccacctctgtttgcgattggtctaaaaataaatataatacttatataaaaaaaaaaaaaaatttgaccaaactgtactgtgatgtgtaacaatgccacaacacagtacttgaaggcaaacgtatgtagattaattagcagaacgacaacctgtgatccatccttgctttcttccatgaaatgaaacgcagccagcgcgacctggcatggccaggcccccttatggccaagatcaagatcgggat

SEQ ID NO: 259565 - DNA, 645 bp, Zea mays
ccttggccggtcccttggccggccccttgggccccccaagttcggtcaaccggggcgggctaacaacccttccaaaaaagtaccacttctccgtgaggcctgagcccctcgccgcggtgagccaagccggcgcacgtcgccccggggctcacgctcaccaccgagccccaaccaattaataatatatatatatagctaggatcgatcgtcagtaaaatggcaggctccgccgtcctgaggagccccctgtccgtcctcctctacatcctcgccgccgtgcccgccaccgccgcggcgacgccgaccgacgccgccatcgacgaggcgtacgcgcatctcgtcaacctcaccgctaaccaggagtactgggcggagcgcgcggaggcggcgcacgcgtacaaccgcgcggcgtaccagaccgaccccgtggccgtcgtgcagcgcttcaacgacggcgtgcacagggcgacggcgacgcggtcgcggtccctggcgcacagggcgcggtgcccctgcacggcgtccaaccccttggaccactgctggaggtggccggcacgactgctcccgtgagctcaagtgactgtgcaggatccccatcgtcttacgtcacatgaccaccggcgggctgaccggcatgttcta

SEQ ID NO: 259566 - DNA, 586 bp, Zea mays
  unsure (1)..(586): unsure at all n locations
cccacgcgtnccgccgagccatgggcgttgatcaagtgcatgtgcatcttcttagtctcgcttctactcgccctcaccttcaccaatgcccaggaagaatcttcacatcggactctcccaccgttcccctgcatcccaggccagccacggcccccgcggttgccaccttgcccgccggcgccaaccgagtgctacacgtcgctgtcgggaatgatgccgtgcgcggacttcctcacccacaacgaggtgccaccgatgccacccacggtcgcctgttgtgatggtctcaggtcactcgtcaccaacgcgtccatctgtctatgccatatcgtcaacggtaacatcaacaagctcctaccggcgcccatgatacccgtgcgcatggtggcgctcccccgcttttgtgttgtccgcttcccacgagccatacttcgccggtgtatcagagggcatttgccacctatgaacccttcattttcaacaacgggttcgtcaaaatcattaacggcgaaatcaacaccgttgacttcacccgggacattaccaccggagttaacggcaacttcaccagcgggattaccaccag

SEQ ID NO: 259567 - DNA, 982 bp, Zea mays
aacacgggcgcacaatcggaactcgctgcactgcttggaatccaacgagccaatcattcaaatcctctccggaaccgcgttgagcagggcacggtcgattggatctagattctagggtgagggtccgtcgccgaagaaactcgcaggcggtcacgaggaggcggcgggggagggcggaggagatggcctcggaggagatgacggcgacggaggtggctgcgctgctggacttgaagccgcacccggagggcggcttctacaccgagaccttccgcgacggctccatcacgctcaccacgtcccagctcccgccccactacaaggtaaaccgtgctgttagcaccgcaatctatttcctacttcccgcagggagtgtttcccgtctccaccgcattccctgtgctgaaacctggcacttctacaagggagagcctctcacggtcttcgagcttcacgacgacggtcacattgaccttactgtcattggcccacaccttgaggcaggtcagcgcccccagtataccgtgccaccgaacgtgtggtttgggtcgttccccacactagacgtcgagtcgttcgcatctgatggcagcgttcttgtcaagtctcggaagagggaccctgagctgcattactcccttgttggctgcacctgtgcccctggcttccagtacgaggattttgaaatggccaaatttgaggacgtgagatccatcgctcccaaggctgaacctttcctcaagtttcttattccctctaccgattaactccagagcagcctcagatgattgtggatgggttctcagcgactttctatactgcatactgtacggatggtgtttctagtgtgattccatgagagttctgctttcacgacagtgtagacagtaaactgtacctttgtggtggcaccggttgaaacgtttggtgcattgaaacagaataacagctggtcttgatgttgaataacaggtgcctttgc

SEQ ID NO: 259568 - DNA, 1172 bp, Zea mays
gaaggcatgaagacccgaaactgaaaccaaaaataaactgcaggcagagggggaaggagagcggcaggagggtcattaaataaatctacttttctgtttcagggtaggaaatgatgtccgagagtgaagagcatggctcgctcctagacaagatcaacgacaagatcaacgagaagatccatgagtataagcactcgtcgtcgtcctcctcctcttcggactcagacgatgacaagaagcccaagaagtctaagaagaagaagctttttggaagaaaacatccattgcatcatgtcctcggaggaggcaaagccgccgaccttgtgctgtggaggaacaaacaggcatctgggagcatcttggtaggggtgaccgtgatctggttactgttcgagggcatcggctaccacctccttaccttcctttgccacgcactaattgtgtttctcaccatctggttcatctggtccaatgctgcgtcatttgtcaacaggtcacctccaaagttcccagaggtcattctatctgaagtccagtgcatgaaggtagctcatgttgcaaggaaagaaatcaacgaggctttctatacattgcgcaatgtcgcttctggaaaagatttgaaaacatatctgatgacagttacagtgctgtggttcatttccataattggaagctgcttcagtttcttgactgtgtcttacactattttcctgatggcatacactctgcccatgttgtatgagaaatacgaagatcaagttgatgtcgtaggcgagaaggccctcattgagataaaaaagcagtacaaagtgattgatgcaaagtttatctctaagatcccaatgttgtctgagaagaaacaacactgagagagggtgctccaaaggtctaattcagcacattaccaatatatgaaagtagttcctttggctttgctatatcatcatttagcaacctttaagatgataccatagatattatatggattcctaaggttggaaatttgtgtcttccgagtcccctagaatagttgcttcttcctgtctgacagtgaatttgattttgtatggatgtgacatatatatgcctgaccaattgtcattatttgctattcatatatgttactgggtgtatttaatagctctcaatttatgcagttatgtttgcagttg

SEQ ID NO: 259569 - DNA, 388 bp, Zea mays
gatcgtagaaaataggttattcattcgtccttctattatctttgcctttgtcttctttcctaagatttcactacttctgcggggtgtcacagtcttaagatcatggtgtttttatgtctcaaacatggtcgcaattgtgacattaggtagatgggagatttttgactgagttttcgtgttttgtgagcgaagtcagggtaggaaatgatgtccgagagtgaagagcatggctcgctcctagacaagatcaacgacaagatcaacgagaagatccatgagtataagcactcgtcgtcgtcctcctcctcttcggactcagacgatgacaagaagcccaagaagtctaagaagaagaagctttttggaagaaaacatccattgcatcatg

SEQ ID NO: 259570 - DNA, 369 bp, Zea mays
aaataaactacaggaagagagagggaagggaccacacgagagtcattaagtaaatccactgtggtggctgattagggtaggaagggatgtctgaaagtgacgagcacggctcgctcctagacaagatcaacgagaagatccacgagtacaagcactcatcgtcgtcttcctcgtcagactcagatgatgacaagaagtccaaaaagtctaagaagaagaagaagctctttgggaggaaacatccattgcatcacgttcttggaggaggcaaagccgccgatcttgtgctgtggagggacaaacaggcattcgggagcatcttggcaggggtgactgtgatctggctgctgtttgagggcatcggctacc

SEQ ID NO: 259571 - DNA, 1956 bp, Zea mays
cggacttgtgggcggacgcgtgggcggacgcgtggggggagagagaatgaattgaaacgaaggcccgcgacgcgaggagcgagggaactaccaccggtgaccggtctcggcgcctccgcgacgatagcctctccgacctcgagcgcggtccggttcctccctgcgtcagcacgcgagcccttggagcttcgagtcagatcccggcgggcgcccatggtggctctggtgccgttgagccgcgcgatgtagggttttcgcgcgccgcagagtaggagcgatggggcgccggaagatgtccgcggcggcaccgccgtctcggagctggtccaacgttggcggaagcgtcatcccggaacttcgagctaaacacaaaacagacttgcagaatttgacgctgaccaaacagccactcagaacattgcattttttcctgttagccatgttacaatacttgaaaagattagcaacatatatcctgagtaagggtggtttcttctttctcctaattgttttattggtagcttctggaatcttgctcgtcgtttcggatggtctgcataagaagcatgtgcaggaattccttaattatgctaaatttgtgtcgtggtgggtttcattaggtgtggcttcatcaattggactaggttctgggttgcatacatttgtgctgtatctgggtcctcatattgctctgttcactattaaagctgttcagtgtggccgaattgatttgaaaatggctccatatgataccatacagcttaaggttgggccatcatggctcgacaagaaatgttctgaatttggtccgcctgtgtatccagcatcagctcattctgttaggatccccgtctttgatttactacctcagatacagctggaagcagttctttggggcattgggactgcacttggcgagctccccccttattttatatcacgagcagctcgcttatcaggaagcgagtcaaaagctgttcaggagcttgatgcagctacttccaaagaagatgggccagtagcatcatcccttaatcgaaccaagcgttggcttctctctcactcccaacatctcaacttcttctctatcttgattcttgcttcggttccaaatccactctttgaccttgctggtattatgtgtgggcaatttggtgtgcctttctgggagttcttgtttgctactttgattgggaaagccatcatcaagactcatattcagacactatttatcgtgtccctgtgcaacaatcagctcttgtatcttattgaaaaggagttaatctggatatttggtcacgttcctgggttttctgccacccttccgtctgtgattgccagactccatgctgccaaggacaagtatctatcaccaccagccccagtctcaccgtcatcacaaatgggggagaaacagtggaatttctcttttacatctgtctggaactctatagtgtggcttgtgcttttgaacttcttcattaagatagtcacgtcaacagcacaggattatctcaaaaagcagcaggatacggagatggaacttatttcggattccccgatccaggaccattctaaaactaactagtggcgcagctagtggtgtttatacacagctgctagcagcaaagattctcctctgtagcttaagctcctgcagatgatttcaagttccaacaattagtattagtagttattcatctgcgcagtggacaaaaacatggacacatggtcttggttaacttgtcagttgacgaccttttgtcattgagcctgtacctgtactggcagctcctggtggagtcattctgtttatttttcggacatctacacggataaacagtaggaattgtttatggagcacggttggctttgtgagatgtatcattcatacatgttcctatgtattctgggaacttgaaatgcaatagaaacctgggaggatttaacaaggat

SEQ ID NO: 259572 - DNA, 529 bp, Zea mays
  unsure (1)..(529): unsure at all n locations
tccacgcgttcgatccgttgctcgcaaaacgcccccacacgccgccggcgaatcggcgactccccttgcgacgggaggaagcagccacgccgccgtctcggcgactccctgacgactgcctctccggtctcgaacgcgatctggcccatggtggctctggcgccgttggttcgtgagatctagggttgtcgagcgccgcggagtgggagcggatggggcgccggaagatgtccgcagcggcgccgccgtcccggagctggtccaacgttggcgggagcgtaatccccgaactacttgcaaaacacaaaatggacttggaaaatttgacgctgacaaaacatccaatcagaacattacattttttcctggtagccatgttacaatacttgaaaagattagcaacatatatcctgagaaagagtggntngntctttctcttaattgtttgggggtagcttncggaatcttactctctatttcagatggcctgcataagaagcatgtgcaggagttccttaattatgctaaa

SEQ ID NO: 259573 - DNA, 859 bp, Zea mays
cgggccggcccacgcgtccagaaagtttgttgcatgttcttctcttgtctttgtcttaatcagcgggatatggatagtcattttcataagaacccatgttgcagtattttgtatagcatcttggcattgtttttgagcactaatgttgtttggatgtcatgtatgcagcatgtgcaggaattccttaattatgctaaatttgtgtcgtggtgggtttcattaggtgtggcttcatcaattggactaggttctggtttgcatacatttgtgctgtatctgggtcctcatattgctctgttcactattaaggctgttcaatgtggtcgaattgatctaaaaattgctccatatgataccatacagctaaaggttgggccatcatggcttgacaagaaatgttcagaatttggaccgcctgtgtatccagcatcagctcattcagttaggatcccagccgcccacccgccccctcagatacagctggaggcagttctgtggggaattgggactgcgcttggtgagctccctccttattttatatcacgagcagctcgcttatcaggaagcgagtcaaaagctgttcaggagcttgatgcagctacttccaaagaagatgggccagtagcatcatcccttaatcgaaccaagcgttggcttctctctcactcccaacatctcaacttcttctctatcttgattcttgcttcggttccaaatccactctttgaccttgctggtattatgtgtgggcaatttggtgtgcctttctgggagttcttggttgctactttgattgggaaagccatcatcaagactcatattcagacactatttatcgtgtccctgtgcaacaatcagc

SEQ ID NO: 259574 - DNA, 519 bp, Zea mays
gtgggtcgatacaagactctacagtgagtccagagacaccaagcgttgaactcgcctaagcagctatcaaccaaccctagaaagctagacaccgtacccatggctcgcgctagcgtcgtctttgtcattgccgctctcctcttcgtcgccatggtcgtagcaccgatggccgaggcaaagtccgccgatgcccctgtggctgacgcgccagccgatggacctagcgggccggctgctgcacctggcccccagggtgtcgaaggcctgtcaggcaatgaggatgacgatgatgactccaccaattgaggccacacacgtcggcccggttaaatttggaacaagacatggaagaaaaatgagagcaatgtctttaaaaccatgataatgtgtggtcatccactcatccatggatacatccttgctctccctctttttctttctgtttgattttcaatgtgttatcatgttgttagttaacggtatcgactcatggtatcaggatctaaaaaattatcgttc

SEQ ID NO: 259575 - DNA, 533 bp, Zea mays
acccaagcgtccgcccacgcgttcagacacacaagcgtcaaacttgccaagcagctagcaaccaacccaagaaagctagacaccatacccatggctcgcgctagcgtcgtcttcgtcattgctactctcctcttcgtcgccatggttgtggcaccgatggccgaggcaaagtccgctgatgccccctccgccgacgcccccgcccccgctgctgacgcacctgccgatggacctagcggaccggcgggtgcacctggtccccagggcgtcgagggactatcgggcaatgaggacgacgacgatgactccaccaactaaggccaagcacgtcggtccggttgcatttggaacaagacatggaagaaaagtgagagcaatgtcgtttaaaaccaaaaatccataataatgtgtggtcatccgtgatatgttcttgctctccctctttttctttctgtttgatttcgatgtgttatcatgttcttagcctctaactggatcgactcttggtatcaaggactccaaaattatcggtt

SEQ ID NO: 259576 - DNA, 488 bp, Zea mays
  unsure (1)..(488): unsure at all n locations
gtttacctaagcagctaccaaccaaccctataaagctagacaccgtacccatggctcgcgctagcgtcgtctttgtcattgctgctctcctcttcgtcgccatggtcgtagcaccgatggccgaggcaaagtctgccgatgcccctgtggctgacgcgccggccgatggacctagcgggccggctgctgcacctggcccccagggtgtcgaaggcctgtcaggcaatgaggatgacgatgatgactccaccaactgaggccacacatgtcggcccggttaaatttggaacaagacatggaagaaaaatgagagcaatgtctttaaaaccatgaatccataataatgtgtggtcatccatggatacatccttgctctccctctttttctttctgtttgattttcaatgtgttatcatgttgttagttaactgtatcnactcatggtatcaaggtctaaaaaattatcgtcgttcttgtgttcttgagcc

SEQ ID NO: 259577 - DNA, 1861 bp, Zea mays
ttgttgtgtgggcggacgcgtgggcgcggctgaaaatttccacgtacacatagatccgcatcgtcgatccatccgtcctcctcccgacggtacgccagcctgccagagtccgacgcacgcctagggctcctggacacagcagagcccacgccttgactcgctccgttcgagtggagcgcacaggcaccggccggcgaccagagagggagcggatcgagggggctcggcttgagtggaggagatggaccgcaaggatgtcgggatcctcgccatggacatctacttcccgccctcctgcgtgcagcaggaagcacttgaggcccatgatggggcgagcaaaggcaagtacaccattgggcttgggcaagattgcatggccttttgcagcgaggtggaggatgtcatctcaatgagtttgacggttgtcaattctctgctgaaaaaatacaagattgatcccaagctaattggtcgcttggaggtgggaagtgaaacagttatagacaaaagcaaatccatcaaaacttggctgatgcagatttttgaggaaagtgataacactgacattgaaggtgttgactccagcaatgcatgttatggtgggacagcagccctactgaattgtgtgaattgggtcgaaagtaactcctgggatggccgttatggtcttgtcgtttgcacggacagcgcggtttatgcggaaggaccagctcgtccaacaggaggtgctgctgctatagcaatgctcattggtcctaatgctccgatttccttcgagagcaaatatagagcttctcatatggctcatgtttatgatttctacaaacctgatcttgcaagtgaatatccggttgttgatggtaaattatcccaaacatgctacctgatggctcttgactcatgctacagacagttctgcaacaagtatgagaagattgcgggtaaacaattctcaatttcagatgcagaatattttgtgttccattctccatacaacaagctcgtgcagaagagttttgctcgactttactacaatgacttcatgcgcaactgcagctatgttgatgatgatgctaaagagaagctccagtctttttcaaatttgactggtgaagagagctaccagagtcgcgacttggaaaaggcctcacaacaggtcgcgaacacctccatgacatcaaagttcagccatcgactctgcttccgaaacaaattggtaacatgtatactgcatccctttatgctgcattagcatctgtgctatataacaagcatgatagtctgaatgggcaaagaattgtgatgttctcttacggcagtggtttgacatccactatgttttcattgaggctaaacaatggccagcatcccttcagtctatcaaacataggttcagttcttggtgtcaccgagaagcttcagtcaagacatgagaccttgcctgagaaattcgttgagacactgaagctgatggaacaccgatacggcgcaaaggacttcgagacgagcagagacacgagcctactgcagccgggcacattctacctcaccaaggtggactccatgtaccggaggttctattcccagaagctgtccgaggaaacaggcggcgggaaaaccaagtgctgcaacggcctcgcaaatggccactagtggtcgcccagcactgttgctcatcattctcagtattttgataatgctcatggttagcgtttagtctagcgtgtttctgaaataatataattgttctttgaagctgtcccaccccacctagatcagctagttttttattttaatattttattcttctgaacattgaaattcatcagtctctacattgtttctctttgtttcttctttt

SEQ ID NO: 259578 - DNA, 520 bp, Zea mays
agcatcccttcagtctatcaaacataggttcagttcttggtgtcaccgagaagcttcagtcaagacatgagaccttgcctgagaaattcgttgagacgctgaagctgatggaacaccgatacggcgcaaaagacttcgagacgagcagcgacacgagtctcctgcagccgggcacattctacctcaccaaggtggactccatgtaccggaggttctattcccagaagccggccgaggaaataggcggcggtaaaaccaagtgctgcaacggcttcgcaaatggccactagtgggagtccgcgtgccgtttgaattgctacgtcgcccttctgtactgttgatcatcattctctgtgttttgatcatgcttgtggttagcgttttcaccctagggtgtttctgaaataatatattactagatatatccccatctgttacaccggggtcacgaattttgccatttaggccttctctatttttctttagttatttattgactctctaatctttttttatctac

SEQ ID NO: 259579 - DNA, 1162 bp, Zea mays
  unsure (1)..(1162): unsure at all n locations
cccacgcgtccgcccacgcgtccgcccacgcgtccgctccgttgcgcctcctccaccttccttttcagcacctgcaccaatccgttgcgctcgtgctcccctctcgtccgccgccagcacccccgcgccgccatggccacggactcctccgccgcctcgttccagaagatccagatccagcgcgaggacaccacttttgatgcttatgttgttggcaaagaaaatgctcctggaattgtggttttgcaagagtggtggggagttgactatgagataaagaaccatgcgatccacatttcccaacttggtggaggatacaaagcactcattccagatttataccgtggaaaagttgctctggatgttgctgaggcacaacatctgatggagggtctcgactggcagggtgcagtcaaggatatccaggcttcagttaaatggctgaagtcaaatggatcacccaaggttggtgttactggctattgcatgggaggtgctttatcaattgcaagtggagttttagtcccagaggttgatgctgttgttgctttctatgggacaccatcttctgagcttgctgatccttctaaggctaaggctcctatacaggctcatttcggggagcatgacagttttgttggtttttcagatgtcactgcagccaagtccctggaggagaagctcaaatcttccgggataccatatgaagttcacatataccctggatgttcgcatgccttcatgaacacttcgcctgaggcactcaagaggaagaaggggatgggtctgactgatgagaaccaggaagccgtcgacctggcctggtctcgcttctcttcttggatgggccggttcctcggatctgcttgattatgtgccgcgtgatgatgtggagtcaggtcccatgaataaaatagaataaaataaaatgttcagattcaggaaccatgcaaatggactgggctgtacggttctctggatttgcttgtccttctgtttatagttatctacctcagtgtggtttccttattttctgtggatggatgcatattgtggaatagccgtcgatggcttctgacagtaagcagcgacaaggcaactaactgctggccagagttccccctaaaaaaaaaannnnnnnnananaaaaaaaaaaaanaaa

SEQ ID NO: 259580 - DNA, 876 bp, Zea mays
cggcttctccacagagttcgttgcccgcgcatgggacctcacccaggacgacgccgccaagctcgtctccacccagcccggatccggcggggtcagggtcaaggacgggcacaagatgcccgaggcgcgcgacgaggacaggcagggcctggtcctcaactgcctagaggcgccgcttgacgtcgacatcaagaacggagggcgcgtcgtggtcctcaacacccagaacctgccgctcgtcaaggaggtcgggctcggtgctgaccttgtcaggatcgacgcccactccatgtgctcgcccggcttctcctgcgactccgcctaccaggtcacctacatcgtgcgcggcagtggccgcgtccaggttgttgggatcgacggcacgcgagtgctcgagacccgcgccgagggaggctgcctcttcatcgtgccaaggttcttcgttgtctccaagatcgccgacgaaaccggcatggagtggttctccatcatcaccacccccaacccaatctttagccacttggcgggccggacatcggtgtggaaggcaatatctccggcggtcttgcagtcgtcgttcaacaccacgccggagatggagaagctgttccgtagcaagaggcttgactcggagatcttctttgcgccttcaaactgattcattcgccggtggaaaatggtccatccatctcgagtaaacttggtgtcctgggtgtgttctttagcagcttcagtttagaataatcagggtatgtcttcatcatcaggtttttagatcggttcatggtaataataaacttgagatggtacacatgtttcttaattagttctcttggtattctttaaaaaacaaacacagtcctaaatgtgaacatg

SEQ ID NO: 259581 - DNA, 647 bp, Zea mays
  unsure (1)..(647): unsure at all n locations
ccggccgatacagaagcacataaacacattcgacgaggtcacgactcacgaggggactcccgagtcccgagcgcacgcgcgaatcgccgcggacctcgccggaggcggcgacgagctcggatcccggcgatctagtcgccggaggcggtcccgatggctcggcggtcgtcttcctcgtcgtcggggacctggcggtacctgaacccggcgtactacctcaagcggcccaagcgcctggcgctcctcttcttcgtcttcgtcgcggccaccttcgccttctgggaccgccagtcgctcgtcagcgagtacgagtctgagatttcccgattagaagatgatataaatcggttgcatgaccagctaagaaaggctggagttaatctggatgaaaatccagtagtaagcaataagaattccagaaaagatcttgtagtagaaattgatcctgtcaataatgaaagacgggaaaaagttaaagaggcaatgctccatgcttggaattcttatgttaagtatgcctgggggatgggacgagcttcaggcccattatgattagggtatcaaggtgagtcaacaagctagagactggtggncngaagtcatttagactttgacaaggattatatgccgaagtgtttttgaaacga

SEQ ID NO: 259582 - DNA, 1374 bp, Zea mays
cggacgcgtgggcgcgaaggcacctagcagccgccactcgccgaactgaggaacacgccgggcgacgggatacagcagcagcgcgcccctctatccccgacgcgacggcgccctgcagctgcagataaacctgttccaatggccaaacaaaaagagggtgtggacaaaagaactgctaggaagatgatccgatctacggaaggctgtgcaaagagcattactttcgagaggaacaacaaatcagacgctgtgcagcttcacgatctgccgaatgacatcctaggtagcatactatcacggttgacattcagagaatcctcacagatgggccttgtttctcatacctggcggcggctgtggagaagctgttgccggaaactggtcttcaccagtgccaccatgttccaacccggaaataggagcatcaaacatacaaggaccaactttgccatgagagtcaacagtttcttgcgtcagctacacactcatcctactcttaataagtttgttattaagttcgggctgcgcaggaagcacactcgccatgtcaacagatggattcgcttctgctccgtgtcgcgagcaaggcacatcactattaatttcactcctggagtgaaagattttgtcatgggtccagccaacagcaagtacatcttccccctgaacgttttcagtggtccagaaggctcctctacacatgtcagaactcttcatctgggctatgtctgtctggacacaacctcgtctgatttcatgatctttgcaaatcttaagaagctcactctgcacaaaatttcctttttgggagacctccagtgcctgatgctgccagaatgcaattctcttgagtgtctgagcatcagcttctgttccttgcctggtttaagcacatgccaaccgctgcaacgtctgcgatgtgttcgtttgcactactgctatctaaaaaagattgagctggaagctccaaatctaacatcgtttgacttgaccaaccaaccaattccatttgtgcttggtggatctctgaatgtaatggaagccaacattaaactgttagctaaggactcaccttatggtgataatctggactacatctacactgagcttcctgctgcgctgtctcatgtgcataaactctcgataacctcgggtctcttcgtttatgatcagctgcaagggttttccaaaacctcagccagattcatcaatctgaggcatctgaccatgtatttgcctctttatggggaacctaagtcaattagtgggattcttcgcttggcctacctactggaattggccccagctctagaagaattggaattgcatgtgagtggcttactaactctataatctgttatagattttctcaag

SEQ ID NO: 259583 - DNA, 836 bp, Zea mays
  unsure (1)..(836): unsure at all n locations
cccacgcgtccgctaaggactcaccttatggcgataatctggactacatctacactgagcttcctgctgcgctgtctcatgtgcataaactctcgataacctcgggtctcttcgtttttgatcagctgcaagggttttccaaaacctcagccagattcatcaatctgaggcatctgaccatgtatttgcctctttatggggaacctaagtcaattagtgggattcttcgcttggcctacctactggaattggccccagctctagaagaattggaattgcatgtgaatggcggtggcgtggatgttgggtgggcactcagacggaatatgttaccgtactcacacaataggctcaagagggtccttatttcaggagccactgtatgggaggggctaatggagctggcatactacattcttcggagtgccaatagactcgaaagtatggtcttagatccaaagataaggattgggggtcctcagctggatggttggatgattgatattggtagggagacgatcaaaaatatttttgagggagaggagtttcagagcattattactattctgtaagaatggtaagataggccacaggattttggtggtcacaccaagtggccatgtttgattatgccataggtttgaccagtatggtcataaatgtttgttgttttcatttccgacctcaggaaatgtaaattaatactccctccaaatccatttttcattcgcgtatacttctcggcagtgaccagattaagtttgaanaaanaaaccgtttcatttttgctgttgcatgtgacgtggcncacgcctgcatgcatgcgaatanaagat

SEQ ID NO: 259584 - DNA, 643 bp, Zea mays
ggccgccacaagccacagccgctccgagtcctgcccgactgctccacaggccactcgtcaccccaaaccaaaacgaagctgcgggcctgcggcggcagcaacagagagcagagatgctgcaattcccggcgctgatgcggcagtggccatcgccgccgctgatcccggcgtccacgctgctccccgtgccggccacctcccaggaggacgaggtcctcctcgccatggccgagtccgacctcgaggacaagttgaatgagatccggaagaccaacagccacctgattatcatcgggaagcccacaggcgacaccaaggaggagtatgacgctgaggtggaggacgacgatgcagacaacgtcgaggagtctgatggcgatgacttcgaccaggagactggttgacccaggcggctccccgctccccccatgcttcgccggcatccttgagcgtcgccatccccactgcccagtctgtatttcgcaatccctgagtcgctcctgctatctagatgttctgtgttaccctattctgctgctgctgtctgttctcggaatttgagcatgtccttgtcatgtggacctcgtctatgaaactactagatgattaatcgatccaatttaaacgctgtagtactttcctc

SEQ ID NO: 259585 - DNA, 459 bp, Zea mays
taagctgaacgagatccggaagaccaacagccacctggttatcatcgggaagcccacgggcgacaccaaggaggagtactacgctgaggtgaaggactacgatgcagacaacgtagaggagtctaacggcgacgacttagaccaggagaccggttgacccaggtggctcccccgtgcttcgtcggcgtccttgagcgtcgtcatccccgctgtccagtctgtatttcgcaatccctgagttgctccttctatctagaaaccctgttacccgattgtggttctgtctgttcacaggatctgagcatgtccttgtcgtgtggaccttgtgtatgaaccaagtacatgattaatcggtcccatttaaatgtaaaattagtttcctcaaaaaaaaaaaaaaaaaaaaaaaaaaaaaaaaaaaaaaaagggcggctgctcgggaatccggacggtcctgcggcg

SEQ ID NO: 259586 - DNA, 641 bp, Zea mays
tccggacctgaattcccgggtcgagccacgcgtccgggtctctcttcctggtccaagtgatcttgccaagttacgagcagcgagcagagatcagatcatccatcggcaatgtcgaacatcgggcagtccttccaggccggcaaggctgaggcccagggcgagtaccaggcggagcacgcggcgcagtgcgtcaaggacaccgccgcagccgcggccgacagtgcgcagctgcagcagcaccgccccaccggcaccgttgagcaggtggcgcagacgggccagggcgtggcggcaggcgtcaaggacacggtggcgggcgcggcggttggcgtcacgaacacggtggcgggcgtggcggcgggcgtcacgaacacggtcacgggcgccgtggcgggcgtcacgaacacggtgaccggcgcggcggcgggtgtcaaggacaccgtgaccggcggccactgatcgacgacccaagaatgcttcatgcatggccaagtgttgagggtttgaggccaaagatggcttgaatttccgtcctttttttgctttattttttgacattattgttttaacatgtttcattcacccgtctctgattgggattgtgatcacgaccgcctgcaataaaaaaggccatctttact

SEQ ID NO: 259587 - DNA, 875 bp, Zea mays
cccacgcgtccgcccacgcgtccgcccaggtcgacccacgcgtacgccgcattcgttccaactcctgagcactttctcctcgtccccgacaagccaatcgaagccgagatacggccatggactccaccggcaccggagcagggggtaaggggaagaagggagcggccgggcgcaaggtcggcgggccaaggaagaagtcggtgtcgaggtccgtgaaggccgggctccagttccccgtcggccgcatcgggcgctacttgaagaagggccgctacgcgcagcgtgtcggcaccggcgcccccgtctacctcgccgctgtcctcgaatacctcgccgctgaggttctggagctcgccggtaatgctgccagggacaacaagaagactcgcattattccgcgccacgtgcttctggcgatccggaacgacgaggagcttgggaagctgttgggcggcgtgaccatcgctcacggcggtgtgctccccaatatcaaccctgttctgctgcccaagaagacggcggagaaggcgtccagtgtggggagcaaggaggcaaagtcgcccaagaaggccgccaagtcccccaagaaggcatagactgactgtctggagtgatctgatgtttagcagtaccttgttaccagtatgcggtgatgcgtaggctgtagatgggacgaatgtgcttgtgtgtgtatgtgtcctgctgcaagttgccctttgctatttaaaatggaagaagaaatgccttgtttctctgaaaaaaaaaaaaaaaaaaaaaaaaaaaaaaaaaaaaaaaaaaaaaaagggcggcaaaaaaacaaaaaaaaaaaaaaaaaaaaaaaaaaaaaaaaagaaaaaaaaaaaagaaaagggggg

SEQ ID NO: 259588 - DNA, 1287 bp, Zea mays
ctttccccaccccgcatcgttggacactctcccaagtccaaaccctctccccgccgcatcgccgccgccggaagcgcctccctcgatccagatccaggagatatgcctcgcaatgatgatcgctatgggaatacacgcttgtatgttggaagattgtctccccgcacccgttctcgtgacctagaataccttttcagcaaatatgggagaattcgagaagtggagttgaagcgtgactatgcattcattgaattcagtgacccccgtgatgctgatgatgcacagtacaacctagatggcagggacgtcgatggaagccgcattattgttgaatttgctaaaggggttcctcgtggttctggtggttcacgtgattacaacggaagaggacctccaccaggaacaggccgttgttttaactgtggagttgatggtcactgggcaagagactgtcaggctggtgactggaagaacaaatgctaccgttgtggcgaaaggggccatatagaaagaaattgccagaacagtccaaggaacctcaggcgtgagagaagctattcacggtctccatccccacgccgaggacggggccgcagccggagctacagcagaagccggagctatagccgatccagatccccgtctggatctcctaggggtggacgccgagaccgtgatgagaggagatcaaggagtcttagctacagcaggagcgcaagccctaggcgttctgtgtcacctgtaaaggaaaaggagcgcagccgcacacctgatggcagtaggagccccagcccaagggacaaggtgagcccaccaccaaaggataatggtgcccacaatggctcggaccgtgaagacagccctgggggcagggagatgagcaagaggagtcggagcccgtctgatggctaccgtagccctgtgggcaatgggcgcagcccgagccgtagcccaagccccaaggtcaacaatggtgatgacccaagccccaagggcaacaatggtgacgacccaagccccaagggcaacaatggtgatgacgagcaccgcggttcaccaagaggaagtcagtccccctgaactgaaaaactccccgtgcaatttggggagcagtgtgcctgatttgagaaaacaaactgtattttgccatttctcagacttgtgatctttttgagcaagaaaactcggtgtaagaatttgttgccctcgggtgtaagacagatttgtggtatttgagcttttcatcctgccaaaagctgaatattcattctattgccaagtatcccg

SEQ ID NO: 259589 - DNA, 1363 bp, Zea mays
ggttcgatccacgcgttcccttaggcttagaattcggatccctcccagcacatccatccccttcccttcccttccctcgtgccccgccggctctccagcgcgccgtctctgcccagatccaggagatatgcctcgctatgatgatcgctatggaggcacgcgcttgtatgttggcagattggccccccgtactcgttctcgtgatttagaatatctcttcggcaaatatggaagaatacgagaagtggagttgaagcgcgactatgcatttattgagttcagtgaacatcgtgatgccgatgaagctcggtaccaactagatggcagggatgtcgatggaagtcgcattgttgttgagtttgctaaaggggtcccacgtggtccaggtggctcacgtgaatatatgggaagaggccctccaccaggcacaggtcgttgtttcaactgtggaatggatggtcactgggcaagagactgtaaggctggtgactggaaaaataaatgctaccgttgtggagaaagagggcatatagaaagaaattgccagaacagtcctaggagcgtcaggcgtgaaagaagttactcacgctccccatctccacgccgtggaagaggtcgcagtccaagctatagcaggagcaggagccggagccggagccggagctatagccgatcgaggtccctatctggatctcctaggggaggccgccgtgaccgtgatgataggagatcgaggagtcttagctacagcaggagccccatgcggtcgccacctgcaaaggaaaaggagcgcagtcccacacctggcggaagcaggagcccaaggagccgcagcccacaggatcaggtgatgagcccaccacctaaggataacggcgacaggaatggttcagaccgtggcgacagccccagagggagggaaaacagcaggagccgcagccgcagccgcagcccatccggtggtaaccgcagccctgcagctaatgggcgtagcccgagccccagaggtgaccgtggcccgagccccatggctgaccgtagcccgagcccaaagggcaatggtaacaacgatggtggtgatgatgatactggccgtggtggttcccccacaggaagcaagtcaccctgaacgctgcaccgtctcagttcttaggtgcttcgtgatgcagtgggcaaacataccaaagacgtgatagctgtatcgtttccctatctgagacgtggacttatttagcttgctttgatcttggactcttattttttctcttatggatatatgatatgatgccttcgggctggcttggatctgaataagtgaatgtggacacgcatgttgtgtcgccctatgttggtatttgcctgc

SEQ ID NO: 259590 - DNA, 835 bp, Zea mays
ttcctctggcgaaccacgcgtccgcccacgcgtccgcccacgcgtccgcccacgcgtccgcccacgcgtccgcccacgcgtccggcattcctcccatctcccaagacctcctcagacccgagaagcgcagctgcggccatggacgccaccggcactggagctggagggaaggcgaagaagggagcggccggtcgcaaggccggcgggccgaggaagaagtcggtgacgaggtccgtgaaggccgggctccagttccccgtcggccgcatcgggcgctacctcaagaagggccgctacgcgcagcgcgtcggcagcggtgcccccgtctacctcgcggccgtcctggagtacctcgccgctgaggtcctggagctcgccggcaacgctgccaaggacaacaagaagacgcgcatcgtcccgcgccacgtgctgctggcgatccgcaacgacgaggagctcgggaagctgctgaccggcgtgaccatcgcccacggcggcgtgttgcccaacatcaacccggtcctgctgcccaagaagacggcggagaaggcgtccagcggcgggagcaaggaggccaagtcgcccaagaaggccgccaagtcccccaagaaggcatagggtttggaggcggatccgatgttgtcatgtgtaggttgtaagcgggcaatgtgattggctgtgtatctgcttcgctcaagttgctttatgtcattcctaatggaataggaaatgccgtgtttcttaaaaaaaaaaaaaaaaaaaaaaaaaaaaaaaaaaaaaaaaaaaaaaaaaaaaaaaaaaaaaaaaaaaaaaaaaaaaaaaggggcggccgttt

SEQ ID NO: 259591 - DNA, 855 bp, Zea mays
tcccgggtcgacggacgcgccctcctctctcgcatccgcagcctctcgagctctactccatcccctcgatctcgaagcgcagcagcagcagtcaggcggccatggacgcgagcgcagcaggagccggcgggaaggcgaagaagggcgcggccgggcgcaaggccggcgggccgaggaagaagtcggtgacgaggtccgtcaaggccgggctgcagtttcccgtcggccgcatcgggcggtacctgaagaagggccggtacgcgcagcgcgtcggcacgggcgcccccgtctacctggccgccgtcctcgagtacctggccgccgaggtgctggagctggccggcaacgctgccaaggacaacaagaagacccgcatcatcccgcgccacgtgctcctggccatccgcaacgacgaggagctcggcaagctgctgtccggcgtcaccatcgcccacggcggcgtcctccccaacatcaacccggtgctcctgcccaagaagaccgctgagaaggcggcggccaaggaggccaagtcgcccaagaaggccgccaagtcccccaagaaggcatagaggggcgcctttaccgctgtgatgttgaatgctcgtgttcagtagatctttacgtctgtagtgtcgtcgttgttattggaactggttagtagatctgtgcattgtggttgaaacgtgattccctgatttcagaaatctaatttgcaaattgggatgaccaaaaaaaaaaaaaaaaaggagaaactaatcggtacatgaaaggaatgatagagtgctctacgtgccaaaagaacatatacatactggacgcatgcgaaagaagaaagggtcgtcctttttaaat

SEQ ID NO: 259592 - DNA, 429 bp, Zea mays
atgggcgtagcccgagccccagaggtgaccgtaccccgagccccatggctgaccgtagcccgagcccaaagggcaatggtaacaacgatggtggtgatgatgatactggccgtggtggttcccccacaggaagcaagtcaccctgaacgctgcaccgtctcagttcttaggtgcttcgtgatgcagtgggcaaacataccaaagacgtgatagctgtatcgtttccctatctgagacgtggacttatttagcttgctttgatattggtgtcttatttctcttatgaataatgtggacacgcatgttgtgtcgccctatgttggtatttacctgcaatgctatagcgtcagtcttgttgaggcctgagcaaaaacaaccagataaaaaaaaaaaaaaaaaaaaaaaaaaaaaaaaaaaaaaaaataaaaa

SEQ ID NO: 259593 - DNA, 1378 bp, Zea mays
cagagtcagagcaaccctatctcttccccactccgctcctcgctcaccctctcaccaaatccttctcctccgcgccgccacagccgggcgcgcctccccgatcgagatccaggagatatgcctcgttatgatgatcgccatgggaatacacgcttgtatgttggaagattggcccctcgcacccgttcccgcgacctagaatatcttttcagcaaatatggaagaatacgtgaagtggagttgaagcgtgactatgcattcattgaattcagtgacccccgtgatgctgatgatgcgcagtacaacctagatggcagggaagtcgatggaagccgtattattgttgaatttgctaaaggagttcctcgtggttctggtggttcacgtgagtacatgggaagaggacctccaccaggaacaggtcgttgttttaactgtggaatggatggtcactgggcaagggactgcaaggctggtgactggaagaacaaatgctaccgctgtggtgaatcgggccatatagagagaaattgccagaacagtccaaggaatctcaggcgtgataaaagctattcacggtctccatccccacgtggtggacgtggccgcagccggagctacagcagaagccggagctatagccgatccagatccccatctggatctcccaggggtggacgccgtgaacgtgacgagaggagatctaggagtcttagctacagcaggagcgcaagccccaggcgttctgtctcgacctgcagaggaaaaggagcgcagtcgcacacccaatggcagtaggagcccaaggagccccagcccaagggctgaggtgagcccaccactgaaggataatggtgcacgcaatggctcagaccatgaaggcagccctggtggtggagagaacagcaagaggagtcggagcccatctgatggctaccgtagccctgtggccaatgggcgcagcccgagcccgagggacgatcggagcccaagccccaagggcaacaacgaagatgacttcctctaggtgaacccacgcgtccgatcgcccacggcggcgtgttgcccaacatcaacccggtcctgctgcccaagaagacggcggagaaggcgtccagtggcgggagcaaggaggcaaagtcgcccaagaaggccgctaagtcccccaagaaggcatagactgactgtccggtgtgatctgatgtgtagccagtaccttgtcttccagtatgcggtgatgcgtaggctgtagatgggacgaatgtgctggtgtgtgtatgtgtcctatcgacagcctacgcatcaccgcatactggtaacaaggtactgctgcaagttgccctttgctatttaaaatggaagaagaaatgccccggtt

SEQ ID NO: 259594 - DNA, 713 bp, Zea mays
caacggtccgggacgtggtctcgactctcaactcccaaggtccctttttttttctcgatctggaagcgccgcagtagcagccatggacgtgagcggagcaggcggtaaggcgaagaagggcgcggcggggcgcaaggccggcgggccgacgaagaagtcggtgtcgcggtcctccagggccgggctgcagttccccgtcagccgcgtcgggcggtacctcaaaaagggccggtacgcgcagcgtgtaggcacgggtgcccccgtctacctcgccgccgtcctggagtacctcgcggccgaggtgctcgagctcgccggcaacgcggcaagggacaacaagaagacgcgcatcatcccgcgccacgtgctcctcgccatccgcaacgacgaggagctcggcaagctgctggccggcgtcaccatcgcccacggcggcgtcctccccaacatccacactgtgctcctccccaagaaggtggccgagaaggcggccaaggagcccaagaaggccgccaagtcccccaagaaggcgtagagtgatctcctgtcttagaacaatattaccattagcaatcgtgcagttagactagatcatgtttagtgtagatccgcaatgttcttgtccctgcagccatctggaacggtttatctagtacatccgtgcactttccttgctaattgcaaaaaaagcggtctaatcttttgtttcaaaa

SEQ ID NO: 259595 - DNA, 613 bp, Zea mays
ggagtcttagctacagcaggagcgcaagtcccaggcgttccgtctcacctgcaaaggaaaaggagcgcagtcgcacacccaatggcagtaggagcccaaggagccccagcccaagggctgaggtgagcccaccacctgagcgataatggtgcacgcaatggctcagaccatgaaggcaaccctggtggtggagagaacagcaagaggagtcggagcccatctgatggctaccgtagccctgtggccaatgggcgcagcccgagcccgagggacgatcggagcccaagccccaagggcaacaacgaagatgacgagcgccgtggttcacctagaggaagtcagtcccccctgaactgagaaattctgatcaaatttgggccgcacgattcggttgtaactgttatattttagtttgagacaacaaactgtatttgctcatttctcatacagtcaggtttatgctttttgagctagaaaacatgtgtaagaatttgttaccttcaagctattcctggtttgtgatatggtaatacttgaactatttagcttgccccatctgaatacttttagccccccaaaaaaaagaaattcaaaaaaaaatataaaaaaagga

SEQ ID NO: 259596 - DNA, 803 bp, Zea mays
ttcttgggggtcagaccggctgtacaatattatattaagaagaccttctcacacaggtcaagatgaccttccacgcaggtcgagaaaacctctaaactcctgccccaccacccccacccatacacaatggcaccgtatcccaagtgagaacgaccgggccaggcctgtgctttggcttgggacaggcgaggggatgttttaacttttaaccacagcctgaaaattcgctcccacggggagtcaaacctagaacctgacttgtgctactcagaccacctaaccaactcgcctgttcataataggtagtttatgaaggtgttgggttctgtgatgcttgacatcattttgaggttcttgtggatggggtcatacaagtcttctgattttattggtgtatgttctgttacatcactaagcacaaaataaatgtttgacctgggcctatttgacttgaatgatcttgttgaaggtttttcggttttttacacaaccatggaggtgtggtggaagggtgcccttgatggaattggtggccatagttccaatgtttgtggaggactttggtgaagggcgcccttggtgtaatcttattgactgttgtagatgatgaagttgcaagttaatgtatttgagtacttcgactcacgtcagcttattgtttgtggcaaccatttccgcagaattcgagaagtggagttgaagcgtgactatgcattcattgaattcagtgacccccgtgatgctgatgatgcacagtacaacctagatggcagggacgtcgatggaagccgcattattgttga

SEQ ID NO: 259597 - DNA, 927 bp, Zea mays
gtagaattcatatccctcctaccacatccgttccccccttcccttccctcctctcgcgcgccggctccacgcagatccaggagatatgcctcgctatgatgaccgctatggaggcacgcgcttgtatgttggcagattggccactcgtactcgttcccgcgatttagaacatctgtttggcagatatggaagaatacgagaagtggagttgaagcgtgactatgcatttattgagttcagtgatcatcgcgatgctgatgaggctcgataccagctagatggcacggatgttgatgggagtcgtattgctgttgaggttgctaaaggggtcccacgtggttcaggtggctcacgtgaatatatggggagaggccctccaccaggtacaggtcggtggttcaactgtggagttgatggtcactgggcaagagactgtaaagctggtgactggaaaaacaaatgctaccgttgtggagaaaggggccatataccaagaatttgccagaacagtcctaggagtctcaggcgagagagaagttactcacggtccccatctccccgccgtggacggggccgcagtcgaagctatagcaggagcaggagccggagtcggagctatagtcgatcaagatccctgtctagatctcctaggggaggtcgtcgtgaccgtgacgataggagatcaaggagtcctagctatagcaggagccccatgcgatctgcctcgccaccagtaaaggaaaaggagcgcagccccgcacctgatggaagcaggagcccaaggagtcgcagcccccaggatcaggtgatgagcccaccaccaaaggataatggcgaaggcaatggctcagaccgtggcggcaccccagagggagggagaacagcaggagctgcagccgcagccgcagtccatctggtagtaaccgc

SEQ ID NO: 259598 - DNA, 455 bp, Zea mays
atccgttccccttcccttccctcctctcgcgcgccggctccacgcagatccaggagatgaggcctcgctatgatgaccgctatggaggcacgcgcttgtatgttggcagattggccactcgtactcgttcccgcgatttagaacatctgtttggcagatatggaaggtttttcggtttttaccggaggtctttggtggaagggtgcccttggtggacttggtgaccatttggtgaagggtgcccttggtgtaatgttattgactgttttagtggaagttccaagttggtgatgcatttgagtacttgacacatgacgtgacggcttactgtttgtggcaaccctttgcgcagaatacgagaagtggagttgaagcgtgactatgcatttattgagttcagtgatcatcgcgatgctgatgaggctcgataccagctagatggcaaggatgttgat

SEQ ID NO: 259599 - DNA, 371 bp, Zea mays
  unsure (1)..(371): unsure at all n locations
tgttgcccaaaatcaacccggtcatgctgcccaaaaagacggcgaaaaaggcgtccaacggcggaagcaaggaggccaagtcgcccaaggaggccgccaagtcccccaagaaggcatagggtttggaggcggatccgatgttgtcatgtgtaggttgtaagcgggcaatgtgattggctgtgtatctgcttcgctcaagttgctttatgtcattcctaatggaataggaaatgccgtgtttcttacgcctgcttttggttctgcattctactgaaaaagcgtacgataattaacacattcacctttgaagaaaaaaaaaaaaaaaaatgagtataaagaaaaaaaaaaaaaaaaaaaaaagggcggccgcn

SEQ ID NO: 259600 - DNA, 181 bp, Zea mays
gcagcaggacacatacacatacaagcacattctgtcccatctgcagcctacgcatcaccgcatactggtaacaaggtactgctaaacatcagatgggacgaatgtgcttgtatgtgtatgtgtcctgctgcaagttgtcctttgctatttagaatggaagaagaaatgccttgtttctctg

SEQ ID NO: 259601 - DNA, 624 bp, Zea mays
tcttttaaagtcaaccaacccttcacgaacgacgcagcccaacccgttcccaccaaaccagcggcaccacccatggcttcggcggcggcgagatccggtctccggtcgctggcggtgcgcgccgccccgttgaggcgccgcatgtcctcctccgtccacgacgacgcctatgagacggccaagtgggagaagatcacctacgccgggatcgtgacctgcaccctcctggcggcgtacaacctgtccaagggccacccccacttcgatgagccgccggcgtacccctatcttcacatccgcaacaaggagttcccatggggccctgatggcttgtttgagacgaaggaccaccactgagccctgattagcacaccttcaggagctggtgcacgcttaaaagagttatatggttgtttcagtgattttccttttcccttgagacctatttgctgcaacaagaaataagaatgaccaaactcttgtattgacagtgaggttttaactgtgttagctgttaccggcttgtctacttttctttgccgtccacgccatatatggtcacctgtaagttggtcttgcccggtgtcaggaaacggcatcacaattatcaaaagctgttattgt

SEQ ID NO: 259602 - DNA, 1167 bp, Zea mays
ttttctcgtccgcccacgcgtccgctcaagtgttcccagtgacaaaaagtacagaaatgaagataatgtgagcctgggcgatcagtcagatggggccgtcatgccatctcccacaaagaagctgcaaatatgcaaaggcccttcagatgcaccttcaattaggaaatcaactatcagaatcctgggtgttaagggagctgctctaccacccacagggaaatctcaagttgaaactcggaaatgctttgctaatgctacagcagaagtgatttctgctagtacaaacgagatcagtgagccagataatgcagctgccccattgcttgcacagcagttgccaccagacactgcaaagaactccactgtcatcatgcattacccatgaaacaagtaaagtcaatcagttggctgcttcatggccaagggcgaactttcaaactgattacaacaagaagccttccaatgtacccataatggctaaccagcccagtgggttcgctggtgcgactgctcccttggtgacaccaaagatggaaatcggaaacatgaaggacagttccaatcctctctcaaatcctgcttacgcaagggcgcttgtaataaagcagcaagagcagctccttcagcaatataaattgggcagttcaccgcagcgacagcatcatggacagcatctctacatcaaagggccagctctgtttgagaatgatgacccgccaccggtcaagccgctgggaacaaggtgccagctctgcaagcttgatgttgctttccggacacaaggggatgctggccgtgatgccaatgctccaccagtcattgcagttttggcatgccaccatgtgttccgcagcaggtgcattgaatctgtttacgggctcgctgagcctgctgagtgccttgcctgcctggagtccggtgcagcgcactgattgctaaccagatacaccaggtcaagagtctgaagtgctccctttctgtgggcctttagatggtgtaagtaggctacccttggagttccatagggagcttgaattatgggacatgtcacatgtctgatatatatgtttatttatttctcccgtcgtggtcataggtaaaatctgcagtctattgacgctgcccttttgaataaacctggtgtctgcgccggttggcttggtgttg

SEQ ID NO: 259603 - DNA, 1019 bp, Zea mays
  unsure (1)..(1019): unsure at all n locations
agttggcgtncggcagctccacgtcgggcgccgtgggcgacgacgacagcgagtccctgcgccccagcggaaccgggtaccggggcccgccggtcatggtaatcagcacgcccgacgccagtgcgaggatgtcggcgcaggacaccaccccggggcactccagctccagggccagcttggcgcgcaccacggcgtcgaaggcgtccccgggcagggagtggttgatctccgcgtcgtgctccgacttctggaactgggtggacgcgatcagcaccgacgcgtcgcacccgctgacgaagcagtcgtggaagaagacgcggagcaggcccgcggccgtcgtcggcccacgcgtccgcccacgcgtccgcccgggtgctggtcaccatgaccggcgggccccggtacccgattccgctggggcgcaaggactcgctgtcgtcgtcgcccacagcgcccgacgtcgagctgccgcacgccaacttcaccgtggaccgcctcatccagatgttcggcgccaaggggttcacggtgcaagagctggtggcgctgtccggcgcccacacgctgggcttctcccactgcaaggagttcgccgaccgcctctacaacttccgcaaccagggcgggaagccggagcagttcgaccccagcatgaacccgtcctacgccagggggctgcaggacgtgtgcagggactacctcaaggaccccaccatcgccgcgttcaacgacatcatgacgcccggcaagttcgacaacatgtacttcgtcaacctcgagcgcggcctcggcctgctcagcaccgacgaggagctgtggacggacccacgcaccaagcccctggtgcagctctatgcatccaacgccacagccttcttcgacgacttcggccgcgccatggagaagctcagcttgttcggcgtcaagaccggcgccgacggcgaggtcaggcggcgctgcgacgcctacaacagcggccccgccgtcgccgccaccatacccaagatgtgacgacgctg

SEQ ID NO: 259604 - DNA, 802 bp, Zea mays
gtgggtcggtccaagcctctaaactgacgttctgctaaaagttaggaggggagcacccatcagccaagagctatccatacgcacagcgatgcaccagcacgagatactagccatcatgcgcctgtcgtccctcctcctcgtcgtggccgccctctcggcgcgcgccgcggcgcagcaggtgccgccggtgggcggcagcgctctgaagccggactactacagccagtcgtgcccgcgcgcggagcggatcatcgcggaggtgatgcagacgaagcagatggcgaacccgacgacggccgcgggcatgctgcgcgtcttcttccacgactgcttcgtcaccgggtgcgacgcgtcggtgctgatcgcgtccacccagttccagaagtcggagcacgacgcggagatcaaccactcgctccccggggacgccttcgacgccgtggtgcgcgccaagctggccctggagctggagtgccccggggtggtgtcctgcgccgacatcctcgcgctggcgtcgggcgtgctggtcaccatgaccggcgggccccggtacccggttccgctggggcgcaaggactcgctgtcgtcgtcgcccacggcgcccgacgtggagctgccgcacgccaacttcaccgtggaccgcctcatccagatgttcggcgccaaggggttcacggtgcaggagctggtggcgctgtccggcgcccacacgctgggcttctcccactgcaaggagttcgccgaccgcctctacaacttccgcaaccagggcgggaagccggagcagttcgaccccagcatg

SEQ ID NO: 259605 - DNA, 606 bp, Zea mays
gactcatcgagtgcaaagcagttgttatcctaagaaccatgcatatgctaccagaataagagagatgagagcggttggtggccaaggctcctgaaaaaggacatgtgttcttgaaggttgactggacaaatggtaggatgaggatggcgaagatgttgaatgttagtatttcacttctggttgattatgttttttcttatgcgcttgacaaatctagatatgcaaccagacatgctttattcttgttcctattttgttttccttatgtattaattccttaacttgtaatgcacatgatattttccttatgtattaattccttaacttgtaatgcacatgatgttttccttatgtattaattcctttacttttaaagcacatgatgaaggctggttgttaggtaagttctcttaaactttagtaagcttgcgtacttttgctatggatcttttgaatcaattacaaggtaattcatttaaaaagcgtagtaacacgtgtacctaaatatcatatataaaagtctgtatggtactgatggttgcaatgtagtggtgaaacaactagattaaaataacaaaatttatgtatggataggatcacatatgt

SEQ ID NO: 259606 - DNA, 1092 bp, Zea mays
agatcacccattggaaatctgtatttctaatttgttgggggatactaggcgtatgaactagtatctatgcagtgggaactatatcagacagttattcaaaaatgtacctgaacaccaatagtacgttggagaacgttgcttcgaccaggattactatcttcgatctgaaactctgataagcagaattgaagacaaacgatcgggtacttggggaatatggaatttatttactgttggtttacctagtacttgcctaccagccaggcgccccaggggacgacggcaaagatacagtctcgggtattaggatggcaaaggcagcgatagataaattctactccaagtatatgttgggatcacgtaagctggtgcttgacccacattcaacgatctttggcaaaaggatgcttgtcaaaagtgcgatcatgtgctattccaataacacaagatagatcagtcctcgaggaaggtctacaggggccctggctttttgaaggaagagggtacttcaagcccgccctagcaataggattgggttgcgcgtccacaccacacggctagtctgttgactttttgtgccaggtgagaacagactatcgggcgttagctagagctgaagcgagggggagggtacattataaactagggagcaagcagcgctacctaggagaatttcagggtagcccaatagataaaatacagaaatcagctcttggatcaaactcaaggcaaggtcagcttcctaagaaatagcgggcgttagcactctacttaggatcagaggatccataagccatttgccgaaggtttactacaggagttaaagagatgggcgacaagaaggcggtcaccagctgctaattatgggccggcccacgaccattttagttgctgtcccctggcactaccgggagggtgccatgccaggattcaaccatataaaggatccgatcagtttgcaactgggcagggggactggtatacctatgacgacgctggcttcataccggacagaacaacaggtattgaaatcattgtgaaaaacaataaatggattggaggggtttatgagggagggagggaaaaagcaaa

SEQ ID NO: 259607 - DNA, 826 bp, Zea mays
atcttggttagagtcgagactcgagacttcgagttccctctccgttataaaaccgagcgcccagggcgctccgtgttcaatctccttgcccgttgtgctctctctctttattcgttccccgcctcaccccgagccagccgtctcgctagggtttcgccgccgccgccgccgccgccatgcctcgccgcagctcaggaaggtctgccccacgcccagctccccgtgctgctccagtgaggaacccgccacagccagcacgccaggctcctcctccagctcctgttcgagatggtggtggctccatgtttggaggaattgggtccaccattgctcaaggtatggcgtttggcacgggtagtgccatggcacacagggctgttgatgctgtattaggtccccggaccattcagcatgagactgttgcctcagaagctgctgctgctgcccctgcccctccagtgatgaatgctgatgcttgcagcatccattctaaggctttccaagattgtctcaacaactatggcagcgagatcagcaagtgccagttctacctagacatgctgaacgagtgccgccgtggtggtgtgtctgcctaagctgcctctgggattattcatggattttctttcggtgatggtatctcattaataagataccgtgaaacttttgtctccacagcttgaagctaaacttcctgggattaatacattttgttatcctatgctgttggagcagacttttgtctcttgatcataaatatttaaacgaacctgtaatgttggaataaaaaaaaaaaaaaaaagggcggccgcaccggtgttttccg

SEQ ID NO: 259608 - DNA, 710 bp, Zea mays
tcggtattcaggtcgaccacgcgtccgcggaagcgtgggcccacgcccagctacccgtgctgctccagtgaggaacccgccacagccagcacgccaggctcctcctccagctcctgttcgagatggtggtggctccatgtttggaggaattgggtccaccattgctcaaggtatggcgtttggcacgggtagtgccatggcacacagggctgttgatgctgtattacgtccccggaccattcagcatgagactgttgcctcagaagctgctgctgctgcccctgcccctccagtgatgaatgctgacgcttgcagcatccattctaaggctttccaagattgtctcaacaactatggcagcgagatcagcaagtgccaattctacctagacatgctgaacgagtgccgccctggtggtgtgtctgcctaacctgcctctgggggttattcgtggattttctttccggatgggggtatctcattaataaggcaccgtgaaacttcgaccatcttcacagcttgaaaccaaacttcctgggattaatttattttgttatcctatggtgttggaacagactttttgtctcttgatcataaatttttaaacgaacctgttatgtttggtgttatttataaattttttattatttacttcttttaattatttttttttaatttttttattttttgatctgtttttattcgttttt

SEQ ID NO: 259609 - DNA, 1833 bp, Zea mays
tcggtttgaaagaactctcctattcaagaggaaagcattcctattgctttaactggtagtgacattcttgcaagagcgaagaatggaactggcaagactgctgcattttgtattcctgcactggaaaagattgatcaagaaaaaaatgctattcaagttgttatattggttcccacaagggaattggctctacaaacatcacaagtttgtaaggagcttggtaaacatttgaagatccacgttatggtcaccactggtggaaccagcttgaacgatgacattgttcgtctgtgccaacccgtgcacttaattgttggaacacctggccgtattttggatcttacaaagaaaggtgtttgcattttgaaggactgttcaatgcttattatggatgaggcagacaagcttctctctcctgagtttcaaccttccatagaacagttgattcgctacctccctgctagtcgacagattttgatgttctcagcgacattccctgtgactgttaaggagttcaaggacaaatatcttcctaaaccttatgtgattaaccttatggatgaacttacactgaagggaattacgcagttctatgcttttgttgaagaacgacagaaagttcactgtctcaacactctcttttccaagcttcaaatcaaccagtcaataatattttgtaactctgtaaatcgtgttgaactattggcgaaaaagatcacagagcttggctattcttgcttctatattcatgcaaagatgctacaggaccaccgtaatagagttttccatgatttccgtaatggagcatgcaggaaccttgtttgcactgatctttttacaaggggaatagatattcaagctgtgaatgttgttatcaattttgatttccccaagaactctgaaacatatctccacagggttggtagatctgggagatttggccaccttggtctggccgttaatttgatcacctatgaggatcggtttaacttgtataggattgaacaagagcttgggactgaaataaaaccaattcctcctcagatagaccaggctatatattgccaatgatcaggcagttttcatctttgttcatttctccgtgattaataaggagacaacttttgtaaataccagctcatcaggttttatggtgttgatctcatttggtgcatcggagacaattctaagttggtggattacgtgagacgaggcacccgacttttcctgatcaccttgtcatgctgacactattatggctatatgggggaaaatgtcctgccacactaggcacaaagtagtgtatattgctaggtgcctattcctagaccctgtcctgctttgagttcgtttgtatttcccttttgttttccgtacgccgtgtcgttaagcagtttcacacaggacattttaaccctgttgctggttctgggcgtgtggcctgtgggtgccgcgcacaagggtaaaagacattttagcccaagtggaacttggggatgtgcgcctcagattggttaatgggtgtgacaagtcggccatcacacttgaggtctggagtctgaacggtagtgaagtgattttaagtttgccaataatcagtggtaagctgcaccgtgctgtgctgtcttttacccttgcaaccatgtccctttgcttcttggcatggtcgccatttagattctgtccggcgaatgtaacgctgggataaaacgttcttgtcgtttgtgatggatttatgtgtttggcacaagcaacttggccaggttatgggtaccagaactgtctacttgtttcttccataataacaaactttgcagttcttttgtgctcaaa

SEQ ID NO: 259610 - DNA, 934 bp, Zea mays
attttggatcttacaaagaaaggtgtttgcattttgaaggactgttcaatgcttattatggaggaggcagacaagcttctctctcctgagtttcaaccttccatagaacagttgattcgctacctccctgctagttgactgattgatttgaagcttggaaaagagggtgttgagacagtgaactttctgtcgttcttcaacaaaagcatagaactgcgtaaatcgtgttgaactattggcgaagaagatcacagagcttggttattcttgcttctatattcatgcaaagatgctacaggaccaccgcaatagagttttccatgatttccgtaatggagcgtgcaggaaccttgtttgcactgatctttttacaaggggaatagatattcaagctgtgaatgttgttatcaattttgatttccccaagaactctgaaacatatctccacagggttggtagatctgggagatttggccaccttggtctggccgttaatttgatcacctatgaggaccggtttaacttgtataggattgaacaagagcttgggactgaaataaaatcaattcctgctcagatagaccaggctatatactgccaataatctgaccgttttcatatgctatcatttctccgcgaataatgagaacttttgtaaataccagctcatcaggttttatggtgttgatctcgtttggtgcatcagagacaattctatgttggtggataacattagatgaggcacccaactgtttttattacaccttgtcatgctgacactgttatggctatatgagggcaaatgtcctgccacattaggcacaaagtagtgtatattctaggtgcctattcctaggccctgtcctgcttttagtttctttttctcttattttcatcctattgtgtcattagctgtttcacacaggacatttta

SEQ ID NO: 259611 - DNA, 808 bp, Zea mays
gtcgatacaagcctctacagtgacgtcgtgactacgcgtccgggcaagcgatcgtcggagcagagagagacttcctcgcctccatcccatcccgccgccgccgtctctacggtcgctaataagccgccgcatccagggatggagatgaagaagatcgcctgcgccgtcctcgtcgccgcctcggccaccgtggcgctggccgcggaggcgccggctccgtctcccaccagcggctcctccgcggtcgcacccgccatcgtcggggccgccgtggcctccttcttcgcgtactacattcactgagccgccggacgaggagccggagccggagggaagagaccaaggtggggggagagacttggctgcgctgcgctgctctgctgctcccgcgcattcccgatgcgtgggcgtgctctgattgggcacggcggtggcagtggcacaccttcgtcttccttttgtttgtttttttttccttcctctttctacttgattttcatttaacgaattggtatcgctgatgcaccagtttaatttggtgccctgttatttgttctttccctcgagtgagggatcgacacctgtaccattgcttgccatttgtctggaccagttcaacaattcgatttaaccatcgcgtaaaaaaaaaaaaaaaaaaaaaaaaaaaaaaaaaaaaaaaaaaaaaaaaaaaaaaaaaaaaaaggaagaaaaaacaaaaagataaaaaataaaaataaacataaaaaaaaaaaaaggggcggccccccaaagggttcaaactttaattcccggtgcatcgaaattaaaa

SEQ ID NO: 259612 - DNA, 1181 bp, Zea mays
aaccataccaaacacgcccatattaatacccgctcggcggtggttctgcaatcgaacgcaggccgcagtcgcgtgcggaactagagctccttcagagaagtgccgtgccagtgccaccgccggccgcatcatcgttccgcccccctgagtgttcagtaacttcttccgatccatattatggcttcaaagcagcagcagaaacagttcctggatgaagccatgatcaagcagccgacaccggaggaggaccgtgagggcgcatggccctcagtgctgacgatcatcggctttggattcctaaccttcaactcattcatggctgtgtacaggtcaaatggagatgttggatctatctcctttgtggtcttctcttacctggtcctcgttctgctgttctactgcctgcgccgattcgagacaactccaccagagtcgcctagccgggagcacataaaaatggccgtgtgggtactcaccacgatgctcactgctgcgttctcatacaaggtggcagcaattatgccactcccggtgcaggtgctggtgtgggcaatggcaggagcaactgtgttcggtggtttttatgctttcttcatccaccaggaaaaaaccgcccagctggaacccccaaaaccataacgagggtgcccgtcctgctagccggtgtgcttgctgtgcgatcgtttggcatgtgcttgttgaggggttgctaggggattggaggggatttaatccccttcaatccccctcaaaccactagtaaccgaacgtggcctgagggggcgggcgagtctttatattgaatgaaactacataaaatagcatgccgtctctgtcactggcaatggacggtggtgcctagcgcaactcagcgcacaactgtgtgtcttgatttttcttctgtttatcacggcattagtgccatgccgttttatgttacagtgttgtgtgctcgcaagcatccgaaaatatgcgtctgagtttagggttgggtcaaacttgtcgaatttggggttctgttataatatgttgagcatgaataaagatggatgctggtgactctgtcgccatcgccgtccatcatgagtgtcctgtaattcaacttatatctatcatgtatgtatgtatgtatgtatgtatgtatgtatatgctgtctactatgcttctttgtttttcctcc

SEQ ID NO: 259613 - DNA, 712 bp, Zea mays
atgataaaccgagtggaatacatgcattccaagggatttattcatcgtgacatcaagccagacaacttccttatgggcttaggtcggaaagctaatcaggtctatatcattgattatggacttgctaagaaatacaaggaccttcatactcataaacacatcccgtacagggagaacaaaaatctgactggaacagcacgttatgctagtgtgaatactcatcttggaatagaacaaagtaggagagatgatctggagtctgttggctatcttctgctatattttttaagaggaagcctcccatggcagggccttaaagctggcactaagaaacaaaagtatgataaaattagtgaaaagaaaatgcttacctcggcagagattctgtgcaaatcttacccgccggagttcgtctcatatttccactattgtcgctccctgcgatttgaagacaggccagattactcttcaatgaagaagctctttcgtgatgtatttatacgggaaggataccaatttgattacgtatttgactggactgcactcaagtaccctcaaatgggctccaacaacaagcttgttcaacaaccaagtgcaagaatggctggagttggaccatcagttgacagaacagacaaagcttccatgggacaagagatccgggatagggtcactggtgctgctgaggcgatcgccagaagaaatcccggct

SEQ ID NO: 259614 - DNA, 499 bp, Zea mays
cgcgtgcggaactagagctccttcagagaagtgccgtgccagtgccaccgccggccgcatcatcgttccgcccccctggggggatcagtattgctcgtgatgcggtgaagcatgagctcaccaagcatattggagttgatgtttcgtatacacgagctcaagtctaggatgatgttatcttgctttgagtgttcagtaacttcttccgatccatattatggcttcaaagcagcagcagaaacagttcctggatgaagccatgatcaagcagccgacaccggaggaggaccgtgagggcgcatggccctcagtgctgacgatcatcggctttggattcctaaccttcaactcattcatggctgtgtacaggtcaaatggagatgttggatctatctgctttggggtcttctcttacctggtcctcgctttgctggtctactgcctgcgccgattcgagacaacttcaccagagtcgtctagccgggagcacataaaaatg

SEQ ID NO: 259615 - DNA, 577 bp, Zea mays
gcaagtatgccactcccggtgcaggtgctggtgtgggcaatggcaggagcaactgtgttcggtggtttttatgctttcttcatccaccaggaaaaaaccgcccagctggaacccccaaaaccataacgagggtgcccgtcctgctagccggtgtgcttgctgtgcgatcgtttggcatgtgcttgttgaggggttgctaggggattggagaggattgaagggattaaatctcctcctattcaattttgaataggaggggatttaatccccttcaatccccctcaaaccactagtaaccgaacgtggcctgagggggcgggcgagtctttatattgaatgaaactacataaaatagcatgccgtctctgtcactggcaatggacggtggtgcctagcgcaactcagcgcacaactgtgtgtcttgatttttcttctgtttatcacggcattagtgccatgccgttttatgttacagtgttgtgtgctcgcaagcatccgaaaatatgcgtctgagtttagggttgggtcaaacttgtcgaatttggggttctgttataatatgttgagcatggataaa

SEQ ID NO: 259616 - DNA, 1073 bp, Zea mays
aacaactccatttgaacaaaaacaggttaaagcatgtgaaatatccatctaatctttcaccagatggacctattgatgatgcagctgctgtgccatttgaaaatttgcaagttcttttgttaggatctaatgacatagatgacttttcttcagtggattcacttaacctgttcccaagtttaagggatgtcaggctttctgacaatcctgtagctgatcctgccaagggtggtgctcctcgttttgtgcttgttgctcgacttggaaaagttggaatactaaatggcagtgagataagtccacgtgaacggagggaatctgaaatacgatatgtccgccttgttatgggaaaaatagaatcaaatgaccaagaagagatcagacggcttcaccctagattcgctgaactgaagtcctttcatggtattgaagatgagaagccaacttcaagcatatcagggccacagaagatggcttctggccttataagtattacgttgaaatgtgtgggtccatcaatgggtgagaagcaaccactgacaaagaaactgcctgcgacaacaactgtcgggaagttaaaatctttgtgcgaaagcttcttcaaactgaaggacataaaagtgaaactgttcgtcgaagaagagggatgccctctaccacaaccagtggaggaggacacggcctctctgatggagcttggaattggctcgggcgcaaccattgttgtggacgaagagagctagccagtcgtctttagagaagggccaactgtatggcgcaaactgacgcttcagctgttattaagttttcgaagagaagatagctgatgacgctcttcgttgcccttatatacttctttctgtgggaatatgcacgtgatgaatattggtgcgggtttgggcttcaaaatggactagcatagtaaaaacattgtgaggacggttgtttggttgggagaagttttctttttttattttcgtcaacgcaacgaactacgtcaaattttttttttgattactgtggtgtgtcgctgacgttttccacaactgaaaccactctgtcattgtgccaca

SEQ ID NO: 259617 - DNA, 1892 bp, Zea mays
gttgctttggttgccaagaaggcttgtgagttaggcctggaggttcggttctggatttcatcttccaacttgttttctttatatattttttgtcctgaccaacatgactaaaatattgatccactggttcacagctaaattactttggtttggtatattcctctttggtggtctgtggctagaattctctggcaattaccatgacaatttaaaaagcattgctgcttttgctcactgttttatatgaaaaccatcctttagtaacactggtatctgtcgatcaggtaaagccatggattaagacgagccttgcacctggttctggtgttgtgaagcagtacttggataagagcgggttgcagaaatatctcgaccagcttggctttcatattgttggctatggttgcacaacctgcattggaaattctggagagcttgatgaatctgtgtctgctgcaattactgagaatgatattgttgctgctgctgtgttgtccggaaacagaaattttgaaggacgtgtgcatcctttaaccagagcaaattaccttgcttcccctccattagttgtggcttatgccttggctggcacggttaatattgattttgagaaagaacctattggcatctcgaaagatgggaaagaggtttacttccgggatgtttggccatcaacagaagagatagccgaggttgtcaagtcaagtgtgcttcctgacatgttcaagagcacatatgagtccatcacccaaggaaatcctatgtggaatgagctgccagtctcaacaagcactctctatccctgggatccatcatctacatacatccatgagcctccttacttcaaggatatgacaatgactcctcctggcccgcgaccggtgaaggatgcatattgccttctgaactttggtgacagtatcacaactgatcacatctcgcctgccggaaacattcacccagacagcgcagctgcaacatatctgaaggagcgtggtgttgaaaggaaggacttcaactcatatggtagccgaagaggaaatgatgagatcatggctaggggaacctttgccaacattcgtcttgtgaataagttcttgaagggtgaggttggacccaagacaatccatgttccatctggggagaagcttgcagtttttgatgctgctatgaaatacaagaatgaagggcatgacactattatcctggctggtgccgagtacgggagtggaagctctcgggattgggctgcaaagggcccaatgctgcagggagtgaaggctgtgatagcaaagagcttcgagaggattcaccgcagcaatcttgctggcatgggaatcatccctctatgcttcaaagcaggggaggatgcagacaccctgggcctaaccggccatgagcgctacacggtccaccttccaaccaatgtgagtgagataaagcctggccaagatgttaccgtgacaactgataatgggaagtcgttcacttgcacactcagattcgacactgaggtggagcttgcttactacgaccatggtggcattctaccatatgtcatcagaaagattgcggaacaatagattgtacaatttgagatgattgcgatgcggtggatcgtaattggtgtaaacgacccatttttgagtacttataataacctctgagtttctcagagtgagctgtctggaacttttagtaaccttttgctttctttaagacactgttaataatatgttaactcctgcaatatctgaatatacatttggcagatgattccctatgttgtaaatgacactagttcatagcactgacgcagttcaaagcggttcttgttatctggtggtactcaaattagtactgcaaacaatccatgagctgatttttatttg

SEQ ID NO: 259618 - DNA, 731 bp, Zea mays
ccgccgaccggaccggaattcccgggtcgaccacgcgtccgcccacgcgtccgcggacgcgtgggcgggagtggaagctctcgggattgggctgcaaagggccggatgctgcatggagtgaaggctgtgatagcaaacagcttcgagaggattcaccgcagcaatcttgctggcatgggaatcatccctctatgcttcaaagcaggggaggatgcacacaccctgggcctaaccggccatgagcgctacacggtccaccttccaaccaatgtgagtgagatcaagcctggccaagatgttaccgtgacaactgataatggaaagtcgttcacttgcacactcagattcgacactgaggtggagcttgcttactacgatcatggtggcattctaccatatgtcgctagaaagatagcggaacaatagattgtaccgtcgagatggttgcgatgcttgcggtgaatcgtaattggtgtaaacggtttgtttagtagtacaacccatttttgcggactacttataataacctctgagtatctcagagtgagctgtctgaaatttgatgaactgctacaattctggtgcgccatgaggatgggatccttttgccttctatgttaataatatgctaacttctgcaataccagatatacatttggcagaagattttgcacgctgtaaatgacactagtattaacactgatgcggttcaaagctgtccttgttttgtt

SEQ ID NO: 259619 - DNA, 943 bp, Zea mays
agcgtcgtaggcactgactcccacacaactatgatagatggtcttggagttgctgggtggggagttggtggtatagaggcggaagctgcaatgcttggccagccaatgagcatggtcttgccaggggttgttggcttcaagttatcaggcaagctgaggaatggagttacagccactgacttggttctaacagtaacccaaatgcttcggaaacatggtgttgtcgggaaatttgttgagttctatgggcaaggcatgagtgaattgtcacttgctgatcgggcgaccatcgcaaatatgtctcccgaatatggcgcaactatgggtttcttcccagttgatggaaagacgctggactatttgaagcttactggccgaagtgatgatacagtggccatggttgagtcctacctgcgtgcgaataagatgttcgttgatcacagccaggttgacgctgaaagggtatactcttcctatctagaacttaacttggaagaggtagaaccatgtctatcaggaccaaaacggcctcatgatcgagtgacattgaagaatatgaagtctgattggctttcttgcttggacagcgatgtaggattcaagggttttgctgtccccaaagaatcacagggcaaagttgcagaattttcgttccatgggactcctgcaaagataaagcatggtgatgttgtaattgcagcaattaccagttgcacaaacacatcaaatcctaatgtaatgctgggagctgctttggttgccaagaaggcttgtgagttgggcctggaggtaaagccatggattaagacgagccttgcacctggttccggtgttgtgaagcagtacttggataagagcgggttgcagaaatatcttgaccagcttggcttcaatattgttggctatggttgcacaacctgcattggaaattccggggagcttg

SEQ ID NO: 259620 - DNA, 938 bp, Zea mays
cttcctcacccgcccgcgccccgtgtacctgctcgacttcgcctgctacaagccggagtcggagcgcaagtgcacgcgcgagaccttcgtgcactgctccaagctcaccggatccttcacggacgagaacctcgagttccagcgcaagatcctcgagcgctccggcctcggcgaggacacgtaccttccccccgccgtgctccgggtgccccctaacccgtgcatggacgaggcgcgtaaggaggcgcgcgccgtcatgttcggcgccatcgaccagctgctcgagaagaccggggtcaggcccaaggacattggcgtcctactggtcaactgcagcctgttcaacccgacgccgtcgctgccagccatggtggtgaaccattacaagctgagggggaatattgtcagctacaacctcggcgggatgggctgcagcgccgggcttctgtccatcgacctcgccaaggatctgctgcaggtgcaccccaactcttacgccctggtgatcagcatggagaacatcacactgaactggtactttgggaacaaccggtccatgcttgtgtcgaattgcctgttccggatgggtggcgcggccatcctgctctcgaacaggcggtctgacaggcggaggtccaagtatgagctggtgcacacggtgcgcacgcacaagggcgccaacgacaagtgcttcggctgcgtgacacaggaggaagatgagattggcaagattggcgtgtcactgtccaaggacctcatggcagtggccggagacgcacttaagaccaacatcaccacgctggggccgttggtgctcccattatcagagcaacttctcttcatgggcacattgattgccaagaaggtgctcaagatgaaaatcaagccatacatccctgacttcaagctggcttataaagcacttctgcatccacgca

SEQ ID NO: 259621 - DNA, 1012 bp, Zea mays
aaatgctcatcgaataggatatgttgcaccacgatttggcaggaatactgaggcaggagatggagaagactctcctgaaaacacagcaagtgcacaaccatcaccttatcattctggtaaagggtacacacatgcaaaagacttgagtaataatatcaaaaagggtggtaagccaagcacatcatttggtattcagcaaagagctgagaagtccgcaaggactaaacgatctacgaagtcaatactgcacgggctgtctgatagtgataatagtgattctgagtttatgggcaccctgtcgaggtcaagatcgcacaccctgaagacaaaccgaaaattgtttcaaaatggcagtactggtttgataacacctcaatccagtggactgatagaaagagagagggtcagaactaaatcccagccattggacccaaaagcaacaagcaacggagatctacatactatggatgagtatcagtctgttatcatgcagttaagggatgaaaattcatcactaaaggaaagattatcaaagatggaagaatcgatgtcgcaagagctagtggttgagtgtgacaagaacaagtctttgacagagagggtggaggatctgcatagacaacttgagtctgcaaccaaggaacatgaggcgctgatcgacatcttctcagaagaaaggaaccgacgagaccaagaagaggagagcctgaggaagaagctgaaggacgcatcttccaccatacaggatttgctggagcaactgaatgctgccaggaaaggccgcaaagtttgaggaaataaactagtaacgttgctccttgcgggcatcatcttagattagagtttgagggttagctgcatctacattgtgctccaggtcgtttggagcatcccatgtacagccaagcagtagtgacccctgaagaacacgttatgctttatctgcagttagcagttaccctacaagaaataacttgcgtaattatctttttatcctgttacgtcatctctt

SEQ ID NO: 259622 - DNA, 1504 bp, Zea mays
cgaatgcccaagccattcccctccagatactccgtgacaccaccgacgacgtggagaacaacctgtacccgttcgtccacctccttcccgacgggactctgttcatcttcgccaacgaccgctccatcctgttcgaccccaggaacggccaggtcgtccgcgagttccacgttctcccaggcggtggtcggaaccgccctgcctccggcatgtcggcgctcctgcccctcgacctccgccgcggcgacgtcctcagtcccgaggtcatcgtctgcggcggctcccccaagaacgccttcacgctcggcgagtccaacacgttcccgcccgccctcaaggactgcgcgcgcatcaaccccttggagcccgacgctcggtgggcgctggaccagatgcccgtggcccgcaccatgggcgacctgctgatcctgcccaccggcgacctgctcattctgaacggcgcggccaagggctgctccggctggggcttcgggcggcagcccgtgctgagcccgctcctgtactctccgcgccaggcgcggggctcgcggttccgggcgctggcgcccaccaccatcccgcgcatgtaccacgccaccagcgcggtgctgcccgacgccaccgtgctcgtggccggcagcaacaccaactcggcctacaacttcagcggcgtcgacttccacgccgtcgtgcgcgtcgagcgcttcaccccgccgtacctcgccccggagcgcgcggccaaccggcccgcgatcgacgtggccaccgtccccggggacggcatggcgtacggggccaagttcacgttccagttctcgacgcccgtgcaggccgtggccgagcccgacctaaaggtgaccatgtacgcgccaccgttcacgacgcacggctactccatgaaccagcggctgctggtgctgtccgtcaccgcgttcgcggccaacgggcagaggtacacgataacggtcgacgctccgggaaagcctgagctcgcgccgcccggatactatctgttgtacgtcatagcgaaaggcgtgccgagcaaggccgcgtgggtgaaggtacacaaatgagaacgaaggcggctcggagacgaatgccagtcgcgtttggcacgacaatacacaagtgtccaccggagtagctggacctctcgcaaccgcacggtaggaggacgtgcggcggtggctgcgcctgtgcatcggatttcgtttgttttctccatgaattttgcatcgcgtgttagtgctccctaatatttggggcaaaacatatgtttagtagagggatatgggtcgactcagattaagtaattagcgagccaaatgtggtatcgtcgtccggttattggtaatgtatctgctgtggtataaatgtatctgctgttggtatacattatgaaatcacattttaattttctatgtagagaccgacgggccattttatcctcttgtacatcacatgtgtgaaatgaaagtgtgggttctaattgagggtctgtttg

SEQ ID NO: 259623 - DNA, 985 bp, Zea mays
cccacgcgtccggttctagatcgcgagcggccgcccttttttttttttttgttgctgaatgcaacatcggtttccaccattttcctctttacagaatactactgctccgtgtatacggagaaactacatttcacggagtagtaaataaacagggattaattagcgccgtgtgcatgcatgcatacggcgttgggctggccgacatgatcataacaattaattaattaattaaggcgaagacacgaagcgtggaggatcgatgcgtccccgccgccgcagtatgttttaagctgacttgcggtagatgtgttgtggcctgccggcggcggcgtccttctgggtgtctatgacagtctcgaaggcgccgacgagcgccttgaccctgctgcactggcgcttctgcatcagcttggtgcgtgccgcctcgatcacgtcgttgctccgagccacctcccggcgccgcggctgctccgactctgaccgcggctccatcgctgtcttcacccggctgcccaggaatctccgcatcgccacctccttctcgtccatctccggcttcttgatcgcctccttcaccaccgccacgaacttgtccgccaccacgtcctccactgcggcgacaacgacgatgggctctggcaccggcgccgctcctttcttgggggactccacctccacctccgtggtggtgggggcggcagcggtctccgcaacaactggcggcgcgtcctcccgtatgatcttctcgggaacgacctcggggtggcagtcgtcgtggcgccgccgctgcttatcctccacctccacgctgccgccgcgggcaccgttgctgctggcggtctcgacaccaggaggcagcggcggcaccgcagacgccgcgtcggagaccttgctgctggcgccgagcaccgccgcccgttcctcggcgaggtccttgaccgtcctgacgacaccgccgcgtgacctgctgcggcggaatgcgcct

SEQ ID NO: 259624 - DNA, 521 bp, Zea mays
accacgcgtcggcgcgagcgccgcccttttttttttttttttatataattataaaggctagtttgacaacttcattttctcaagtgaatcctatttttcaggagaaaatgaattaaattcccttgaaaaactaaaacctcttagaaaaaataaggttgtgaaactagccctattaataaatttatgcacgaatgcaacatcggtttccaccatgttcctctttacagaatactactgcttccgtgtatacggagaaactacatttcacggagtagtaaataaacagggattaattagcgccgtgtgcatgcatgcatacggcgttgggctggccgacatgatcataacaattaattaattaattaaggcgaagacaccaagcgtggaggatcgatgcgtccccgccgccgcagtatgttttaagctgacttgcggtagatgtgttgtggcctgccggcggcggcgtccttctgggtgtctatgacagtctcgaaggcgccgacgagcgccttgaccctgtt

SEQ ID NO: 259625 - DNA, 854 bp, Zea mays
tcctgattcgtcttcgtctagaacgtcagaattcaccaaatcagccctcgcgtttctcccttcccccggctcccggcgtctctgcgctgcggccgtacggcgatgcggtggctatcgaggctgctctctcaagccgtcgccgccaggagggcctccgcggcggcgaggtccaacactagtctcgtcaagggaggatcccacgggttcgctagtggcggcagggatgggtcaccggaggtgcctcgggagtggttgcggaagctgtgggtagacgagctgaagaagcagaaggaagccgcgaggagatggggcgtcggctcatcattagaggttgcaggagcgaccgaggaggcaccgtcaaggagctatcagtacgaatacagcggctctaaccccgtggaggccaaactggctccgcttcttgcaagagctaacctcgtcattgccagggatattgagtgggcaaacatcatgtttgcttttgagcaggagagcaggtatatcataatggacccactctttccacaatctccagtaggttttattcgagagaaaagcaacatcatctttagacagctactcagaacaagacggccatttgttgcagaaataactgatgctatgggtaacgagatatttaaggttcgccggccattttggtggatcaacagctcaatttatgtagaagtgaatgataaggagataggtgtagtccacaggcgttggcacctttggcggagaatttatgacttgtacttagggaatatgcaatttgcagttgttgagaatccaggattctggaactggacctttaacctggcggatgaagatgataaaatgttggctcagattga

SEQ ID NO: 259626 - DNA, 2177 bp, Zea mays
ggacgtggtgaccaagttgttggtgattgcttcatggattgcgtcaactgtcttataggttttgcaaataacaagtgcactcctcggattagtttgaaggctattgctctcctgcgtatatgtgaagatcgtttggcagagggattcattccaggcggcgctattaaacctattgatgttgttccagaggccaattttgatgtgactgagcattattggtttcctatgctagctggtttgtctgttttgactttggactccagaccagaagtcagacactgtgcactggaagtgttgcttgatctgttgaatgaaagaggacataagttctcttctcccttctgggagagtatttttcatcgtgtactatttccaatttttgatcatgtaaggcatgctggaagggatgggctttcttcttctggggatgattggcttcgtgatactagcattcattcgctgcagttaatctgcaaccttttcaatacattctataaggaggtatcctttatgcttccacctcttctcagtttgctgcttgaatgtgcgaaaaaaacagaccaaactgtcgtttcaattgctcttggcgctttagttcatctgattgaagttggtggtcaccagttcagtgatggtgattgggaaacattattaaagagtattagggatgcgtcatacacaacacagcctcttgaattgctcaattcattaagatttcataaatcaaacaaccagcagttactttcaagagaagaaagcaatgcacatggcaatagttaccttggcagccggggggaaccctccatcagtgtaataatggtgagcatagtcatgcagaggcaggtccacaaactagcctggagaattcggaaggtttaccgtcaccatcagggagaacacaacctgccgtttccccacgtggccaaagctttggacaaagaattatgggcaatatgatggataatattttggtcagaagtcttacgtccaaatcaaaaggtcgaacagatgatattgctccaccctcacctgtgaaggcccctgatgatgaggctgacaaggctgaagaggaagagagccctatgatggaaactgtccggagcaaatgtatcacacagttgctgctgctcggggcaattgacagcatacagaagaagtattggagcaggttaaaagctacacaacagatagcaataatggatatcttgctctcactgctagaatttgcttcttcgtataactcaccttcaaattttcggacgagaatgcaccatatacctccagaaagacctccactgaatcttctccggcaagaactagctggaacaacgatttatttagatatcctccataaatcaacagtggagcaggatgaaaaggactccattgaggaaacaaatggtttaaatgtggaatctgatgaccaggaaaagatcaagtacctagcagaagggaagctggtttctttttgcggacaggttttgaaagaggcgtctgatttacagcctagcactggggaggctgccagtgcagacatacatcgtgtattagacttacgggcacctgttattgtaaaggttttgaaaggaatgtgcatcatggatgctcagatcttcaaaaggcacctgaaagagttctatccattaattaccaaacttatctgttgtgatcagatggatgttcgtggagcccttggtgatctctttagcaaacagcttactccactcatgtcctgaagtatggcagtatttcctccgttgcatatatcttgttggaatatattcgtcatcagcatttttgtgcaaacatggagcaccgtgttttccctagcgacttggatgacacaagggatgatgcttccattatacagtagagtagtgttggtgacatgtacgcattgttcaggacattgtacttgaggcctgttgttattttatggcaatagtagattatttgcggcaagcctcgtttttgtgcgtctaataaagtgaggtcctgatgtatagccttgtctgacttgcagaattgcgttggcaaattccctttgtcctccaagttgctgtaatgttgacatgacggtgcatttatctgctggtactagtgtcttgtccgtattgggttcatgcattgtttgatattccgtagttgaaagcaatgcatatatcattattttctgt

SEQ ID NO: 259627 - DNA, 729 bp, Zea mays
ggaatgtgcatcatggatgctcagatcttcagaaggcacctgaaagagttctatccattagttaccaaacttatctgttgtgatcagatggatgttcgtggagcccttggtgatctctttagcaaacagcttactccactcatgccctgaagtctggcagtatttcctcccttgcatagatcttgttggaacatattcttcgtcagcatttttgtgcaaacatggagcaccggttgggtgcttgacatccttaacgcgctttctggtgcaacagctactccctaggaacttaagagcttgatcagcgggaacggcaggtccctaggccacatcttttttttttggatgacgcaagggaagtagcttgactgatgcgcacaccgtgtttttcctagcaggcttgtactttggagctatttatctgtgcccggacagggatgatgcttccattatacagtagagtagtgttggtaatatgtacacattgttgagaacgttgtacttgaggcctgttgttattatacggcaatagtagattgtttgcggcaagcctcgttttttgtgcgtctaattctctgacttgcagaattgcggtggcaaatacccattgccctccaagttgtgcgttagcgtatttatccgtagttgacagcaatgaacatattactactgctttctgtattttctattaacgcatgcacatagtttattgggtttccatattttcaa

SEQ ID NO: 259628 - DNA, 470 bp, Zea mays
aaacagcttactccactcatgtcctgaagtatggcagtatttcctccgttgcatatatgttgttggaatatattcgtcatcagcatttttgtgcaaacatggagcaccggtggtgcttgacatccttaaggcactgtctggtgcaagtgcaacagctattccgtaggaagttaagagcttggtcagcgggaacggcaactccctaggccgcatatttttggatgacgcaaggaagtagcttgattgtttcgcaccgtgttttccctagcgacttggatgacacaagggatgatgcttccattatacagtagagtagtgttggtgacatgtacgcattgttcaggacattgtacttgaggcctgttgttattttatggcaatagtagattatttgcggcaagcctcgtttttgtgcgtctaataaagtgaggtcctgatgtatagccttgtctgacctgcagaattgcgtt

SEQ ID NO: 259629 - DNA, 838 bp, Zea mays
ttttcacacttctcttcatgtggatgccagtggcacagatgtggacaaattaccttaacccaagtaacatcaaagggttgtcagctttcagcatgttgcttgcaatgcttggaaatggacttatgattcctcgcgctgtattcatccgtgatttgatgtggttcactggttctgcatgggcatctgtcctacagggttggggtaacctggcgtgcatgtactgctttaatagcatcagcggagaagttttctttgcaacatcagctggtctgcttctatggctaggatttactctatggagagatgccattgcctatggcaacagctcgcccttgtcttccttgaaggagctgttttttgggaagtgatgaaccgtcggcaaccttgtttctcttgcactttaagcagctaactgttcccgggtaggacgctctcctgcaataaatcatggtagctgttaagaacggtggttcagttgctctcatatggtctgaagaaacggtgcttcagtctttagcattttgaggaggaaacgtgaaacttactggtcagctgaaggctataaacattgccatggccctggactggaagccccaactttcccaagcctgtagaaagcgccatgtgcctctacagaagccaccgcgtgatgaccagcttcatccggcagggtgggtacagtagctagctatagccctagtctgatgtaagaacaaatttatattatccatcccatattgtctttaattagattcttttttgaaaccaatgcaatttcagctcttgctgtcgtgcaaatttgtaccattgtccatggatgagtagatgacctgggaga

SEQ ID NO: 259630 - DNA, 3253 bp, Zea mays
gcgttcgttctatgagcgggacggggggcggcgagactagagagcggtggtcgtcgagcagctaaaagcgcacccgcgaggggctgagcttcagcgagggccagcagtgtctggagatctttggccccaacaggctcgaggagaagaaggagagcaaggtcctcaagttgcttgggttcatgtggaacccgctgtcatgggtcatggagatggctgccatcatggctattgcactcgccaacggtggtggcaagcccccggactggcaggacttcgtcggtatcatcgtgctcttggttatcaactccaccatctccttcattgaggagaacaatgccggcaacgccgccgccgcactcatggccaaccttgctcccaaaaccaaggttctgagagatggccgatggggcgagcaagaggctgcaatcttggttcctggtgacatcatcagcatcaagcttggcgatatcgtccctgccgacgctcgtctcctcgagggtgatgcactcaaggttgaccagtctgcgcttactggagaatccctcccggttaccaagggcccaggggacgaagtcttctcgggttccacttgtaagcagggtgagatcgaggccgtggtcattgccaccggagtgcacaccttcttcggcaaggccgctcatcttgtggacagcaccaaccaggtcggacacttccagcaggtgctgacagcaatcggtaacttctgcatctgctcgattggggtcggcatcctcgtcgagatcatcgtcatgttcccaatccagcaccgcaagtaccgcagcggaatcgagaacctgttggtcctcttgatcggtggtatcccgatcgccatgcccaccgtgctctcggtcaccatggccatcggctcgcacaagctgtcgcagcagggcgccatcaccaagaggatgaccgccatcgaggagatggccgggatggacgtgctctgcagcgacaagaccggcacgctcaccctcaacaagctcagcgtcgacaagaacctcgtcgaggtgttctgcaaaggcgtcgacaaagaccatgtgttgctgttggctgcaagggcttcaaggactgagaaccaggacgccatcgacgccgccatggttggcatgcttgctgaccctaaggaggccagggctggtatcagggagatccacttcttgcccttcaaccctgttgataagaggactgctctgacgtacattgatgccgatggcaactggcaccgtgtcagcaagggtgctcctgaacagattcttgacctgtgccactgcaaggaggatctgaggcggaaggtgcactctattatcgacaagtatgccgagcgtggtcttcgttcgcttgctgttgccagacaggaagtacctgagaaaaacaaggagtcccctggtggaccatggcagttcgttggtctgttgcccctgtttgatccgcctaggcatgacagcgctgagacaattcgcaaggctcttgttcttggtgttaacgtcaagatgatcacgggtgatcagcttgctattggtaaggagactggaaggaggcttggcatgggtaccaacatgtatccatcctctgcgctgctcggccaaaacaaggatgctacgcttgaagcgcttcctgtagatgagctcattgagaaggccgatggttttgccggagtcttccctgaacacaagtacgagatcgtgaagagactgcaggagaagaagcacatcgttggtatgactggagatggtgtcaacgatgccccggctcttaagaaggctgacatcggtattgctgttgcggacgctactgacgctgcgaggagtgcttccgatattgtccttactgagccaggtcttagcgtcattatcagcgccgtcctcaccagcagatgcatcttccagaggatgaagaactacaccatctatgcagtttccatcacaatccgtatagtgcttggatttatgctcattgcgttgatctggcaatacgatttctctcccttcatggttcttatcattgccattctcaacgacggtactatcatgaccatctctaaggacagagttaagccatctccgttgcccgacagttggaagctgaaggagatctttgctacgggcatcgtgcttggaagctaccttgctctgatgactgtcattttcttctgggctatgcacaagaccgacttcttctcggacaaattcggtgtgaggtcgatcagggacagcgagcatgagatgatgtccgccctgtacctccaagtgagtatcgtgagccaggctctgatcttcgtcacccgttcccgtagctggtccttcgtggagcgccctggtctgctcctggtcaccgcgttcctgctcgctcaacttgttgccaccttcctcgctgtctacgccaactggggcttcgccaggatcaagggtatcggctggggctgggcaggtgtggtctggctctacagcatcgtcttctacttccccctggacctgctcaagttcttcatccgcttcgtgctcagcggcagggcatgggacaacctcctggagaacaagaccgccttcaccaccaagaaggactacgggcgggaagagagggaggcgcagtgggccaccgcgcagaggacgctgcacgggctccagccgccggaggccgccaccagcacgctgttccacgacaagaacagctaccgcgagctgtccgagatcgcggagcaggccaagaggcgcgccgagatcgcgaggctgcgggagctcaacaccctcaagggccacgtggagtcggtggtcaagctcaagggcctggacatcgacaccatccagcagaactacacggtgtgagatgtgtgctgtgatgtcgacgaaaacacctttgccatgccacccttgttgttcttgcgacgacggagtcatgtgattgttacagaaaaaaagaagaaaattttccggtgatgtgattggagacaatagaagcgtgtacgtacgtacgtgtggctgatcctgaccccgagcatgcagagcagccctaggtgaggtgaccattgccaccagatatatacccgtctttctagcttagctagggagcttcttcttcttttttttccctcttgttattgtcaagtgtgtgcgcgtgttgtaatggttttactcgcctaactagccggtggtctcgcgaggcgaagaaataatgcaaccgaaagcattattaaaaaaaaaaaaaaaaaaaaaaaaaaaagggcggccgctttata

SEQ ID NO: 259631 - DNA, 1339 bp, Zea mays
  unsure (1)..(1339): unsure at all n locations
gcggccgccctttttttttttttttttttttntnntttggccaagcaagctgttaacctttcaccacaagctcacaaaccaggcacaactcataagaacgaaccgtgaagaatctccactcgactctcacattcacatcactaccgcatatacacaaacaaccagaaagctatgggctcgcaagcaataaacaacaagagtcccgctacaaacctgaggctactactcaccaatgcaatagggaaagaatgggcggacgtaaactacagcacaaaagaatcgcgaagccatgtatcgtggctcataagagaactctgacgcgctgcgttgcgctgtgctgcgggaggcagccattcacaacgctcagagtcctgcagcgtcgatggacagcagcttcctgttcatggcgggaggtgctaggcccggaatgtctctgatgttcttgttatgcgggttgacaatcttaacaacaattattgcaatgacaccacagacaatcagaaacaggaacgccataatgcatttgtcagtagcaacctgacggccaatctctttcaccatttgactagccttcttcagtgaaaagtggacagaatctagctcattgcctatcctcttcatttgttccgtttgctgtgtcagagttgcagcagtctgagctccaacttcaacagtttgtctacaaccattttgagcgctcaatagctgggtcattggccatttgtttccttccggtgctaatgagttcttgatttgacatttctgatgccatttgaactggagttccctcagccacctggtcattacccgtatcgaatagttcgatcctcttattaccaaggctgctctggtacgttttcctcaaggtcacataggagttgagttctttgatcatgaactgcttcttgtcattgagctgcttgttgacatcaggggtgttctttttctcctcatccttgagtatacggtcaaactctttgatcaagcgcttgcactctctcatcttggccgtgagatcctccagctgcttggactgcctgctggagtccttgatcttgtccatcttctggaacccattctggagcgcgcggaagatgtcctggatctcgccgtccacctgctcgagctcggggctcatgggcacgtcggtcgacatggctcgctggatcccctcctcggcgacccggtggcctgtgggtcgcggcggcggctcctctgtcttgtctggtgcggcgcggtttcgtcaccccgtcattccgggagatggcggcgattggtctcgggctctccggcacggctggcgttgagaggaaggaaagcacgcagcggacccacgcgt

SEQ ID NO: 259632 - DNA, 2243 bp, Zea mays
cccacgcgtccgggcatggcgatggggatgccgccgatgagcaggacgaggaggttggcgatgccatcgcatgaccgccatcgaggagatggccggcatggacgtgctctgcagcgacaagaccggcaccctcaccctcaacaagctcaccgtcgacaagaccctcatcgaggtgtgcggcaagggcgtcgacaaggacatggtgctcctctacgccgccagggcctcccgcgtcgagaaccaggacgccatcgacacctgcatcgtcggcatgctcgccgaccccaaggaggcccgcgccggcatcaaggaggtccacttcctccccttcaacccggtggagaagcgcacggccatcacctacatcgacggcaacggcgactggcacagggtcagcaagggcgcccccgagcagatcatcgagctgtgccggatgagcaaggatgccgagaagaagatccacgccctcatcgacggctacgccgaccgcggcctccgctccctgggcgtgtcgtaccagctggtccccgagaagagcaaggagagcgccggcgagccgtggcagttcatcggtctcctcccgctgttcgacccgccgcggcacgacagcgcggagaccatccgccgcgcgctccacctgggcgtgaacgtgaagatgatcaccggcgaccagctggccatcggcaaggagacggcgcggcgcctgggcatgggcagcaacatgtacccgtccaccaccctgctgggcgacaacaagaccggcgagatgggcggcctgaacatcgacgagctgatcgagaaggccgacgggttcgcgggggtgttcccggagcacaagtacgagatcgtgaagcggctgcaggaccggaagcacatctgcggcatgaccggggacggcgtgaacgacgcgccggcgctgaagaaggcggacatcggcatcgcggtggacgacgcgacggacgcggcccggagcgcgtcggacatcgtgctgacggagcccgggctgagcgtgatcgtgagcgccgtgctcaccagccgcgccatcttccagcgcatgaagaactacaccatctacgccgtgtccatcaccatccgcatcgtgctgggcttcctgctcgtcgcgctggtctggaagttcgacttcgcgcccttcatggtgctcatcattgccatcctcaacgacggcaccatcatgaccatctccaaggaccgcgtgaagccgtcgccgacgcccgactcgtggaagctcaaggagatcttcgccacgggcatcgtgctagggacctacatggcgctcgccacggcgctcttcttctacctggcgcacgacaccgacttcttcaccaacgccttcggcgtgcggtccatcaaggagaacgacaaggagctgatggcggcgctgtacctgcaagtgagcatcatcagccaggcgctcatcttcgtgacccggtcccggagctggtccttcgtggagcggcccggcgcgctgctggtgatcgccttcctggcggcgcagctggtggcgacgtgcatcgccgtgtacgccaactgggagttctgcaagatgcagggcatcggctggggctggggtggcgccatctgggcgttcagcgtcgtcacctacttcccgctggacgtgctcaagttcgccatccgctacgcgctctccggcaaggcctggaacaacatcaacaacaagacggccttcaccaaccgcaccgactacggcaagggcgagcgagaggcgcagtgggccacggcacagaggacgctgcacggcctcaaccaggccaccgccacctccgacctcttcggcgacaaccagggctaccgcgagctgtcggagctcgccgagcaggcggccaagcgcgccgaggtggccaggctcagggagctgcacacgctcaagggacacgtcgagtccgtcgtcaagctcaagggcctcgacattgacaccattcagcagagctacaccgtgtaaactcgactcagtttttttatttgcttttttttgcagacaaatacaaaccacacacatatatatatttgtaaagattcgttcgtattttcattttcaccgggaagatttgtaactgtcctcctccctccttgtaagttgctcctgtaaactcttcctgaattcatggcgtgtcgttgtagcaaaaaaaaaaaaaaaaccaccaaaaaaaaaaaaaaaaaaaagggcgaccgctcgcgatctagaactagtccgaacgagtgga

SEQ ID NO: 259633 - DNA, 672 bp, Zea mays
gacaacctcctcgagaacaagaccgcccgccccacccggccggactacgggcgggaagagagggaggcgcagtgggccaccgcgcagaggacgctgcacgggctccagccgccggaggcttcctccaacacgctgttcaacgacaagagcagctaccgcgagctgtccgagatcgccgagcaggccaagagacgagctgagatcgcgaggctgagggagctcaacaccctcaagggccacgtggagtcggtggtcaagctcaagggcctggacatcgacaccatccagcagaactacacggtgtgagagcccctctgctgcgatgtcgacgacaacacctttgctgcccgacgggagccatctgattacagataaaaattttcctagctgtaaagctctctataccaccagatactgccatatgatggtatggttgggtacccgtctttctagggagtttcttttctctctctcttttcttattgttatgtttttcaatagtggagtgtgcgcgtgttgtaatcgtttttacctgcgttttcctctaactagccggtgatctcgcgggaagcgaggtgaagaaataatgcaactaaaattctctgccaaaaaaaaaaaaaaaaaaaaaaaaaaaagggcgcaaaaaaagggcggccgctcgcgatctagacc

SEQ ID NO: 259634 - DNA, 526 bp, Zea mays
ggacgagaggaggaccccatttctattattgtcataacagaaatacaaagtggttcagatagtttccacactaccaacgcaaaataacaggaagaacccgcaaacagaagcgctgacgagccaatccgcttcggatgactcagaacagccgggtcccctaccaggcaacatgccaaccgacgagtttagagttttacatcacacaagtaccagaccatacgacataacagacggcagcaaaatagagcgagttcctgacaaagctaacaccaggcgagcagtcacgtcatgactcaacgcccgtgtggctgcagcatcccttccatctcatcgcccgacccgaggatccgatttcctctagcacttgcagcacgcaccagcatcttggcgccctcttgcagaaggtcctggagctctttcttgctaagccctgccaaattccttttagcagctattcttctgttcttctcctcgattctgattcctgcgtccttcttaagtctttcactaaccccggacgaatggg

SEQ ID NO: 259635 - DNA, 627 bp, Zea mays
ctcaccaccactttgggccccctccactctctagtctcaccgccccgtcccgctcattggacgagacgacggacccttcccttctcgcacgggaagagtagcgaggaggcgcggcgcccgtgcggcgtatgcccgtgcctgccgtcgggctccgcctctaggactagggtccgctccagcgccagccgtccgccatgggtgggctcgaggagatcaagaacgaagccgtcgatctggagaacatccccatcgaggaggtgttcgagcagctgaaatgcacccgcgaggggctgagctccagcgagggccagcagcgtctcgagatctttggccccaacaggctcgaggagaagaaggagagcaagatcctcaagttccttgggttcatgtggaacccgctgtcatgggtcatggagatggctgccatcatggctattgcactcgccaacggtggtggcaagcccccggactggcaggacttcgtcggtatcatcgtgctcttggttatcaactccaccatctccttcattgaggagaacaatgccggcaacgccgccgccgcactcatggccaaccttgctcccaaaaccaaggttctgagagatggccgatggggcgagcaagagg

SEQ ID NO: 259636 - DNA, 609 bp, Zea mays
  unsure (1)..(609): unsure at all n locations
gtggttttttttcatttgtgcagggatttcccagcacttttggtttcnttcatttggttcaggattttcctgaccttttccaataggagatattttaatgccaagtcttttctctctttttttctttctagattggacaatagtgaagtcgtctgattcagacccttcctcattacataagaaatcagagttgctgccatgatcatcttgcatatagggtgcaacctctttacccttgtctttttctagctctattttttttgagctagacattcatttgctatttccatttccttgactaaatcaatactctctaaattgtcatctcttattttgataccagccttaaatgctaagtcagcaatatcattaagagaagaaaaatcaactttttgtcgggttgcataaaatttaccttccaaattccttttagcagctattcttctgttcttctcctcgattctgattcctgcgtccttcttaagtctttcactaacccttctatcttcttttttagtacacatcttttcttcagcatgctttttgtttttaggattcatcatatccttctcagcttcttctttctgatcaacctcttcctaaaaatcc

SEQ ID NO: 259637 - DNA, 466 bp, Zea mays
ccggaccggaactgcagggtcgactcaagcgacgcgtccacgcgacgcgtccacgcgacgcgtccacgcacgcgtacgcacccttaatggtcacctaacctaggtggtcaagctcaagggcctggacatcaacaccatacagcacaactacacagagtgagagcccctctgctgcaatgtctaccacaacacctttgctgcccgacgggagccatctgatcgcagataaaaaccttcctagctgtaaagctctcatacccccagatactgccatatgatggtatggttgggtacccgtctttctagggagtttcttttctctctctcttttttcttatggttatgtttttcaacagtggagtgtgcgcctgctgtaatcgttttgacctgcggttttctcggaccagccggtgcccttgccgccaagcgaggtgaataaataatcccccatctaaaattctctgcc

SEQ ID NO: 259638 - DNA, 784 bp, Zea mays
ccggtccggaataaccgggtcgacagccggcccattaaccctcgttcctgtcgcgcagccacgacctccacttcacatctcccccggcggcggcgcggtcagttgaaccatggcggactccaaggccacctcggcggtcaccctccgcacccgcaagttcatgaccaaccgcctcctggcccgcaagcaattcgtgcttgaggtgatccaccccggccgcgccaacgtctccaaggcggagttgaaggagaggcttgccaaggcgtacgaggtgaaggaccccaacaccatctttgtcttcaagttccgcacccacttcggaggaggaaagtccactggtttcggcctcatctacgacaacctcgaggctgccaagaagttcgagccgaaataccgcctcatcaggaatggtcttgctactaaggttgagaagtcccgcaagcaaatgaaagagcggaagaacagggccaagaagatccgtggtgtcaagaagaccaaagctggtgacgccaagaagaagtaaacgttcgtttacatttgtattactgttctgggctctgggtggtctagctgcaatgtcataattatggtcgtgttaggttttgttccacccttggcactgaagtgatttttttgtaattcctcggcactgaagtgaagttttgtcagaatattgcctcgtaacataattgcccggtccctgttctagttgtggcgcagtctggtttgttttgacatttgttttcaaggttcatccttatttgcattgcatttgtttatcgct

SEQ ID NO: 259639 - DNA, 730 bp, Zea mays
ccaccgcagcagccagtcagcagatcggcccgcgagccagccccggcgacgtcgacagcaccaagcatggcggacacgaaggcgtcacccgcggtgacgctccgcacgcgcaagttcatgaccaaccgcctcctctcccgcaagcagttcgtgctcgaggttctccaccccggccgcgccaacgtctctaaggcggagctcaaggagaggctggctaagatgtacgaggtgaaggatcccaactgcatcttcgtcttcaagttccgcacccacttcggaggcggcaagtctaccggattcggtctcatctacgacaacgtcgactcagccaagaagttcgagcccaagtaccgcctcatcaggaacggccttgctaccaaggtggagaagtcgcgcaagcagatgaaggaacgtaagaacagggcgaagaagatccgtggtgtgaagaagacaaaagcgggagatgccaagaagaagtaagggaggaagttacttgccttgccatttctcatcttagtctttggtttgtttagggtgggctccttccggcaatgctgaatgtttagttagaagtagagaagattttgccaattacccatcacgttgagtttctcgttgcaccttctgttcagttttgaggcaccttctgttcagttttgaggcactttgtcagacacaagaatatatatacttggtcatcacggcttttgtcctgctatcatcattttga

SEQ ID NO: 259640 - DNA, 744 bp, Zea mays
cgtacgagctggcaatcggctcgagaccccttaaccctcgttcctctagccgtctcgcgcaccacagcctccatttctcctccgacggcggtgcggctagctcaaccatggcggactccaaggccacctcggcggtcaccctccgcactcgcaagttcatgaccaaccgcctgctggcccgcaaacaatttgtgcttgaggttatccaccccggccgcgccaacgtctccaaggcggagttgaaggagaggcttgccaagatgtacgaggtgaaggaccccaacaccatcttcgtcttcaagttccgcacccacttcggtggaggcaagtccactggcttcggcctcatctacgataacctcgagtctgccaagaagttcgagcccaaataccgcctcatcaggaatggtcttgctactaaggtggagaagtcgcgcaagcagatgaaggagaggaagaacagggcgaagaagatccgcggtgtgaagaagacaaaggctggggacgctaagaagaaatgagcaaggtttcagtgtactttagccgtcttgagtttgagtaacacctgctcgccgtcagaaattttgtaccccatgtcgcaatgctttgatctagaaaaagagttttttttagctgtttacatcgactactggtacatttgaaaaggcatattccccatctttgtggcaatgtcgcggcgataccatgctgggccgaggattttttaacgaagttatacttttg

SEQ ID NO: 259641 - DNA, 564 bp, Zea mays
acccacgcgtccgcggacgcgtgggcggacgcggtggaggcaagtccactggcttcggcctcatctacgataacctcgagtctgccaagaagttcgagcccaaataccgcctcatcaggaatggtcttgctactaaggttgagaagtcccgcaagcaaatgaaagagcggaagaacagggccaagaagatccgtggtgtcaagaagaccaaggctggtgacgccaagaagaagtaaacagtcatttatatttctgtattactgtcctgaactctgggtggtcgtctagttgcaatgtcataattatggtcgtgttaggttttgttccgcactcagcagtaagtgaagttttgtaattcctggatgtgaacctacccggattggctgtagcatgttgtgagatgagaaggctattttgtcatgcagttgtgtcatttgcaagccaatccattttgtcatgcagttgtcatttgctcacctctgatccatatcagctttgatcgtgctgcatttgcgccaaaaaaaaaaaaaaaaataaaaaaaaataaaaaaatataaaattttg

SEQ ID NO: 259642 - DNA, 697 bp, Zea mays
  unsure (1)..(697): unsure at all n locations
tctttttcctgtcgcgcagccacgacctccacttcacatctcccccggcggcggcgcggtcagttgaacaatggcggactccaaggccacctcggtggtcaccctccgcacccgcaagttcatgaccaaccgcctcctggcccgcaagcaattcgtgcttgaggtgatccaccccggccgcgccaacgtctccaaggcggagttgaaggagaggcttgccaaggcgtacgaggtgaaggacccaaacaccatctttgtcttcaagttccgcacccacttcggaggaggaaagtccactggtttcggcctcatctacgacaacctcatcaggaatggtcttgctactaaggttgaggtgtcccgcatgcaaatgaaagggcggaagaacagggccaagaagatccgcggtgtcaagaagaccatggctggtgtcgcctagaaggagtaacacggtcgtttccttgtgtgtattgatgacctgaactctgggtggtggtctagttgcaatgtcataattatggtcgtgttaggttttgttccgcccttagcagtaagtgaagttttgtaattactggatgtgaacctacccggattggttgtagcatgttgtgaaatgagaaggttattttgtcatgcggttgtgttatttggaaccccctccctttataaaatgcccttcccttttgctcnnngnagg

SEQ ID NO: 259643 - DNA, 309 bp, Zea mays
gtccccgatggcgccggcgtcgcagcgtggttgccgctagggttcggcgccgacgacttgcccttggacggcgccgacgacggggcggcgttcgcggtgtggtggccgctagggttctgcatctctgcggtgtttggggtgcgtcggaggtccaggagagcaggggaaggcggagaagtggtgaacacggcagccttttcgattcccggcccggggtagccgggaggatgccgatttccgcgaacaagagcggaatcgcacgaagcgcgtcagtttctagagactaattctgtaattcatagttctgaa

SEQ ID NO: 259644 - DNA, 738 bp, Zea mays
tttattcgtccgcccacgcgtccgcccacgcgtccgcaagcgccccagcgagccactccggcgaagtcaatcctgcgctccgcaggcagcatcaagcatggcggacacgaaggcctcacccgcggtgacgctccgcacgcgcaagttcatgaccaaccgcctcctctcccgcaagcagttcgtgctcgaggttctccacccgggccgcgccaacgtctctaaggcggagctcaaggagaggctggctaagatgtacgaggtgaaggatcccaactgcatcttcgtcttcaagttccgcacccacttcggaggcggcaagtctaccggattcggtctcatctacgacaacgtcgactcagccaagaagttcgagcccaagtacaggcttatcaggaacggtcttgctaccaaggtggagaagtcccgcaagcagatgaaggagcggaagaacagggccaagaagatccgtggtgtcaagaagaccaaggctggtgacgccaagaagaagtaaacagtcatttatatttctgtattactgtcctgaactctgggtggtcgtctagttgcaatgtcataattatggtcgtgttaggttttgttccgcactcagcagtaagtgaagttttgtaattcctggatgtgaacctacccggattggctgtagcaaaatgtgagatgagaaggctattttgtcaaaaaaaaaaaaaaaagggcggccgccccggtacattccgcggc

SEQ ID NO: 259645 - DNA, 529 bp, Zea mays
  unsure (1)..(529): unsure at all n locations
caacatagcaccccccctagggtttcacaacatatgtaccctctcgcgcaaacactcctctttccgcgccgcctcccctcccgcccacttgctccgccggcgcggccaccgccgccgcaccgcagcagccagtcagcagatcgtaaccatggcggattctaaggccgctgcggcggtgaccctccgcacgcgcaagttcatgaccaaccgccttctctcccgcaagcagttcgtgctcgaggtcatccaccccggccgccccaacgtctccaaggcggagctcaaggagaggctggcgaagatctacgaggtgaaggacccaaactgcatcttcgtgcttcagttccgcacccacttcggtggaggcaagtccactggcttcggcctcatctacgataacctcgagtctgccaagagttcgagcnncaatacgctcatcggaatgtcttgcactaaggtgagagtccgaagcaatgaagacggagacaggccagagtcgtgtgtcagagccagctgtgcgcagagagta

SEQ ID NO: 259646 - DNA, 1356 bp, Zea mays
tcgacatgtcggtggcgtacagcctgcaggagtacgcggtcgccgtggtggccgtcgtgggccgcgtgtgtgaccgcaagggggtgcagcaccccatcatctgcagcgagagcggccgcgcgctggtgtcgcaccactcggtcctggtgttcgaggccttctcggctacggcgccgggacgcctggacgcggccacggcctacctcctcgacgagctcacggacgactgccgcgccgactaccgcaacgtgatggccgccgccgtgcgcggcgactacgacacgtgcggcctgtacgccgaccagctgaagcggcggtccgcggagctgttcaaggagggggtccttggcctggagcacctcgccgcggtggacgccttctgcgagctcgtcgcccgcggcatgggcgcgcccgagccgccgcgcacctaccacatcaacctgtccgtgttcacctccctgccggacatgtgggccatcgggcagcagttccccatcatcccgatccagcggctgcaggagcggcccgccgtcgacggcgtgctctcggacctcacctgcgacagcgacggcaaggtgagcgagttcatcggcgggaggcacagcctgccgctgcacgagctgcccacccacgccacccgcggctactacctgggcatgttcctcgggggcgcctaccaggaggccctcggcgggctgcacaacctcttcggcgggccgagcgtggtgcgcgtgtcccagtgcgacgggccccactgcttcgccgtgacgcgcgccgccgcgggcccgtcctgcgccgacgtgctccgcgcgatgcagcacgagcccgaggtgatgtacgaggtgctgaagcagaggaccgacggcgccacggccgtcgccctcgcccgggccttcggcgcaatgccgtacctggtgttcgaccccgaggccgccgtgatgtccggcggcgagagcagcgactcggagcggtcggccgccggcgccgccgaggaggaagacgatgaggagtgggagttcatgcgcgggctcaccgtctgatgacgtgcccgcccgccccgccccgggtgaaacaaggcgagtccgtcgccaggaagttgtcagtggccggccggcgttggtttacataataacccccaccgcccggtgttgtatcgtgtcgtggtcgtagtcgtcgggtgtctcgtcgtcgccggagttgtttggcgccacctttttattccgaacgcgtcagtgtccactgttcgcctttccttttttttctctctctttcatgggaataatctgaagggaactaatagcaagtttctctttaactggaaatttcgttttttccagtattcaatatgtctgttgc

SEQ ID NO: 259647 - DNA, 1161 bp, Zea mays
cgcggcgacgggttcggggttcgagggacgcgtcacgcaaaacccagaacctgagaatggcgcacttccttcgcggcaaggccgccgccgccgaccggggcggcggcgctgcgcgcgtcgtctccggcgccatggcggcggacggcctccgcgtcgtaccaccacacgatccaggctgtaccgcgggagacagtcggcccgcgcgccgcggcacgcgagcgccgccacggccgcgtcccggcggtcctgctcacgctcgcgggcgccgcgccagggaacggaattgcccaccggcacctccttaccgccgacaggaggcagctcgcggagatgctcaagcagtcgccctacttcctctccacccccgtccgcctccaggtccgcgcgggcgagcgatccaacgccatcctccacgccggcaccgtcctccccatcaaggtgcatagagatgaaaattctgggaatatactgaatttggtaatggtgaaggcagatgaaggaacaatgctgaaggtggatttgcctgtagagttcaagggagaggatgcttgccctgggttgaagaaaggaggctttttgcagaaaataaggaccagcctggtgtatctctgcccagctgagcacatccctccaaaaattgaggtggacctgacaaatcttgatgtcggagatagggtattgatgcatgacattcccgtccatccatcgctcaagttgctgagtaaaaacgagaccatgcccgtctgcaagatcttggcctcaaagccagacgagtaggaggcgctgcaaatacttcagagctgataacattgtacctttaggtggtacagccctccagcagctccgtccctagttcttggcttgctttttggtcatctgtcccctaggtttcaatgtgatagtggattcagacaagctatgggcttcaagtaaagatacgaaggaacaaaatgaagaaatatcactggagagacattgtctgtaccaaccgctatagaataacatcctttctcattcagtttgggttcagggacacatgacatgtaagacgactatcctttgctgtggcctgggtgaattcattctctaagctactcttgcagcggctcacaattcatcaaaaaaaaaaaaaaaaaaaaaaaaaaaaaaaaagggcggccg

SEQ ID NO: 259648 - DNA, 513 bp, Zea mays
  unsure (1)..(513): unsure at all n locations
gcagttctcgacctctcctcctacctcctcttcactcccttcctccctcttgcatcactatcaccaccaacaacaaggctaacgcacaccaatccaacaaggagaacaaaaaacaattaatcgtgttttgagcttttgatatcacctcgttcgagttaagtgcgtgaagaggcaataatggtggcagtggaggttgtgccggcgtccgcggagtccccgattccgatcgaggctaaggccgcggtgacgtcggaggcggaggcggaggccgagggcgaagtggaggcggagatgaagggtgatgcggcagccacggcggaagaaacggaggaggaggaggaggaggagaaggtgtccaaaagcgacctgaagaagctggagaacctcatgtccaagcttaacccctccgcgcaggagttcgtgccgtcgtcgcgccgcacggncccagccgccgtgtcggcggcgaanccggcgggaggaaggtgctcttagccgacgcgcccgtgttcgtgt

SEQ ID NO: 259649 - DNA, 287 bp, Zea mays
gcagaagatgacagcttcttctttgggctagcgaccgcgccggcacatgtggaggacaggttggaagacgcttggcttcagtttgcggtggagcactcctgcgacgacaaggaggccatgcgcgaccctacgacagcagatgcggtgatggcgtccgctgcaggggacgggggcgctcagttggcttctcgtaggtcgtccagaggggacgatgatagggatggtgatggagagttgaggacgaagcctcttaagatcgccatggaggcgatgctcagggggtttga

SEQ ID NO: 259650 - DNA, 1052 bp, Zea mays
cggacgcgtgggctctttgggcgaccgtgactcgagccgttggagatccacactttcctccctgcatcgtttctcgatctctcgaccgggcgagggcgacgccgcccgcgcgcgcgccatggatgtggattacgacgtgatcgtgctgggcaccgggctcaaggagtgcattctcagcggcctcctctctgtggaccgcctcaaggtgttgcacatggacaggaatgactactacggcggagactccacatcgctcaatctcaatcagctctggaaacggttcaagggtgaagaaacaccgcctgcgcacataggagctagcagagactacaacgttgatatggttccaaagtttatgatggcaaatggtaccttggttcgtgtgctcattcatactggtgtcaccaagtacatgtccttcaaagctgtggatggaagctatgttttcaacaagggaaagatccacaaggttcctgatactgacatggaagctctcaagtctcccctgatgggattgtttgagaagcgaagagctgggaaattcttcctttatgtccaagattataaggaaaatgacccaagtactcataagggttacaaccttactaaactaacgacaaaagaacttatctcaaaatatggtttggatgataatacgatagacttcattgggcatgcagtggctcttcatagagatgatagctacttgacagaacctgcaattgacactgtaaaacggatgaagctttatgcagaatcagtggctcgctttcaaggaggatcaccatatatttatcccttgtatggtttaggagaactgccacagggttttgcaagacttagcgctgtttatggtgggacctacatgttgagtaagccagagtgcaaggtcgaatttgatgatgaaggcaaagtttgtggtgttacctcagaaggggagactgcaaaatgcaaaaaggttgtctgtgatccttcctacctacctgacaaggttaaaaaaattggaaaagtttttcgggcaattgctatcatgagccatcccatcccaaata

SEQ ID NO: 259651 - DNA, 1015 bp, Zea mays
gtattggcgcttcctgttctagtatgactaatggtcgatcccgtagtaaaaagctgtctccaatcccaggctacctgaacctacgaagagccgactcaaccgctagtacagtccacacatgacacaacgacaccaactgtcctcaatccagcagccctcgagtctcgtccccgcacatcagcagagagacgccactaccaccaccgcaagcgacgacggggagatgtttctgcgacggatcctgaccggcggaggcggcctggcggccctgagggcggcgcgcgccgtgaaggagacgacggggatcgtgggccttgaggtggtgcctaacgcgcgagaggttctggtagggctctacgagcgcacgctcaaagagatcaaggccgtccccgaagacgagggctaccgcaaggccgttgaatccttcaccggtcaccgcctccagatctgccaggaggaggaggactggaagcgcatcgaggaccgaatcggatgcgggcaggtcgaggagctcatcgaggaggccgaggacgagctcaagctcatcgctaaaatgattgaatgggatccatggggtgttcccgatgactacgaatgtgaggtgattgaagacgacaccccaattcctaagcatgttcctcagcaccggcctgttgctcttcctgaggagttcttcaaggcactagatgctgtcaaatctgatcctgctcttcaaggcgatgctcctcctcaagtgaaggcgtaaggatggctgttcctggctaacgtcatttcacattttgccgcggtgggtagggactggtttcttgtgtcatttgccagcaatgcgcttgctctgagcagaataaatttctggtgagtaccatcaaagtgtgaatttgaacttagtgattcggcacagtaaacttgttgcccatgaaatactcgatgccctgaacatcgtttgttttgacgttataatcgatgttgacgaaatatttgatgctaaaaaaaaaaaaaaaaaaagggcggccgc

SEQ ID NO: 259652 - DNA, 880 bp, Zea mays
tctcgagccacaccaactctccccaatccagcagccctcgagtctggtcccccacccctcagcgcgacgaaggtaagatgttcctgcggaggatcctgaccggcgggggcggcctggcggccctgagggcggcgcgcgccgtgaaggagacgacggggatcgtgggccttgaggtggtgcctaacgcgcgagaggttctggtagggctctacgagcgcacgctcaaagagatcaaggccgtccccgaagacgagggttaccgcaaggccgttgaatccttcaccggtcaccgcctccagatctgccaggaggaggaggactggaagcgcatcgaggaccgaatcggatgcgggcaggtcgaggagctcatcgaggaggccgaggacgagctcaagctcatcgctaaaatgattgaatgggatccatggggtgttcccgatgactacgaatgtgaggtgatcgaagacgacaccccaattcctaagcatgttcctcagcacctgcctgttgctcttcctgaggagttcttcaaggcactagatgctgtcaaatctgatcctgctcttcaaggcgatgctcctcctcaagtgaaggcgtaaggaggcgtagggatgcccttcggggcgctgttcctggctaacgtcatttcacattttgccgcggtgggtagggactgctttcttgtgtcatgtgccagcaatgcgcttgctctgagcagaataaatttatggtgagtaccatcaaagtgtgaatttgaacttagtgattcggcacagtaaacttgttgcccatgaatactagatgccctgtaacatcgccccccttgttttaataacccctgctgggggaatatttgatgctaaaaaaaaaaaaaaagaaa

SEQ ID NO: 259653 - DNA, 529 bp, Zea mays
gggtgttcgcgatgactacgaatgtgaggtgattgaactcgtcctcagcctcctcgaggagctcatcgaggaggccgatgacgactcaagctcatcgctaaaatgattgaatgggatccatggggtgttcccgatgactacgaatgtgaggtgattgaagacgacaccccaattcctaagcactgttcctcagcaccggcccggtgctcggcctggggagttcttcaaggcactagatgccgtcaaatcagatcccgccctccaaggcgatgctcctcctcaagtgaaggcgtaaagatgagtcttcccggttatgtcttatgtcatttcacactttgctgcgctgggtagggactagtttcttgtgccatttgccatttgccagcaatgtgcttgttccgagcagaataaatttctggcgagtaccatcgaagagtgactttgaacgaagtgattcgacacagtaaatttgttgttgtccatgaatacttgctctgaaaaaaaaaaaaaaaaaaaaaagggcggccgc

SEQ ID NO: 259654 - DNA, 2041 bp, Zea mays
gccacacgtccgcccacgcatcccgatgttccaacttccgttgacccttgaacaaaagactgttgagtatttactgaggagaggtgttctacaatatattgttactctgggtgtaagtctcaagtcatgctacctacatcatgaactcctgaacttgatgctagttcttatgtcaactcacatatgttctggaccatcttcagaaccaaaggatgtgcatcctttcattgatgcagctatgcttcaggacagctccatagtggcttcagtagtgcagaaattgttgctcaattttgtaacacgaccgaaacttcctctaaatgcttcgcaccctgttttctctgatgatgctaggcctggtgttctgcagcgagttggctcagcagctgcaaatgtcgtcttattgccatattatactttcaactaccttgtaagctcaactcctgagggtgcgacaagtcaattggcagataacagtttacttgttctgcttatcatgatccactaccgaaagggcttttcaactaatgagtccattccaaccaacaacgtatacacgatggactcaaaggccaacgacaaggatgctccagtttttcatgataacccttactgcaaggcattaaacagcgctaaggacattcactatgatcgcgctgatgttgaaggaaatgctcaagatcgacctgttgtcaggttgtcttttgcatcgttgtttgatgctttcggaaggtgcttaaatgatgagagctcggttctgttgctctattctttggtctatgggaactgcgactttcaggaatatgtcctggttagaacagacttggacactttgctgatgcctatcttggaaatgctctacaatgcatcaaggaagacttcaaatcagatttacatgctgttgattattctccttatcctcagtcaagattcaaccttcaatgctagtgtgcacaaattggtgcttcctggtgttccttggtaccatgaacgcctgatgcatcaaacttctatgggatctttgatggttgtaatactaattcagaccatcaagtacaacctctccaagctaagagatgtctaccttcacacaaactgtcttgcaattttagcaaatatggctcctcatgtgcataggctgagtgcttatgcatcacaaaggctagttagtctctttgacatgctttctcgcaagtatgccaaactagctgagttgaaaaatgacaagtctctgaaagttatatctgatcaaatggaagcagacaacatcgcagatgatatgtctacagagcttcacatatatacagatttcttgagaattgttctggaaataatcaatgcaatccttacatatgcattgcccagaaatcccgaggttgtatatgctgtattgcatcgacaagaggtttttgagccatttaaaaatcatccacgttttaatgaactgcttgagaacatatacactgtattggatttcttcaatagtcgaatggacatgcaacaattagatggggaatggtctgtggataaagtgcttgaagtcatcaataaaacttgccgttcatggcgcggagaagggatgaagatgtttactcagttgcggtttacatatgagcaagaaagccaccctgaggaattctgtatcccatatgcatggcgccttgtcctgtcacggggattctccttcaatcccagcgccataaatctcttccctgtggagattcaccttgaagatgcaccagccggtgaacaaaaggtttaggaagaatggtccgaaccagagttctgacaaggaacataaaggcatatttttgttccattgtggcaaagagcataatgtaaataggcggcatataccaggtagtcgaatgtactcattcttttgtattaaaatagttctgttgtttcataatatgtgtaagagggggaagagggtggacgaattgtgcaagggttcagagattgtgctactataggtggtagattactatatgtaggctatacacaattctttcataacctattgttgtattgtaccctt

SEQ ID NO: 259655 - DNA, 498 bp, Zea mays
gcgtcgtccgccgcgctcgcgctccagctcaacgcgcactcctccaccaaggagcaggaaatggaagtaacagagcataatttaaagacacagcttgaaaatgctctgaaggagctagaggctgctcaacataaagcatcaacagcaacctctggaacagctgaaaatgctctactggaagctaagtcagtgactgaccttaaatctaaagatttggaggagaagaaaagggagcttgaactattggataacaaggtgcaaacattagagaaagagtggtctgtggttgaagaagaatctttaaagaaacccactcctgcacaaagggagaaggtcctggagaggcaactgcatagcctcatcgagcagttgacagctaagcaagctcaagctgaaattctggccactgatgtgcattccaaagaaaaggagctggaacggctgaaccatctgcatagaaacctctacggcggtgccaacgaaactggcgcaccccgg

SEQ ID NO: 259656 - DNA, 337 bp, Zea mays
gacccaacaaagagaagtaactctccaagaagaaaatgcagcctatgagaaagctatatcagagtgtaaacagaaaattcaggaaaagcagatggaggccactcagcttctgagtaatctggaggaaatggaagtaacagagcataatttaaagacacagcttgaaaatgctctgaaggagctagaggctgctcaacataaagcatcaacagcaacctctggaacagctgaaaatgctctactggaagctaagtcagtgactgaccttaaatctaaagatttggaggagaagagaagggagcttgaactattggataacaaggtgcaaacattagag

SEQ ID NO: 259657 - DNA, 632 bp, Zea mays
aaggtcacttgggcggacgcgtgggcggacgcgtgggcggtaccaaggaggaaccatctgtagttgagtcctactttaacaagcggatagtcggttgtcctggtggcgagggtgaggacgaacatgatgttgtatggttctggttgaaaaaagacgagccgcatgagtgtccagtctgctcgcaatactttgtgcttaaggtaattggtgatggtggagatccagatggccatgacgatgaagatgatggacatcactaaggatgccttgtggttctgaaaataagaatctgatgaggcagatgagtccatcacacttcttttttcttgaaccagactgcacggcatccttgtttatgaacagacatttggccatcaagcgggtggtagttaatcacctagggattttgtccagacaaaagcttattgagatttgacccatgcatttctttaagagcatcatcgaataaaagatgactgcatcagattgctttcttttgttaccgtatggccatcgggtgtgatggacatgtaatattcagtcatggaatggaacagacccatttctttattcagtgtgctggggaatttgcaaaaggtctcctatatctcttacaagtttcaagccagagg

SEQ ID NO: 259658 - DNA, 837 bp, Zea mays
tccatctccattaccgccgccgagagagagacccaccccgctcatccaccaccatgtggcgccgcctccacaccctagcacccgccttgcgcagggctactgccgccgctgccgggggccccgcggtgcccgcctcctctgctgcccgcgccgcgccgctctcctcggcggccgccggcttccgccgcactagccctctcctctcagaggacaagccggcgagggtggaggacgtcatgcccatcgccacggggctcgagcgggaggagctagaggccgagctccaggggaagaagcggtttgacatggattccccggtcggccccttcggtaccaaggaggaaccagctgtcattgagtcatactataacaagcggatagtcggttgtcctggtggcgagggtgaggacgaacatgatgttgtatggttctggttgacaacagacgagccgcatgagtgtccagtctgctcgcaatactttgtgcttaaggtcattggtgatggtggtgatccagatggtcatgacgatgaagatgatggacatccctaaggatgccttgtggttctgaaaataagaacttggtgaggcagatgaatccaatacacttcttttttctagaaccagactgctccacggcatccttgtttatgaaaagacagttggccatcaagcaggtggtagttttcacctaggtattttgtccaaacaaaagctgtttgagatttgacccttgcgtttctttaagagcatcgtcgaataaaagatgactgcagtcagattgctttcaaaaaaaaaaaaaaaaaaaaaaaagggcggccgctcgcccacgcgtccg

SEQ ID NO: 259659 - DNA, 513 bp, Zea mays
attcccgggtcgacccacgcgtacgcggacgcgtgggcggacgcgtgggggatcaccggccgtcgagcgagcagtctcccaattccacccaataactaataacatctcctcgaacgccaggttccttggaccactatatccaggagcgacgaagtgatccacccgccagccatggagatgaagaaggtcctctgcgccgccctcgtcgccgccgcctcggccaccgccgtgctggcctcggtcgcctccgaggcgccctccgaggcgcccgccggcgcggccggtggtgcggctggccctagcgcaagcggcgccgccgccgccgccgtgcccgccgccggggcgctcgtcgcctccttcctcgcctactacctccactgagcgacgacgcgcggggcggcaacgttgggatgcatcgtgtttggttcatccgattaattaattgttttttttatttacgtggtttgcgattggttaattgtttgtttgttcgttcgtttcgtggtcgtgtga

SEQ ID NO: 259660 - DNA, 851 bp, Zea mays
accgggtcgaacgccttggccgtcgggccgaccagcagccgagtgcccgattacaatcagccatcgccaccacctccctccgcggctccgccttccgccgcgaacacgccgctgtctcgaccccttgtcctcctccttcagcaagatggcggagattgagataaaaacagcacctgctgacttccgcttccctacaacaaaccaaacaaggcattgttttactcgctatgtcgagtaccacaggtgtttgaatgccaaaggggatgatgctggtgtttgcgaaaaatttgccaagtactacaggtccctttgccctggagaatgggttgagaaatggaacgagcagagggagcatgggacgtttccaggacctctctgaatgtaccgcccgagacctccagttggaccagtcaacaagttggccaggcagtcctactgttccattctgcattcctacttcccgaatcgtaaatgccttttgtcccttgctcttcaaccagtcaccacaaaactgttagtgatgcctctcgtatgcagctctaataatttggctacagttgccccacatgcagccttgttttgtgtgtggactgtggacctcattttgttcactttttgtaaacgtctgaatggacttgcattttctttcgtgcctgcgaccgcgtcgtcctgtactgcggcttttgtgtcgtcagtaagctggcattgtagtaatggcctatgaatgtgggtgtacctttcccgtttaaattaagggtctccaattctggaggattggaggggattgagtttaaaaataaactgatttcccctcttattcacctctaataaaagtggcaatttgaatttcc

SEQ ID NO: 259661 - DNA, 549 bp, Zea mays
cgactgcttcatacacatatatagcagtcgacgaaactatacatcgtcggtcatcaaattgggaggtatacccatgcatgcatgcatcaaatcgtcatcgcatcccatgcatgcatgtatgatgtatcagtgattcaggtgcgccggccgtcgagcgagcagtctcccaattccacccaaggactaataacatctcctcgaacgccaggttccttggaccactatatccaggagcgacgaagtgatccacccgccagccatggagatgaagaaggtcctctgcgccgacctcgtcgccgacgactcggccaccgccgtgctggcctcggtcgcctcctaggcgctctctaatgctccagtcgtcactgcctgttgttccttgctcttcaaccattcaccacaaaactgttagtgatacctatcgtactcagctctaataatttggctacagttgccccacatgtagtcttgttttgtgtatttgacttgtggaccttattcttgatcactttttgtatacgttcttaatttactttggttatttttttt

SEQ ID NO: 259662 - DNA, 913 bp, Zea mays
ggatgtttgaggaatgcttccaacagaggtggtacaggactgctgcttgctacatactggtcattgctaagctggagggccctgcagtcagtcagtattgtgcactccgtttgctacaagctacacttgatgagtctttgtatgagcttgctggggagttggttcgcttcttgctaagatctggaagagattttgagaatgccactccagactccgagaagctctctccaagatttctaggctattttctgttccgttcgccatataagaggcaatcttctgatttgagaagtaactcaatgaaagaacttagtccacatattgcttctgttatgaacattctagagcgccatgctagctatttgatgtctggcaaggagctttctaaactcgttgcttttgtcaaggggactcaatttgatcttgtggaatatctacaacgagaaaggcaagggtctgctcgtctagagaattttgcttctgcactcgaactgattggacaaaagctccaaatggatacactgcaaagtcgacttgatgcagagttccttctagctcatatgtgttcagtcaagtttaaggaatggatcgtggtgctagctactttattgcggcgtgcagaggttttggtggatctctttaggcatgatttgcgattgtggaaagcatatagcattactctacagtcacatgatgtattcacagaatatcttgaccttcttaatatcttggaggaggagctttcatctgtctctgatcttacattgcaaaatggaccattgtcatgaatgctggacaatgacactgattggaagatcgccgggatgcagcgttttaaccttgagttaattaacacatacagtttgatgagatctgctgttgggccaggaatcctatgtaaatagattactca

SEQ ID NO: 259663 - DNA, 401 bp, Zea mays
actaattttatgatttattatgcttatcattattaatttattatattctcatgcccctttggtccatccatatgaataaaatatttttggttttcatctgcttcttgaaacttactcatgtacatgttggcattctgatttctgatgacagctccaaatggatacactgcaaagccgacttgatgcagagttccttctagctcatatgtgttcagtcaagttcaaggaatggatccgtggtgctagctactctgttgcggcgtacagaggtaaaattttttaagagttcattattttacatggctttcaattattgtttccattccccatgctaaccgctttgttataattccttttaaacttcgctgcttgttcttcttttattctggtctaccctaccc

SEQ ID NO: 259664 - DNA, 471 bp, Zea mays
gtcaaccgtcatcgctttctccccctcccccgtctcttctccctcgagggaataagcccgccgcgtgaagcttcttcttgcatccgagtgcggattcacctccaatctgcccctcgggccgccggcgccgatggagaaggtgaagaacatgctcaagccgcggccgacgccgcagcagcagctgcgcgagtggcagcgccgcctccgcaacgagtgccgcgtcctcgaccgtcagatccgagatgtgcagagggaggagaagaacgtggagaaagccatcagggaggctgccaagcgcaatgacatgggatctgcaaaggctcttgctaaggaacttgtaagatcaagacgtgctgttaatcgtctttatgagaacaaggctcaactaaattcagtatcaatgcaccttggagaaattgtcgcaactgcaagaacagtgggtcatcggtccaaaacactgaagtgatgaaa

SEQ ID NO: 259665 - DNA, 1167 bp, Zea mays
  unsure (1)..(1167): unsure at all n locations
ataaattccaccactccccttcgccgcttcctgtcgcgccgccgctcctctcacaacccagtcgctcaaaaccctagagctctcgcctgctcgcctccgccgccggagcgagctccccatcttcatccgtcaaccatggcgacccagatcagcaagaagaagaagttcgtcagcgacggtgttttctacgccgagctcaatgagatgctgacgcgggagctggcggaggacggctactctggcgtggaggtgcgcgtcacgccgatgcgcacggagatcatcatccgcgccacgcgcacgcagaacgtgctcggcgagaagggccgcaggatcagggagctcacctccgtcgtccagaagaggttcaacttccctgagaatggcgtcgagctttacgccgagaaggtcgtcaaccgtgggctctgtgccatcgcgcaggccgagtccctccgttacaagctcctcggaggccttgccgtccgcagggcttgctatggtgttcttcgttatgttatggagagtggtgccaagggttgtgaggtgattgtgagtggaaagctcagggcccaaagagccaagtccatgaagttcaaggatggctacatgatctcatctggtcagccagtgaacgagtacattgactcagctgtgagacacgttcttctcagacagggtgttctgggtatcaaggtgaagatcatgcttgactgggacccgaagggcaaggttggcccgatcactcctcttccggacctggtgaccatccataccccgaaggacgaggacgagctgcgccctcctgtcttggcagctgaggtctaaggtcccaacagcgtcctcgaaatggcagtttgatcgggtcctagctaggtttgtatcttatgataagggcagtgctaagacagttcgttccgtgtcacttctgtttaaaattaagttttgccgagacaagctatatgtaccggatgaaagtgtggttccttattgtatgctctggaattttatttttggtatgtttattttttgccttagttcaacatgcctcctgcttggacaaagtcaaattaaaaaacatgcttggacagacagcgtcatgtggattgagccgtttgtattttctgtcgatttggaccaaaatgtaaatataaataaagtacatagcgtana

SEQ ID NO: 259666 - DNA, 781 bp, Zea mays
cacacgcgtccgctcacaacccagtcgctcaaaaccctagagctctcgcctgctcgcctccgccgccggagcgagctccccatcttcatccgtcaaccgtgggctctgtgccatcgcgcaggccgagtccctccgttacaagctcctcggaggccttgccgtccgcagggcttgctatggtgttcttcgttatgttatggagagtggtgccaagggttgtgaggtgattgtgagtggaaagctcagggcccaaagagccaagtccatgaagttcaaggatggctacatgatctcatctggtcagccagtgaacgagtacattgactcggctgtgagacacgttcttctcagacagggtgttctcggcatcaaggtgaagatcatgcttgactgggacccaaagggcaaggttggcccgatcactcctcttccggacctggtgaccatccacaccccgaaggacgaggacgagccgcgccctccggtcttggcacctcctgaggtgtaaggtcccaactgtgtccttgaaatggcagtttgatcgggtcctagataggtttctatcttacgataaggacaatgctaaggcagttggttaccttaatctttatggacagatgctatgtgttgcttctgtggcacttttgtttaagctaagttttgcggagacaagatacttatatatgttcccgatgaaattatggttccttgtaaaaaaaaaaaaaaaaaaaaaaaaaaaaaaaaaaaaaaaaagggcggccgcccgggaattcggacggtc

SEQ ID NO: 259667 - DNA, 2158 bp, Zea mays
cccacgcgtccgggcgcacccagcgcttctccttccgtccttggcaaccacgcccaggcatcggttcgccgctattcctcctgccccatctcctcccgatccatccgagcccaaaccctagtccagccagatctccgccgccgccggcgagagcacggcatcagatccgccgcgatggcgttccgccgcatcttatccacagcggtgcgccgccgctcggccatcgccgcggcagcgtccgggaacgcgcgcgaggcctccacggccgtcgccgcggcgcccggcgtgctagcccccgacgcgaccccggtgcgcgctcccgtgatgccgtacgatcgcatcgccgaagccgttaacgccaggctccggcggcttgagcacccagacccgcgcttcctccgctatgcaagccccgtgccgtcccacgccgaccacacggccatccttgcggcgccggagacccgggtcaccacgctgcccaacggcctgcgcgtggccacggagtcgtccctcgccgcgcgcacggctacggtgggtgtgtggatcgatgcgggcagcaggtacgagaacgaggaggcggccggcgtcgcgcattttgtcgagcacatgctgttcaagggcacagggaagcgtagcgccgcgcagctggagcaggagattgaggacatgggtggccacctcaacgcttacacgtcgcgggagcagacgacctactacgccaaggtgcttgacaaggacgtgccccgtgcgatggaggtcctcgcggacatcctgcagaactccaatctcgaccaggcccgcattgaacgtgagcgcgaagtgatcctacgagagatggaggaggttgagggacagtctgaagaagttatatttgatcatctccatgcaactgcattccaatatacatcccttggcagaccaatcttgggttctgcagataacgtcaagtcaatcaccaaagaggacctcgagaactacattgcaactcattatacagcttctagaatggttatcacagctgcaggcaatgttaaacatgaagacattgttgagcaggcaaagaagttgttcagcaagctatcaactgaccctacaacaacaaacatgttggtctctaagcagccagcctctttcactggttctgaggttcgaatcattgatgatgacatgcccctcgctcaatttgctgttgctttcaatggagcatcatgggtggatcctgattctgttgcactgatggttatgcaaacaatgcttggttcatggaacaagagtgctggtggaggaaagcacatgggttcagagcttgtgcagagggcagcaatcaatgacatcgctgagagtgtaatgggattcaatacgaattacaaggacactggtctttttggtgtctatgctgttgctaaggctgattgcttggatgatttggcttttgcaattatgcatgagatgagcaaattgtcataccgggttacggaagaagatgttatccgtgcacgtaatcagctgaagtcctctatccaactccaccttgatggttcaactgctgttgttgaggacattggccgtcagctgctgacctatggacgaagaattcctacccccgagctttttgcaagaatagatgctgttgatgcaagcactgtgaagcgtgttgcaaaccgcttcatctttgatcaggatgttgctattgctgcgatgggaccgatccaaggacttccagactacaactggttcagacgccggacctacatgctccgttactagattaatcagccggtgtacccatgtttaccgtctgcaaaagacaagataaaatttgcctcttttagcgtcagtatattaaggcctcagcactgcacattacgtgctgcgatggaggaattttttgagaatttgttttatttcttgtcgtgtccaaaatccacaaatctgtcaataatgataggcaggttcgactgacgtggctgacttggttggccaccggatgttttcttacaacgagtcatgaaccataccgtcccatcttttgttggaagattttactttggcaaataattttgtggcacgttatatgtaaagatggtacagttttagcttgtgcaattttttttataccttgtcggaaggttaaaaaaaaaaaaaaaagggcggccgc

SEQ ID NO: 259668 - DNA, 2199 bp, Zea mays
tttcgtacgcgtcgccctctccgcggcctcgccctgaggcggttcccccgttcctcgcctctgtcatcgtctcctctgacccaaattgagccaagcgaagccgtggccgtgatccggtccatgcgcggagcgtggtagccggattctatcgccgtcgcctccccttcgccgctattttccagtcgccgggatcagccgagttggatctcgaggcataaagcgttgcgggcgcccggcgaggatacgatgcctgcggtgctcgccgcatacgctacccttcgagccgccgctgccatcgcctccggagactcctccttcccctgttcccatcgtctcaagcatcgttttagtagtagtaattttagtagtagtaattatcattaacctttgcgttccttccgtcgcgcacgctcctcggctcggtcctcaccttcgcatttcggttttggtctggttgtgctcgatccgaggcttactttggctttgcggcttctctccttgtcgaagcttgttgtctggattcgacctgcagatcggaaggaaacaaggtggtcattatcacctacaagataagagaaatttctctttgtaatttgggatcaagcctgtggatggacgaaccctcggtggacttcagtgctgaaggtgttagcagcagatcaggtctctgccaaagcacctgtttaaatcctggttgtaagcatgaccgtgcttgctgggaagatgattatgtcaaggctgtaatatctcatgggcaagatgatttggcggtcgatgaaattggattggctcttactgaagtgatgcatgcatatgatgatgacaaatggtcaagtctgtatgaagattttgacgacggtgtcggcgatgaaccaattcttcctctggaatctgattcaactggtgattttgtggacattgactccgcatcacctacctttcctagtgacgatgcaatggaatcatcaattaccaattcatttgctcggaattgttcaattaatggcactccaagtttagtttctgcaatgaaaggaacacgtgtgaagaagggaatcacgacaaagttgagcgtttcttgggcccctgatgtatacgaccctcctattacttctgactcgcacacggtgaaagggcaccatacgagttcaactaagggtaactacaaatacaagacctccaagagcagcagtaccactagaaggaaaaaggacaagaagcattctaggcacagtagtagcaatggaggtggcagcaaaagagacaagaagcattcttaccgcagtagtgccagcagcagcagagctattaccagtggttctcaatattgtgacgcatacagtggtggtggcatcaacagcagaactgttcctgaatctgccaagatatctccattggtggtagctgaaaatgtcacaccgcaagagatggttcctgtactgaagacactggaaccaatcaaatgtactaccagctgcggcaaagagaagccatttgccttgctgtcgcgccagttttcccctgcaaggtacaaggggatgttcaccttttggaaccaaaaccaactggcttcttgacaatttgctatgcggaagctcacctgaaagtttccttgccaagggctgttcggatcccctccaaactttagagcttcaaaaattttagagcattttagctcacttttgaactctaaagctctaatctaaggttgaccaaagtttagatctaactgagctttacctctaaagtttagagaaggaaatctaaacatgctctaatttgattgtatcaaagattgttgctattgttctcttcgttaccatgtttgtttcgcctgtctgaaacttcagagatcatgttttggaaaaccgcttggcaaagtccatgcgtccgcgtgacgcgtggggcaaattgtcataccgggttacagaggaagatgttatccgtgcacgtaatcagctgaagtcctcaatccaactccaccttgatggttcaactgccgttgtcgaggacattggccgccagctgctgacctatggacgaagaattcctacccccgagctttttgcaagaatagatgctgttgatgcaagcactgtgaagcgtgttgcaaaccgcttcatctttgatcaggtactgttttggcaacctagaacctctcaccctgtagaacgttcagcatctttatgcttccttctc

SEQ ID NO: 259669 - DNA, 491 bp, Zea mays
  unsure (1)..(491): unsure at all n locations
canataattatttgctttagtanaatcttccaacaaaagatggggccgatccaaggacttccagactacaacgtgttcagacgccggacctacatgctccgttactagattaatcagccggtgtacccatgtttaccgtctgcacaagacaagataaaatttgcctcttttagcgtcagtatattaaggcctcagcactgcccattacgtgctgcgatggaggaattttttgagaatttgttttatttcctgtcgtgtccaaaatccccaaatctgtcaataatgataggcaggttcgactgacgtggctgacttggttggcccccggatgttttcttacaacgagtcatgaaccataccgtcccatcttttgttggaagattttactttggcaaataattttgtggcccgttatatgtaaagatgggacacccttagcttcattgtcccccccccttgttttgcacgattattgtcgtgtatttagcccc

SEQ ID NO: 259670 - DNA, 997 bp, Zea mays
attgtgagcgctggcacccgcgcgggccccgccccggtattcccgtctacccccacgcgcccgttttattcctgaagggcgtggatcatggggcgagtctgatgctacaggagagggcatggattctgagcttgaacagaaagcagcaatcaacgacattgctgagagtgtaatgtccttcatcatgaattacaaggacactggactttatgctgtctatgctgttgctaacgctgattgctcggatgatttggcttttgcaattatgcatgagatcagcaaattgtcataccggattacagaggacgacgatatccatgcacgtaatcagctaacggcctcaatactactccaccttgatgggtcaactgatgttgctgccgacattgaccgtcagatgctgacctatggactaagaatacctaccccagagctttttgctagagtagatgctgctgatgcaagcactgtgaagcgtgttgcaaaccgcttcatcttggatcggtcccatcgcagcaatagcaacatcctgatcaaaaatgaagctattgctgcgatgggaccgatccaaggacttccagaccacaactggttcagacgccggaactacatgctccgttactaagatcaatctgccggtgtaccatgtttacggtgtgcaaggacaaagataaaatttgcctctttcggggtctgtatatcaaggcctcagcactgcacatcgcttgctgcgatagaggtttttttcttctccagaatcggttgttatttcttttcctgctcagaatccacaaatccgccaataatgataggcaggttcgtccgacgtggcttacttgggtggtcagcccatgttatttttctttcaatgagtcatgacccttaccgttccatcttttgttggaaggtttttcctttggcaaataatttgatgtggcccgttatatgtaaaaatggtacagttttagcttgtgcaattttttttattccctgttgg

SEQ ID NO: 259671 - DNA, 610 bp, Zea mays
tacaagcatctacactcattcttgccacgctgctctccccgtcctgctcgtccccgcgctaccgccgcctccgcgcggcgctgttcctggccatgggcctgtcgggcgtcgtcccggcgctgcacgcgctgtggctcaactggggccacgccgcctgctacctggcgctcggcctcgaggtcgccatgggtctcgcctacgccacgggcgcatggttctacgtcagccgcgtgccggagaagtggaggcccggggtgttcgacgtcgtgggccacagccaccacatcttccacgtgctcgtgctcgtcggcgccgtcacgcactacgtcgccgtcgccgcgctcatccactggcgggagaaggtggctgccgcctgtggcgcggcgtcgtatgcggggcttgctgctcctggcttctgcagcaacccagctgaggtgtttgatcatccagagcttcaatgtgccactgcgatggattcaacatgcgttcgaatcggttaacgaagtacttgcagttgcagcatagatcggctctagaggtcgtcgattcgtaatttaattgatgggatgatcgagtatgggggctcattaacttatgatgagatttatct

SEQ ID NO: 259672 - DNA, 488 bp, Zea mays
  unsure (1)..(488): unsure at all n locations
cagagagatacccgatcgccaccgccgaccggactcccctcaaaggcggccacagcacagcgagcatgggagaccggcatcagcatgggcctggcagcggcgtggaggacccggcgacgctgctgcggcgggtgcagacccgcgcgcccaactcgacgcaggtggtggggttcctgacgctgctcgtctctggcgccgtgctgctgctgctgacgggggtgacgctgacgggcgccgtggtggcgctcgtcttcctgggccccatcgcgctgctcaccagccccatctgggtgcccgtcgccgtcgtgatctccgccatcgtcgccgccgcgctctccgcctgcgccttcgccggcgtcgcgctccccgtggccacctggatgtaccgctacttcacgggccgacaccccgtgggcgccgaccgggtggactacgcgcgcagtcggatcgccgacaccgncagccacgtcaaggactacgcgcgcgag

SEQ ID NO: 259673 - DNA, 1243 bp, Zea mays
tcttcatggagtttcaatgtcaccacatcggttggactcatcatggtcaacaaggccttgatggctacgtatgggttcagtttcgccacaacattaaccgggcttcattttgtgactactaccttgatgactatcttatttcgttggttaggcctgagtcagccatcccacttacccctagcagatctagttaaatttgtgatattttcgaacttgtcaattgttgggatgaatgtgagcttgatgtggaactctgttggcttttatcagatagcaaagctgtgcatgatacctgcatcatgtcttctggaggttgtctttgatcatgtacattattcccgggacacaaagctgagcataatggtcgtgcttataggagttgcagtctgcacagttactgatgtcagtgtgaatgcaagaggtctaatcgcggctgttatagctgtttggagcacagctttgcaacaatattatgtccattttctccaacgcaagtactctctgaactcattcaacctgctgggccacactgctccagcccaagctgggtcactcctgctagtgggaccatttgcagattacttgttgacaggcaaaagggtggatcacttcagtttctcatcgcttgctctgtttttcctggcactctcatgcttcatcgccattggtgttaatctgagccaattcatctgtattgggcgcttctctgctgtatccttccaagtcctaggccacatgaagaccgtacttgttctgtcccttgggttcctattctttggcaaggagggcctgaatcttcaggtagtccttgggatggttctggccgttcttggaatgatatggtacgggaacgcatctgccaaaccaggcggcaaagagcggcgcagcgtcctaccgctgaggtctgcaagtctcaagggaagttcggaagaaaagggcggtgccgagaaatagtcttgctctctctgattgccaacttgaacggggagttttccgttccaaggttgaatttctggtgaggtgacgtgaagtaccacatattgggaactcttgcctaatatttgacgcagagaacaaactcgttccatctagaaacccaggattgttatagttacaggtatactgtaaaggttcatttttttttggcgctctgaatcatttgcagtgaggggaaagacagacatggttgttacgagtcttcaacccagtttttttatcccatacataatgcagttgtttgagg

SEQ ID NO: 259674 - DNA, 568 bp, Zea mays
cagaaagagaagagcggaatttgattatttttatgatgaggaagatgacaatattgtaggggttgcatctacggagctcccgcggcagcataccccagaccctggtgttggaattgctgaagacgctgaagtaaatcaaaagagcttggaaactgaacacgatgtaccaaacaatgggaaaggttcctcaacgggggtggactctgacttcacatctgaatgtaaaatcaaaacgatcgatcctatgaacgattctgggattactttaaaagaaaagagcagtgatcctcctatcaatgacaagaagcaggattctgctgctgagcctgcctccacctcaccaaagaggagaaaggttttgaagacacgcatagatgagaggggaagggaagttaccgaggttgtctgggagaatgaagcttctgcagatgacaaggcagagcagaatgtcaacactattgatgcgactgcaagcggggcgactgtcccaagcaaaccgaagcccgcaacaaacgctgacaaaagcaaagctccaagcaaaacagcagcaggcaacaagaaagctgcg

SEQ ID NO: 259675 - DNA, 521 bp, Zea mays
gctagatctcttctccattcgtttacctgaagcacaagaataaacgcagccgggcatgggcgaagctaagctcaacaacgtgaccgtcctgctggtggccctcctcctcctgagcagtggcgttcaggacgctgccgccatgccaggcacgttgaactacgacgcgattgtcgccgacgagccaaacggaaagaacaaggacctgtaccgccccgtcgccaacgccaataaatacacccgcgggtgcgagcccatagaacgctgcaggggcgcgcgctgatcaccaagcatatacatatagcacatcgatttcttattattgcatgcacgtttatataagtgctcattgtcttgctgttgtaagtgccagcacaagcatatatacggcgtttatatatactacatactccgatcgttcaaaaaaaaaaaaaaaaaaaaaaaaaaaaaaaaaaaaaaaaaaaaaaaaaaaaaaaaaaaaaaaagaaaaagaagagacccttgaccaaaagaaaaaaagaaaa

SEQ ID NO: 259676 - DNA, 551 bp, Zea mays
tagttagcctctagcgtcaggtcagcctccctctccggatcccccacctgctccgccgccggccaacgcatcgctccccttggcagccaggatgacagaagcaccatttctgccacgtgagaggctcttcaagctgcaacatcatttccagaacatgaccaagcacacctacctgaaagggcgctacgatgtgatcacctccgttgccatccctcttgcacttgctgcctccagcatgttcatgattgggcgtggagtttacaacatgtctcatggaattgggaaaaaggagtgatctaccacgggttaactagtttttctacttggcatggaagtaccatccagactatgaagtcttctttgcttgctaaataatactgtcaaagaacaagtcgactacatttttgcatcatatttctgtttgtatttgtggatatgaaatgccatcaacttgaagatcagcattgttactattttggttaattactccaaaaataatataataaattaaataaatattaataaaatatatattaatattattattttat

SEQ ID NO: 259677 - DNA, 843 bp, Zea mays
ccattctgaagtccggcggcggcggcacggcgagggcgaggcctctgcgacttccagatctccccgacgaggaggaagtctctacagcggaggggagggagatgtcgtacatgcggggtgacctgctgacgaggatgcggaagctggtgaagggcctcgccaggcccgagccccggtggctcaaggccttggaacgggctccgccagtgacatttcctcgcccagaggggaagatcaagactctggtgcttcctgaggatgtgtatgtcacgaagttcaacagaatacatccagattcgctttaccatgatgcaatcaagataagtggatttgatccaccgccagctcgagtgtttgcttggcgtgtcctggagttgaaagagcaaggagtcgatgaagatgttgcaatggctgtagcagataacgagtaccggacagagaagaaggcaaagaagaaagcgtacaaggagctgaaagaaatcgcccgcagcgaagggaggaagccacctccgaatccatacccgagtgccataaaggaaatacaggcggaggaaaagaagtatgtcatggaccgtttgcataacccgaaggtaatcgagattgcgaacaagatgaaggaggagcgagacaggatgttgagggatagagcagcaggtcagcggtagtcgtagcagcaggtaatgtttggactggccgactgggtgttgtcgtttacgacatgggccaactggcgtcataaataatggttgttggagattgatatggcaaatatgaaactcgtgtttttgtttttcgtaaaaaaaacaacaaaaaaaaaaaaaaaaaaaaaaaatggaaggaaaa

SEQ ID NO: 259678 - DNA, 578 bp, Zea mays
  unsure (1)..(578): unsure at all n locations
gcgagacttcccatccattccactccgcagtggcggcggcggcggcggcgagggctctacgactgtcacatctctccgaagagggcggagggcagggagatgtcgtaatgctgccggagggctgctgacgaagatgcggaagctggtgaagggcctcgccaggcccgagcccacgtggctcagggccatggaagaggcagcaccagtgacatttcctcgcatgatgggaagattaaggcgcgcttgtttgcgattataatctgtccagattatataggccaacaacttgaacaccccctaagaagtgcgcggtcccgatgatgtgtatgttaggaagctaaacaaaaagaacatccggattcgctatgccatgatgcaatcaatggatttgatccaccaccagcacgagcttttgcttggcggtcctggagttgaaagaacaaggagtcagtgaagatgatgtgatggctgtagcagatgtagttattctcttctataatcctattgttcatttttatcaaacgcccttanacagaaaactcaattctgggcctcactgagctgtttaagtttgaacg

SEQ ID NO: 259679 - DNA, 1670 bp, Zea mays
cctgaatcagatgcaaagcagctaattagttatgcacgcgctaataataaggtcatcattggacctgcaacagttggaggaattcaagctggtgctttcaagattggtgatactgctggaaccattgacaacataattcagtgcaagctttacaggcctggatctgttggttttgtgtctaaatcgggtggcatgtcaaatgagatgtacagcaccattgccagagtgacagatggtatttatgaaggaattgcaattggaggggatgttttccctggatcaactctgtcagaccacattctgcgttttaataacataccacaggttaaaatgatggttgttcttggggagcttggtggaaaagatgagtattcactagtggaagcattgaaacaaggaaaggttgagaaaccagttgttgcatgggtcagtgggacatgtgcacgtctattcaaatcagaagtgcagtttggtcatgctggtgccaagagtggtggtgagttggaatcagcacaagctaagaatcaggcactaagggaagctggtgcagttgtgcctacatcatatgaagctctagagagtgcaattaaggagatatttgacaaactggttgaggaaggaaaaatttctcctgtgactgaaattacaccgcctctcattcctgaggaccttaaaactgcaatcaagagtgggaaggtccgagctcctacccacatcatctccactatttctgatgacagaggcgatgaaccatgctatgctggtgtccctatgtctacaattattgaacagggttatggagttggtgatgttatttctcttttgtggttcaagcgcagccttcctcgctattgcactcagtttattgagatatgcgtcatgctttgtgctgaccatggtccctgtgtatctggtgctcataactctatagttactgctagggccggaaaggaccttgtttccagcttggtgtctggattattgacgattggtccccgtttcggtggagcaattgatgatgcagcccgatacttcaaagatgcatgtgataggagcctcacgccatacgagtttgttgaaggcatgaaaaagaagggaatccgtgtgcctgggattggtcacaggattaagagcagagacaacagggataagcgtgtgcagcttctacagaaatatgctcacacacatttcccttcagtcaagtacatggaatacgctgttcaggttgagacctacaccttgtcaaaagccaacaatttggttatgaatgtcgatggtgcgatcgggtcccttttcttggatcttctatctggaagtggaatgttcaccaaacaggagatcgatgagattgtggagatcggttatctcaatgggctctttgtgcttgcacgatcaattggcctgatcgggcataccttcgaccagaagaggctcaagcagccactctaccgtcacccatgggaggatgtactgtacaccaagtgagaaagccattctttgcaaggcataataaagtattattatcgcctagagcttccagttgcctgtacacttcattaaatcgagcacttgcaaaaaagaaagccagagagagaggaagacgaacatcactagtcagcactagattgtgtgttttatgttgagttgcaaattcaggtcctgatttttgt

SEQ ID NO: 259680 - DNA, 772 bp, Zea mays
ggaccgtggagctaatggtaatggtttatttcgattccaacagcggagtcgttctcctgaaattgtagaagtacaggaggaagcagctgtcgatgtgaaaccacatgaaaccttaaggattgaaataggatctgttgtgttgatggatgatgcttacatgcagaaaggttttcagatcaatgacatcctaacagacagtgatcctcctatttatacttctactcctgtagaagaacctaccagaacctatttgctgtatgtgggctccagcccttctcatttggaaccggcatgggaggatatgaactcctggtaccaagtacagaggcagacaaaagtactgactgtgatgaagcaaagatgcatttctagcagatatataccacagatggtatcttctggacggctcgtccatccaggcccatgtaacaagcctaactcaaatggaagttgtggccatccatggtgcagtactccaatgcttgtcacctcaccagtcggtgagaccatttcaaatctgataaggaatggactgtttggtgttgaggaggctctgagatgttgccatgactgtttatctgctctcgccgccgccgcagcagcaggaatccgccatggtgatatccggccagagaatgtgatccgtgtcaataacggctcaaggcatccatatttcgtgcttattggatggggccatgctatcccagaagatagagaccggcctgtgatgaatctattcttctcatccacgtttgcgctccaggaaggaaaa

SEQ ID NO: 259681 - DNA, 415 bp, Zea mays
ttggtcgcgtgggtcgcccacgcgtccgcccacgcgtcctggttttcaaatcagtgacatcctaacaggcagtgatcctcctatttatacttctgctcctgtggaagaacctaccaaaacttgttactgctagggtcggaaaggaccttgtttccaacttggtgtctggattattgacgattggtccctgtttcggtggagcaattgatgatgcagcccgatacttcaaagatgcatgtgataggttgagccaacttagattttcctttaggtttaagcatccccatgtatcttagatcgtttaatccctggaatggctctatcaattggtttcagagcccccccccatacgagtttgttgaatatataattgtgatgcttttgtgattaaaaaaatgtggggcttttgtgtttt

SEQ ID NO: 259682 - DNA, 441 bp, Zea mays
gatcgacgagattgtggaaattggttatcttaatggtctctttgtccttgcacgttcaattggcctgatcgggcacaccttcgaccagaagaggcttaagcagccactctaccgccacccatgggaggatgtcctgtacaccaagtgagatagagccattctttgcaaagcataaagtattattgtcgcttagggctttcagctgtctgtacacttcataaatcgagcagttgcaaaaaaagctcgaaattgtgattgttgatgaagttaggggcagggggagagacatcgaggggaggcactactagattgtgtgttttgtgttgagttgtttcacgatatacggcctcagaatagaagttccctttgaaatgaagtaacgctcgctgatttatgagttgataaacataattgagaagcacaatgatggatcttggaaaa

SEQ ID NO: 259683 - DNA, 492 bp, Zea mays
cggacgcgtgggtgttgcagtaatatatgttccgctatattggccatttgatttacagcaggcggcttttctgaaaaaaatgtgttactttgattcacaggcataccttcgaccagaagaggctcaagcagccactctaccgtcacccatgggagggtgtgctgtacaccaagtgagggagccattctttgcaaggcataataaagtattattatcgcctagagcttccagttgcctagcttccagttgcctgtacacttcattaaatcgagcacttgcaaaatagaaagccagagagaggaagacgaacatcactagtcagcactagattgcgtgttttatgttgagttgcaaattcatgtcctgatttttgtcctgccatgaaccgttaggcgatattgtattggaaaggatgcttccgctattgtttcacgatataccgcctcagagtagaagtttccagttaaaatgaactctgattagttcgtcgat

SEQ ID NO: 259684 - DNA, 282 bp, Zea mays
tactgctagggctggaaaggaccttgcagtaactatagagttatgcgcaccagatacacagggaccatggtccgcacaaagcctgatgctcataactctatagttactgctagggctggaaaggaccttgtttccagcttggtgtctggattattgacaattggcccccgttttggcggagcaattcatcgatgcagcccgatacttcaaagatgcatgtgataggggcctcacaccatacgagtttgttgaaggcatgaaaaagaaggaatccgtgtgcct

SEQ ID NO: 259685 - DNA, 1524 bp, Zea mays
acataaaaatcatttccatccctctatcctatgaggaatgagatagacttggatttgaattttacaaagtggtggaacatcaaatttcaagccaaataatctacacagtagattccaattcctctaaaaatgacaagatccaaacggccttaagttacaagtccacattgtaaagccaaccggtgtttttcgtttattacgtgttgcattctcgtttcacaaagcgaaaccacaaaattaaagcatgactaggttcctacgtagtagcaactactagcattttgcgaagcttacaaattaaacaaaatgcacttcctgcaagcaaaaggctgcagctatttacatatttacttgtaatgaaaaccctataaatattccgactgggcatcgaatcagtatcgaccagataataattagctggcagatttgatggaggacgtcctgtttattttatcagaggaatcagcatctttcaacagcatatcaatggtgtccttgccacaattccctgattctattgccagttgcaatccctgtaagaacttttggcctccaaaacgttttgtcgtcattttggagccttccaggcgatccggaagctttccaccattttgctccatgaattggcagaggtacatcacaccagcacatgagaagtcctgtttagcttccattgaatcaattttcccatccagaccccaaactaattctttgatgttcttaatttctgaaccaatattctcaagcttcagacgtgcatcagtaacatcatttcttatttgtccagatagagccttttgctgatccaatttatcgtccaacttttcaatgcgctgtgtcaaatgccttttagcagcagcaagagaactttgcacttgctccaaatgtttagtcatgcttgaaacagcatttgccatgttgcgcttggtgacatacattagatctgagaacgagatccccttccaccacatataaccgtaacccagtgctcctacagttgctgcaggtactatcaggcctgatactcctgattgtgcagaacctccattgagaacagttattgaacgtgaattaccaagttgccggacctccatggcaaggcgacgcacctgcgaggtaagagcctcgttgagatcggtttccccgtctccccctcctccatccttcaccttcttccccttgtcgagtatctcctggagctcgccgaggatctcggcgaggcggccgttgcggaggacgacggagccggcaacgccggcgccgacgaggataacgacccgggtaaggcccatgcccgcctgcaccagcgccatggctgcacgcccgcctcgtagaacggaggtagcggcgaagaaaaccctagctcaaggcacgtcgaggtgcgcccgtggaaggcgttgagcaggtctggtggagggagacggaaccctagctaaacggaaccagatccgctgccttaccgcagcctgccgtgcgttccatcttcaaatcaaccgagatgtgctgctctcgaggcgcacacta

SEQ ID NO: 259686 - DNA, 743 bp, Zea mays
cggaattcccgggtcgacccactcgtccggacccactcgtccgcccactcgtccgtccactcgtccggcatgtgctaccttaggggtcttctaggccactcacacgaaagctttcatttgatgcctcctcaagtgaatcaaggggcacagaaccctcaacaagtatgtcaacagagaacacacctgtgtccatcaacgtcccaaagttggcagagggcattgaatttgggaggcaaccaatggtcacatcctccactttggtagagctaacaactagactagatttcttcaaggagcgaaggtcgcaactgatggaacaacttcatagccttgatttgggacgtggatctgctccgcaaggttttccattcaagccaccctctccttggaaccacccaaggtaggaggatgaccgttcgatttcatgattgtaaattcttcagtagtggttcttttctccccgcctggcgattgcagaaaactgcatatacgagtgtaaatgtattttgctcttcgatatggttttagctttcgtgttgtgcgaggatagctccttaagtgggatgtgtgatatagtcttttctgtataacacgttgtcatggagagatgccttttagacaagtttttccaaaaacaaaaaaaaaaaaaaaaaaaaaaaaaaaaaaaaaaaaaaaaggcagaccgttttaaaggtcccagctttcctacccctgcattccaacgaattacttttatattaggg

SEQ ID NO: 259687 - DNA, 1085 bp, Zea mays
ccgaagaatagtattctgtagctgttaatatctattaatattttgtgttttttttttttttttatccaaagtaaacatctttaggcataatgcaaaatcctgacagcgaccacaaaaactgagacaatgtttcaccatagtacgaggcaacaacacatccgttctgaaacacatgtcctttaacaatctaaagcacagtagacagataaacaacgacaataactctaggtggccttgtcagccttggaggctgtggcagcagcttgacccctgagccttccagtcctcctagcggcaatgagaccaaccttctggccagggggagcgtctcggcggacagtagaggcgtgaccgatgtgttggtggttacctcctccgtggggatgctccacagggttcatggccacaccacgcaccttgggccagctgttcctcttcacacggtacttgtggtacgcgttaccagccttgagcatcggcttctcagtcctgcctccaccagcaacctgcccaatcatagcacggcagctgctggggacaatcttcttggcgccagagggcagcttaatcctcgatgtgccgttgtcagggttgtggctgatcacaatggcgtagtccccagaggccctggcgaagacaccgcggtcaccgacgtggtgctcgacgttgcagacgacggcaccctcagggatcccgcggaggggcagcacgttgccgatggagagggtggcgcggcgaccgcagtagacgaactggcccgtgtacatgccctcggctgcgacaaagagctccttctggtgcttgtacctgaatgggtggcggaaagtgaccttggcgagcggcgcgccacggccggggtcgtggatgacgtcggtgacgacgcccttgaggtacccgttgcgctcgccgaagtcgagggagcggaagcgggcggggcccttgcggtggtgggtgtgggacttgaacacggaccccgcacccttacgctgcgcgcggatcacgcgacccatcttctccggcggcggtgaggcggcgcggcgggagggggatgcagaaatgagcgcagtgcggaagtgaaagcgcga

SEQ ID NO: 259688 - DNA, 963 bp, Zea mays
gttctagttcgcgagggccgcccttttttttttttttttcttttgtggcacgaggagtctttatagtacatagcagttggaaacatccaaacgtcaggaaatttagtcttcccactagttaccacaacacattcatgctaatcaccgtagccgatccatgctcacgagacatctaatgtggtcaggatggtgatgatgagtcgtgagcccaacaacatgatgacaagattagtcaccgctggcacaacccctgcagccgcaatggacacattctatcacttgctcctccctcagatgcttggggacccggcagacacaagtcgttgcaaagttgtggtcacgtgtctgtatgcaccgaaggcagcaaaggcgctcgtaacctggctttttccactttgcgatcaggttacgatctgcatagctctggtccaggcagaactcataaagctcccgtgatatctccttccttctgtagtaaagatcatatatgtagcggctcctttgatgagaaatacgaaaaataggccagagagcttcacactttctctttccatcatgtggatcattttcagcttctctcattttggcatccaactcacggatggttggttcaataagctcccatccttcaggatacttgacacgacttgtctttatcttaggcatgctgtctcaataaatgtcctctctcttcaggagagacgatgggggcgattcagcggagcaacgacggctcaagctcggcgcggctgtggctgcggcggcgggggtggcttcgagtttgcctcggcggcggcggtgcgactgttggggctgaggcggttggcggcggctggccgaccgccggctagcgtgtaactccccttggccgccggatgggatccgggacgtgaggtagggttcttccccaccagatctggggaagaggaccctaattcgtcaggtaacgcagataagcttcac

SEQ ID NO: 259689 - DNA, 1458 bp, Zea mays
gtgatgattctgcacagcttcttgctgccgcaaacgccgcaaacagtgctcaaggaattgtcgcaactctcttggaggaatatgagggcatttttcatgatgaacacctcagatgttccttgtcacctgaatctcaaattgaagatagtggtactgaagcatcaactgatgatggtaatttggaagccaagggcaatggatttcatgatgcagaaaatgatgtagatcaagaaatggatgatgacaatggcgtggagcgtatacttagtgggaaattgagtgagagcagtggatatgctggcagtgacctctatgactacaaggcagtcaatgctgaggagtcagatgctgaacgccctgtgaagatgttggaaggaaatttgaatttgagcaaagtacagaacagcctttcaactgaaaacggttcagcgaatgtggatagcttactaagcgaaaataatccttctaacccaacagttggtcatgagactttgtctatgggggagatcctttcttcttttgatcctggaatttctgtaccgacccatagtcctgaatattctgtagagagacagacaaacaaaactaatggatctcacccacatgtgaaacggagtaatttttgggggaggaataatgcaaggaagggccaaaactctgaatcagtcgattcatctggagaagaagagcttgctattcaaagactagagattgcgaagaatgatctgcaaaacagaattgcaaaagaggctagagggaatgcaattctacaggcgagtttggaaagaagaaaacaagcgctacatgaacgcagattggctttggaacaggatgtctccaggttgcaagaacaactacaagctgagagggatctgcgagctgcattggaagttggcttgagcatgtcttctggacagttttcaagtgctcgttcgatggacgtgaagacaaaggcagagcttgaggagattgctctcgctgaagctgatgttgcaaggttaaaacagaaggttgcagagcttcacctccaactcaatcaacaacgtcaacaccagtatggctctgtagtggatgcaaatgatcgtcatcaccgcctccctggtcatttctcacagcaaaactttgttcaacaaggatttgatatgaaccttgctttctgcaatcaagagaagcagagaaatgaggagagttcggtggagtcatcacaatggagaaacatcaagcagcatgtgctaccttatggttcttcgaggccactcacacgaaagctttcatttgatgcctcctcaagtgaatcaaggggcacagaaccctcaacaagtatgtcaacagagaacacacctgtgtccatcaacgtcccaaagttggcagagggcattgaatttgggaggcaaccaatggtcacatcctccactttggtagagctaacaactagactagattttttcaaggagcgaa

SEQ ID NO: 259690 - DNA, 1328 bp, Zea mays
gatttaggaggcaggagcaccgctggatctctctctctgcattagtttacaggaactgtcacacaaattccaataacaccatacggaagattatcagtacagttccaccatcgatttatatcagtttacaggaaccgaaaaattccgataacaccttactgaggaagcatgtcttgtatccctggtgatgatgacaaacaagctgccttgaacaacttctgacgacttgcacatactccgttggaagttcctgtgcactgcactagagccagccacccacaaccacaaccagtaagccttttaatgggctgtgtgatgtccgttgttgggtaggttcaggtcatcaacctgcctgcactgccgagtacgcagataaaccgttagttttaccccgccagtcagacttcaagcgtagaacagactaggcaagtgggattcacctcctaaggttaaccacgctgacactcaagcttctttgtattctccaatagcacctctcggatataagttgcaattgctttgcacccttctattgcaagtcccattacattttcaaatgtatcaattggtaattttgcatccatctgaagcaaagtcactttgtccatctttgcaagaatgccaacagtgacatcggaacccccagcactgtcttcgaggtaattcagatcgagcaaaggagtagaacacagataaccagcactacatgatgtggcaatgtctcgcattggaatcccagcatctgcaagagctagtgttgcagcatttatgcaagctgaccttgttccaccatcagcttgaagaacttggacatatatatcaatctgtgagtgtggcattaaatgtgttaatatgcttgcctccattgtctgtcgaataacaagagaaatttctgttgatcgcctgtcacccttcggttttctcctccgatctcctgtactaaactctgccatcctgtactcacaacgaaccaaagcctccttgctgtttacttgctgacctttgttctgaacctctcgcgggccgtagacggcggcgatgactctggtgttgcccatctcgaacagcgccgacccgtctgcgcgcgcaacgacgccgacctcgcccttgagttgccgcatctcgttggggcggcggccgtcgacgcggaagccggtgagggggttcacgtactccatcgccggaatcgccgctgtatctccgtgtccgaacgacgcgccgcaccgaggtgagcgaacaagtgaggcgagcgagggtttttgttgggttccctccgagaagagagtcgtgctgtcccatcgccgtgcccctggaggcctgcacccgcg

SEQ ID NO: 259691 - DNA, 905 bp, Zea mays
gaggaaattgctctcgcagaagctgatgttgcaagattaaaacagaaggttgcagagctgcatctccaactcaatcaacagcgccagcaccagtatggctcttcggtagatgcaaatgattgtcctccgcaccttccaaatcatctctcacagaacactgtccaaactggatttgataggaccgttgctttttgtaatcaagagaagcaaagaaatgaggagagcctgccgagcacatcccactggagaagcatcaaacagcatgtgctatctcatggttcttcaaggcctttctcccgaaagcattcctcggacacctccttgagtgattctacaagtgtgcctgcagagggcgggccaatgttggtgaacatccctagaacaacgaaacagggtgtcgaatatgggagaccgccgtctgtgtcgtcatccactctggttgaactaacaaccaggctagatttcttcaaagaacggcggtcacaattgatggaacagctccacagcctcgatttagggcatggatccacgtcccatggtttcccatacaaaccttcatctccctggaacagcccaaagtaaagtaggggatgatcatttgctgcagtacgacgtctctgtatattcttggtatagaatctcctttatgtttcactccatctttgtagagcctggtagtgagaatgtatatcccttgccttcacttgttttgctagtgcttgcagcggatctttttttagcatgattttgttttactgtatatgtaatgagttgaggagattgtgacacggcttttatatgttttagcaattttgttctattgtgtatgtaatgagttaaggggattgtgacacggtttttatatgttttcgcaatatactagatgcgtcttttttcttggggat

SEQ ID NO: 259692 - DNA, 782 bp, Zea mays
tgatactgaaccaacaccttaataatcgtgccatagacatatatagaaaattctacctagctacatgactactgcccagacaacatctcaaaatattaactgagtgcaaatgtgcaaaaagtataggtctacacaggccataagtggaaatgctcaaaccaggcgatccggaagctttccaccattttgctctatgaattggcagaggtacatcacaccagcacatgagaagtcctgtttagcttccattgaatcaattttcccatccagaccccaaactaattgtttgatgttcttaatttctgaaccaatattctcaagcttcacacgtgccgcagtggcgtcatcgcgtatttgtccagatagagccttctgctgatccaatttatcgtccaacttttcaatgcgctgtgtcaaatgccttttagcagcagcaagagaactttgcacttgctccaaatgtttagtcatgcttgaaacagcatttgccatgttgcgcttggtgacatacattaggtctgagaacgagatccctttccaccacatataaccataacctagtgctccaacagttgctgcaggtactatcaggcctgatactcctgattgtccagaacctccattgagaacagttattggtcgtgaattagcaagttgccggatctccatggcaaggcggcgcacctgcgaggtaagagcctcgttgagatcggtttccccgtctccccctcctccggcagtctagcgcacgcgtggcgtgggtcggacccttcaattccggt

SEQ ID NO: 259693 - DNA, 1411 bp, Zea mays
gggccgcccttttttttttttttttttttttttttttcgggaccgcaaaaaatgaaaataggtttttttttcccaataattatatttcacaaacatgaaatatagaggaaactacaggaacataataatccattccccttggctacaatgttagcgtgcaccttgcaacccgcctagaaactatatgtccaggatctcccttctagtacacacactcatatgatatacaaagcatatgtgcattctctcgccaagcggtgcaaaagcagaaacagaaacaattacagggaacttacataggtaaaatcttgctcagagttgctactagccaccttgcctcggttatatatatacaaaaacctcaactcctgcagaaaactacagtcttgagcgccggaagtaccttatgggattgaatggaccaagttgccgggcagaagcaaacgttggccgtccattcggggacactgtcggcttaatgtcccatccttcaacattatttggaacacaaacatcaaacaggatttggccaaggactcctttaggctccatgcagggtggatgtgagatgtggcgcctctgatcctcaattagagaactgggttcccgagattcatcatggtccttcgaacttggcaagaagaagtgatcactaggactgttagcaacccttcttaagctctcatttgaattggctgcagcattgtgtagactgcacactgagtgcgctatcttatactcctggtcaccagccatatttgagtcatatagttggcttcggtggcagaaggtaacaagagccttcttcaacgtatcatctacagctttcctgtattcaatttcatgtgaattgtaatggccgacatgttgggagtcgctccatttcataagtttaacatctgtgcctagttcaatcaatcgccttgcaaagccacagataatatggcatggagcaagattatcatcttctgagcaaaatataagaacaggacccaatcctgctgctgagtatagtgtgtgccagtactctgcacgctgagcttcaatcctgcttgggaagagagtatccatgccagaagctagaacctttgccatccatgaacgtaatatagttgactgagataaatttccaacagcaggcttttggagaaactgggtgcccacatcactgacaaaatctacagggctagagtcataaatttgcccgcagatacagtttctcactaaccgataatccttcatggttgcatctccttcacatattccagctagtaactgaataaccttgtacatgcacccttttgagccaccagaaaaggaagcaagaacagttggcacaggttttactctcagttccttaaccagctcactaataacaccagttgccagagatgttgctttctcagagaga

SEQ ID NO: 259694 - DNA, 544 bp, Zea mays
  unsure (1)..(544): unsure at all n locations
gggtaaaagagaatgcatgcacacnaaagggatcttcnaacaatcaacctggtttattttatcagaggaatcagcatctttcaacagcatatcaatggtgtccttgccacaattccctgattctattgccagttgcaatccctgtaagaacttttggcctccaaaacgttttgtcgtcattttggagccttcctgtacagttcaaaaaaaaacaaaatgtaatgaacaaacaacatataaatctgcagtgacatagatcatggtcatctccggagcatgtatatatagacgtttaaattgtagactgcattgtttgcagagtgaagtttgaaatagggagtgagataggttgtgggatagggaggctgctagagacatccttaaggcgatgaggtggccatggcaattgactatcaccttatgcttaaacatagagctaaggggtgccgcgagtggatgccttaccaagtttaggagaccacaaaacagcagcttagagccataggtcacaaaggaaaaagaaaaaggagtcagaagtgaacga

SEQ ID NO: 259695 - DNA, 282 bp, Zea mays
gtgaccgttcgatttcatgattgtaaattcttcagtagtggttcttttctccccgcctggcgattgcagaaaactgcatatacgagtgtaaatgtattttgctcttcgatatggttttagctttcgtgttgtgcgaggatagctccttaagtgggatgtgtgatatagtcttttctgtataacacgttgtcatggagagatgccttttagacaagtttttccagtgttgtggcggtgatatgtatttggtgcgacttggcgaagaaattgatagttgactgc

SEQ ID NO: 259696 - DNA, 990 bp, Zea mays
cacagccccacagtcgccccttcggacttccctttattccccttcctatataatcccatcgccactgccttcttcttccgcttccaacttccgttccgcaaatcgaaagctcggcgttgccctgcctcgagctcgaaggactttgtccctttacgtcgttgtccagctcctcgcatattgtggcctggtgcagattggagatccgcccggacttggatcgagtcctcctgtctttggacattcattggagtgctccattcattgaggcagcatgcctaagataaagacaagccgtgtcaagtatcctgaaggatgggagcttattgaaccaacaatccgtgagttggatgccaaaatgagagaagctgaaaatgatccacatgatgggaagagaaagtgtgaagctctctggcctattttccgcatttctcatcaaaggagccgctacatatacgatctttactacagaaggaaggagatatcacaggagctttatgagttctgcctagaccagggttatgcagaccgtaacctgattgcaaagtggaaaaagccaggttacgagcgcctttgttgcctccggtgcatacaaacacgtgaccacaacttcgcaacgacatgcgtctgccgcgtccccaagcatctgagggaggaacaggtgatagaatgtgtccactgcggctgcaggggttgtgccagcggtgactaatcttgtcatcatgttgttgggctcacggctcatcatcgcaacgttaaccagatgaggtgccctgctgtgagcatggatccgctgcggtgattagcatgagtttattgggtaactagtggggagtactaaatttcctcacgtttggacgtttcaactgttatgtactacgctttctcgtgtctcagatgcttgcgttaaattagtggcgcttttgcattttaaaaaaaaaaaaaaaaaaaaaaagggcggccgcccttttttttttttaatttttttttttt

SEQ ID NO: 259697 - DNA, 677 bp, Zea mays
agctgatgttgcaagattaaaacagaaggttgcagagctgcatttccaactcaatcaacagcgccacaccagtatggctcttccgtagatgcaaatgatcatcctcaacaccttctaaaccatctctcgcagaacattgtccaaacgggatttgataggagcgttgctttctgtaatcaagagaagcaaagaaatgagggtgtcgaatatgggagaccgccgtctgtgtcgtcatccactctggttgaactaacaaccaggctagatttcttcaaagaacggcggtcacaattgatggaacagcttcccagcctcgatttagggcatggatccgcgtcccatggtttcccatacaaaccttcatctccctggaacagcccaaggtaggggggcttgttcagttgctgcattacccgcgcatctgtatattcttggtatagaatctcttttgtttcactttatctctgtagaagctggtctcgtttttgtttcacttgttatctctgtagaagctggtagtgagaatgtatataccccttgcctaccttcacttattttgctagtgcttgcagcggacatttttcgagcgtgatttttgttttgcttttgtatttactgtgttatgtgatgactccccggcaaatatatagatgcgtcaatttttcttggggatataa

SEQ ID NO: 259698 - DNA, 692 bp, Zea mays
ttttaatttttttttttcagactgctgcagctacggggtattgagacagaatactgggtaatcagtatacgaacattgctgaaactcgctctcttatcatgaaattaaccaacaacctcggtactgctggacagataaaacagtaaagccttgttcggttattcccaatacacatggattagatgggattggaaaaaattaagaagtttgacttgtttgggattcaaactcatccaatctcactcaatctacatggattgagagctaaccgaacgagccctaactagttgaaagcaccgggatcctggccaagcagcctgccttgtgctggaagcagcgagcactgccattcagcaccgcgctctccatcaagaagctcaccgtcgacgccacaaccactgtgggtactgccaactggcctaaccttcacttcttttatcttgacatattccacgtaggggaagtagaagatgccagcagagctgataggcaacaaagaagcaaaacagtctcagcctgccgcttccatggacgagaatcaggtccaggctgctgtcgtcgtgccgcgctttcggtgcgataacaggagaaagtaacccctgggcaggctcgcagaagtgattgcaagcgagaatgccaagaaactccccgttcctggtaacacgaacgcgtgggtcgaccggaattcagga

SEQ ID NO: 259699 - DNA, 623 bp, Zea mays
taccttcatttcattactttttagatgcaaaagcgttactaatttaacaaaaacatctgtggcacgaggagtctttatagtacatagcagttgcaaacatccaaacgtcaggaaatttagtcttccaactagttaccacaacacattcatgctaatcaccatagccgatccatgctcacgagacatctaaggccttgttcggttattcccaatacacatggattggatgagattgaaaaaaattcttaaaaagtttgacttgtttgggattcaaactcatccaatcccactcaatccacatggattgagagctaaccgaaaagccttaatgtggttaggatggtgatgatgagtcgtgagcccaacaacatgatgacaactgacaagattagtcaccgctggcacaacccctgcagccgcaatggacacattctatcacttgctcctccctcagatgcttggggactcggcagacaccagtcgttgcaaagttgtggtcacgtgtctgtatgctccggaggcagcaaaggcgctcgtatcctggctttctccactttgcgatcagcttacgatctgcatagctctggtccaggcaaaactcataaagctcccgtgatatctcc

SEQ ID NO: 259700 - DNA, 469 bp, Zea mays
gttctagatcgcgagcggccgccctttttttttttttttgagaaaagaggcatatatcattgagcaccaaaaacttctttaggcatacttgaaaatccatacagataccacaaaaactgacacaatgtttcaccatagtaccatccatagcggaacacgtcctttttaaccatctaataaatcacagcagagggatagataaaacaagaacaacaatactctaggtggccttgtcagccttggaggctgtggcagcagcctggcctctgagccttccagtcctcctagccgcaatgagaccgaccttctggccagggggagcatcgcggcggacagtagaggcgtgaccgatatgctggtggttacctcctccgtggggatgctccacggggttcatggccacaccacggaccttgggccagctgttcctcttcacacggtacttgtggtaggcgttgccagccttcag

SEQ ID NO: 259701 - DNA, 579 bp, Zea mays
cggacgcgtgggcttggaaccacccatggtaggaggatgaccgttcgatttcatgattgtaaattcttcagtagtggttcttttctccccgcctggcgattgcagaaaactgcatatacgagtgtaaatgtattttgctcttcgatatggttttagctttcgtgttgtgcgaggatagcatcatcagggcttgttcggttattcccaatacacatggattggatgggattggaaaaaattgtgaagaagtttgacctgtttgggattcaaacccatccaatcccgctcaatccacatggattgagagctaaccgaacaagccctcagtgggatctgtcatatagtcttttctgtataacacgttgtcatggagagatgccttttagacaagtttttccagtgttgtggcggtgtatatgtattttgtgcgacttggcgaagaaattgaataggttgactgcttgtatggccgtttgattcatgcctagggcaaaggacaggatgaggaaaactggggatcaaatgagaacccagcacgagtttataaataattcgggggccggcttgaggctgtgtttt

SEQ ID NO: 259702 - DNA, 695 bp, Zea mays
catttacaaatcgatattcaagcacggtcaatacattttacatgaactccgtctatacgtcgataaagaatagcaccgcaagctcaatcatttagtcgttaaagaccgttgcccattctccttgtttctcatttccattttattctcttctttttttatctatttcttttttattttttttatttcttttttttatttttttttcattgtaaagccaaccggtgtttttcgtttattacgtgttgcattctcgatttcacaaagagaagccacaaaattaaagcatggcctaggttctttggtagcaactactaacattttgcgcaagcttacaaattaaacagaaaacacttcctgcaagcaaaaggctgcagctctttatatgtttacttgtaatgaaaaccctttacaatattccgattgagcaacgaatctcgatagatatatatgttccacacctagtatcgaccaaagaatgactaactgcctgatttgggggacgtcctgtttattttatcagaggaatcagcatctttcaacagcatatcaatggtgtccttgccacaattccctgattttattgccagttgcaatccctgcaagaacttttgacctccaaaacgctttgtagtcactttggagccttcctgcgcagcttaaaaaaataaagttaaatcaactgtcaacatacaaat

SEQ ID NO: 259703 - DNA, 566 bp, Zea mays
cgtggacgaggtgcgcaccttcgagtgcatgtcacgccatagccagggtccccgcctcctcggccgctttccgaacggccgcgtcgaggagttcatccacgcaaggacattgtcagctgccgaccttcgtgatcctgaaatttcagctctggtggcttccaaactgagggagttccacaaccttgacatgcctggtcccagatctgtgctcatttgggacagacttaggaactggctcagaactgccaagagcttgtgtccacctgaagaagccaaggaatttcggttggacggtctggagaaccaggttactgcattggagaacgagtgttcaggtgattaccagtggattggtttctgtcacaatgatcttcagtatggcaatatcatgattgatgaagagaccaacgtgctgaccatcattgattacgagtatgcaagcttcaacccagttgcatatgacattgctaaccatttctgtgagatggcagcagactatcattcatcaaagcctcatatactggactacagagatatccagatgttgacgagcagaagcgttttgt

SEQ ID NO: 259704 - DNA, 509 bp, Zea mays
tttttacttgatttcaattatttattttttcttttgtttttttttttttttttttttttttttatttttttttctttttttttttttttttttttttttttttttttttttttttttttttctataccccaaaattaccatagtattgataaaaccacagtattatatacagagtttttaaaggctaccaaccaacttttggcttaaaatacaagggttcatccaaattccatggtattaacgggtcctcatgatcgactggccttcacgagcacatacatgcacctagtgaaggttctcttagggcttgttcagttattcccaatacacatggattggataggattggaaaaaattgagaagagatttgacttgtttgggattcaaacccatccaatcccactcaatccacatggattgagagctaaccgaacaagcccttaagggtttggagcaatttttttttttgttaaggcttcacaggatgtataactttgcacccatagctt

SEQ ID NO: 259705 - DNA, 487 bp, Zea mays
gattccaattcctctaaaaatgagaagatccaaacggccttaagttacaagtccacattgtaaagccaaccggtgtttttcgtttattacgtgttgcattctcgtttcacaaagcgaaaccacaaaattaaagcatgacctaggttcctacgtagtagcaactactagcattttgcgcaagcttacaaattaaacaaaatgcacttcctgcaagcaaaaggctgcagctatttacatatttagctgtaatgaaaaccctattagggcttgttcggttattcccaatacacatggattggataggattcggaaaaaattgagaagggagtttaacttgtttcgggattcaaacccatccaatctcactcaatccacatggattgagtgctaaccgaacaagcccttaaatgttccgactgggcatcgaatcagtatcgaccagataataattagctggcagatttgatggaggacgtcctgtttattt

SEQ ID NO: 259706 - DNA, 532 bp, Zea mays
aataatgcattcccttggctattcaatgttagcgtgcaccttacaacccgcctagaaactatgtccacgatccaccttctagtacacactaagggcttgttcggttattcccaatacatatggattggatgagattggaaaaaattgagaagaagtttgacttgtttgggattcaaactcatccaatctcactcaatccacatggattgagagctaaccgaacaagccctaatatggtatacaaagcatatgtacattctctcgccaagcagcgcaaatgttaaaaacagaaacaattacagggagcttacataggtaaaatcttgctcagagtgcccattagacaccttgcctccgttatatatacaaaaaataataatctcaactcctacagaaaactatagtcttgaacgtcggaagtacctgatgggattgaatggaccaagttgacgggcagaagcaaatgttgcccgtccattcggggacactgtcggcttgatgtcccatccttcaacatttccccacgcgtccg

SEQ ID NO: 259707 - DNA, 521 bp, Zea mays
aaaagctaagaagttgcaaacaagcgtaagaaagcttgggtcctttaaaagggcaccccttttaaatacatacagagtaagtgaccatgttaaaactgatgaccaatagtatattaaattgttacttataatatcagtattatttattttatttattgattttatctattttttttaaaacagtaaagccttgttcggttattcccaatacacatggattagatgggattggaaaaaattaagtttaatttgtttgggattcaaactcatccaatcccactcaatccacatggattgagagctaaccgaacgagcccttaacggctgtgtggcatgtaccggtgttgggtaggttcaggtcatcaacctgcctgcactcctaaggttaaccacgctgacactcaagcttctttgtattctccaatagcacctctcggatgtaagttgcaattgctttgcacccttctattgcaagtcccattacattttcaaatgtatcaattggtaattttgcatccatc

SEQ ID NO: 259708 - DNA, 372 bp, Zea mays
ttaaaacgaacgccctttttatattattttttaagcaccaaaaacttctttaggcatacttcaaaatccatacagagaccacaaaaactgacacattgtttcaccatagtaccatccataccggaacacgtccttttaaccatctaaggccttgttcggttattcccaatacacatggattggatgggattggaaaaaaattcttaagaagtttgacttgtttgggattcaaacccatccaatctcactcaatccacatggattgagagctaaccgaacaagccctaataaatcacagcagagggatagataaaacaacaacatttctctaggtggccttgtcagccttagaggctgtggcagcagcctggc

SEQ ID NO: 259709 - DNA, 309 bp, Zea mays
accacattagatgtctcgtgagcatggatcggctatggtgattagcatgaatgtgtttaggatggtgatgatgagtcgtgagcccaacaacatgatgacaagattagtcaccgctggcacaacccctgcagccgcaatggacacattctatcacttgctcctccctcagatgcttggggactcggcagacacaagtcgttgcaaagttgtggtcacgtgtctgtatgcaccggaggcagcaaaggcgctcgtatcctggctgcaagagggcaaaatgtagcagtaagaaatgaggatgctagatctggc

SEQ ID NO: 259710 - DNA, 855 bp, Zea mays
cccacgcgtccgcccacgcgtccgctccctctccgtcccccaagcaaagaaaagaagctagctagctaggcgtagaacgaatgacgacgcagggcggcaacaggtcgacgacgacgctggtcgccgccgtggccgtagttctggccgtggcggcggcgtcgtccctggccggcgtggcgtccgcggagaaggcgggcgggttcgtggtgacggggcgcgtgtactgcgacccctgccgcgccgggttcgagacgaacgtgtccaggagcgtggccggcgcgacggtggaggtggtgtgccggcacttcggcgcgtccaaggagacgctcaaggcggaggcgacgacggacgacagcgggtggtacaagctggagatcgaccaggaccaccaggaggagatctgcgaggtggtgctggcccggagccccgacccggggtgcgcggagatcgaggagttccgcgaccgcgcccgcgtcccgctcacctccaacaacggcatcaagcagcagggcgtccgctacgccaaccccatcgccttcttccgcaaggacccgctcaaggagtgcggcgccctcctcgagaagtacgatctcaaggacgcctccgagacgccatgatcgtcctccgtcctgtgcatgcctgcatccattgctgccctgcccgctcgcccaagaattgaagatggtagctgccttccgcgttttttgtattgtgtatgtctatgcactgcattcgagggcagcgataatgggcctggcctcgtaagcaaacgttcgatccgcttcttttgatgggcctaaatctgcatgcatgcagatgtactgctacttctgctcttttatattgctttttttt

SEQ ID NO: 259711 - DNA, 1110 bp, Zea mays
ttcttttttgcacatataaggcaatgaatcgtgaatatactgttggcgagttcagaaaggtagtcgacactctgtgtgagcttgtccctggaatgcaaattgctacagatattatctgtggctttcctggtgagaccgacgaagatttctctgagactgttaacctcgtaaaggaatatcaattccctcaagtccacatttcgcaggtctaccccagaccagggacgcctgctgctaggatgaagaaagtaccaagcaacgaagtgaagaagcggagccgtgaattgacttcagtcttcgaatcgttttcgccataccaaggaatggaaggcaaagtagagaagatctggatcaccgagattgcgtctgatggtgttcacctggtcggacataccaagggatacatccaggtgctggtaactgctcctgatagcatgttgggaacgtccgcggacgcgaagatcacgtctgtcggacgatggtccgtcttcggtgtagtggtagaaggatctgttgcagtcatagaagcaccaatacaaactagtgccgaactgcaggaggaacacgtacagaatcaggtggaggaagctggctgctgtgccaccgactcctgtggcgcctgcgcgtgctccaatgaggcgcaaccgtgtggcccagaccgatgtggagatgcacttcgtgccccgcagacctgtggtggtgacgttgttacaactcgccaggaggcactccagcctacgctcgtgaggagaagcgtagatggaaccacgaaaggaagcgacagtactgcggcgcattcagcagggaaggaacagcgggtggaagtagtgactaggcgtggggtagatatcgacacggttctgtggtgcggtttgcccgcgagcttcgctgtgacggtagccctgcttgcactcctcaccagcaagattttgtcggcgacatcacactagggctaataaggcgaagctttgtaacttgtggtttggttcttgagcgtgtccctggatccattttggcggtctctttcttttcttgatccccctgtatgtcgttgcaaaaatctgtgcccctgtatacaaaaacacgtggttgcaaacaagttttctcgtt

SEQ ID NO: 259712 - DNA, 804 bp, Zea mays
cgagtttttgaacgcaagttgcgcccgaagccttctggcggagggcacgtctgcctgggcgccaccacccgcctccactcccccctcccaggtgctgcccaggtaagtcggcggcggcgatgacaacgcgcttcaagaagaaccgcaagaagcgcggccacgtgtccgccgggcacggccgcatcggcaagcacaggaagcacccgggaggtcgcggtaacgccggtggcatgcaccaccaccgtatcctcttcgacaagtaccatccgggctacttcggcaaggttggcatgcgttacttccataagctccgcaacaagttctactgccccgcggtcaacatcgagcgcctctggtcgatggtgcccgccgacaaggcggcggaggccggcggcgacaaggccccgcagatcgacgtcacgcagttcggctacttcaaggtgctcgggaagggggtgctgccgcccaagcccattgtcgtcaaggccaagctcatctccaaggtcgccgagaagaagatcaaggcagcaggcggcgccgtcgtgctcaccgcctaggtttcagtccttgttcgcctcctggttttgaaatctatatctgaactgatagtgctttcctgtctcagcaatttgtgttaagaaaacctgtagttttaaaatatgtggttcctgcctgttgggcagtgcttatgcggtttttgatgccagttcatatcaaatatttcacatcaattaaatctatcctcgctatcagttgtgctagtttcatctatacagtcgacttatggtgcgcattgtggggtct

SEQ ID NO: 259713 - DNA, 1022 bp, Zea mays
gtgggtcgacgcaagactctacagtgacgtcgtaggcaacggatatctcggctctcgcatcgatgaagaacgtagcaaaatgcgatacctggtgtgaattgcagaatcccgcgaaccatcgagtttttgaacgcaagttgcgcccgaagccttctggcggagggcacgtctgcctgggcgtcacgccaaaagacactcccaacacccccccgcggggcgagggacgtggcgtctggccccccgcgccgcacggcgaggtgggccgaagcaggggctgccggcgaaccgcgccgggcgcagcacgtggtgggcgacatcaagttgttgttctcggtgcagcgtcccggcgcgcggccggccatccggccctatggacccatcgagcgaccgagcttgccctcggaccgcgaccccaggtcagtcgggactacccgctgagtttaagcatataaataagcggaggagaagaaacttacgaggattcccctagtaacggcgagcgaaccgggagcagcccagcttgagaatcgggcggcctcgccgcccgaattgtagtctggagaggcgtcctcagcgacggaccgggcccaagttctctggaaagggacgcctgggagggtgagagccccgtccggcccggaccctgtcgcaccacgaggcgccgtcaacgagtcgggttgtttgggaatgcagcccaaatcgggcggtaaactccgtccaaggctaaatacaggcgagagaccgatagcgaacaagtaccgcgagggaaagatgaaaaggactttgaaaagagagtcaaagagtgcttgaaattgccgggagggaagcggatgggggctggcgacgcgcaccggccgtatgcggaacggctcctgctggtccgccgatcggctcggggcgtggaccgttgtcgcccgcgccggcggccaaagcccgggggccctaggcgcccccggcagccgtcgtcggcgcggacggtatccgcgcgcctctggcgcgcccctcggggcgctgcgccgcaa

SEQ ID NO: 259714 - DNA, 817 bp, Zea mays
gacccacgcgtcagcggacgcgtgggcgaggccgccgtcgcgctcaccaactgaccggaccggccggcgttccccgtcgactgtgtgcgatcgctggaccgggtggcacgctgcgatgactacctgtatggcgagtccctatacttacgcagacataagctgcgccgccgtgtcgtccggacgcgtggggccgtgggcgagtgcggcgtggacgaggaggaggagctcgggctgagcggcggcggcggcatcggcgccggcgacgcgctgcggcggacgcttgcgcagcgcaagccgaccaaccggtacatcagctacgcggcgctgcgcgcggaccaggtgccgtgcaacaagcgcggccggtcctactacaccaactgcgcggcgcagacggccgccaacccctaccgccgcggctgctccgccatcacgcgctgcgcccgcagcatgaactgagcgccaaggcggcggccggcggtctgatctgcctgctggctggctgggcagggggcacgcagctggcctggctcgatcgcacaccatgcattgacgtcgtcgcggccggccgccatgccgttggacggtggggtcggacgatgacggaggaggaggcggcggcgcgacgatagtatatacaaacaccaatgaccaccatactaccagttctattgtcgctctggcgtagcttctctataaataatatctaactccaacaagatatgtttgatcatggatcgcgatctatcatatgtatgccattcattcgttaatttgaaaaaataaaaaaagaagcgccgccgctcgcgatcggacgcgt

SEQ ID NO: 259715 - DNA, 2173 bp, Zea mays
cccacgcgtccgcccacgcgtccgcccacgcgtccggaataattttactaatcaaattcttgttgggatatattcctccaattcccctcctcctcccaacaaggcaacaacaatctgttccggccgccaaacaaaaccaaaaaaaaaacacactgaacccaataatccgatcccacagaaacttttctctcggtccgttcgatcgatcgctgccgtgtcgtttgccagacaccatcagcacccaaaaccatggcctgcaacctggctcagtgcgccaccgccgccgcggcgaccgtcgcgccccgcacccctcgccctgctgcgtccgcgtccgtctccttctccgcgaggaagccggcgggcggcagcctgcggctgcagcggcaggcgtgctgcgagccgtcggtggcgccgtcgcgggcggtgttcgcctgccgggccgcggcgtcggggagcgcggccgacctggcctccgggggcaggaggtcgtccggcgtgccggtgttcgtcatgatgccgctggacaccgtcaaggagtgcggcaccgcgctgcaccgccgcaaggcggtgcaggccagcctctccgcgctcaagagcgcgggcgtcgagggcgtcatggtggacgtgtggtggggcatcgccgagcgcgacggcccgggccggtacaacttcgcgggctacgcggagctcatggagatggcgcgcaaggccgggctcaaggtccaggccgtcatgtccttccaccagtgcggcggcaacgtcggcgactccgtcagcatcccgctgccgcggtgggccgcggaggagatggagaaggaccaggacctctgctacaccgaccagtggggccgccggaactacgagtacgtctccctgggctgcgacgcgatgcccgtgctcaagggccgcacccccatccagtgctacgccgacttcatgcgcgccttccgcgaccacttcgccaccttcatgggcaacaccatcgtggagatccaggtcggcatgggccctgccggcgagctgcgctacccgtcctacccggagagcaacggcacctggaagttcccaggcatcggcgccttccagtgcaacgacaggtacatgcgtagccgcctgaaggcggcagcggaggcggccggcaagcctgagtggggccacggtgggccgaccgacgctggcggctacaacaactggccggaggacaccgtcttcttccgcggcgacaacggtgggtggagcaccgagtacggcgacttcttcctgtcgtggtactcgcagatgctgctggagcacggcgaccgcatcctgtcgggcgccacgtccgtgttcggcgccgcgcccgtggaggtctccgtgaaggtggccggcatccactggcactacggcagccggtcccacgccccggagctcaccgcgggctactacaacacgcggcgccacgacgggtacctcaccatcgcgcgcctcctggcgcgccacggcgccgtgctcaacttcacctgcgtggagatgcgggaccacgagcagccgcaggaggcgcggtgcatgccggaggcgctggtccggcaggtgggcgccgcggcgcgcgccgccggggtgggcctcgcgggcgagaacgcgctgccgcggtacgacggcacggcgcacgaccaggtggtcaccacggccgccgagcgcgccgccgaggaccggatggtggccttcacgtacctgcgcatgggccccgacctcttccacccggacaactggcggcgcttcgccgccttcgtgcgccgcatgaacggcgccgggtcgtgccgggaggccgcggagcgggaggcgcacggcgtcgcgcaggccaccgggtcgctggtgcacgaggccgccgtcgcgctgcggagctgaccggccgggacgggacgggacggaacggaagcctacgatcgactgtacatacaggggttgggacttgggagggagctcgggttcttgttgggttttcctttgggtggagagcgagggagcgcagtcgagagccagcgagcagtctctcgtgcagtgcagtgcagtgcagtgcagtgcagctccggcgtagatgagattgtattgtgaccaagccgggagggaaagcagggaggggaggacaaagatgttttgtcacgtttcaggctccggccatcgccggagtttgtcc

SEQ ID NO: 259716 - DNA, 1104 bp, Zea mays
gggtcgagcacgcgtccgcccacgacgtccgcccacgcgtccggcgcgaccacgagcagccgcaggacgcgcagtgccgccccgaggcgctggtgcagcaggtggccgccgcggcgcgggaggccggcgtgggcctggccggcgagaacgcgctgccgcgctacgacgacacggcgcacgaccaggtggtggccactgccgccgacagggccgccgaggaccgcatggtggccttcacgtacctgcgcatggggcccgacctgttccagcccgacaactggcgccgcttcgccgcgttcgtcaagcgcatgacggagccgggcgcgcgggaggcgtgccgggagcaggtggagcgggaggccgagggcgtcgcgcacgccacccagcccctcgtgcacgaggccgccgtcgcgctcaccaactgaccggaccggccggcgttccccgtcgactgtgttcgatcgctagacggggtggcacgctgcgatgactacctgtatggcgagtccctatacttactcatacataagctgcgccgccgtgtcgtcggtgcgtgcaccgcgcagtagtgtgcgtacagcggaagctgcgactgcgagcgaggtagggtgtggggtgggtgactggggtacggtacgtaggtgccacgttggaggctttggcgtttgctcagagcctggcaggagatgggtttgatgttctgctgctgtgttactgtatcctacacctacagaatgtgctatgatttgtactgctataatttttaacgaagatacaaacttctacaaaaaaaaaaaaaaagggcggccgctcgcgatctagaactagcccacgcgtccgcgcacgcgtgggcggacgcgtgggcggactcgtgtgcggcaacggatatctcggctctcggatggatgaagaacgtagcataatgcgatacctggtgtgaattgcagaatcccgcgaaccatcgagtttttgaacgcaagttgcgcccgaagccttctggcggagggcacgtctgcctgggcgttacgccaaaagacagtgaaaaataaatttgagatttcaattacaatttagatcaaataatatagtaatataatatgtgtc

SEQ ID NO: 259717 - DNA, 796 bp, Zea mays
cctatcctagggtttactcgctcccatccactcccaagtcccaacacccgtcggcgtcgagcagcggcacggcggcggcgatgacgacgagcctgaagaagaaccggaagaagcgcgggcacgtgtcggcggggcacggccgcatcggcaagcaccggaagcacccgggaggccgcggcaacgccggcggcatgcaccaccaccgcatcctcttcgacaagtaccacccgggctacttcggcaaggtgggcatgcgctacttccacaggctccgcaacaagttccactgcccgtcggtcaacgtggagaggctctggtcgatggttcccgccggcaaggccgcggaggcggtcggcgcggaccaggccccgctcgtcgacgtgacgcagttcggctacttcaaggtgctcggcaaggggatgctgccgtccaggcccatcgtcgtcaaggccaagctcatctccaaggtcgccgagaagaagatcaaggctgccggaggcgccgtcctgctgaccgcttaggtccttttgcatcttgtttcaactatctgcgctaagaaatattctatcttttttgggtggatttatgaggccctggttttgagcacttggtaacgaatatgagttcgattatatcgatgctccacacctcttgctgcatgtattattcattctatgcagttgcagttcatgtgggctgtgctactgagatatgaaatgttttggcatttttctgataaaaaaaaaaaaaaaaaaaaaaaaaaaaacggacgcgtgggcggacgcgtgggcggacg

SEQ ID NO: 259718 - DNA, 1258 bp, Zea mays
  unsure (1)..(1258): unsure at all n locations
gtcgaagaagaccgcgcaggaggaggcgctgctctccgtggagcgtcgcatcgacgagctcgacctcccacggcacgaggtggtgcggcgcctccgcgtgctgcgcgattacgtcacgctgttcggggaggtcgacgacgcccgcctcgcgcgcttcaagctcgtgctcaagtccggcgtcatcgacgacatggacgacggcgacatgaccgagggacagaccaacgacttcctccgcgacatgatcgagatgcgcaacggcagaaggccgggagggacacctacgccaagggcaagagcaagcgtgtaggtgggggtgatggtggcgacgggggtgctgctggagacagtgcagatgatggggatgccaaggggagcggcgatgatgctgacgcagacaaggactccaagaggatgaggaccaagtttgaggagctttgcaatgaagacaagattttggtgttctttaagaagctgcttaatgagtggaaccaggaattggatgagatgactgagctagagaagcggacagcaaaggggaagtccatggttgcaacattcaagcagtgtgcacggtatctcagcccgctgtttgagttctgcagaaagaaggtacttcctgatgatatccgtcgagcgttgcttgttattgtcgagtgttgcatgaagcgagattatttagcagcaatggaccaatatatcaagttggcaatcgggaatgcaccatggcccattggagtgactatggttggcatccacgagcgttctgcccgagagaagatctacacaaacagcgtcgcccacatcatgaatgacgagaccactcgcaagtaccttcagtcaatcaagaggctcatgacgctttgccagcggcgttaccctgcactgccctcaaaatcagtggagttcaacagcctggcaaatgggagtgacctgcaggcgcttctatcggaagagaatggttcgggtaaagcttccgaggaaaggctccggttgatgccagcattgaaagagtgatgccttcgcagactagattggattacaagtagagcttgagatgcttgtgtaatatatacaatcaatcctgcctgtttttttttcttttcctgtttgtgctgaagagaaaagcaacagagttatgtatgctaattaaatcgctttaccgctacatctggtcaggcaaagtttttattaatatatctgccaattctggagaaaaaaaaaaaaaaaaaaaagggcggccgcnccgggnnttccg

SEQ ID NO: 259719 - DNA, 789 bp, Zea mays
cccacgcgtccgcccacgcgtccacacagaaaaccctagccgccgccaccgaagcggcctcccaggtaagcaggagcgtccaccccgccgccgccatgaagcgcaatccccgcgtcacgagctcccgccggaagtgccgcaaggcgcactttacggccccgtcctccgtccgccgcgttctcatgtccgccgggctgtcgacggagctccgccacaagtacaacgtgcgctccatcccgatccgcaaggacgacgaggtgcaggtcgtgcgcggcacctacaagggccgtgaggggaaggtggtgcaggtgtaccgccgccgctgggtcatccacgtcgagcggatcacccgcgagaaggtgaacggctccaccgtgaacgtgggcatccacccctccaaggtgatcgtcaccaagctgaagctcgacaaggaccgtaaggcgctcctcgaccgcaaggcccggggccgcgccgccgacaaggctaagggcaagtttactgccgacgacgtcgctgccgccgccgctggtggcgccgccaccggcgcctctctccaggagatcgactagactcttcacggtcatctgatggttgtcgtaccgccttttcctcatctctttagtttttgctaccaatggttatgtgatagaggttttatgttatttgaaaactgctctgtgcctggatgagagttttggaacataatgtgaacctgtgtgtctgtgacctgagctttgaagatctcattatgtggttaatgtctaaaaaaaaaaaaaaaagggcggccgc

SEQ ID NO: 259720 - DNA, 712 bp, Zea mays
gttcggaattgccggatggacccacgcgtccgcggtcacgtgggcggcgctatcgacggagctccgccacaagtacaatgtgcgttccatcccgatccgcaaggacgacgaggtgcaggtcgtgcgcggcacctacaagggccgtgagggcaaagtggtgcaggtgtaccgccgtcgctgggtcatccacgttgagcggatcacccgcgagaaggtgaacggctccaccgtgaacgtgggcatccacccttccaaggtcatggttacaaagctgaagcttgacaaggaccgcaaggcgctcctcgaccgcaaggcccggggccgcgccgccgacaaggctaagggcaagtttactgccgacgacgtcgccgccgctgctggtggcgccgccgccactggcgcgtctctccaggagatcgactaggcgcttcgcggggatctgatggtggtcctaccgcctattactccttatcgctctagtttttgctatcaatgattatgtgctaggagttttatgttacttataaactgctttgagcctcgatgggagttgaacttaatgtggagtgtatctgagatatgaagaactcattatatggctaatatctcttgttgtgttctgctaaaaaaaaaaaaaaaaaaaaaaaggggggcccccgcttagtgaccccgtcgccccgggatttatttccggccgggtacctgagggggt

SEQ ID NO: 259721 - DNA, 418 bp, Zea mays
gccacgcgtccgcccacgcgtccgtccacgcgtccgaccacgcgtgcgcgcaccggccgggtgcggaacagctcctgctggtgcggcgatcggctcggagcgtggaccgttgtcgcccgcgccggcggccaaagcccgggggccctagtggcccccggcagccgtcgtcggcgcggacggcatccgcgcgcctctggcgcgcccctcggggcgctgtgccgcaacggtctgcgagctccccatccgacccgtcttgaaacacggaccaaggagtgtgacgtgcgtgcgagtcgacgggttcagaaacctgagatgcgcaaggaagctgacgagcgggaggccctcacgggccgcaccgctggccgaccctgatcttctgtgaagggttcgagttggagcacgcctgtcgggacccgaa

SEQ ID NO: 259722 - DNA, 600 bp, Zea mays
cccacgcgtccggccatcttcttcgtcgacaagcaggggagttaggtctcacatgcatgcttcatcacattgttgactgcataacgaaacacatcgtcgtcggatcggagatgatgagttccgtcgtcgtggatgctgctgctaccagcagcagcgagaagaagacgtcgtggccggaggtggtgggcatgtccatcaaggaggcgacggagactattctcaaggacatgcccaacgcgtacatccaggtgctgcctgttgggtcgcccgtgacgctggaccttcgccccgaccgcgtccgtatcttcgttgacaccgtcgccatgactccgacagttgggtgatacataccaaatgcaataaacaaaccctactttttattttatgtttccagttaataataaaccaggccttagcttcttggttgtccttccttggttggtgttagcttctaagctactagtacaccattaaaaaaaggaggacctcatgtatggctaccgtgaaaaatgtgatcttgatggaataatatatcataaataagcaattaatgatgataaaaaaaaaaaaaaaaaataaatattatataatgtcacctaa

SEQ ID NO: 259723 - DNA, 709 bp, Zea mays
  unsure (1)..(709): unsure at all n locations
ctcccccctaccaggttgtctgcgggggcacagttaggggttgagacgtcttttccctccaagaagaaccgnaagaagcgcggccacgcgtccgccgggcacggccgcatttggaagcacaggaagcacccgggaggtcgtggtaacgccggtggcatgcaccaccaccgtatcctcttcgacaagtaccatacgggctacttcggcaaggttggcatgcgttacttccataagctccgcaacaagttctactgccccgcggtcgacatcgagcgcctctggtcgatggtgcccgccgacaaggcggaggaggccggcggcgacaaggacccgcagatcgacgtcacgcagttcggctacttcaaggtgctcgggaagggggtgctgccgcccaagcccatcgtcgtcaaggccaagctcatctccaaggtcgccgagaagaagatcaaggccgccggcggcgccgtcgtgctcaccgcctagttttcagtccttattcgcctcttggttttgagatctatatctggactagcagtgctttcttgtctcacctatttgtgttaagaagacgtagtttttaaatccattgctccttcctgtttggacagtgctttcatatcagatatttcaggtatattagagctaactgcgctatcaactgtgctattctcatccgttcaactgattttgtgatgcatattgcgatatc

SEQ ID NO: 259724 - DNA, 579 bp, Zea mays
aggccctgccggcgagctgcgctacccgtcctacccggagagcgacggcacctggtcgttccctggcatcggcgagttccagtgctacgacaggttcatgctgagtagcttgaaggcggctgctgaggcagtgggcaagccggagtggggcaacgcgggtccgggcgactccggcagctacaaggactggccggaggacacgggcttcttccggcgcgagggcggctggagcacggagtacggggagttcttcatgagctggtactcgcagatgctcctggagcacggcgagcgcatcctgtcggcggcgacgggcgtgttcacgggttcccccggcgtgaagatctcggtgaaggtggccgggatccactggcactacggcacccggtcccacgcggcggagctgacggcggggtactacaacacccggtcgcacgacgggtacgcgcccatcgcgcgcatgctggcgcgccacggcgccgtgctcaacttcacgtgcgtggagatgcgcgaccacgagcagccgcaggacgcgcagttgccgcccgaggcgctggtgcagcaggtggccgccgcggc

SEQ ID NO: 259725 - DNA, 995 bp, Zea mays
accacgcgtccgcccacgcgtccgcagcgaaccaagagagcagggtgtgggcgaagagaccccagccagtcgatcgttcaagaaaaataccagcttaccaacaacagcagcagcaagcccacccgttcgacgacatggcccgcctcggcgccggcgccgtgttggcgctcctagtggcggtcgcggcggtggccgcgttcctcgcggtgccggcctcggcgaagtccggggagctgagcgcgatggggttgctggcggcgaagggcggcagcggcgcgggcccgcagaagtgctcgggcgcggtgggcgagtgcgacgtggacgaggcggaggagctcgggctgagcggcggcggcctcggctccgacgacgcggtgcggcggacgctggcgcagcggaagccgaccaaccggtacatcagctacgcggcgctgcgcgcggaccaggtgccgtgcaacaagcgcggccggtcctactacagcaactgcgaggcgcagaaggccgccaacccctaccgccgcggctgctccgccatcacgcgctgcgcccgcaacatgaactgagcccagcgctagctgctgccggggcgcgccgtcgtcgccgagccggtcggtctggtctggtctggtctgcctgcctgccaggtcacgcagcctggctccaccgatcgcacaccatacattgacgtcgtcgtcgcggccgtacgtgccgttggacggtggaggaggcggtggcgctacgacagtatatatatacacaattacacatacacaccccaaaaagaaaagaaaaaaactactgccattgctgtcgttgtgcgtagcttctctctatatatatacccgtatttaaattctcgacaaaatttgtttgaccacggtgatctgtcatatatgtcgtccattgatttgtgttaatttgacataagacgttgaaaagaaaaaaaaaaagggctgccgcgagtcattttagaggcttgtatcgacccgcgagtc

SEQ ID NO: 259726 - DNA, 474 bp, Zea mays
cccacgcgtccgcccacgcgtccgcctccactcagaaaacccagccgccgccgcatcggcctcccaggtaagcagtagcgtccaccccagccgccgccatgaagcgcaacccccgcgtcacgagctcccgccggaagtgccgcaaggcgcacttcacggccccgtcctccgtccgccgcgtgctcatgtccgcggcgctatcgacggagctccgccacaagtacaatgtgcgttccatcccgatccgcaaggacgacgaggtgcaggtcgtgcgcggcacctacaagggccgtgagggcaaagtggtgcaggtgtaccgccgtcgctgggtcatccacgttgagcggatcacccgcgagaaggtgaacggctccaccgtgaacgtgggcatccacccttccaaggtcatggttacaaagctgaagcttgacaaggaccgcaaggcgctcctcgaccgcaaggcccggggccgcg

SEQ ID NO: 259727 - DNA, 1182 bp, Zea mays
cccacgcgtcctaaaatatcagcgagaaccctcgttttctttgtttgtttagcagggggcacaagagcaagctgcaagcagattacagggccacgaagctcgcccctgctctgctctctatcttattagtcctcgaattgggctttcctctgctgcggggttctggtctcgtctggggttcagacgccagatttggagcagaggacaccggtccttggtttccttgccgccttgccggctgcaatgttatggcgcttgcggggttatgtagagcctgaattctgtgatgacgggggagttcgcgtcgttgggagattttttctgtgctttctcttttcttagctgagaaatctggtgctatttggtgctcgccgacgccgagccggagggcgtaatcgttgctgtgtcctctgtagctggatttgtggtcattggtagagagaagcgttcttcctcggggaatccgtgggaagaagcggtctccggtgcaatcccacccattctagggatttcctgggagggttcggccgggatggagggcaagcgcctgtgggtggcgctggcgccgccccggggcccggcggggagtcggacgagatcgagctcagcctcggcctgtccctcggcggctgcttcggcgccgagccttcgcaggaggggaggagcgccgaccctcggctccagcgctcgtcctccgtcgcgtcgatctgctccttgcctgctgccaccaccggcaccagctgcggggcgcaggacgccggccccgccgccgcgcctccgccggacctgctccgcacctcctccctgcccgcggagtacatggaggaccggctccgccgccccgcgatgcagagccagcggcgcctcgaggccaagcgcaagcgcctcgagcgccgcatctccatgagctcgggaaggccggttccggcggccggtggccgcgacgacggcctcgagcacaccgtgcccagcggctatccagctccgccgttcggtcgccttgacgacggcggggtcgccgacgcccagccggccgcatcaaggacccgtggaccgccgtgcggcggaggcgaccggaccggacggggcggcctgccacgacgagccgctgccgctgcgcctgcgcacgctgcggtcgctgacgatgcggacggcgagcacgggcgaccttcggagcgccat

SEQ ID NO: 259728 - DNA, 545 bp, Zea mays
atacacatcattcccgttacgctgctttatttgctaagtacatacaaccgtgatgatttatatgctaagtatatacaaccgtgatgagtagcagactagccagcactccagacggatatctcggctatcgcatcgatgaagaacgtagcaaaatgcgatacctggtgtgacttgcagaatcccgcgaaccatcgagtttctgaacgcaagttgcgcccgaagccttctggcggagggcacgtctgcctgggcgtcacgcgtgctcgctgcgccctcctgcttccacccccggcagcggcaggggcaggaggagacgacggtcgccaccggcgccctgcaccggcggatgtcggatcgggagctccgccccctgcgctccatcagaatcacaggggacggtcgatgcctgttcaggtccgtcgcctacggcgcctgcctgaggagaggaaagcatgcgcccagcgacagcgcccagaaggaactggccgacgagctccgagccaaagtagctgatgagttcgtcaagcgaagaggagacaccgaat

SEQ ID NO: 259729 - DNA, 402 bp, Zea mays
cggtctggaatgcccgggtcgacccacgcgtacgcggacgcgtgtgcggcaacggatatctcggctctcgcatcgatgaagaacgtggcaaaatgcgatacctggtgtgaattgcagaatcccgcgaaccatcgagtttttgaacgcaagttgcgcccgaagccttctggcggagggcacgtctgcctgggcgtcacgccaaaagacaaaaaaaaaaaaaaaaaaaaaaaaccaaaaaaaaaaaaaaaaaaaaaaaaaaaaaaaaaaaaaataaaaaataaaaaataaatattaaatattaaaaaagggcgtcctttcgtgacttaaaattaaccgtcccaattaacgtccccgtccattaaacctacaaaatcccgtgttccctcgtcttaatcaatttaa

SEQ ID NO: 259730 - DNA, 378 bp, Zea mays
aaaataaaaacaagaaagataaaaaacataacaataaaaagaaaagcaattaaatgcaaaaattaaatacaaatactgaatcagcaataaccaaaaagaaaaatgaatgttatggtatacaatgcaaggctgtggagaaagcaatcgataagaaacccatcaaccaaagtacatcatactatcagatcacttttttgtttatatcattcatgtaaagtttcatagttaccattttacacaatcattaagaacagaaaacagaggagataaaaaaaatataagctcaaatccaaaagaagagatggtgtggcagccctatctgtgttaagaagacgtagtttttaaatccattgctccttcctgtttggacagtgcttt

SEQ ID NO: 259731 - DNA, 654 bp, Zea mays
acgcccacgcgttcgctgacacgtgggtaccccttctccacatcccccctcccatgaaccggcggtgtacttctccagcggcgatgactacgcgcttcaagaagaaccgcaagaagcgcggccacgtgttcgccgggcactgccgcatcggcaagcaccggaagcatcccggatgtcgcggtaacgccggtggcatgcaccaccaccgtatcctcttcgacaagtaccatcccggctacttcggtaaggtcggcatgcgctactttcacaagctcctgaccaagttctactgccccgcggtcaacatcgagcgcctctggtcgatggtgcccgccgacaaggcggcctaggccggcggcgacaaggccccgcagatcgacgtcacgcagttcggctacttcaaggtgctcgggaagggggtgctgccgcccaagcccattgtcgtcaaggccaagctcatctccaaggtcgccgagaagaagatcaaggcagcaggcggcgccgtcgtgctcaccgcctaggtttcagtccttgttcgcctcctggttttgaaatctatatctgacctgatagtgttttcctgtctaaacaatttgagttcagcccaacctgtagttttaaaaaaaaaaaaaaaaaagggcggccgcccgggaa

SEQ ID NO: 259732 - DNA, 462 bp, Zea mays
atttaaattctcgacaaaatttgtttgaccacggtgatctgtcatatatgtcgtccattgatttgtgttaatttgacaaaagacgttgaaaagaagctgcactactctaccgtgccgcaaaaaaaaaaaaaaaaaaaaaaaaaaaaaaaaaaaggaggaggcacaagaaaaaaaaaaaaaaataaaaaaaaaaaaaaaaaaaaaaaataaaacaaaaaaaaaaaaaaaaaatgaaacatacataacaatcccgctgacgaagtgaacctcggatgatatggagagggaccaagaacctttgttacaccgaacaatggggccgtcgcaactacgaatacgtcttgctcagctgcgactccattcccgttctcaaaggactcacgcccgtcgagtgctacaccgacttcatgcgcgcgtttcgcgaccacttcgtcgactaccttggcaacaccatcgtggaaa

SEQ ID NO: 259733 - DNA, 752 bp, Zea mays
ggaaaaaaaaagaccagactgagggctcctctcccgttccgatcgccaattggccttccaccgcctgcaaccctttcttcccttctcggtcatcgtgacggcatcacgcgcgcgctctcctcttccacgagtccgtcagcctgctaagtcttaagatggcgtcaagcaatggtcagacagaagctccagcaccatctgtccccaaaaatcctgctatggcatcatgccggaagaagaaaacagatgatgctaccttccttgaagatctgaaagaccacatggatgagttcattcacgcctccatggatgagcacaagagctgctttaagaagacaattcagaagatgtttgggatgtcgaaggctgttgcagagagatccgcggcggaagcaaacaaagctgaagttgaaagtgctttgccacttcagaccagtgtctcgcagtagaatttcatgcagtagaatttcatatgttggtagtttcttgctcgtgccaatagttttatataagggtttttgttgctgtgttttctgaaacgcataagcgtgtcagtagcatgttttcataaccggattgtagtgcttcattatctatagttttctgtacgtgtaaaatagaccagcgtaacagcgtagtttgcttcattctccgaagtattgtatggctgtacacccaggcatctgggcatcatgaacccaactgattggctaaatgaaataaatctcctccatccaacagcaaatttacaaact

SEQ ID NO: 259734 - DNA, 632 bp, Zea mays
tccggttcggaattcccggctcgacccacgcgttcgccacgcgtccggtcctcagcgacggtccgggcccaagttctctggaaagggacgcctgggagggtgagagccccgtccggcccggccctgtcgcaccacgaggcgccgtcaacgagtcgggttgtttgggaatgcacccaaatcgggcggtaaactccgtccaaggctaaatacagacgaggagacactctaaactcaaacaaatacatatattgtcggcattagctcttacccttttcacccatgatgacgaagtgccagaagcgcgcgagcatccaaggactttggctcctttccatggttcttctagcgtcgtcctctcttgtctgtgcaagcatggcggtagatgggcaaaccaaagaggacatcaacgcaacgagtgtgacgagcatgaacatgacgaggtcgtcgtcggcgagctacaacatgactggcggcggcggagaacttaacagaggtccgtgcgtcgtgagatctggattctactggtgccagaacattggctatccgaccatgtcggagtgcttgaagaactgcgaatcgtaaagcactggagtatagaaaaggaataaagtggtctctgctagctttaaaaa

SEQ ID NO: 259735 - DNA, 444 bp, Zea mays
tttaaagtcgacccacccgtccgtagggagttcacctcgctcggtgtgcagtgagcgactagattgttgactgcataacaaaacccatcgtcgtcggatcggagatgatgagttccgtcgtcgtggatgctgctgctaccagcagcagcgagaagaagacgtcgtggccggaggtggtgggcatgtccatcaaggaggcgacggagaccattctcaaggacatgcccaacgcgtacatccaggtgctgcctgttgggtcgcccgtgacgctggaccttcgccccgaccgcgtccgtatcttcgttgacaccgtcgccatgactccgacagttgggtgatacacaccaaatgcaataaacaaaccctacttttttattttatgtttccagttaataataaaccaggccttagcttcttgttgtccttccttggttggtgttagct

SEQ ID NO: 259736 - DNA, 502 bp, Zea mays
ccggtccggaattcccgggtcgacccaagccttccgcggccccttgggtttggccccccgatccctattccttgcgcgctcctctctgccgggcggcttcttcacgcgtgtctctctctccctggtgcctgctcgcgacaacctcctgctcccttccgtggtcgcgtgctcagctctactgcacgccgcgcccagcttctctccctcggcgctcacagctctctctctcccctagtccctgccatggccgccgttccctggtcggagtttcttctagctcggatctcctccctacggcgcccgagctccatggctgctgcgttcttcagccgacgcgtcctgccgagtccctctccatccccacggcgtcctgcttgcccagctttcatccatggccggagccctcccatgtcacgtcccagccaagcccctgcctcgatccctgttcggcctggcggatgcgctgctctggtgccaggtctagccgctcgtatcagctcgc

SEQ ID NO: 259737 - DNA, 476 bp, Zea mays
ggacaactggcggcgcttcgccgtcttcgtgcgccgcatgaactgcgccgggtcgtgccgggaggccgcggagcgggaggcgcacggcgtcgcgcaggccaccgggtcgctggtgcacgaggccgccgtcgcgctgcggagctgaccggccgggacgggacgggacggaacggaagcctacgatcgactgtacatacaggggttgggacttgttgggttttcctttgggtggagagcgagggagcgcagtcgagagccagcgagcagtctctcgagcagtgcagtgcagctccggcgtagatgagattgtattgtgaccaagccgggatggaaagcatcggagggaggacaaagaagttttgtcacgtttcacgctccagccattgccggagtttgtccggggaatatatcgatttccttattacaaatccggataaaatgatgtgttcctgcactgcctgattacgtaacgcact

SEQ ID NO: 259738 - DNA, 635 bp, Zea mays
  unsure (1)..(635): unsure at all n locations
gngcgacaacatgattgagaggtgcaccaaccttgactggtacaaaggaccaaccctgcttgggggtctgcgaccaccatacaccgggcgcaagaggactttggacaagctgttccgtctgcccttgcacaatgatgtcaagattatgacccttgagaaggggaacggctccaccgtgaacgtgtgcatccacccttccaaggtcatgggtacaaagctgaagcttgacaaggaccgcaaggcgctccttgacctcaaggcccggggccgcgccgtcgacaaggctaacggcaagtttactgccgacgacctcgccaccgctgttggtggcgccgccgacactggcgcgtcttttcatgacatcgactaggcgcttcgcggagatctgatggtggggctaccgcctattactccgtatcgctctagtttttgctatcaatgtttatgtgctaggagttttttgttacttataaactgctttgagcttcgatgggagttgaacttaatgtggagtgtntctgggntatgaagaactcattatatgtctaatatctcctgttctgttctgctnnntggttgcaaaaaaataaactttctaaaaannnnaaaaaaaaaaaaaaaaaaagggcggccgc

SEQ ID NO: 259739 - DNA, 707 bp, Zea mays
gtttgtgtgcgtgtctcggagaagctctccctcgcctcgcagatccgcggcctgctgtgttgctgctttgccagcaagctgccgcgctcatcctcgcgcgccgccgtcatgaagcgcaatccccgcgtcacgagctcccgccggaagtgccgcaaggcgcactttacggccccgtcctccgtccgccgcgttctcatgtccgccgggctgtcgacggagctccgccacaagtacaacgtgcgctccatcccgatccgcaaggacgacgaggtgcaggtcgtgcgcggcacctacaagggccgcgaggggacgggggtgcaggtctaccgccgccgctgggtcatccacgtccagcggatcacccgcgtgataggtgaacggctccaccgtgaacgtgggcatccacccctccaaggtgatcgtcaccaagctgaagcttgacaaggaccgtaaggagctcattgctctgaatgtcggcaagcttgccgttaagttagttaaaggcaagtttactgccgatgacgtcgctgccgccgtcgctggtggctgcttcaccttagcgggagtcaatgtgtcaactatagtcttcacggtcatctgatggttgtcgtaccgccttttcctcatctcttgagtgtttgctgccaagtgagatgcttagatgtcttattttatttgaaaactgctctgtgcctggatgagagttt

SEQ ID NO: 259740 - DNA, 435 bp, Zea mays
aatcttgaagctgcaaagcaaattgcccgtgagttgcgcttgagggatattggtggcattatcattgtggattttatcgatatgtgagatgattcgaacaaaaaactagtatatgaagaaatgaagaaagcagtagaaaaggatcgatcaacagttggtgtttcagaactatcaaagctaggtttgatggaaataactagaaaaagggtccgaccaagcgttactttcatgatcagtgagccatgtacatgctgccatggtactggtcgtgtggaagctcttgacacatcgttttcaaagatcgaacgtgaaatatgtcgacgtcttgctgcctctcgacgaaaatcagaccctgagaaaccaaaatcatggccaaggtttctgcttagagtggatcatgagatgtgcacgtatttgacgtccggaaagaagaca

SEQ ID NO: 259741 - DNA, 784 bp, Zea mays
tctcgcgtccgcccacgcgtcggcccgactccgccgcccgccgccgctccgcctcagcgcatcgcccgccgccacagcgtaccgcgacctcatcgatcaccttcagctttcaatcatggcggacgtcgatgtcgaaccggaggttgccgccggcgctcccaagaagaggacgttccgcaagtacagctaccgcggcgtcgacctagatgcgcttctcgacatgtccacggacgacctcgtccagctcttccccgcgcgcgccaggagaaggttccagaggggtctgaagaggaagcccatggcgctcatcaagaagctgcgcaaggcgaaaaaggatgctcctgctggtgagaagccagagccagtcaagacacatctccgtaacatgatcattgtccctgagatgattggaagcattgttggggtctacaacggcaagaccttcaaccaggttgagatcaagcctgagatgatcggccactaccttgctgagttctccatctcctacaagccggtcaagcacggcaggcccggtatcggtgccacccactcctcgcggtttattcctctgaaatgagctgttactcggctctttagtatcccaagagtccgttggcaatgttcattcagatttttctacttctttagtatcccaagacatttgtgttgttccattccagctcaagaattcaaagctaagcattgcacaattatgctgttttgttggaagtatttgagtttatccttaaaaaaaaaaaaaaaaaaaaaaaaagggcggccggca

SEQ ID NO: 259742 - DNA, 822 bp, Zea mays
cccacgcgtccgcggacgcgtcggcgtacgcgactccgccgccgcccgccgctccgcctcagcgcatagcccgccgcgacctcatcgatcaccttcaactttcaatcatggcggacgtcgatgtcgaaccggaggttgccgccggagctcccaagaagaggacgttccgcaagtacagctaccgcggcgtcgacctagatgcgcttctcgacatgtccacggacgacctcgtccagctcttccccgcgcgcgccaggagaaggttccagaggggtctgaagaggaagcccatggcgctcatcaagaagctgcgcaaggcgaaaaaggatgctcctgctggtgagaagcccgagccagtcaagacacatctccgtaacatgatcattgtccctgagatgattggaagcattgttggggtctacaacggcaagaccttcaaccaggttgagatcaagcctgagatgatcggccactaccttgctgagttctccatctcctacaagccggtcaagcacggcaggcccggtatcggtgccacccactcctcgcggtttattcctctgaaatgagctgttacccggctctgtagtctcccaagagtccggtggcaatgttcattcagcttttctacttgttttgaacaagttaaatgcccaagacattttgttctgttccattccagctcaagaattcaaagctaagcattgcacaattatgctgttttgttggaagtatttgagttaatcatatctaagctgagttgctacgttgaattaaaaaaaaaaaaaaaaaaaaaaaaaaaaaaaaaaaagggcggccgct

SEQ ID NO: 259743 - DNA, 595 bp, Zea mays
cagacgcgtggcttccacgctcagccatctctaaaccctacccacagccaccgccgccgccgccgctacatgacccctagtgtccggatttaacttcaaacatggcggacgtcgatgtcgagccggacgtcgccgccggtgctcccaagaagaggacgttccgcaagtacagctaccgcggcgtcgacctcgatgcgctgctcgacatgtccactgacgacctcgtccagctcttccccgcgcgcgccaggagaaggtacctttcgtgccacgacttgttggtctccatagtatttttgtttgctgagtttgttttggtaggttccagaggggtctgaagaggaagcccatggcgctcatcaagaaactgcgcaaggcggttagtttccaaccgcttagttttcattaccactttttcttaacgtgttccgatcaagataattgcgtggatctgttatgctgtcatgattaacgatgcttattagaattttcctattttttccattctagaagaattcgagaaaaccgaaatgtgtcttctcgattctcgaatgagtttaatgcatcttctctcaaatttacccatacgatatta

SEQ ID NO: 259744 - DNA, 573 bp, Zea mays
cccacgcgtccgcccacgcgtccgcccacgcgtccgtccacgcgtccgcccacgcgtcggctgagatgattggaagcattgttggggtctacaacggcaagaccttcaaccaggttgagatcaagcctgagatgatcggccactaccttgctgagttctccatctcctacaagccggtcaagcacggcaggcccggtatcggtgccacccactcctcgcggtttattcctctgaaatgagctgttactcggctctttagtatcccaagagtccgttggcaatgttcattcagatttttctacttctttagtatcccaagacatttgtgttgttccattccagctcaagaattcaaagctaagcattgcacaattatgctgttttgttggaagtatgtgagttacatcacatcttagctgagttgctacccggtccagcactttcacgctcagctccagcaatggctgcctccaccatggcgatctcctccacggcgatggccggcacccccatcaaggtgggctccttcggcgagggccgcatcaccatgcgcaagaccgtgggcaagcccaa

SEQ ID NO: 259745 - DNA, 312 bp, Zea mays
catctctaaaccctacccacagccaccgccgccgccgccgctacctgacccctagtgtccggatttaacttcaaacatggcggacgtcgatgtcgagccggaagtcgccgccggtgctcccaagaagaggacgttccgcaagtacagctaccgcggcgtcgacctcgatgcgctgcttgacatgtccaccgacgacctcgttcagctcttcccagcgcgcgccaggagaaggttccagaggggtttgaagaggaagcccatggcgctcatcaagaagctgcgcaaggcgaaaaaggatgctcctgtcggcga

SEQ ID NO: 259746 - DNA, 461 bp, Zea mays
tgttggggtctacaatgcttccaatcatctcagggacaatgatcatgttacggagatgtgtcttgactggctctggcttctcaccagcaggagcatctccgtaacatgatcattgtccctgagatgattggaagcattgttggggtctacaacggcaagacgttcaaccaggttgagatcaagcctgagatgatcggccactaccttgctgagttctcggggtcctacaagccggtcaagcacggcaggcccggtatcggtgccacccactcctcgcggtttattcctctgaaatgagctggtactcggctctttagtatcccaagacattttgtgttgttccattccagctcaagaattcaaagctaagcattgcacaattatgctgttttgttggaaggatttgagttaatcatatctaaagctgagttgtaaaaaaaaaaaaaaaaagggccggcggt

SEQ ID NO: 259747 - DNA, 669 bp, Zea mays
  unsure (1)..(669): unsure at all n locations
gtcgcgcccgaggtggtggccggcagcgagtacaccgagaaggtggacgtctggagcgccggggtcgtgctctacatgatgctctccgggaccgtgcccttctccggcgccaccgcgggggagatcttccaggccgtgctccgtgggaacctgcgcttccctccgcgcgccttcgccgccgtctcgcccgaggccaaggacctcctccgccgcatgctctgcagggacgtctggcgcangctctccgccgagcaagtcctgaggcacccatggattgtgactcgcggcgtaagtgtgcctggcggtagactggtttagatgctccgccgcatccgatgtgtacatagtggcgtcctccatccaatccaagaggagtagagaaggaccttttgcttgtgatctcttcgctatggttctggcaaatgatcgtgaatttggacactagtgctgtagttggttaccagtagcacgcagaaagaagtaatcgttaggctaagcagggatttaggagggctgcctcttcctgggtttgctctgttctgcagtaatcctgtgctcgtcttagcttgtttgcattgcaacccaaacccatgtatgtgtatagcacagccttcctatggctgaggaagagacgactagctctgttcaggagaaaatgcttccgggttc

SEQ ID NO: 259748 - DNA, 2395 bp, Zea mays
ctcatccgcaccacctccccctgtcccccgctcctgcgtcgcctcaccaccattagagcgcgcgcgccaagctcgtggtgaggttttcgagatgaaggttatcgagaagatcctggaggcggcgggggatggccggacggcgttctcgttcgagtacttccctcccaagacggaggagggggtcgagaacctgttcgagcggatggaccgcatggtggcgcacggcccctccttctgcgacatcacctggggcgccgggggatccaccgctgaccttaccctcgaaatcgccaaccgtatgcagaacatggtgtgtgtggaaaccatgatgcacctgacatgtacaaacatgccagtagagaagattgaccatgccttggaaaccatcaaatccaatgggattcaaaatgttttggccctcagaggggatcctccacatgggcaagacaaatttgtgcaagttgaaggcggatttgcttgtgctcttgatttggtgcagcatattagagccaagtacggtgattattttggcataactgtagctggttatccagaggcacaccctgatgcgatacaaggcgagggaggtgctacattggaagcatatagcaatgatcttgcgtacttgaagagaaaggttgatgctggtgctgaccttattgttacacaacttttctatgataccgacatctttctcaagtttgtgaatgactgccgccaaattggtattacttgtcccattgttcctggcataatgccaataaataactacaaaggtttcctgcgcatgactgggttctgcaaaactaagataccttctgagatcactgctgcactagatcctatcaaagacaatgaggaggctgttagacaatatggaatccaccttggaactgagatgtgcaagaaaattcttgctactggcattaagactttgcacctttacacactaaacatggacaagtctgctataggaattttgatgaatcttggattaattgaggagtccaaggtttcaaggccattaccttggaggccagcgactaatgttttccgtgttaaagaggatgttcgacctatattctgggccaacagaccaaagagctatcttaaaaggacattaggttgggatcagtatccccatggacggtggggtgattctcggaacccatcatatggagcacttactgaccaccagttcacaagaccacgaggccgtggtaagaagctccaagaggaatgggctgttccactgaaatctgtggaggacattagtgagcgcttcacaaacttctgtcaagggaaactcacaagcagcccatggtcagaattggacggtcttcaaccagagacaaagattatcgatgaccagttggtgaatattaaccagaagggtttccttacaattaacagccaacctgctgtaaatggagagaaatccgactcgcctactgttggttggggtggtcctggaggctacgtttatcagaaggcctacctcgaattcttctgcgcaaaggagaagttggaccaactaattgagaagatcaaagcattcccttctctcacttacattgctgtgaacaaggatggagaaacattctccaatatttcaccgaacgccgtgaatgctgtcacgtggggtgttttccctggcaaggagattatccagcctacggttgtggatcatgcaagttttatggtttggaaggacgaagcatttgaaatctggactcgggggtggggttgcatgttccctgagggtgattcatcgagggagctactagagaaggttcagaagacctactacctggtcagcctcgttgacaacgactacgtccagggggacctgtttgctgccttcaagatctgattatgctctcatggtctgtattgttgtatggttggacccaacaatattcttgcatccccgactacaggtctgatcgccatgaaagcttctgttcatttgagctcgggggagtccgctagtcttatttttcttgatttctcttggctttctggaaccatacgaatcaataagaaatgagctgtgttcactttccagttcctccgtgcaagtggcgcaacggccaggttctagatgtaaaattcgtcctctaatacagaggttggtattgtatgttagtgtaggatgcgctgctcgcattgcactgttattgtgcttctgtttggtggaaataaagattggtcgaaatctgagggccagattgaaagccaaaaatataaacataatggaagaagacacaatatctcgagtataacgatacaaaatacaagataattcagttccggtaaacagctatgcctccattgaacctaaataagtcttgatgggggggcgccctctttaaagaccccaggttacctgccc

SEQ ID NO: 259749 - DNA, 300 bp, Zea mays
tagtgagcgcttcacaaacttctgtcaagggaaactcacaagcagcccatggtcagaattggacggtcatcgataatctttgtctctggttgaagaccagttggtgaatattaaccagaagggtttccttacaattaacagccaacctgctgtaaatggagagaaatccgactcgcctactgttggttggggtggtcctggaggctacgtttatcagaaggcctacctcgaattcttctgcgcaaaggagaagttggaccaactaattgagaagatcatagcattcgcttctctcactta

SEQ ID NO: 259750 - DNA, 1503 bp, Zea mays
gtttcagaagaaagaagatgattatgaacatgctcttgcgcagataggtgatctgaagatgtccgcgaagactatggaagagtgttatagtgtaatgcttgatgaggcaaaacacgacataactggcctacgggaaactgtggagaagctagaagctgaagtgagcaagtgcagagaagaatgtgaatctaaggagcttgaccttatcacggctagcaagcagtctgaacaagaaattgctgctcttaaagaagaagcccagcatttatctgcatcactgcaagttgcagagcacgagcttgaagcagtcaagacgcgtggggaaaggtttcaggagaaactggcgtgcacagaatcagcagttgctgaagccaaccacgctgtgcaggaggcaaaggccgagaaggagaggcttcaagagaagcttgcacacacggaatcagaggttgctgtggccaacatggctgcacatgaatctaagattgagttcgacaggcttcaagagaaactgacatacacagagtcggcggttgctgaagccaacaaggctgtgcaagaggcaaaggctgagagttcgcagctgaaggagcggttacttgacaaagagaatgcattgcagagcataacccaggagaatgatgagttcaggatgcgagaagctgacgccatgaagaaaatagaggagctatctgccctgcttgccgaagccatgacaaagaagcatcccgaggaggaagagaagctggtggttgttgatgaggcacacaattctggacgtgaagctatccgttctgtggcagaaaatgaagatacagaagaaactgaccataagaaaccaaagcttgaagctgatgcagtcgatacgaactccaacggagaaccgaagcacgacgagaaagacgacagcaaggtggaagaagaggagctgaagactgagctcagcctacaggagagcgacagagctagctctgagaaggaagcacagtccgaaaacaggagacaagaaacagaaccatccaacgacgagttagacccgaagaaggacagcagcaccgagagcgccaacggaacggccgtgccagaggatacggcgacgacgacgactaaagcggcaacgtctcctacgaaaccccagcagccgcagcagaaaaagaacaagcctctgctgaagaagtttgggagcttactgaaaaagaaaaacagcaagtagccgaacggtgggctgtactactactagtgttgttttgattttcttctttcctctccctttttctttttttctttttggggtctgtttgacgaggtgttgtgcttgctattcgtcgtctaccgccaatgcctgtatttgtgggtgattggaaaagtttgtgggtgtcgtgaatttttaacttggggacctatatggtgttggctgctgctgtctacacgtttgtggcagatcctcccatgtgtgtaaatggagttactcttcctgatcagaatgcatggctattcgtttctggg

SEQ ID NO: 259751 - DNA, 826 bp, Zea mays
gtgtccctctgtcgtcgtcgtcatcagtgaaccaggcgaggcgacgatcggacccgggtcgtaagcggtaagcccaccggctcaacagcaggctgcagatccccccaccccccacgcaactccatctcctctccgcctccacctgcacccatcgagcaccgaacggcggcggcatggaggctggcggcgaggagttcgcgatcggcgtggtgatctccgcgaagaccaccctgggggaggagttcgagggccagatcgtcgccttcgaccgcccctccaacctcctcgttatccaggagggcgtgggtagggcggagaggggggagcggaggaacgtgagggtcctcaaagcgaactacatccgggagttctcggtggtcagtaagggtgacgaccctctcgatcctgccagctgcatgctggacctcaactccatttatgcccgggaggatgctgcactcaggcaagcagagattgaagctgagagaattggtgttggtgtcaccccagaagctcaaagtatatttgatgcgctgtccaagacgcttccggttcagtgggacaagactgacattgtcgtaatgaaggaggttcgtgtacgcagtccgtacctgcctgaaaatgttaatggaggaacagctgcagcaaatgaacgcgttaagaaagtgattgactttgaaaggaaaagattacattcacgtgtacctggccaattctcttgattaaaaggcttgactattttttacattagcctcgtgttgtatttctaatactgcatccagttttcttattctcatcgatgcggttttctataaaatgtttcagc

SEQ ID NO: 259752 - DNA, 682 bp, Zea mays
cttccccatcgcacaagtccagaactgcaatctgcaatcacccacttccagaactgcaatcaagtccagaacgccaacttcagagcatccaatgccgatcgccttaacacgcgacggctctcctagtcgtcctcatcagtgcgctggtcggctggtgaactgggccatctcgtctcgtgacgatcagccccgggccgtaagcccaccggatcaacagcaggccgcagattcccctgtttccagaactccgtcgaatcctccccctcctccacgcagacgcagctccctctcctctcagcccccacccatcgagccgctagcgccggcgcccggcgcggtatggaggctggtggcgaggagttcgcgatcggcgtggtgctctccgcgaagaccaccctgggggaggagttcgagggccagatcgtcgccttcgatcgacccttcaacctcctcgttatccaggagggcgtggggagggcggagagcggagagcggcggaacgtgagggtgctgaaggcgaactacatccgggagttctctgtgctcagcaagggagacgaccctctcgatcctgccggttgcatgctggaccttaactccatttatgcccgggaggatgctgcactcaggcaagcagagattgaagctgagaaaattggtgttggtgtcaccccataagctc

SEQ ID NO: 259753 - DNA, 407 bp, Zea mays
tcgttcacgcgtccgggacaagactgacattgatgctatgaaggaggttcgtgatcgcagcccgtacctgcctgaaaatgttagtggaggaacagctgcagcaaacgaacgcgttaagaaagtgattgactttgaaaggaaaagattacattcacgtgcacctggccaattctcttaacctaaaagtattgatttttttttacattagcatgtgtttctgatactgcggcccgttttattattctcatcggtggggttttccataaaatatttcagcaaaaatgtggtaataatcacatcaactagcttgtttatgaactgtttgatagatgacttgttgtaattgaattgattataagccctctgtatttaggactgttagattgataataatctcctcttttttg

SEQ ID NO: 259754 - DNA, 1546 bp, Zea mays
ctctcggtctgtccctttggagcgaaggcgaaccgcgtcgcgaacccaggatcccatcgagggcaggcgggcagatcccggcgtccgacggcgatgggcgaggaggacgcgagcgccgggggagatccgcagcggctgaagcggatcgccgctgcggcgtacgactacgagaacgatgcgcggtgggccgggtactggtccaacgtcctcgtgccgccccacctcgcctcccgccccgacgtcgtcgaccacttcaagcgcaagttctaccagcgatacatcgatcctggtttggttgttgaaccgatgtcctccatgacttcaactcagtctagcagaccagcagcgaagtcttcagctacaccatctagtgagaatgtcagagctcgggactcaggctctagcacgagatcaactgggacctcccaacatccaccagcagagaggactgcaaattcattacagctagacggacggacaataaacttttctatcaatgcctgggtactggttgtagctagtctcggaatactcccagttctacccaaccatatcttgagtaaagcataccgtctttcattgctaggaacaatatgctcgtctgcatattctttatatggcacttatgggaaaccaagagcatggaatatgcctgcaattcagtcctggttgcagtctattattgtagctaaggactttgttcacttgatgttctctcttatgatgttcacatctaatgtgcactttaagattgctctacttcctgtgctttgctgggcgcttgatcatgttgctcgattcctaaggcgtaattttacacactcttctttatacaggaagtacttagaggacccttgcctatgggtagagacaaacaacactacactcagcctactttgttcgaatgctgaaatcaccctggggtttctcatgatcatctcgcttttctcgtcgagacgcaatataatccagacatttatgtactttcatcttttgaagttgatgtaccattctcctgtgacatctggttaccaccagagcgtgtgggcaagaataggccgggctgtaaacccgtacatttaccgctatgcgccattcctgaacacacctatttcggcagtccagagatggtggctgaggtaggaaagcatggaccgcagcacagtgaaaatatgcctaaacagctactctgatctcagcgcctcgatcttttagaaggcgtgcttgcacggcgtgttcttttcttgtaaaggttgtattctcagttcatgtcttactgagctactgaaggcataacactagagaatttcttacgatgagcagtagcgcttgagcaaactgtcgatttgatgggatacagttacaggcataaagtgattgcacagaattttcataaggatgcttgctgcagtcaataggatggaacatgcgagtggcactattgattcttgaagtaataaaagatgttcttgtcttaaaaaaaaaaacaaaaaaaaaaaaaaaaaacccaaaaaaaaaaaaaccaacaaaaaaaaaaaaaaaaaaa

SEQ ID NO: 259755 - DNA, 1055 bp, Zea mays
ctcctctagtgaaactcttgaaaaggcagaaaaatactacaaattcgagggtggttaatagcgttatcaagagagcagctgatgcaattaccaatcttgcacatgagaatagcaacattaaaactagcgtcagaatggaaggtggaatcccaccacttgttcaattgctagaatcacaggatcttaaggtgcaaagagcagctgctggggccttgcgtactttagcctttaaaaatgatgaaaataaaactcagattgtgcaatgcaatgctttgccaactttgatcttaatgctgcgatctgaagatgctgcaattcactatgaagcagtctggtgtcattggaaatttggttcattcatcaccaaagatcaagagggaggttcttaatgcaggggcactgcaacctgtgattggattattaagctcatgttgtacagaaagccaaagagaggctgctttgttgctagggcaatttgcttcggccgactcggattgcaaggtccatattgtgcaaaggggtgcagtctgtccactaattgaaatgctacagtcggctgatgtccaactccgggagatgtctgcttttgcacttggctggcttgcccgggacacacattaccaagcaggtattgcatataatggtggcttggtgcctttgttaaaacttcttgactcaaaaaatggatctctgcaacataatgctgcatttgccctttatggagttgcagataatgaggactatgtatctgacttcattaaagtaggaggtgtccaaaagttacaagatggagaatttattgtccaggcaacaaaggactgtgtggcaaaaacattgaagaggttagaggagaagataaatggacgagtgttgaaacacttgctttatttgatgcgagtaggagagaaatctgtgcaaaggcgtgttgctctagctcttgcacacctttgtgccccctgagaatcaaagttcagtttttatggatattatgggctcgaactggctcttgatcctcttaatttcatgaggtcaaacatcaacagatgctcacagca

SEQ ID NO: 259756 - DNA, 1124 bp, Zea mays
ctcgcgggtcgatacaagactctaaagtgacgtcatatgacatcaatagtccctaccattcggcgaacgtacaaatcaaagtgcggcgtgcccgctcgcaaactttgagtacgtactgctactccggctcgtcctcctctcttctccatcgccgttggttctctcacgccacacggtcatccgatccctgtccaccgcgttgggagcggcgcagcccatggacgacaacgagagagagaaagagaatgagaatgagaaggagaagcactacgggactgacgtcgaggatgaagaagaggacgaggaaggtaacaagcgagtcgtggtgcttggcccccaggtccccctcaaggagcagctcgagctcgacaaggatgatgagagcctgaggaggtggaaggagcaactccttgggcaggtcgacacagagcagctgggagaaactgcggaaccagaggtcaaggtgctggacctgaccatcctgtcacctggcagaccggacctgatccttccgatcccgttccaggctgacgagaagggctatgcgtttgccctcaaggacggcagcccctacagcttccgcttctccttcatcgtctccaacaacatcgtgtcaggcctcaagtacaccaacactgtctggaaaactggagtcaaagtggagacccagaagatgatgctggggacgttcagcccccagctagagccctatgtctacgagggcgaagaagagaccacccctgctggcatttttgcgagaggttcttattctgccaaactaaagtttgttgatgatgatggcaagtgcttcctggagatgagttactactttgagattagaaaggagtggccaggaactcaatgatgtgtggaccagcatggctgactcgtcggagtatgttagagctcatagctaagccaagcacaagatgtggactcatcttcaagaatgattttcattcgctacttcatctttaatcgcattttaatttgttttgaattgtcattgtacgtcgtttatgacataaaactgtttattcatcacatatataattcatgtatcgagatataaaaaagaaaaaaaaaaaagagagaaagaaaaaaaaaagggcggccctctaaag

SEQ ID NO: 259757 - DNA, 476 bp, Zea mays
cttcaacaacatcgtgtccggcctcaagtacaccaacactgtctggaagactggcgtgaaaggggagacccagaagatgatgctgggaacgttcagcccccagctagagccctatatctacgagggcgaagaagagacgacacctgctggcatttttgctagaggctcctattccgctaaactaaagtttgttgatgacgatggcaagtgcttcttggagatgagctactactttgagattaggaaggagtggccaggaggccaatggatgtggccggaccagcagggcagagctgactcgtcggagtacgctgttgttagagctcatagcaaaaagccaagcagaaaatatgtgctatcgcttcaagaatgtttcactactttcttcgtcattatcgattgtgttttgatttgtttcgagctgtcattaattgtatgttgtttgtcgcataaggctgcttattcgcatatataat

SEQ ID NO: 259758 - DNA, 1774 bp, Zea mays
gccgaaatccaacgagaagtattttaactcaaaaaatttcgtgtttcttcttgtgtgaactcttacatgatctacgtaagtcttcaataaatcttctactgtactactttaagatgaatttcttgatcaccacgatgtcttcatccaaatccacgttgcaccgtctaaactatattcttaaacactagcaaactttttttctgcgagtataaatagttacattgatcatcaaacaacaaaacaattgaaatctatatgtaatgattagggcattaaacaaccaaagagcacaaaacatagacactgcagttctgaagcatggaacaatccatagaagaccggaccatgctcccaaaccatccggctacaaaacttggtacagcaaggttacaaacaaaagtatcacagtttgatgattttgagaaatgggactttcgctgcaccgcagcaccttacgccttgagcttaccaaagaacctctgcttctcatcggtagtctggaagcgaccgtgcccaaatttggacgatgtgtcgatgaacttgagcttgatctcctccagcgccagccgggaagtctgcttcaggagggactggcggagggtcaccaccctcttctttggacccacacagcatcccttgatcatcaggtagtcacccttcacgataccataatgggggaagccacccatgggagtgatgtccttctcagtcctgtcaaactctgtggaggcatcgtgggtctcttgtccagccttgccgatcttgtaaaccttcttgttcatctcagtgcggtggtggtacccattctgaccagcacgggcaaccgtataggagaccctagccggatgccatgcaccgatacaagcaactttgcggagacccctgtgggtcttgcggggaagccgggtgacaccccaacgagtgaccacaccctcataacctttccctttggtcacaccaatgatgtcaatcatctcatccttctggaagacagcatcaacagggacctctttctcaaagaaatttgtagccatagtccaccttgtcagcaatggtaccaccattgacctgaatctccatcaggtgagccttcttctgcttcaaacccttcatcttcctaatctgggtatgagcaatgacacggataacagaagcatatttcttcatcttctcaagctgcagctgaatttccttcttgccagcatcattttcatatttgagagcatactttgtgaaagccttcttcttgctcttgcaccagttcttgtagaaccttctcctcacttcttcgctaagatgttgggcccaaacagagttgagtgtgcggaggccacgaggagtcttcacatatgccacgagcccaacaatgacaagaggaggggtttcaatgatggtaacagcctcacaagtttccttcttatggagtttggatcctggcttctcaacctcacggacaatgtgagtcatgccagccttgtagccaaggaaggcagtgagatggcaaggcttcttggggtcatccctagggaatgacttcaccttgccgcggtgacgggaggagcgcttcctgggaaggaagccgagggagccgtgcctcgggtgctcgaacttacggtgcgacatcctgccctcctcctcttccttacctgtagggggtggcggcgcggaagtgaggggccacaatgcgcgtaaaccctagcggatataaagggctctcgggtgcgagagtttcgatcccgccggaccgaaatgccccgaaccgaaatgacctgtg

SEQ ID NO: 259759 - DNA, 647 bp, Zea mays
  unsure (1)..(647): unsure at all n locations
cgttggactcacgctctcgcccccttgccctcccacgcgtgtggaannnnaagcttgaaatcatggtgtcgttgtttgagagcgtactctggaaaanccttcttcttgctcttgcacagtatcttgtagaaccgtctcctcacttcttcgctaagatgttgggcccaaacagagttgagtgtgcggaggccacgaggagtcttcacatatgccacgagcccaacaatgacaagaggaggggtttcaatgatggtaacagcctcacaagtttccttcttatggagtttggatcctggcttctcaacctcacggacaatgtgagtcatgccagccttgtagccaaggaaggcagtgagatggcaaggcttcttggggtcatccctagggaatgacttcaccttgccgcggtgacgggaggagcgcttcctgggaaggaagccgagggagccgtgcctcgggtgctcgaacttacggtgcgacatcctgccctcctcctcttccttacctgcaggagatcacaacaagcccatcagatccgccgcgagctcaacatgggcggctcgccgcgcggcgacgaaatggccgccgacggcgagcaaggcgagtcgaggtgggaggaggagatgacgccggcggcggatatagtt

SEQ ID NO: 259760 - DNA, 874 bp, Zea mays
tctttttttttttttttgtttcttttttttattctcaagggctagcaagcaaacaattaatataaatagttatgttgatcatcaaacaccaaaacacttgcagtgattagggcattaaaacaaccaaaatagcacaaaacatagtcactgcagttctgaagcgtagaacaatccattgaagaccggaacatgctcccaaatcatcctgctacaaaacttggtacagcaaggtaacaaacaaaggtttcacagtttgatgattttgacaaatgggactttcgctgcaccgcagcaccttacgccttgagcttaccaaagaacctctgcttctcatcggtagtctggaagcgaccgtgcccaaatttggacgatgtgtcaatgaacttgagcttgatctcctccagcgccagccgggaagtctgcttcaggagggactggcggagggtcaccaccctcttctttggacccacacagcatcccttgatcatcaggtagtcacccttcacgataccatagtgggggaagccacccatgggagtgatgtccttctcggtcctgtcaaactctgtggaggcatcgtgggtctcttgtccagccttgccgatcatgtaaactttcttgttcatctcggtgcggtggtggtacccgttctgaccagcacgggcatctgtataggagaccctagcaggatgccatgcaccgatacaagcaaccttggggagacccctgtgggttttgccgggaaggcgggtggcacccccaagagtgaccacgccctcaaaacctttgcctttgggcacccccattatgtccatccttttaccctataaaaaagcggcccctccacaaaaacctcccccccaaaaatttggaa

SEQ ID NO: 259761 - DNA, 500 bp, Zea mays
cgggcggccgtcgaccttttttttttttttttttagtataaatagttatattgatcatcaaacaccaaaacaattagaatctatatgcaatgattggggcattaaacaaccaaaatagcacaaaacatagacagtgcagttctgaagcatggaacaatccatagacgactggaccatggctacaaaacttggtacagcaaggttacaaacaaaagtatcacagtttgatgattttgagaaatgggacttcgctgcaccgcagcaccttacgccttgagcttgccaaagaacctctgcttctcatcggtagtctggaagcgaccgtgcccaaatttggacgatgtgtcgatgaacttgagcttgatctcctccagcgccagccgggaagtctgcttcaggagggactggcggagggtcaccaccctcttctttggacccacacagcagcccttgatcatcaggtagtcacccctctcgataccataatgggggaagcaacc

SEQ ID NO: 259762 - DNA, 615 bp, Zea mays
aactcaaaaaatttcgtgtttcttcttgtgtgaactcttacatgatctacgtaagtcttcaataaatcttctactgtactactttaagatgaatttcttgatcaccacgatgtcttcatccaaatccacgttgcaccgtctattctttttttttaaacactagcaaacataattaatataaatagttacgttgatgatcaaacaccaaaacacttgcaatgtcgctgcagttctgaagcgtagaacaatccacagaagaccagaacatgctcccaaatcatcctgctacaaaacttggtacagcaaggtaacaaacaaaagtttcacagtttgatgattttgacaaatgggacttgtcgctgcaccgcagcaccttacgccttgagcttaccaaagaacctctgcttctcatcggtagtctggaagcgaccatgcccaaatttggacgatgtgtcgatgaacttgagcttgatctcctccagcgccagccgggaagtctgcttcaggagggactggcggagggtcaccaccctcttctttggacccacacagcatcccttgatcatcaggtagtcacccttcacgataccatagtgggggaagccacccatggga

SEQ ID NO: 259763 - DNA, 481 bp, Zea mays
ggcaagtgctagcgcatgtaaagtgacgcaactagcaagctgacaaatcaactcaggcctatgatgcttgaatcacaaagactttcgagttcattagaagtaatataacttcagccgcccgcaatagaatcaactcagactagcaaatcaaacatgttcttatgatatctccaacaaagctgaatctgaaaaacaaaaaactatctggtaatacatttccatttcgcttgacaccatcagcaactcaggccttgagcttgccaaagaacctctgcttctcgtctgtggtctggaagcgcccatgtccaaacttggacgaggtgtcgatgaacttgagcttgatctcctccagggccaaccgagacgtctgcttcagcagagactggcggagagtcaccacccttttcttggggccgacgcagcaacccttgatcatcaggtagtcgcccttgatgataccgtagtgggggaaaccacccat

SEQ ID NO: 259764 - DNA, 426 bp, Zea mays
attaagatgttgggcccaaaccaaagttgagtgtatggaggcctctagaaagtcttagattgtgaaacgagggcaagaatgacactacccccggtttcaatgatggtaacagcctcgcaagtttccttcatatggagtttggatcctggcttctcaacctcacggacaatgtgagtcatgccagccttgtagccaaggaaggcagtgagatggcaaggcttcttggggtcatccctggggaatgacttcaccttgccgcggtggcgggaggagcgcttcctgggaaggaagccgagggagccgtgcctcgggtgctcgcccttacggtgcgacatcctgccctcctcctcttccttacctgaagggggtggcggcgcggaagccacggtcgcggacgcgtgggcggacgcggggcggacgcgtggg

SEQ ID NO: 259765 - DNA, 543 bp, Zea mays
ctgcacgtaccgtccgtattcccgtgcggccgccctttttttttttttttttttaatataaatagttacgttgattatctaacaccaaaacacttgcaatgtcggtgcaggtctgaagcgtagaacggggcacagatgaccagaccatgctcccaaaccatccggctacaaaacttagtacagcaaggttacaaacaaaagtatcacagtttgatgattttgagaaatgggacttgtcgctgcaccgcagcaccttacgccttgagcttgccaaagaacctctgcttctcatcggtagtctggaagcgaccgtgcagcaccttacgccttgagcttgccaaagaacctctgcttctcatcggtagtctggaagcgaccgtgcccaaatttggatgatgtgtcgatgaacttgagcttgatctcctcctgcgccagccgggaagtctgcttcaggagggactggcggaggtcaccaccctcttctttggacccacacagcagcccttgatcatcaggtagtcacccttcacgataccataatgg

SEQ ID NO: 259766 - DNA, 371 bp, Zea mays
cggccgcccttttttttttttttttttgaggatttttttttccatgctatttgcatggatcggggctttaaacaaccaagggagcacaaaacatagacactgcagttctgaagcatggaacgatccatagaagaccggaccatgctcccaaaccatccggctacaaaacttggtacagcaaggttacaaacaaaagtatcacagtttgatgattttgagaaatgggacttgtcgctgcaccgcagcaccttacgccttgagcttgccaaagaacctctgcttctcatcggtagtctggaagcgaccgtgcccaaatttggacgatgtgtcgatgaacttgagcttgatctccttcagcgccagccgggaag

SEQ ID NO: 259767 - DNA, 1748 bp, Zea mays
taaaataataagaaaaataattaaaaaaaaaatataaattatataaaagaataaaaaaataaacaatataaaaggtgataaaggaaaccgttcgattgtttcggcggcgttatacaaagcaaaccacagtaatgcgttttcgcagaacttgtcacaacaacatagaaagatctaaagataggccaatgatatgaaaggactaaaatattatagtgctcagacaaagaaggtaaaattccatgtcagaccaaggcgcaggggaccggatcaaatgctgtgccacatgttatccattgcctttttcgactccatggtagcatgcaatcaggaaccttctgccactcccttttcaaaaggttgtatgtaacaaggcggttcatatgcttcgccttcaaggagagcatgagcaaaccactgttgcccaggcatttcatcttcatgtgcttaccgtagaactctaagcaccagagatttggcattctgtccacctccttccagaggagagtcatcttctgcaactcccatatgcagatgcaggtcgctgcatttttgcacagcagacccaccagcataacccttccctggaactcggcaagtgtgtgatcagtcagatgcagtggcagtgggatggcaaattgcctccaaatcccggtgcttacatcatatgacaaaacaccatctggttctgcgcacatgaagtatatcatgctgccaaccgccactggttgtgacctcaaatttagagcaagtggaagtttgatgcttggaggaaaagttccagggcaagaccacacgttctttgtagagtcatagacttcgcaagtcccatcaatatctaaccacattactttgtagccatcactagaacttcttccattcaacaccatccctacaacgactcttgaccaaccatggactgatcttggtgggatctccttcagtgattgcgtaagagggttgcagatgtaaaaattcctgtggctcagatccaataaacatacaaggccacccacggatgccactggaataactatcttcgtatgattgagaggaacagattggtggtgccatttcttcagcaaaggatcatacatcgcaacattgttgtttgaattctcatgagtgattgtatagaaccatggcagtccatgtggagcttcagagtactgacgagagaaactgtctgagcccaaaagggaagaccaccttcggcagacagtgcggaatcgaaaaattgcagcaacaggaagccttgctatgacagtttcgaaaagatcttcagggaaatctctccatatctcttgttccatgacttcaattttgtttgaggagggtgccttttcacggtttcgatctctccgcggtcgcttgcaagggggagattggttagtttccatgatcttcagtaattccgagttgtatcctgagcttcccccacaataatcatccttgattgaaccatgttcgaagtcaggtaaataccacctggggacggggttgccgttggcgccgtagaggtcccagagctcctggacctggccgacgagctggcgcagcgcggccacctcccccatcgccaggccgccggcgccgcaagcgcgcgcgcgccgccggcctcctcaccgcgcccctccactgcctctgtcgctcgccccctcctctacctcgtcttccgggtcggggtcgggccttccggtcgcaccctccctttccgcttcaataaatggacagcagcgaagcaggtgacg

SEQ ID NO: 259768 - DNA, 438 bp, Zea mays
aattaaaaacattattttcatggtaataacaagcaccactgcatctccatgcaccagagtccaaacattaacatcccggtatttattgtataatgaactcagctctgggcaggtaactgcacgttcagaaagattacaagcttaacagaacagcaggtgataaaggaaaccgttcgattgtttcggcggcgttatacaaagcaaaccacagtaatgcgttttcgcagaacttgtcacaacaacatagaaagatctaaagataggccaatgatatgaaaggactaaaatattatagtgctcagacaaagaaggtaaaattccatgtcagaccaaggcgcaggggaccggatcaaatgctgtgccacatgttatccattgcctttttcgactccatggtagcatgcaatcaggaaccttctgccactcccttttcaaaag

SEQ ID NO: 259769 - DNA, 575 bp, Zea mays
aaaacgtcaacatcccggtctttattgtataataaactcggttctggacaggaaactgcaagttcagaaagattacaagttgacggtacataccaaaaccaagaccaaatacagacacctggcgttccgttttttacttcaatgaaacatattcaggtcgacttgcccaattgatgtagcagtgacccaagtaccagcaggtgatcaaaggaaacggttcaaatgcgtcagcgtgatagaaaacaaaccacagtgaacgcggttttgcagagctcatcataacattagaaagatctaaaaatataggccaatgatacgaattcactatagtattatggtactcgggcaaagaaggtaaattccatgtcaggccaaggcgcagcgcaccggatcaaatgctgtgccacacgctatccattgcttttgccggtctgtatggtagcacgcattcaggagccttttgccactcccttttcccaaggttgtatgcccagagccggttcttgcgcttcgccgtcaaggagagcatgagctaaccactgttgcgcaggccggacgcgtgcggtcgattcggg

SEQ ID NO: 259770 - DNA, 448 bp, Zea mays
tgctgatccgaagagctagcgcgcgatggccaacaacctcctccgtccgctcgcgctcctcctggccgtcctcggctgcgcgctgtgtccccgcgccgatgccaccgcgttcgaggtcggcggcgacgacgggtgggtcgtgccgccggccagcgacggcggcaggtacaaccagtgggcatccaagaaccgcttcctcgtcggcgacgtcgtccacttcaagtacagcgaggactcggtgctggtggtgacggaggccgactacgacagctgccgcgcgtcgcaccccgtcttcttctccaacaacggagacacggaggtgacgctggaccgcccgggccccgtctacttcatcagcggcgagaccggccactgcgagcgcggccagcggatggtcgtcagggtcgccggccagggcgcacccccgacggcgccttccagcccggcg

SEQ ID NO: 259771 - DNA, 1032 bp, Zea mays
gtcgcagcgagctagcactgtgtcggatatgcggacagaaaacatgtcgcgatgtgatgcagacattacctgctctggtctcaatgagaaaccttgcattggctgacgaaggcagtcaagaatgcatgcatttgtgggaggtgctggagtgctcaatgtgcgatccacgtgtgggtatcaggcctggacctcctgttgtatgtgcatcattctgtgatatggtcttcaaagcttgttcagagtcgtacttctccatagatacgaaaacacaggccttgtctccttgtggtttagatgacatcctttgtggcaaaacacataaatgggtctctaacggcacggagttgtgccgtcttgctggtttctctgttcaaatttctgagaccagctctggtggagttggtcacactttctgctatggtgggaaagcaagtttggattccatctctgattcatggacttcttcaaaagaccgtccaacattaagtggtgtggcttcatgggacgttcaagattttcagagatgggcacgagaaatgcctatcggtgaaagagtttcgtgggcgattggaggaatggttctcacagctggccttatttttatcagcaaaagaaagagctacagccatcaccagaagcaagctgctattgctcgcaatatgagattgagaaggctggattctagagccaacccacaacaaacaaagcggagctaggaaggcataggcaacttagtgttactcatagaggattcttggacttgtgcttctacttttgtggatcggtataatcaacaactgtgaacaatagattgtactgtgtgtgagtccatcttgttgcttagatgcaccagctacgacctccgtgtcatccttgtgtggaagaagagttctataagttgtcactgagtattcctggaatgcagaacttatgggctgtgacgagatcatgtacatattatttggaaatgacttttttgatgcaaaacaaaattgtctaaaggtacatacgctgggcttgtcaaaacaaaaa

SEQ ID NO: 259772 - DNA, 329 bp, Zea mays
gcaagcagcagcagcagttacgacgacgacgacgacgacatccaactcccagaaagcccattcacgtcgtcagccgtgccgatgctgatgtaatgggccgggaaagggaaaccaacgtccacttaattagcttcttttgttacacaggacaggacaggacacaaaaacaccctcttttttgttgtagatataaacaaattaagggagtcacagtacacagagagagttggtgttcttagaatgcaggcacactggtgagttttaaacaagggtgccagaattacttattagctgtgccataataataataataataataagatcgtcgc

SEQ ID NO: 259773 - DNA, 702 bp, Zea mays
cggattccggtcctattgtgttggcctacgcgatcggttccaacaccagccgccgtcatgtcgaagcgaggtaggggaggttcggctgggaacaagttccgcatgtcactgggtctaccggtggcggccacggtgaactgcgcggacaacacgggcgccaagaacctctacatcatctccgtcaagggcatcaagggccgcctcaaccgcctcccgtccgcctgcgtcggcgacatggtcatggccaccgtaaagaagggaaagcccgacctcaggaagaaagtgatgcccgccgtcatcgtccgccagcgcaagccgtggcgtcgcaaggacggtgtctacatgtacttcgaagataatgctggagtgattgtgaatcccaagggtgagatgaaaggttctgcaatcactggacctatcggcaaggagtgtgctgacctttggcctaggatcgctagtgcagcaaatgccatcgtttgagagcttgttggaatgtgtttagacttgagtatgatcatctcaattgtgtgttgcagctgttgtaagggtgctattggacttgatggctccttttatgtttggtcactcaattttgtagtgaacagaaatttgtctaccctggttgcctcaagtttgctgtctgagatgcttatattatttattttgttctatggtggaaaaaaaaaaaaaaagggcggccgc

SEQ ID NO: 259774 - DNA, 809 bp, Zea mays
ccgacgcgtccgcccacgcgtccgcccacgcgtccgcccacgcgtccgcggacgcgtgggcgccgccatgtcgaagcgaggcaggggaggttcggcggggaacaagttccgcatgtcgctgggtctgccggttgccgcgacggtgaactgcgcggacaacaccggcgccaagaacctctacatcatctccgtcaagggcatcaagggccgcctcaatcgcctcccgtccgcctgcgttggcgacatggtcatggccaccgtcaagaaggggaagcccgacctcaggaagaaggtgatgcccgccgtcatcgtccgccagcgcaagccgtggcgccgcaaggacggggtctacatgtacttcgaagataatgctggagtgattgtgaatcccaagggtgagatgaaaggttccgctatcactggacctatcggcaaggagtgtgctgatctttggcctaggattgctagcgcagcaaacgccatcgtttgagagcttgttggaatatgttcagacttctatatgatcatcttattatcagttgctaagagtgctattgggcttaatgggccctttatgtttgttcactcaattttgtagtaaacagaatttggtataccaaggggatctatataacaatgtatgccataaattttctgtctaccatttctcatgaaatgcttataaaaaaaaaaaaaaaaaaaaaaaaaaaaaaaaaaaaaaaaaaaaaaaaaaaaaatttaaaaaaaaattttttaaaatttatttaatattaaatttgattatttatatttattataattaaatttaa

SEQ ID NO: 259775 - DNA, 902 bp, Zea mays
ccgggttcttgtacttcttcacacgcaaccactccaccattgtcgcttttgccatcggcgcaaaatacgttgctggcaatgggttccacatcatcggtgcacacactgacagcccttgcctgaagctcaagcctgtctccaaggtaaccaaaggaggttaccttgaggttggggttcaaacgtatggtggtgggttgtggtacacatggtttgaccgtgatcttactgtagctggtagagtgattatacgggagaagaatgatggcgcggtctcttatgcacacaagcttgtacgggtacaggaaccaattatgcggatacctactttggctattcacctggacaggactatctcctcagaaggtctcaaggttaacaatcagagtcatcttgttccagtgctggctacatgtatcaagaatgaaatgcagaaatttgtagcagataatggcccaaagcaggcatccgagaatgcgaacacaaagcatcatccattactattgcagttgattgctaaagaggctaactgtgagcctggtgagatatgtgactttgaactgcaattatgtgatactcaaccaagcgtcgtagcaggtgccacggaagagttcatcttttcaggaaggcttgacaatctttgcatgtcattttgttcattgaaggctctaatagattccagttctgttgaacactctcttgatcatgaatctggtgtgagaatggtagctctatttgaccatgaagaagttgggtctgattctgctcagggagctggttcccctgccatgttggatgctttatcaagaattactgggtcttttaacttttcaggtgtcaagttgctagaaaaagctattcagagggagcttctggtctctgctgacatggcacatgctttacat

SEQ ID NO: 259776 - DNA, 1195 bp, Zea mays
cccacgcgtccgcggacgcgtgggcggacgggtgggcggacgcgtggggtgatgatttccttgcaatgttggaagaaagcaaggagcttacatcatcaacaagatggagcaaagcaatacttatgtttgaagatgatgaaagattcaaagcagttgagcgtccaagggagcgtgaagatttatttgagaactatcttgtggaactgcataagaaggaaaaagccaaggctgctgaagaacacaaaagatatgtagcagaatacagagcttttctagaatcatgtgacttcatcaaggcaagcactcagtggagaaaagttcaggaacgcctggaggacgatgaacgttattcccgacttgagaagtttgatcggttggatatttttcaagagtacattcgacacctagagaaagaagaggaagagcagaagcgggtacaaaaggatcaagtgagaagacaagagaggaaaaaccgtgatgggtttcgtaaaatgctggaagaacatgttgctgatggcacacttaatgcaagaactcggtggcgtgattactgtgcacagataaaagattcacagtcctacttggctgtagcgtcaaacacatctggctctacaccgaaagagttatttgatgacgtgatcgaggaacttggcaaacagtatcaagaagacaagatccaaattaaagaagtggtgaaatctggaaagattcctatgacaacttcatggacattagaggaattccaaactgctactctggaggatgatgctcttaaaggaatatcaaccatcaacatcaagcttgtatatgacgatcagcttgaaaggctcaaggaaaaagagcaaaaggacgctaagaagcgccagcgcttgggtgaaaatttttcagatcttttgtattccatcaaggaaatatcagcttcttcaacatgggatgattctaaacagcttttcgaggatagccaagagttcagggccttggacagtgagacttatgctagagagctttttgaagagtgcgttgtccacctgaaagaaaggttaaaagagaaagaacgtttgagggaggaagaaaaggcaaaaagagagaaagagcgtgaggagaaagagaagaagaaagagaaagagaaagaaaggaaggagaaagaaccgcaaagacaaagaaagagaccccaccggagagagagaaaggagaa

SEQ ID NO: 259777 - DNA, 1173 bp, Zea mays
caagttgggagaaaccagttgagttgatgacacctttggagagggctgatgcctcaactgaatggaaagaatttactacaccagaaggacggaagtactatttcaacaaagtgaccaagcaatcaaaatggactattcctgacgagttaaaggttgcacgtgaattggcagagaacacatcaaatcaacaacctgatcgagaatcaggaatagctactagtgctcttgtcagatctgctgcctttgaaccttctactgcacctgctaatcagtcgtcatctgctgttggtataattgcttccagcgcacatgatggatcatcaaactctggtctttctggtcctcccctgccgcacaatgtggagaatacttccagttctattgttggcatgcaaaatggtggttcgagtactgctgttgttcctgttgcagcaagcacagaagttccattagttgcaacagatgcagggtccagcagaaacaacgatgaaaattcatctctgaccactggggctgacgcagaggatggtacatcggctgaagatttggaggaggccaaaaagaccatgccagttgcagggaagattaatgtcactccagtggaggagaaaacaagtgaagaagaacctgtagtctatgccactaagatggaagcaaaaaatgcgttcaagtccctgcttgagtcggtaaatgtggagtctgattggacatgggatcagactatgagagtcatcataaatgacaaaagatatggtgctttgaaaactcttggagagagaaagcaagctttcaatgagtacttgaaccagcgcaaaaagtttgaagccgaagaaaaacgtatcaaacagaggaaagcacgtgatgatttccttgcaatgttggaagaacgcaaggagcttacatcatcaacaagatggagcaaagcaatacttatgtttgaagatgatgaaagattcaaagcagttgagcgtccaagggagcgtgaagatttatttgagaactatcttgtggaactgcataagaaggaaaaagccaatgctgctgatgaacacaacagatatgttacagaatacagagcttttctagaatcatgtgacttcatcaaagcaagtactcactggagaaaagttcacgaacgtctggatgacgatgaacgttattcccgacttgaga

SEQ ID NO: 259778 - DNA, 600 bp, Zea mays
cttccaccacccaatcgcgctcgcacggaggcggcgccggcgcggacggacagattccattcacctcccatccatttctcaccagaagcgaaggcggaggcggaggagcggaggtaggagatctcgagcaagccggaggcggaggagatgaagacgttcgacccgtggccggtcttcttccgccgggagtggaagcgcaactggcccttcctcacgggtttcgccatcaccggattcatcatcacgaagatgacggccaacttcaccgaggaggacctcaagaactccaagttcgtccaggaacacaagaagaagcactgacgaaccaggtgaaggagttgtcagaaacgcatgtttggccagccagttctgttatgcttttgaatgaaaaatttagacccctctttctcgtttccttaatcgaaatgcttgcactctatgttccatttgtaatgtaataagaggcaaatgaattgaaccaacaacaatcaacttctgattgaaaaatatcgatgtgtggcctgaatgttgtgggatcgcatctaatcctgtcgatttggtgaaaaaaaaaaaaaaaaaaaaaaaaaaaagggcggccgc

SEQ ID NO: 259779 - DNA, 551 bp, Zea mays
  unsure (1)..(551): unsure at all n locations
ccggnccggaattcccgggtcgacgcacgcgtccgctcgaaggagaatttccattcgaccccatccacttctcacctcaatctcgcgagaagcgaagccggaggaggagggtgcgaggagatcgcgagcagccggagccggagccggagccggaggcctagtagatgaagacgttcgatccgtggccggtcttcttccgccgggagtggaagcgcaattggcccttcctcacggggttcgccatcaccggcttcatcatcactaagatgacggccaacttcaccgaggaggacctcaagaactccaagttcgtccaggagcacaagaagcgctgaccaaccagtaatctatgacatggacgccggatggcactggcagagggatggtgtacggtgttgtccgaattgcctgtctggacagccagttatgttatgctgtttgaatgaaaaattagcttctttttcttcatctaaatgcgtgcagcctatgctccatctgtaatgtaataagaggcaactgacttgatccaaaagctaccagcttctgattat

SEQ ID NO: 259780 - DNA, 636 bp, Zea mays
ggtgattggagctcgaaaacggagaaagcgaggggtgtgataggtcgaacacaacaacaaatgacaattagcactggaggatgccaagtattcaaagggtgcattattataatgccaacagagcaattactgtcttcatgatgccaatagtctgaagtccgatgaatcgagtgccaaaattgcaaaaatctctccatcatgcgggagttagtttcatttcgcaacagcagtgattcttaggttcttatttctggtggctattgtagcacttatccattaacgatgtcattatcacattagtgtatttcgggaacagtaatctatgacatggacgccggatggcactggcagagggacggtgtacggtgagtggctccaatctaatcgctgatgcattctgccattggtgctggcgtgctgtaggtctgtcttgcgtatatctcatttgacatgctacataaaaatttccaacaattcctggtcggttgttgacaccactgctaggaggtgggcattttttttactcatataccaaaaaccaaaccgagccaaaagtgtcgtttttaccatagacaatcctggattattagcttggtgatcgtttttactaacaaaactgaaatcaaaaactgaaac

SEQ ID NO: 259781 - DNA, 515 bp, Zea mays
caattccagtcgcccccatccgttcctcatctcaccagaagcgaagccggaggagggaggaaggagatcgcgagcagccggagccggaggccgagaggatgaagacgttcgacccgtggccggtcttcttccgccgggagtggaagcgcaactggccctttctcacggggttcgccatcaccggcttcatcatcaccaagatgacggccaacttcaccgaggaggacctcaagaactccaagttcgtccaggaacacaagaagcgctgaccaaccgggtggagtcgtccgaatcgcctgcggatgaaaaattagccccctatttttcttgtcttttttttatctagatgcgtgcactctattgtaataatgtaataagaggcaattggattgatccaacagcaaccggcttctgattttgatccgcttcgctgacatatgcatgcagcaaacgaatatgtgccttttttttttcttgatgttggattgcatctaatcctgttgaattggtgaaaa

SEQ ID NO: 259782 - DNA, 546 bp, Zea mays
  unsure (1)..(546): unsure at all n locations
cccacgcgtncggtgcagtgcaggtcgtcgcagcgccgctacgagggggaggggatcgaactcgaaggagaatttccattcgaccccatccacttctcacctcaatctcgcgagaagcgaagccggaggaggagggtgcgaggagatcgcgagcagccggagccggagccggagccggaggcctagtagatgaagacgttcgatccgtggccggtcttcttccgccgggagtggaagcgcaattggcccttcctcacggggttcgccatcaccggcttcatcatcactaagatgacggccaacttcaccgaggaggacctcaagaactccaagttcgtccaggagcacaagaagcgctgaccaaccaggtgttgtccgaattgcctgtctggacagccagttatgttatgctgtttgaatgaaaaattagcttctttttcttcatctaaatgcgtgcagcctatgctccatctgtaatgtaataagaggcaactgacttgatccaaaagctaccagcttctgattatgagtgatacttcaaggttt

SEQ ID NO: 259783 - DNA, 447 bp, Zea mays
aaatattccctaggaatcttacctataaaatctgtaacctactgctttagtttgttccctaggaactggaactgtagcaggttctagtagtgccccggaaggattatcactgataaaagccagacttcacattgtctatgctcactgtttgacactgctcacatgcccatgccattcatatcccctttgcatatttgggactccataaccaaatagtttgttgtgaaactgcagtgtttaacgcttacatacctttgcaggtgttgtccgaattgcctgtctggacagccagttatgttatgctgtttgaatgaaaaattagcttctttttcttcatctaaatgcgtgcagcctatgctccatctgtaatgtaataagaggcaactgacttgatccaaaagctaccagcttctgattatgaatgatacttcaagtttgatctggttc

SEQ ID NO: 259784 - DNA, 917 bp, Zea mays
ttaaaggcggaggatgctgcatcgctcctctccccatcctgcacgctcctccgcctgattcccagcgcgtcgcacatctgctgctcgtcgcacttcaagagattcgatcgggttcgccggttcgcgcccgccgccatggcgacttcctcaggaccaaaggaggcgccagcgaataaccctgggctccagaccgaggtcgaccccgccaccaaaggctacttcttgcaacaaacgatgttacgtgtgaaggacccaaaagtgagccttgacttctactcacgtgtgatgggcatgtcgttgctgaaaaggttggattttgaagagatgaaattcagtttgtattttctaggttacgaggatgtgaccttagcccctgatgatcatatcaagcggactgaatggacttttaggcaaaaagctactcttgagctcacccacaactggggcacggaaaatgaccctgaattcaaaggttaccataatgggaactcagaccctcgtggttttggtcatataggagtaactgtggatgatgtccacaaggcatgtgaacgctttgaacgtcttggggttgagtttgtgaagaaacctgatgatggaaaaatcaaaggcatcgctttcatcaaagatcctgatggttactggatcgaaatatttgaccagaccattgggacggtaacttcttcagcatcatgatgaacagtagtggttccttatatggtgcgcaagatcatacaactctggcataagagcttttcatatgtgtggctggggtctggactcggattaagggctggaatctgtccactcctagcatcttcttgctctcaacaatatgcgaactatgttgaggaatgaaataaaataagttcgggtaaaaattcaaaaaaaaaaaaaaaagggcggccgccccggga

SEQ ID NO: 259785 - DNA, 456 bp, Zea mays
gaaacgtcagtcctgtcgatttgcctaaatactggtgctctgctctacatgataccattggggcttacttactccataagcacacgcgtttccaacgagcttggcgctgggcagcctcaggccgcgaagatggcagcaaaggtagtcatgtacatggctttgtctgaaggactcgttatatccttgacgatgaccctgctacgcaacatttgggggtacgtgtacagcgacgaggaggagatcgtgacgtacatctctaagatgttgccgatcctcgggatatctttcttcatagatgggctccatagctctctttcaggggtgctcacaggctgcggaaagcagaagatcggcgcggccgttaatctcggaacgttctacttgctaagcatcccagtggctgtactggctgcattcgtcttccatctcaaccggaatgggccccttggcttggca

SEQ ID NO: 259786 - DNA, 639 bp, Zea mays
ctcctgttcaccccgcgtcgtcttcgctctcacgatccctcggcagtcggcgacggctgggcgaccgccacttccgccttctcttcctactgagcgtctccaggcacgcttctgaattcggagttgccagcattcgctcgaggtgccggaccagatctcaccatcatgcaggctagcgatagattcaacataaactctcagcttgagcatcttcaagccaaatatgttggtacagggcatgctgatttgtctagatttgaatgggctgtaaacatccagagagacagctatgcctcttatattgggcactatccaatgctagcatattttgccattgctgagaatgaatcgatcggaagagaacgttacaatttcatgcagaaaatgctgcttccttgtggcctccctcctgagagagatgaagattgaggagctgttgcatagtttcagtgtttccaatgaccatttatgagattgtaacctctatggtactatgtgccatttgtgttaaagctcgtatgcctttgacttgtcttgcatcggtctctatcgtgatacataaacattcgtaacttgtatgcattgtaaacgaaatgctggttatgcccctttgtctaaaataaagctcacctataaaaa

SEQ ID NO: 259787 - DNA, 465 bp, Zea mays
cccgcgtccgctgtgtgctctctcgctctctcggcggaagttggcgacgactgggcgaccgccgccgccgtacgccaggtgctcaggtctccgtcagacccttcgccaggtcttcttccgcggcgagcaccgccagggtgtgcacccaatcttcttcactgggtcctccgctgcttctagtcacgcatctaaatccggagttgccagcattcgcttgaggtgcctgacaaagcacaccatcatgcaggctagcgataggttcaacataaactctcagcttgagcatcttcaagccaaatatgttggtacagggcatgctgatttgtctagatttgaatgggctgtaaacatccagagagacagctatgcctcttatattgggcactatccaatgctagcatattttgccattgctgagaacgaatcgatcggaagagaacgttacaatttcatgcagaaaatgct

SEQ ID NO: 259788 - DNA, 627 bp, Zea mays
actagtccttggaatgtgaataagctcgctcacatagctcgcatacaaggtcttcctgaagtttgtgtaactatacttgataagatgtatggtcatgctactatggaagttcaggaagcatttgtgaagatatgtgaacaagctaaggcttacttagaaatgaaaggagaactagtcagtggtcttaacttaatcaataataccaatttagaatttttccccgtgaagaacaaagcagaaatatttcgtctgagaggtgattttctgttaaaaatgaacgaatgcgagactgcaaatcagtcttattcaaatgccataactctttttaagcatttgcccaaaggatggattagctggggaaattactgtgatatggtttttaaagaaacaaaagatgaggtttggcttgagtatgcagtcagttgttttttccagggcatcaaatatggagtttcaaactcaaggagccatctagctcgaattctctaccttcttagctttgatggacaaaatgaacctgttggaagagctttggataaatatcttgagcagctgcctcactgggtttggctttcatggatacctcagttgttgttgtcgttacagagaagtgaagcccaacactgt

SEQ ID NO: 259789 - DNA, 628 bp, Zea mays
gaatttcccacaagacaaatcaaagatacctgcagcaagttatctaatggagcttgcagccattgactggtttaaggacaccaaacgtatggataacgttgctaggcagaagggttgtgttgctcaggttgctgctgagaaagggatgcatacatttattgtcaacatacagattcctggatcaactcagtatagcttggtcatgtattttgtcacaaataccttgaagaagggatcattactacaacgtttttttgatggcgatgatgaattctgcaatagcagactaaagcttataccatccgttcccaagggctcctggttagtgcgacagagtgttggaagcaccccttgtctgttgggaaaggctgttgattgtagttacgttcgaggtcctgcatacttggaggtggacgttgacattggatcttcggcggtagcaaatggagttttgggtcttgcttttggtgtggtgacaacattagtagttgatatggccttcctaatacaggccaacacatatgaggagctaccggagcaagtgataggcgcatctcgactggcttatggtgaaccggccacatgagtagttcctgatcttaacaacacattaaatgacagtagcaac

SEQ ID NO: 259790 - DNA, 1766 bp, Zea mays
gttgatactcatgttcatcactcagcatgcatgaaccagaagcacctgttgagatttatcaagtctaagttgaggaaggaacctgatgaggttgtaatctttagagatgggacctatttgactcttaaggaggtttttgagagtttggatttgacagggtatgacctcaatgttgatctcttagatgttcatgctgataagagtacatttcatcgttttgacaagttcaatctgaaatataatccatgtggtcaatctcgcctgagggagatatttttaaagcaggataatcttattcaaggtcgcttccttgctgagctgacaaaagaagtattttctgaccttgaagcaagtaaatatcagatggctgagtatcggatatctatttatgggaggaagaaaagcgaatgggaccaaatggcaagttggatagtgaacaatgaattatatagcgagaatgttgtttggttaattcagattcctcggatatacaatgtatacagggagatgggcacaatcaattctttccaaaacctccttgacaatatttttctccctctttatgaagtaactgttgacccagcttcacatcctcagctccatgttttcttaaaacaggttgttgggttggatttggtggatgatgaaagcaaacctgaaagacgcccaacaaaacacatgccaacacctgagcaatggactaatattttcaatccagcctatgcgtattatgtgtactattgctatgccaatctgtatacactgaacaagcttcgtgagtccaagggcatgacaacaatcaaacttcgtccacactgtggggaggctggtgatatcgatcaccttgctgcagcatttcttacttcacataacattgctcatggggtgaacctaaagaaatcccctgtacttcagtacctgtattatcttgctcagattggtctagcaatgtctcccttaagtaacaactcactgtttatcgactatcatcggaaccctttcccaacatttttcttaaggggtcttaacgtgtctctttcgactgacgaccctctacaaattcacctgacgaaggaacctttggttgaagaatacagtgttgctgcttcactttggaagctgagctcatgtgacttgtgtgaaatcgctagaaattctgtctaccagtccggattctctcacaggctcaagtctcactggatcgggagaaactactacagaaggggtccggagggcaatgacatccaccagacaaatgttcctcacatcagggttgaatttcgacacactatctggaaagaagaaatggagctgatacattttggaaatgttaacctacccgaagaagttgacaggtgaagagcaggggaattgcagtgaagtctggcggtggcggcaaggggaggagagaatgtgtcaacacgagagactcgtttgcttgcagaggaggtatcatgacaatggatgtcgccaagtcctccgtgtcgaccatatatatatatgaagaataataagaaaacccaaatacccaagtatttagaagcgttgaatccagatgtggcatgaggtcggagccaacgtgtacttgcatacgttacgtttatatacatgtactgctctgctgtaatggtgtttcgacgaatgtgtcttgtcaaaaaaaaaaaaaaaaaaaggtttctttaatttgtactattggtggtttgtaagattggcttatgtgattcaaaaaaaaaaaactagcgagatgaaagaagtttaaataaaca

SEQ ID NO: 259791 - DNA, 600 bp, Zea mays
gcatgaagttcttcatcatgtgctcattttaggataagtaacacataaaatcttctggaaaaaagataatagtgcgtgtttttttttcataaaataaattttagcttgcagttagcttcttgttcaacattcatctggttaaattacaatggttaatttgaaatttgttgagagcgcagcttcgtgagtccaagggcatgacaacaatcaaacttcgtccacactgtggggaggctggtgatatcgatcaccttgctgcagcatttcttacttcacataacattgctcatggggtgaacctaaagaaatcccctgtacttcagtacctgtattatcttgctcagattggtctagcaatgtctcccttaagtaacaactcactgtttatcgactatcatcggaaccctttcccaacatttttcttaaggggtcttaacgtgtctctttcgactgacgaccctctacaaattgcactgacgaaggaggcgttggttgaggaatacagtggtgcggcttcagtaatgcgcctatctctatctctgtcatgtgttttcccaatcccacccagaggttcttagtctggattgcttgttactcttg

SEQ ID NO: 259792 - DNA, 837 bp, Zea mays
cccacttgttcggcagaacgctttgaaagatttttactggaatcatatattgaagataatgatacagtcaagtggtgcccaagcacaccacattgtggaaatgctatacgcgtcaagggcgatatttattgtgaggtggagtgcacatgtggatgccagttttgttttaattgctccttacgagcacactcaccgtgttcctgcatgatgtgggagctctggatcaagaaatgccgtgatgaatcagaaacagtgaattggataacagtaaatactaagccctgtcccaagtgtcacaaacctgtggagaagaatggtggctgcaacctggttgcatgtatatgtggacaagcattctgctggttatgtgggggtgctacaggtagagatcacacatggtcaactattagtggccacagttgtggccggttcactgatgatcagactaagaagaccgaacaagcaaggcgagacctctatagatatatgcactaccacaatagatacaaggctcacaccgactctcttaagcaggaagcaaagctaaagaatgagatccaagggaagatatccatttcagaaaataaggagtcaaagataaaagattattcttgggtcataaatgggttaaacaggctattcagatcaaggcgtgttctatcctattcgtatccgtttgcattctacatgtttggtgatgagattttcaaggatgagatgactcctcaggagagagaactgaagcagaatttgtttgaggatcagcaacaacaattagaatttaatgttgaaagattgtctggtttccttgagaaaaattttcaactttttaccgat

SEQ ID NO: 259793 - DNA, 1865 bp, Zea mays
cggacgcgtgggcggacgcgtgggcgaagccggagaatgaagagctagcctatcaaccatgcatggaagtagcaatggcacctgaatcagctacaaaccatgatccaatcctagcggctagcgatctctagtttatattacaattaggagcaagcgatccaattatcgatagagcgcgagatcgatcgatcatgccgggccgctcggtggtctccatcctcctcctcctcctccatggcctcctctgcctgcagctggctgccttggccgagatggacgacgacgacgtcatggaggacggcagctgcatgcatttcagtgtgtccccgccgcctgctccgccggaggacgcggatgagcggcgcgactatttccgcgccatgcaggccaaggatctgttccggcacgagcagatgatcacgatgatgggcagcgaccggaacggcagcagcaggaggcggcgggcgaaggagtcgtccaagctgccggaggtcatgtccgccacgtccatgttcgagctgccgatgcggagcgcgctgaacatcgcgcacgtgggcatgtacctggtgtcggtgcgcatcggcacgccggcgctgccgtacaacctggttttggacaccgccaccgacctgacgtggatcaactgtcgtctgcggcgccgcaagggcaagcactatgggcgacagtcgatggggcagacgatgtcggtgggcggggaaggcgcgacggcggcgaagaaggaggcgagcaagaactggtaccggccggccaagtcgtcgtcgtggcgcaggatccggtgctcgcagaaggagtgcgcggtgctgccctacaacacgtgccagagccccagcaaggcagagtcgtgcagctacttccagaagacgcaggacggcacggtgacgatcggcatctatggcaaggagaaggcgacggtgacggtgtcggacgggcggatggccaagctccccggtctcatcctgggctgctccgtcctggaggccggcggcagcgtggacgcccacgacggcgtgctgtcgctggggaacggcgacatgtccttcgccgtccacgccgccaagcgcttcgggcagcgcttctccttctgcctgctcagcgccaacagctcccgcgacgcctccagctacctcaccttcgggcccaacccggcggtgatgggtccgggcaccatggagacggacatcctgtacaacgtggacgtgaagcctgcatacggggccaaggtgacgggcgtcttggtgggcggggagcggctggacatcccggacgaggtgtgggacgccgagaggtttgtgggcggcggtgtcatcctagacacgagcacgtcggtgacgtcgctggtgccggaggcgtacgcgccggtgacggccgcgctggacaggcacctgtcccacctgccgcgggtgtacgagctggacggcttcgagtactgctacaggtggaccttcgccggcgacggcgtggacctggcgcacaacgtgacggtgcccaggttgacggtggagatggccggtggcgcgaggctagagccggaagccaagagcgtggtgatgccggaggtagtgcccggggtggcgtgcctggcctttaggaagctgccgcggggagggcccgggatcttgggcaacgtgctcatgcaggagtacatctgggagatcgaccacggaaaggggaagatgaggttcaggaaggacaagtgcaacacccatcatctccacaacagcaaaggcggagaggtctataataataataatggcaattcctcctctactgtcgtgcatcgcgtcaattaattcgttctctcctctctacctccacaaaatttaaggaccagaccatgcatgcac

SEQ ID NO: 259794 - DNA, 994 bp, Zea mays
tttagagttacaagagaaacacttaaccaatgtatggtattaaactgacatcctggcatgatacaacataaatcaacggagcaacgtaaactctccacgcaaggccacaagtcagacgatcaggaggggatagtcccatagctacatctacctccgatatccgaagctttaaacaccagcagaacacgtactatacttcgctgatgctacatgagaggcgcatgcgcagcgcggcgcagccttatctgtcagcagtgtgccgcagatcatcagttccaagccaatccatcatcagttccggagaaacgtccatggtcccctcgctgcccccatcctccaggtgctagctatggtcctcagactcatgtagatcgtcaatgcgatccatataccgatgaatccgttatgcgcagaaaggtacagcaggcacggtatcgacacagacgcaacagcaaccatggagtaagcagagtatctgtagtctgacgctccaaagttgatgccatcaaacacgaaggccagggaattgatggtctgcgtgccggcgacaaacgggatgcctctgtgaatgacttggatcacgggcacgtcacttgtgaaaatgccagccccgaacctcatagcaagtcccagcgcgacggtgagacccatgcccaggacaatgctcagctgcaacacacgggatgtcgcggcagcgaccttcttactgtcgttcttggcgaacgcgcttgcaagcaccgcctgtcctgccacggccaatccatcggcgagaagagacgtggccagccagagctggcagcagatctggaagcctgccatgacggtgggtccatggcgagcggccagggacgccgccagcgtgacgcagaacgtcaccgcgacaacccttgcgagcagcaggaatccacatccaagaaacctcccaaatttcagagatttaatgctgggtgggataacgtgaactcgctggacgagccggcacagcagtatcaac

SEQ ID NO: 259795 - DNA, 765 bp, Zea mays
ccgggccggaaagctcgggttgacctacgcgacttctgattcgcatctgcttccagagccccccgccgccgctgcgccctcctctcggtcctgccgtccgtcgaggtaaaaggacagcatggtgagggtcagcgtgctcaatgatgctctcaagtccatgtacaatgctgaaaagatagggaaacgtcaggtcatgatcaggccgtcatccaaggtgatcatcaagttcctgacggtcatgcagcgccatggctacattggcgagttcgagtacgtggatgaccacagagctgggaagatcgtggtggagctgaatggaagactgaataaatgtggtgttattagcccacgttttgatgtaggtgttaaggagatcgagggatggacggcgaggcttcttccatctcgccagtttggctacatcgtcctaacaacttctgctggaattatggaccatgaggaggcccgccgtaagaatgttggtggcaaggttctaggtttcttttattgaaaatgtgtttttttgagccacagatgcgtccaagaactcgtctgatgttttgaggtttgttaagactgggtgtccgagcctttgtggtttgttaagacagcgatgtgtcatgtatttcagaaattgggatttttatgagatgtacctgcgagagccctgtctgtttcgattttcagatattggttttgatttatgcgatacaaacaggtcctttagtccatataactttttgatgctgtgaaaataattatatt

SEQ ID NO: 259796 - DNA, 762 bp, Zea mays
gccgacccacgaatccgcccacgcgtccgtgcctctcctcctccagagctcgtcgccaccggccaccgccaccctcgatcacgccgtccgtcgaggtaaggtcagcatggtgagggtcagtgtgctcaacgatgcgctcaagtccatgtacaacgctgagaagattggcaagaggcaggtcatgatcaggccgtcatccaaggtcatcatcaagttcctgacggtcatgcagcgccatggctacattggagagttcgagtacgttgatgaccaccgatcgggcaagattgtggtcgaactcaacgggaggctgaacaagtgcggcgtcatcagccctcgctttgatattggcgtgaaagacatcgagggatggactgcaaggctgctcccgtccaggcagttcggatacatcgtccttacaacttctgcaggcatcatggaccacgaggaggcccgacgcaagaacgttggaggcaaagtccttggtttcttttattaattaaagggtcgtccgagtttcttctattaaatggtgggtcaaccgagtttttgtttttgtttttggtctgaattgaatagagtgtctgcttcgttaagactggaatgtgttatgtgcctttgttaagactggatcactggaatgtgggaatctttatgagtgattcggcatgtaactaactggaggccacgagacagtttggcgcaaggcctatgaccccctacgagcagtgtcgatcaactagattctcacattttttactg

SEQ ID NO: 259797 - DNA, 500 bp, Zea mays
tgcagcgccacggctacattggagagttcgagtacgttgatgaccaccgatcgggcaagatcgtggtcgaactcaacgggaggctgaacaagtgcggcgtcatcagccctcgctttgatatcggcgtgaaagacattgagggatggactgcaaggctgctcccgtccaggcagttcggatacatcgtcctcacaacttcggcaggcatcatggaccacgaggaggcccgccggaagagcgtaggaggcaaggttctaggtttcttctattgaagaagctgagaatctttgttatggcctgcctgcctgtcttactctctcagactagagtacctgttattttactttaatatgtctctctcagactagagcgccttcttttacttgaatattggtgactgcattggtctttcactttaaaatcggtgactgcattgatcgaattatctgagccggttcttcagatactatgtggcacaaaaaaaaaaaaaaaaagggcgg

SEQ ID NO: 259798 - DNA, 2324 bp, Zea mays
  unsure (1)..(2324): unsure at all n locations
aatgaacatgaaggaggcttggaagccttctcccgtagttatgagaagtttggatttaatcgcagcgcggaaggtatcacatatcgagaatgggctcctggagcattttctgcagcattggtgggtgacttcaacaactagggatccaaatgcagatcgtatgtgcaaaaatgagtttggtgtctgggatatttttctgcctaacaatgcagatggtacatcacctattcctcatggatctcgtgtanaggtgagaatggatactccatcagggataaaggattcaattccagcctggatcaagtactcagtgcaggccccaggagaaataccatatgatgggatttattatgatcctcctgaagaggtaaagtatgtgttcaggcatgcgcaacctaaacgaccaaaatcattgcggatatatgaaacacatgtcggaatgagtagcccggaaccgaagataaacacatatgtaaactttagggatgaagtcctcccaagaataaaaaaacttggatacaatgcagtgcaaataatggcaatccaagagcactcatattatggaagctttggataccatgtaactaatttttttgcgccaagtagtcgttttggtaccccagaagaattgaagtctttgattgatagagcacatgagcttggtttgctagttctcatggatgtggttcatagtcatgcgtcaagtaatactctggatgggttgaatggttttgatggtacagatacacattactttcacagtggtccacgtggccatcactggatgtgggattctcgcctatttaactatgggaactgggaagttttaagatttcttctctccaatgctagatggtggctcgaggaatataagtttgatggtttccgttttgatggtgtgacctccatgatgtacactcaccacggattacaagtaacatttacggggaacttcaatgagtattttggctttgccaccgatgtagatgcagtggtttacttgatgctggtaaatgatctaattcatggactttatcctgaggctgtaaccattggtgaagatgttagtggaatgcctacatttgcccttcctgttcacgatggtggggtaggttttgactatcggatgcatatggctgtcgctgacaaatggattgaccttctcaagcaaagtgatgaaacttggaagatgggtgatattgtgcacacactgacaaataggaggtggttagagaagtgtgtaacttatgctgaaagtcatgatcaagcattagtcggcgacaagactattgcgttttggttgatggacaaggatatgtatgatttcatggccctcgatagaccttcaactcctaccattgatcgtgggatagcattacataagatgattagacttatcacaatgggtttaggaggagagggctatcttaatttcatgggaaatgagtttggacatcctgaatggatagattttccaagaggtccgcaaagacttccaagtggtacgttcattccagggaataacaacagctttgacaaatgccgccgaagatttgaccttggagatgcagactatcttaggtatcatggtatgcaagagtttgatcaggcaatgcaacatcttgagcaaaaatatgaattcatgacatctgatcaccagtatatttcccggaaacatgaggaggataaggtgattgtgttcgaaaagggagatttggtatttgtgttcaacttccactgcaacaacagctattttgactaccgtattggttgtcgaaagcctggggtgtataaggtggtcttggactccgacgctggactatttggtggatttagcaggatccatcacgcagccgagcacttcaccgccgactgttcgcatgataataggccatattcattctcggtttatacaccaagcagaacatgtgtcgtctatgctccagtggagtgatagcggggtactcgttgctgcgcggcatgtgtggggctgtcgatgtgaggaaaaaccttcttccaaaaccggcagatgcatgcatgcatgctacaataaggttctgatactttaatcgatgctggaaagcccatgcatctcgctgcgttgtcctctctatatatataagaccttcaaggtgtcaattaaacatagagttttcgtttttcgctttcaaaaaaaaaaaaaaaaaaaaaaaaaaaaaaaaagacaaaaaccaataaaagggccaagctaacaagctcttacatgacgacgtcatatctcatgaggtaatgccacctaaaatcaattcaatggtcccatttatacaacgttgggactgcgaaaa

SEQ ID NO: 259799 - DNA, 777 bp, Zea mays
ccgacccacgcgtccgcttggataaatgccgccgtagatttgaccttggatatgcagattatcttagatatcgtgggatgcgtcagtttgaccaggcgatgcagcaccttgagggagaatatgaattcatgacatctgatcactcatatgtatcacggaagcatgaggaggataaggtgatcatctttgagagaggagatttggtcttcgtgttcaacttccactggagcaatagctattttgactatcgcgttggttgtttcaagcctgggaagtacaagattgttttagattctgacgatggccttttcggtggatttagtcggcttgatcatgacgctgagtacttcactgctgactggccgcatgacaacaggccgtgttctttctcggtctatgcacccagcagaacagccgtcgtatatgcacctgcaggtgcagaggacgaatagggcacagcagcggttgttggggaagaacttcagagggatgtgctgctggtggactgacaccactgccacgcgcgatgctgccagatgttgccctcgagaccacgtggcaggacgatcagctattcaggtggataggttagcttaccgatgagctctcgctttcgagtgactggtgaaggaaatggacctcgcacaccgcattttcgctatgcattctgaaaatgtaccgtgtggttttgtacatatggcatcagtaggcattatatcattcatctctttgaaccaaccatttacgctaaaaaaaaaaaaaaaaaagggcggccgc

SEQ ID NO: 259800 - DNA, 620 bp, Zea mays
  unsure (1)..(620): unsure at all n locations
ttcgaattccctatcgacccacgcgtaccaaaaaaaataaaaaaaacaaaaaaaacaaagggttaaaactaagaaaaaaaaataataaggaacgtacacttacaaagtgggaggtggttaaagaaatctgtaacttatgctgaaagtcatgatcaagcattaatcggtcatcagactattgcgttttggttgattgaacaatgatatgtattatttcattgccctccatagacctttaacttctaccattgatcctgcgatagcattacataagatgatttcacttatcacaatgggtttaggaggagagggctatcttaatttcatgggaaatgagtttggacatcctgaatggatagattttccaagaggtccgcaaagacttccaagtggtaagtttattccagggaataacaacagttatgacaaatgtcgtcgaagatttgacctgagtgatgcanactatcttaggtattatggtatgcaagagttatgatcaggctgtgcaacatcttgagcattaattttaattaattacttctgatcaccagtgtatctctcctgatacatgaggatgttattgcgatttctttttaaagtgtgtatttttttcttttttt

SEQ ID NO: 259801 - DNA, 459 bp, Zea mays
ccctccctcactcagccaaacctgacatcagcctattacaagcgtcagtagagatcttccagggggccatggccaagcccccgcgtcagacggccgccatcatcttcctcgtgctcctcgcgaccgcgtcgtgcctccacaccgtcgacgccgccgctttagggttttgctggggcaagtgcagcgctcggtgcgcgcgggcaagcgcgcggcgggcgtgggccgcgtgcatgagctcatgcggcctctgctgcgaggagtgcaactgcgtgccgcgcgacatccatgactgcccctgctacagcaacatgttcaccaccggccccaagaagatgcccaagtgcccctgagactgagactgtgaggccggctcacactgcggcatccatgggactgcgactgctgcctacaactacgatccgatccatgctgggccagacaaccagttatgcatgttat

SEQ ID NO: 259802 - DNA, 1513 bp, Zea mays
aatcagacgacttgaaaatagcgctcacaacccatgtcccagtttctcaaccgaccacacaagggcctcacttcgttccaatcatgagggcatgaggcttctcgcttgtttgacaagaaaattggacacccgtcgaatttattctaaggcacagcttcctgacgaattgaattaagttcacagacgcctcggtgggatttattctcaggcacaacatcccgaggaactgattcaagttcacggacgcctcggtctaatttggcacaactccgtgtggagtttattcaagttcacagaggtctccttgagagcacacacaaaaaaattcgatcactcaacccaacaaacatagcaactcacaacccgagtcttcctttttccatttctcggcttatctggatttccttcgtcatataattaatcccgtggccaaaattgtgctgcgagcctgggattttatccaacgaaagcgaaatcttcatgcggctgatggtgactctgcccacttattcactacctctttcaatttgtcgaatcctgttcggtttgtgaagcttccaaaagattcgccttcctggcgtgtgccattccaataggtaaagagaggctccaaaaccttctcgatgtcatcaagcttcaccttgtccataaatgattctgctagcgtactctggtttggtgttccacccagccagatctggtaactttttgggccatcaccaacgaaaccaagctctgccatatatggtctagcgcatccattagggcatccagttatcctcacaaccacagactccgaatccttgataccaaccttattgaagactgctctaattcgtttaagaatgggtaagatcccccgttcagcttctgtttgtgccaaagggcacagtggcaaggcagggcatgccatggcagttaaattcagggggtcgacatccttcggttccagcaggccagcttgtgcaagagctgtagttatgggttctctccacgcttgatcaatcccacataaaataagattttggtttggggtaatactaacatccaaattatacttctcaattatctctcgtagagttttctttgcttgcccaccaacacgaccattatcaacatgcactccatagaataatttcccatcaccctgttcttgccagccaaggtagctgttaaactgccactctggcaatggtcggaaactttcaaacttcttcccgtaatatttttcaacttcagcccgaaacctatctattccccaacggtcaatcaaatacttcatcctactatacttgcggtcatcccttcttccattttccctctgtgtgacgccgatggcctttatagcatatcatatatcttcttttggagcatgacccaatggatcagccacccgagggaatgtagtttccactcggtgtgtccttcccatgccacccccggaataaatgtgaaagcccataggttaacctccctcctctggcccgtccgcccgcgtgggcgtaaggagggt

SEQ ID NO: 259803 - DNA, 1140 bp, Zea mays
acggcccacctggaagccggacgcgaatcgagcggacgccaccaccgatcgctcctctccactttccacattccagttccactccgcctccgctgccggtcgccgactccgaaactccgacagtccgaccacaaggtcttgtgcgggatccacagaaggatgagtgaagaggataagactgctgcttctgctgagcagccgaagagggcccctaagctcaatgaaaggatcctctcttctctgtccaggaggtccgtagctgctcatccatggcatgatcttgagatcggtcctgatgctcctgctgttttcaatgttgttgttgagatcacaaagggaagcaaagttaaatatgagcttgacaagaaaactggactgattaaggttgatcgagtcctgtactcatcagttgtataccctcacaattatggtttcgttccaaggactctttgtgaagacaatgacccaatggatgtgttggtcctgatgcaggagcctgttgttcctggttcgttcctgcgagcaagagcaatcggccttatgcccatgattgaccagggtgaaaaggatgacaagataatagcagtctgtgctgatgatcctgaatatcgtcactacaacgacatcagtgagctgtctcctcatcgcctgcaagagatcaagcggttctttgaagattataagaagaatgagaataaagaggttgctgtcgatgcattcttgcctgcgaccacagctcgagaggccattcagtactccatggatctgtatgcgcagtatattttgcaaagcttgaggcagtagattggaagcaactatttatctgggcgtcttggaatgagtgtgattttaataagtcaaaacacttgatattgtgtgcaaatcttggggttgagaacaatgtcactagctgtgatttacttctgtgacttgcattttttttcttgttaaattatgaataagcgaagtccatacgtctactgtgtggcttcttgctgggttcatcgtctacccatgttcctcaagcttgggaacatggggcttttccccatttccgtgtcttccatgcgaagtaaaatttatttgtatacaatcgtattaatctgttcatgtgagttttttatttgattggacgtaagg

SEQ ID NO: 259804 - DNA, 537 bp, Zea mays
  unsure (1)..(537): unsure at all n locations
tgcccacgcgtccgagagaatcgagcagagccacccggttgctcctcatttccactttccactccgcctccgctgccgatcgccgtccccgaccgcagcgcaggactgaggatgagtgaagaggataaggctgctgcttctgctgagcagcctaagagggcccctaagctcaatgaaaggatcctctcctctctgtccaggaggtccgtagctgctcatccatggcatgatctcgagatcggtcctggtgctcctgctgtattcaatgttgttgttgagatcacaaagggaagcaaagtcaaatacgagcttgacaagaaaactggactgattaaggttgatcgagtcctttactcatcagttgtataccctcacaattatggtttcattccaaggactctttgtgaagacaatgacccaatggatgtgttggtcctgatgcaggagcctgttgttcctggttcgttcctgagagctagagcaattggccttatgcccatgattgaccagngtgaaaaggatgacaagataatagca

SEQ ID NO: 259805 - DNA, 1508 bp, Zea mays
aaaaaataaaataattataaacaaaacaataaataaaattataaaaaataataaaaaaaacacacccccccccccccccaaacaaaaaaaaaaaataaaaaaacataaaaatagatatttataaataacaacaaaaataatattaaatacaagaactccatagaataatttcccatcaccctgttcttgccagccaaggtagctgttaaactgccactctggcaatggtcggaaactttcaaacttcttcccgtaatatttttcaacttcagcccgaaacctatctattccccaacggtcaatcatatacttcatcctactatacgtgcggtcatcccttcttccattttccctctgtgtgacgacaatggcctttatagcatataatatatcttcttttggaacataacccaatggatcagccagccgagggaatgtagtttccactcggtgtgtccttcccatgccaccaccaacatagatgttaaagccaataggttctcctgcatcatctgaaacaacaacaacaccgatgtcattggtcagaatatcaacagagttatcaccagccgcggtaactgcaaccttgaacttccttggtagatactgggtgccatagattggttccggagagtcagggaagttcgttccatgcgagttgtcattgcgggcttttgtcacctcaggaggctcttcagctgacattatcttctcgccatccacccacaggtcataataagccccggactgtggtgtaaggagtgctgcaatgttctctgctgtttgttgagcaaaaaggatatcttttttgacaaaaggcgctgcaggagcaagtacattcctgttgagatcgccacaagcacccaatgttgagcccatattctttatgacagtgcttagaacagtcttcaagttcttcttaagaacaccgtgcaactggaatgtctgcctggtcgtcaggcggagtgttccgatgccaaactcatcggctagtgtatccatagctaaataaagttggtttggaactttcccacaagggttctttgtccggagcataaacgagtaattcttctgcccacggacatctcggtcagtttgctggtagcttccatgaaacttgatcagctgaacagcactctcgttgatatttggggcctctgagaccaactcctcgttcaaagggtaccggaggaagttgctcttttccttgattatctcaaccttgcttcgcttaacttcagaagcatccttcttcgcaggcgcggagacggcgcgtatgctacccgcggacgcgccgcccggccgggccgcggcgggtggcgccacccggatcggcctcccgagcacccgcgaccgcgggagctgcgccgctgcgccccggaagccgtggacctcggcgcccccgatcgcccccgacatcgctggagccgggaagaaggtggcgggcggaggtgcggcggcgtagtagctgcgactgcgagcgaggatatttgtcctttgctcgttct

SEQ ID NO: 259806 - DNA, 536 bp, Zea mays
  unsure (1)..(536): unsure at all n locations
ctcatttccactttccactgcgcctccgctgcccatcgccgtccccgaccgcagcgcaggtgaggatccaaccccaacaaacttccaggcgacggactgaggatgagtgaagaggataaggctgctgcttctgctgagcagcctaagagggcccctaagctcaatgaaaggatcctctcctctctgtccaggaggtccgtagctgctcatccatggcatgatctcgagatcggtcctggtgctcctgctgtattcaatgttgttgttgagatcacaaagggaagcaaagtcaaatacgagcttgacaagaaaactggactgattaaggttgatcgagtcctttactcatcagttgtataccctcacaattatggtttcattccaaggactctttgtgaagacaatgacccaatggatgtgttggtcctgatgcangagcctgttgttcctggttcgttcctgagagctagagcaattgccttatgcccatgattgaccgggtgaaaaggatgacaagatatagcagtatgtgctga

SEQ ID NO: 259807 - DNA, 791 bp, Zea mays
gccgtaccggaattgaattcccgggtcgaccgcacgcgtccgctcacaattatggtaacattccaaggactctttgggaagacaatgacccaatgggtgtggtggtcctgatgcaggagcctgttgatcctggttcgttcctgagagctagatcaattggccttatgcccatgattgaccagggtgaaaaggatgacaagataataacagcatgtgctgatgatcctgaataccgtcactacaacgacattagcgagctgtctcctcaccgcctgcaagagatcaagcgctcctttgaagattacacgagaaacgagaacaaagaagtcgcagttgatgcattcttgcccgcgacaacagctcaagaagccattcagtactccatggacctgtatgcccagtatattttgcaaagcttgaggcagtagattgcaagcaacaatttatctatcatgcgtcttggatcggggcgtgattttaataagccgaatcgcttgctatattgcgaaccttggaattgagaacagcgtcactagctgtgattcgctcctttctcgttaaattatcatatgaataggccaagtccatacgtttaccgtgtggcgctctgtcagtcttcgtctacccaagtagctagctgcatggagggatgtctagcgttgctatgagatggcactcgtgggtctgcgggctgactacatgggtccgttcctgtgttttccgtaaaataaaattataattctatataattgaatcatttaatttatgtgatctttttgtgtattccaatc

SEQ ID NO: 259808 - DNA, 522 bp, Zea mays
cggcccacctggaagccggagagaatcgagcatagccagcaccgatcgctcctctccactttccacattccagttccactccgcctccgctgccggtcgccgactccgaaactccgacagtccgaccacaagaaggatgagtgaagaggataagactgctgcttctgctgagcagccgaagagggcccctaagctcaatgaaaggatcctctcttctctgtccaggaggtccgtagctgctcatccatggcatgatcttgagatcggtcctgatgctcctgctgttttcaatgttgttgttgagatcacaaagggaagcaaagttaaatatgagcttgacaagaaaactggactgattaaggttgatcgagtcctgtactcatcagttgtataccctcacaattatggtttcgttccaaggactctttgtgaagacaatgacccaatggatgtgttagtcctgatgcaggagcctgttgttcctggttcgttcctgcgagcaagagcaatcggccttatgcc

SEQ ID NO: 259809 - DNA, 675 bp, Zea mays
ctgcaaccgtacctgctgtttgttgagcaaaaaggatatgttgtttgacaaaaggcgctgcaggagcaagtacattcctgttgagatcgccacaatgacccaatggatgtgttagtcctgatgcaggagcctgttgttcctggttcgttcctgcgagcaagagcaatcggccttatgcccatgattgaccagggtgaaaaggatgacaagataatagcagtctgtgctgatgatcctgaatatcgtcactacaacgacatcagtgagctgtctcctcatcgcctgaagagatcaagcggttctttgaagattataagaagaatgagaataaagaggttgctgtcgatgcattcttgcctgcgaccacagctcgagaggccattcagtactccatggatctgtatgcgcagcatattttgcaaagcttgaggcagtagattggaagcaactatttatctgggcgtcttggaatgagtgtgattttaataagtcaaaacacttgatattgtgcgcaaatgttggggttgagaacaatgctactcgctgtgatttacttctgtgacttgcatttcttttcttgttaaattatgaataagcgaagtccatacgtcaaataaaaaaggaaataaatcatgaagaatgagtctaaagggactactggtccctaatgtaggg

SEQ ID NO: 259810 - DNA, 1075 bp, Zea mays
ctgagccgcaaggaaaacgcagacagtgacagacgcagccccagatttcttttccatcaaaacaccccccgttcccctgctcccattccgccccggatttcgatttcgtcctcccttcgccgcccgcgccaagactttcctctgccggggctgcaccggcagcgcggggtcgacaacagctcgagatccggtgactgatctcctttgtttctcgggcatcttgctagtcttcttccagattgcttcctaataatgatgacacatgaatgggctgccaatttggctcttgctggtctgagcttggcgccgcttgtggttaatgtaaacccaaatgtgaatgtggtactgacagcatgccttactgtctatgtgggttgctaccgttctgtgaagccaactccaccctctgagaccatgtccaaggagcatgctatgcggttccctttagttggaagcgctatgcttttatcactgttccttctattcaagtttctctcaaaagatttggtcaacgctgtgctcactgcctactttttcattctaggcattgttgctctctccgcaacactgcttccttctataaaacgttttcttccaaaagagtggaatgataatctcatcgtctggcgggctccattcttccactcactctcggtggagttcacaaagtcccagattattgcctcaatacctggatttttcttttgcttgtggtatgcgtcaaagaagcattggcttgcaaacaatgtcctgggattggctttctgtattcaggggattgagatgctgtcattgggatcatttaaaactggagccattctcttgggtggactttttgtgtatgacattttctgggtgttcttcactccagttatggtcagtgtggctaaatctttcgatgctccaataaagcttctgtttccaactgcagacgctgaacggccattctccatgcttggccttggtgacattgtaatacctggtatattcgtcgcacttgccttgcgttttgatgtctcaagaggtaccaagaagcgttacttcaacagtgcattttttggatacgctgggggta

SEQ ID NO: 259811 - DNA, 555 bp, Zea mays
gtcgaccaagccgtccgaccacccccagatttcctttccatcagcgccccccgttcccctcctcccctttccattttaccttctcgcccgtccccgaattcttcctcctcccatcccgtgcagccggcctcaccgccggcgacgggacgcggagacccgggctgccggtaccgtcagccgtgctccttcctctcttcgtcgcccccgccaaaaccttcatctgccggggctgcaccggcggcgcggggacaacaaaagctcgagatccggtgactgatctcttcgttcctcggttcactttgatattccaacaaaggtcacattgctagactcccagattggttcctaacaatgagggcacatgaacgagctgccagtttggctcttgcctgtctgagcttggctccacttctggttaacgtaaacccaaatgtgaatgtggtattgacagcatgccttactgtctatgtgggttgctaccgatctgtgaagccaactccaccttctgagaccatgtccaaggagcatgctatgcggttccctttagttggaagc

SEQ ID NO: 259812 - DNA, 608 bp, Zea mays
gctgtgcagcttgaaaccagttcattacaatgatggtcaccgccatacccacggcgtatcccgaaaatgcgctgttgaagtaacgcttcttgatgcctcttgagacatcaaagcgcaaggcaagtgcaacaaaaatgccaggtattacaatgtcaccaaggccaagcatggagaatggccttgcatcatccgcagtaggaaacagaagctttatcggagcatcaaaagatttagccacactgaccataactggagtgaagaacacccagaaaatgtcatacacaaaaagtccacccaagagaatggctccggttttaaatgatcccaatgacagcatctcaatcccctgaatacagaaagccaatcccagaacattatttgcaagccaatgcttctttgacgcataccacaagcagaagaaaaatccaggtattgaagcaacaatctgggactttgtgaactccaccgggagtgagtggaaaagtggagcacgccagacaatgagattatcattccactcttttggaagaaaacgttttatagaaggaagcagtgttgcagagagagcaacaatgcctagaatgaaaaagtaggcagtgagcacagct

SEQ ID NO: 259813 - DNA, 471 bp, Zea mays
ccgacgcgtccgcccacgcgtccgcccacgcgtccggccacgcgtgcgcccacgcgtgcggccacgcgtccggaaattcgccgcttgatgtgtggatccgtcgcggctgccgtcaagcatagacaccaagaaccagacctcggggtggatcatcggggtcgcggaggtctactggatggggtcaagaagtatccgggcaagtcgtctctgggaaccctgcttattgctcgccggatgctagcgccgccgtggactgcgcggctccgagaagtcgaggtcgtcgcgacatatcccaggaaccttcggacttggaacgaagctgtccataatatggaaagcatgattgggacgaaggtcgaatcaattctgaagctatgcgcaaggaagcttcggctcagtagcagaaaaaggaaccgacctaaaaaggaaaaggctatttagtcctcgatagattgtccttaagtcaattgt

SEQ ID NO: 259814 - DNA, 379 bp, Zea mays
atttaagaaatttgccgcttgatgtgtggatccgccgtggctgccgtcaggcatagactccgggaaccggacctcggtggtggatcatcggggtcgcggaggtctactggatggggtctagaagtatccgggcaagtcgtctctgggaaccctgcttattgctcgccgatatgttttcaggcgtcgcgatgcagctgtgtgccgtggctgggtctcattgccgtcttcaatcgaggtgaggccacgaggatctgaagaatcaccctggtaactggaatctcaagtgccaggtgtgacagccgacgtcgacccgagacttcaacgtcttcccgtcgtcctccatgtgctcccgggttcgcactcatggagaagaataggt

SEQ ID NO: 259815 - DNA, 1828 bp, Zea mays
gggattggttctttatcagctagggaagctgaaggtagagcaaacattacaactggtgacaaggaagcccataaacttttgcagcctgttgacaacaccctcaagacaatggcactagaatttgctgagtatcaggtctgtgtggatgtattcctcaccacacaatcctatgttgatattgcttctatatccgttgtgcctcaaactacaggtggccgggtctactactactatccgttttctgctctttcagatccagccaagctcttcaatgatctcagatggaatatcagtagaccccagggttttgaggctgttatgcgtgtaaggtgcagtcagggtctccaagttcaggactattatggcaatttctgcaagcgtgttcccaccgatattgatcttccagcgattgattctgacaaaactgtgatggtcacgtttaagcatgatgacaagttacctgaaaatgtggaatgtggcttccagtgtgcacttctctatactactgtatatggacaaaggaggatccgagtcataaacctttcactttcatgcacaaatttgcttgccaatcttttccggtatgctgatttggagacacagttttcatgcttcctgaagcaagctgctaatggcatcccgacatctccattacctcgtattcgggatgaagcaacaaatacatgcataaatattcttcaatcttaccgcaaacactgtgcatctgtaacttcatcagggcagttgattctcccagaggctctaaaactgctgcccttatatactttggcactggtcaaaagcttaggcttgagaaccgatgggcgattggatgaccgttcctactggatatctgtagcctcgtcagtttctgtagtactagctgttcctttggtgttccctagattgattcctatccacgatctcacatcaagggatgacgatgattctcttatacccagtccccttatgctcaaaagtgaaaatgtacaagaggatggggtctatttattggaaaacggtgaggatggtctagtctacgtaggaaacatggtaaatccggctaccctggaacaaatattcggtgtctcttctttggctgcattaccagcccagttagcattggagcagtttgacaacgaactctcgaggaagattaacgaagttgtaaatgaaattaggcgccagaggtgctcatacttgaggttaagactatgcagaaggggcgaaccatctggtgattttttccggtcatttctaatagaggacaaggcacctggcgtcttctcctacgaggagtttctcgtgcatgtccacaggcagatccaaagcaagatgacctgagggccaggcgaatgcaaaggcaacatgaactgagggtcaggctggcaaatgcaaaagcaagatgacctgagggcccagatcctgtctgtagcatttcggtcagtagatggattgtaggtaccaaaacgagttcgatttctgcataaggagacagcgaagtggcgattccacatcactatggagcataatgtttgctcggacagtagaactcaggaatagaggcaccgtttttggagtggggtggtatatgtgttgtatacagagatgagaggcgttagtttttgtgttgtcattgtcgctgtgcatccttattgttttaccccttgtccaaaaagggatgcattattatgttgagaggaaggttatagaggtttcgcaataaaatgcacctagccaattgatagtatgaatcagatatataatctaatttatgccataacaaatcactgcatgggcagaacaaggttaaaaaaaaaagggcggc

SEQ ID NO: 259816 - DNA, 778 bp, Zea mays
cccacgcgtccgcccacgcgtccgcccacgcgtccgcccacgcgtccgcccacgggtccgggaaaatggtgaggatggtttaatttatgtaggaaacatggtaaatccggctaccctggaacaaatattcggtgtctcttctttggctgcattaccagcccagttggcgttggagcaatttgacaacgaactctcgaggaaggttaacgaagttgtaaatgaaataagacgccagaggtgctcatacttgaggttaagacaatgcagaaggggtgaaccatctggtgattttttccggtcatttttagtggaggacaaggcgcctggcgtcttctcctacgtcgagttccttgtgcatgtccacaggcaaatccaaagcaagatgacctgagggcccaagatcctggttgtaacatttcggtcagtagatggattgtatgtaccccgggagtttgatttctgcataaggagacagcaaagtggcgattccatatcaatgtggagcataaagagtgctcggataatagaactcaggaatagaggcttgtggtgtttacagcaccgtttttggagtgggtggtatatgtgttgtatacagagatgagaggggtggagctttagtttttgtgttgtcttttatcatcgtgcatccttgtttatctcatgtgccaaaagtgttggattatgttggttggaaggttatagaggtttcgtaatagaatgctcctagctaatcgatagtatgaatcagatatacaaaaatttccctagtatgttg

SEQ ID NO: 259817 - DNA, 452 bp, Zea mays
cccacgcgtccgcccacgcgtccgcccacgcgtccgcccacgcgtccgtcgcttcaatcttaccgcaaacactgtgcatctgtaacctcatcggggcagttgattctcccagaggctctaaaactgctgcctttatatactctggcactggtaaaaagtgtaggcttgagaactgatgggcgattagatgaccgttcctattggatatctctggtctcgtcagtttctgtagtactagctgttcctctggtgttccctagattgattcctatccatgatctcacgtccagggatgatgatgattcccttgtaccaagtccacttatgctcaaaaagtgaaatgtacaagaggatggggtctatttattggaaaacggtgaagatggtctagtctacgtaagaaacatggtaaatccggctaccctggaacaaatattccgtgtctcttcttt

SEQ ID NO: 259818 - DNA, 1799 bp, Zea mays
  unsure (1)..(1799): unsure at all n locations
gttggaatctttgagagcaaaatttgttgaactacagtcagagatggaagaaagagacaaggagattatatttgcacaaaggaatatgagcttgctatatgaagcatgcgcaagttcagttgctgagattgaaggaattagtgatatatatcctggtaaacacagctatgctgttgaacattctgcagatgaatgtataacatcaatcgttgaacagttagttatggctgtaaaaacttctcagaacagtaacgaaggtagcacaaaggagctgaaggctattgttcttgagttgcagcaggagcttcaagctaaagatgtccaaattagcacaatcagtttctgatctatcantatcagttaagggtggctgaatcttcganaaagcaattctaagttgattttgaagatgcaagaatggagctccaaaatttggagaaacaagttgatgtggtgcagaatgagaagaaggatttagagactcaattaaatgagcttaaaaatatggaatcaatggcaagtgaacaacatggaagaattgagaaattgactgatgaattaagcagaaaagatcaagaaattgaaggtttggtgcaagcactcgatgaagaagaaaaagagcttgaaatcttggagaataaaagccttcagttggagcaaatgctgcaagagaaagaatttgccttgaagacctcagaagtttctaggaccaaagctttggcaaaacttgcaacgactgttgacaaatttgatgagctgcatagcttgtctgagaaccttcttgctgaagtggaaaaccttcagttgcaattgcaagaaagagattctgagatctcatttctgcgaaaagaagttacaaaaagcactaatgaactgctaaccactgaagagagcaacaaaaattattcatctcagctaaatggtttcatgaagtggttagaaagagaactgttgcagttcggcttccattctgagagtgccaatgattatgattacactcaatttcctgtctatatggatatgttggacaaaaaaataggatctctgatagccgaatcagatgatttaagggttacagttcaaagcaaagattctttactacaggttgagagggccaaaattgaggagttgatgcgtaaatcagatggtctagaagcttcattgagccaaaaggattcccagatagggttacttcgccgggacagagcatccaatcagcagagcagatctataaatttgcctggcacttcagagattgagcaaatgaatgacaaagtaagcccagctgcagttgtcactcagattcgaggcgcacgaaaagtcatcaatgaccaagttgctattgatgtagagatggagaaggacaagccttttgatgatgaagatgatgacaaagcccatggtttcaagtcattgactatgtcacgctttgttcctaaattcactcgaccggtatcagacagaattgatgggatgtgggtctcaggcgatagattgctcatgaggcaaccgaccttaagactcggcgtcttgatatattggattgcactgcatgctttgcttgctagttttatttgaactctgtaaagatgtagccatctcctggcgagtgactgtacagtactctgtgtctatagcaagttatatctaaacagaagcagtttgcactgataccgtgattcctttcgaaaatgttaccgaatacttgagccgtattggcagctgcagaaatcttcaaatgaatggccaaantttttttttttttccccaaaacccncccccccccccncttttttttt

SEQ ID NO: 259819 - DNA, 511 bp, Zea mays
tctatagcaagttatatctaaacagaagcagtttgcactgataccgtgattcctttcgaaaatgttaccgaatacttgagccgtattggcagctgcagaaatcttcatgatgcattttcacccttcatcctggtgcaaatcctgtctagcttagtttgtgttcaattgatacaaatggatggaagagaactgaaggaagcagcagcaaagaaccccctgtacatacatttttgtttgctctattctttgcttttagaaaaaagatggagggcattctacatgctagcgactacttactaccctatatgatacaggattacagggaagtgacatgtagttttggaagttagggttttgggatggtagcaggtcatcccctcccttgagttggccccctcaatcccatcatgccttctaatctttttcgtttacatgtataacacagtgattatatcatttattgtaatccacatagtgtgcaatgggggagcttgcccattttttttccgtc

SEQ ID NO: 259820 - DNA, 1420 bp, Zea mays
gcgcccacgcgtccgctggcttaattttgcatttgattacttccatacgtaggctggacaagaacgtggaagattacatgtaaatccagaagaagatgagcaaccgaagaagaaagttcgacttggaagcccagcaaatcagtggatttcagtttataatgctagaaggcccatgaagcagagataccattacaatgtagcagatgccaggcttcatcaacacatagagaagggtaatgaagatggattgttcattagttcagtagcatcttcagccaatctttgggctctcattatggatgcagggactggtttcacatcccaagtatatgaactgtcacccatattccttcataaggattggattatggagcagtgggaaaataactactacatcagtgccatagctggtgcaatgaatgggagttccttggtggtcatgtcaaaaggaactccttacactcagcagtcttacaaagttagtgaatcattcccctacaagtggatcaacaagaaatggaaagaaggttttcatgttacatcaatgacaactgcaggaagccgctggggtgtagttatgtcaaggaactctggatactctgaacaggtagtggagttggattttctttatcctagtgaaggtattcaccgacgatgggagaacggatatagaataacttctacagcagctactggcgatcaagctgctttcatattgagtatacctaaaagaaagttaatggatgagacacaagaaactcttagaacatctgcttttccaagcaaccatgtgaaggagaaatgggccaagaacctttacattgcttcaatatgctatggccggacagtgtcatgaggcttgctcggctgcatccctagttgggaagagcatgttctgatgagtatatattgggaaaaaagcagcaatctttgttgctgctctctattaatctctgtatgtgtaggtaacccgttcaagatgaagcaccttacagtggccagagtaggagctcaagaaagaaccgagaggaaggtggaaagcaatcggccaataagcagacgaggagtatgtgatctggctagtagcgggtacaggcgctaatggcgtcaaatgttttgtatcagcatgttttgcttttgcttcgctcctgaccgctgtgcaaagagtagacagcttgtttctttcggaggcaagtcatctgagaaccatcgtgtatagcgtatgatgtcattgtattttctttagtggaggccaagttccatctttccggaactcccaaaatgctaagttattatgcgaggaaacaagtgtactgataaaatcggtgtatcaattccattattcgacaattctcacctgcattaattaatgcaatgctgcaaaaaaaaaaaaaaagggcggccactcgcgatctagaac

SEQ ID NO: 259821 - DNA, 451 bp, Zea mays
ggttggttgccgtggcaaggttatcagggcgagaacaagagttttcttgtttgcaagaagaaaatggctacctctccagatctattatgctgtttttgcccaactccattcagacttttcctggagactgtgacaaacatgaaatttgatgaagaaccaaattactcaaagcttatttcccttttcgatgaattgattgagccccagcatttgaggcctattagaattgatggtgcattgaaggctggacaaaaacgtggaagattacatgtaaatccagaagaagatgagcaaccgaagaagaaagttcgacttggaagcccagcaaatcagtggatttcagtttataatgctagaaggcccatgaagcagagacaccattccaatgtagcagatgccaggcttcatcaacacatatataagggtattgaagatggattgttcattactt

SEQ ID NO: 259822 - DNA, 606 bp, Zea mays
tccactcgtccgggcaatttctatacttgagaaacttcatgcaaaagggtttgttcatggagacgttaaacccgagaattttctacttggccagcctggatcccctgacgagaaaaaactttttctgattgatcttgggttagcatctagatggaaggaatcagggtcatctggacaacatgttgaatatgttctgtgccctgtccttgtcagaggtacaataagatacgctagtgtccatgcacatttaggacgtactggtagcagaagggatgatctggaatcattagcatatacattgatatttcttcttagaggaaggttgccgtggcaaggttatcagggcgagaacaagagttttcttgtttgcaagaagaaaatggctacctctccagatctattatgctgtttttgcccaactccattcaaacttttcctggagactgtgacaaacatgaaatttgatgaagaaccaaattactcaaagcttatttcccttttcgatgaattgattgagccccagcatttgaggcctattagaattgatggtgcattgaagtttttttttcactacaagaaatgacatttctattttgtatacaatta

SEQ ID NO: 259823 - DNA, 992 bp, Zea mays
  unsure (1)..(992): unsure at all n locations
aatggaggcagacatacatagtggtgatgcggtgaagaaggagcttcatcaagtgcatatggaggcaaagagacttattactgagaggcagatgctgacccttgagacagaggatgtgactaaagaattacagaaactctctgcctctggtgacagtaaaagccttcctgaattgctagctgagctagatgggctaaggaaagagcatcttaatttacgatctcaatttgaatttgagaaaaatacaaacgtcaagcaagttgagcagatgcggacaatggaaatgaacttgataaccatgaccaaacaagctgagaagttacgtgttgatgtggcaaatgctgaaagacgggcacaagcagctgcggctcaagcagcagcacatgcagctggtgcacaggtgacagcttcgcagcctgggacagctcaagctaccacggtttcagcagcagcagccacagactcatatgcaggtgcatataccagctacccccctgcatatcagcagggagcccaggctggggcatatcagcagggagcccaggctgggacgtaccagcagggagcccaggctggggcgtaccagcagggagcccaggctggggcatatcagcaggggggccaggatggggcatatcagcagggggctcaggctggggcatatcagcagggagcccaggctggggcatatcagcagggagcccaggctggggcatatcagcagggagcccaggctggggcatatcagcagggagcccaggatggggcatatcagcagggtgctcaagctggagcatacaactatgcttatgatgctggcacggcttatgcatatgcaggttactctggctatccagttgcaggctacgcgcaaagtgcagtgcccaactattcctatgctgcacctncgcagccaacaagcagcggtgcagctacgaacgccgcaggaagccagtatggggcaattggtagtgctggatatcctactgggc

SEQ ID NO: 259824 - DNA, 926 bp, Zea mays
gtcgccatctccccaccacctcgtcaccgcagaccatgcccccacggggcccccgcgcgggcgtggcctaccggtgaacgccgggcggacacacgggaccgcgcagccggcgagcacgggatcgcacatcacgggcgcggccaagaggcgggagccgtgcgctgcgaagtgcggaagcgcctgttaattgctctccctccagtgccgcgcagtgcgcacagggttttaggaagggggcgacaccggtatcgccattcgccagccatggaatccgcaacggcggccgtccgcagcgcgtcgctagcccgggcccggcccgcgccgctcgtccacgggcgcgcgcgcggggcgggtcgcgtcgtgggcgctggcctcgccgcgcgcgcccggcggagggcgctcgtcgccgtagcctcccaccaggagcaccacgagccgctcccgccgcgcgcgcaggagggcggcgccgtggctgtggcgacgcaggctgacgaggcggaggtccatgcgattgacgctccggcggctgctgctgaaacctcgtcttcccaactggctgctggcaagacagtgcgtgttcgatttgtgctgaaaaggcagtgcacgttcgggcagagcgtctgccttgtcggcgacgaccctgcgctcggcctctgggatctgtcgaacgcgtttcctttgaagtgggcggaaagccacgactggaccttagagaaagatttgccggccaacaagctcattgagttcaagttcttgctccaagattccacaggaaagttgcattggcagggtgggccaaacagaagctttcagacaggggaaaccgccgcaaacacattggttgtgtttgaagattgggatgatgtgaagaatcagaaaatagtagaagaggggggagtggcgtctgctgggatagaacaaactgg

SEQ ID NO: 259825 - DNA, 751 bp, Zea mays
ggtcgatacacgcgtctacacacgcgtctgctcgtttctcattcagcgcccgtacagccaccactctcaaccgagccatatccaaagttctcaacatcgcttcgtgcagcctgcatcggtcgacgagggctgcacgaacgatggggtccgcctccgcctcagtgacgacaaccagcctgctggcgctggcgctggcagcgctggctttcgtctccagggccgcggcgcagggcaacggctgttccagcgtgatgatgaccctggccccgtgcatggacttcatctccagcaaggcgtcggagccggggatctcctgctgctcggtgctggccggagtcgtgcagaccgacccccgctgcctctgcatggtactggacggcactgccacgtccttcggcatcgccatcaaccagaccagggcgctggagctccccggcgtctgcaaggtcaaggcgccgccgctcagccagtgcacaggcgtccctgcggcacctgcaccgacgcctcccgacgagccagcagcggcagctgaggaagaagccgacgcagctgcagatgccccttcagcaaatggagcctcaagctccacaaactcaaagaatgcagcgagcttactgcttctcatctgcgcattgctgtatgccttctaataagtggtgatacaacttcgctggccatgtcaccgtgcaggaattaggtctttccctgagtcctgacaatgtacttacccatgattctccggcaaattttt

SEQ ID NO: 259826 - DNA, 529 bp, Zea mays
accggcataatccggcggcataggctaagaaagggttcctgcccgtcgtcgacaagaaggctggctactctttcctctacccgttcggatgggaggaagtggctgtgcaagggcaagacaaggtgtacaaagatgtgatagagcctctcgagagtgtgagcgtcaactctattccaactagcaaggaggatatccgtgatcttggtcctccggataagggtgccgaggctctgattaaaaaggttttggcaccatcaacacagaagacaaagttaattgaggcgaaagagaatgatgttgatgggagggcttactacacttttgagttcacagctcaggctccaaactacaccagacatgcacttggtgctattgtaattgcaaatggcaaattttacacattgaccactggagcaaacgagagaaggtgggaaaagatgaaggatacgctgcatactgttgtggattccttcaaaatcgaaaatagaatatgagtgcctgaattgctgtgctgtttttccttcggtga

SEQ ID NO: 259827 - DNA, 561 bp, Zea mays
aagaagttggagctgctcgcctgctgcccctttcctcccccgggccccctcttcgctgcgacggcgagcccaagaaaactttcctctaggagcgcatggaggtgtccgctgggctccggccgccgcccgtcgctgcggcagcgtcgctccgaggccgtcggtttgcgtcggtgccgccgctcgcggcttcccattcggtgcggtccgtgtcccgcgcggttaagaataaagcaagtgcaatctatgacctccaaaggaatagaagttaccttgaatcgctattctgctacgactaatctgtcccagaggagaatattggaaaaccgtccggtctagatctggaaaagaaggatgtcgggggcaaccctccctgctcaagctgtgaagctaaaggcgctgtgctgtgcgcaacatgcgctggttcaggcttgtacgtcgactcgatactagagagccaagggatcatcgtgaaagtcagatgcctaggctgtggaagaactgggaacatcatgtgctccaagtgtggaggcccggggcatacctgaatgataaaaagcttgg

SEQ ID NO: 259828 - DNA, 607 bp, Zea mays
atgtacacaccaagttcaatatcaacatgacttttgcaggagaaccggcgtgtgctagctactgacgagtggcttagggttcaagggtgtgaggatgtatatgctcttggtgattgtgcaacgattgctcaaagaaaagttatggaagatgttgcttccatattccgagtagcagacaaggataactctggcactttaaccgtgaagaaaataaaagatgtccttggggacatatatgagagatacccacaagtggaattgtatcttaaatccaaccaaatgaagagcttccacgagctacttaaagactcagatggtaactccaaggagttgaaagaactgaacatcgaacagttcaaaaaggcccttgctcaagtggactctcaagtcaagatgctcccagcaacggctcaggttgctgcacaagagggaagttacctagcggattgcttcaacagaatgaagacgtgtgaagaatatcctgagggtcctataaggatcagaggtgcagggcgccatctgttcaaacctttcaggtacaagcatcttgggcaattcgctccactggggggagagcaaactgcttaccaattggcacgggactggg

SEQ ID NO: 259829 - DNA, 762 bp, Zea mays
gtacggtcggaattccgggtcaccacgcgcccgggacctggcccacgcgtccgcccacgcgttcgcccacgcgcccagcgccggcaaccgccgtcatcgatcgatcgcccggaaactaacccctaacgatgtctggagccggcgaggaggacaagaagcccgcggagggcggcgcccacatcaaccttaaggtcaagggacaggatggcaatgaggtgttctttcgcataaagaggtccacccagctgaagaagctgatgaacgcttattgtgaccgccagtctgtggacatgaatgccattgcgttcctgtttgatggccgcaggcttcgcggcgagcagacccctgatgagctggagatggaggacggcgacgagatcgacgccatgcttcaccagaccggaggcagcgttcctagcaccacctaaaagcagcagttgcggagcctcgttttgctctccgccctgcgtagtagtaaacaaaagggaaaaagtctttttaaggaacttgtgatgctctggctccttgtgccattgctgagggacatccttagcctttgtttagtagtatggtttggtactttgttctgtcatcactcgtttatctatccctaatacatgccgccatgattgtactcccaatgacgcgcagatcatttgctttgttttgtctgctcgaacctcgaagtcgtctatgcttttcagtttattttgggcaaaaaaaaaaaaaaaaaaaaaggcgcggccgccccgggtatttcgg

SEQ ID NO: 259830 - DNA, 638 bp, Zea mays
acatcatatacataacggacaatgatatgcaccgatcatgctaaatcttaggcctggcaatgcttctaggcggatatgtgtacacaatgcccacttacaacggctctaacatcaacctcatagtcaccgaactagctgacaaatatcagttctcccacataaagaggtccacccagctgaagaagctgatgaacgcctattgcgaccgccagtctgtggacatgaatgccattgcattcctgtttgatggccgcaggcttcgcggcgagcagacccctgatgagctggagatggaggacggcgacgagatcgacgccatgcttcaccagaccggaggcagcgttcctagcaccacctaaaagcagcagctgcggagcctcgttttgctctccgccctgcgtagtactaaacaaaagggaaaaagtctttttaaggaacttgtgatgctctggctccttgtgccattgctgagggacatccttagcctttatttagtggtatggtttggtactttgttctgtcatcactcgtttatctatccctaatacatgccgccatgtttgtacttctcaaaaaaagaaaatgttaaagcatttactgcagcttggtgcaacttggtgggtcttggactttaagaa

SEQ ID NO: 259831 - DNA, 676 bp, Zea mays
caaatcgagaaatggtccaaatttttcgatttgtgcgtgtcatccttgcgccgtcatcgatcgatcgccggaaaactaacccctagacgatgtctggagccggcgggggggacaagaagcccgcggagggcggcgcccacatcaaccttaaggtcaagggacaggatggcaatgaggtgttctttcgcataaagaggtccacccagctgaagaagctgatgaacgcttattgtgaccgccagtctgtggacatgaatgccattgcgttcctgtttgatggccgcaagcttcgcggcgagcagacccctgatgagctggaaatggatgactgcgaccagatcgacgccatgcttcaccagacccgaggcagcgttcctagcaccaccctaaaaacctcgttgtgctctccgtcctgcgtggtagtaaacaaaagggaaaaagtctttttaaggaacttgtgatgctctggctccttgtgccattgctgagggacatccttagcctttgtttagtagtatggtttggtactttgttctgtcatcactcgtttatctatccctaatacatgccgccatgattgtactcccaatgacgcgcagatcatttgctttgttttgtctgctcgaacctcgaagtcgtctatgcttttcagattattttgggcatgtttttaatt

SEQ ID NO: 259832 - DNA, 964 bp, Zea mays
tcggtgcctgaattccacgggtcgacccacgcgtacttggacgcgtgggaaaaaggccggcgactacaccatcttcatgggtcttgagaagtacgagaacgaggacctcatcaaatacggcttccccgaggacatctggttccatgtagataagatgtcctctgcacatgtgtatgtgagattgaataaaggtcaatcaatggatgacatgagtgagggtttgctggaagactgtgcgcagcttgtcaaagctaattccattcaaggtaataaagtcaataacattgatgtagtttatactccatggtacaatttgaagaagacgccttcaatggatgtgggccaagttggttttcacaaccctaaattggttcgcactattaaagtggaaaagaggatcaatgagattgtgaaccgcttgaataagacaaaggtggaacggaaacctgatttaaaggctgaaagagaggctattagtgctgctgaaaaggcagaaagaaaggcacagcttagagacaagaaacgtagggaagagatggagaggcttgagaaagagaagcaggctgatatcaggagctacaagggtctaatggtccaagagaagatgacttccaacaagcaaatcgcttctggcagcaagaccctgcaggaacttgaagaagactttatgtgagaggcggacattataaatgccatgctgaagatttccttgaactgcttctgtcgaagacagaaggggtaccacaggcttgtgagatactggatctaaatgactcatgggcaggccatggtctgttattatctcctcttgctgttgtggtctatgtaaaccttgtttacttgctgaaaaaacaacggtgcatgctctaactgtggttgatgtaatggtctgttgcccatcaagttgaaatggtaatggaattatggtttcctggatttttcaaacaataaagacatggcagca

SEQ ID NO: 259833 - DNA, 549 bp, Zea mays
cgaagaaagaagtatgaataaaacaaaatttgaagacgcctaacagcccgactgcttcgtttccacgcgcacgaaaccctagactagataaaaagttcccatttccctcaattccccaacttccctcgccgcaatctctcgccgcctccagtccagagccaccgtgagatctgcccgattccgccgcccggacccggggactccctcccctcctcgatccgttcgggcggccggccggcctagcttcaagtgcggggatggtgttctacttcaaggcgcggcccgaggccggcgactacaccatcttcatgggtcttgacaagtacgagaacgaggacctcatcaaatacggcttccccgaggacatctggttccatgtagataagatgtcctctgcacatgtgtatgtgagattgaataaaggtcaatcaatggatgacatgagtgagggtttgctggaagactgtgcgcagcttgtcaaagctaattccattcaaggtaataaagtcaataacattgatgtagtttatacttcattgtacaattttt

SEQ ID NO: 259834 - DNA, 754 bp, Zea mays
  unsure (1)..(754): unsure at all n locations
aaccgctttcccgttccccaccccgaccgactgctccccctcccccgcaccagcctcaagccctcaaggcctcaaggcatcgccggcgccgcaacttcgctgaggaagcccgcacccctgcccggatccgatggccaacagcaacctcccgcggcggatcatcaaggagactcagcggctgctcagcgagccagcaccggggatcagcgcgtcgccctcggaggagaacatgcgctacttcaacgttatgatccttgggccggcgcagtcgccctatgaaggtggagtttttaagcttgaactctttttacctgaggaatatccaatggctgccccaaaggttaggtttctgacaaagatttatcatcccaacatcgacaagcttggtaggatatgcctcgacattcttaaggacaaatggagcccagctcttcagattcgaacagttcttctgagtatacaggcacttctgagtgccccaaatccagatgatcctctctcagacaacattgcgaaacactggaaatccaacgaagctgaagctgttgagacagcgaaggagtggactcgcctgtacacaagtggggcatgacagccaagtgttgttccagatgtgatgttacaacacttccatagtttggggccgactgaacacccctcttgcttggtgtgagcaaatttgtaaaatgttgcaatggggtaaaaaacccaccccttccttcgtgctttgtttnaaaaaattatttaagggggt

SEQ ID NO: 259835 - DNA, 612 bp, Zea mays
ctcatgcacaagctactaggtatatattcttcttatcaaatcattgattttttcccttttcaatatagcatgtaatctagaaaatgcatggcaagtaaaagagtagtgattatttcacaaagttaagccaattaaagacttaattccaggcacaactacagataacgatagagtaacaattgctcacccatatggcatcatttatttgggaacgttaaacatggcaggatagagttccaaaactatttggttttaagagactcgccggccttggcaagctcctccagctttttatcaatctgtgcttccgtcaggccatccaagttcacgcatctctccacacccatatcgtagcgcgcccagagctggggctggacaccggagcactcgcggacaaggaaggggagggaggggttgcgagccttgatgtcaccatagttcttcttcacgaactcacgggcggcggcgctggccggggaggactgacagaagaggacgcggatctcctttaggctccgagacaggctcgcccgccatgccatcgcccgatcgccgccgcctgcttcctctgtgttgtgttaaggggaaatcgcggacgcgtgggcggacgcg

SEQ ID NO: 259836 - DNA, 666 bp, Zea mays
ccgacgcgtccgcggacgcgtggccgtacgcttgcgtggccgccgcattcgccctagggaggtggagttcttaagctcgaactctttttacctgaggaatatccaatggctgccccaaaggttaggtcccgggccaagatctatcatcccaacatcgacaagcttggtaggatatgcctcgacattctcaaggacaaatggagcccagcacttcagattcgaacagttcttttgagtatacaggctctactgagtgcgccaaatccagacgaccctctttcggataacattgcaaagcactggaaagccaatgaagtagaagctgtcgaaacagctaaggagtggactcgcctgtatgcgagcggtgcatgagaacgcagtgatgttcttgatgtaataacccatcatacttcagtcctcatctattgccatttgcttgataaaaaataggctggagatatttgccatggaatgaagtctctacatgactatcactctgaattgtttggttgtacacctgtggtcggttccctttaccttggggcacctttgacaaatcagtatctgtggtagaacttgctgatactgtaatatatttgttacttcatgtagaagagcttctctactgttcataatgttggaactgaggctggttagcttggtttc

SEQ ID NO: 259837 - DNA, 913 bp, Zea mays
atttgttacttcatgtagaagagcttctcaactgtccaaatatattagagtaactgcaagttctaccacatatactgattagtcaaaggtgcccaaaggtaaagggaaccgaccacaggtgtacaaccaaacaattcagagtggtagtcatttagagacttcattccatggcaaatatctccagtctatttttatcaagcaaatggcaacggattaggactgaagtatgatggggttattacacaaagaacagcactgcgctctcatgcaccgctcgcatacaggcgagtccactccttggctgtttcaacagcttctacctcattggatttccagtgctttgcaatgttatcggagagagggtcatctggatttggtgcactcagtagagcctgtatactcaaaagaactgttcgaatctgaagtgctgggctccatttgtccttgagaatgtcgaggcatatcctaccaagcttgtcaatgttgggatgataaatcttggtcagaaacctaacctttggggcagccatgggatattcctcaggtaaaaagagttcaagcttaaaaactccaccttcatagggcgactgcgccggcccaaggatcataacgttgaagtagcgcatgttctcctccgagggcgacgcgctgatccccggcgctggctcgctgagcagtcgctgcgtctccttgatgatacgccgcgggaggttgctgttggccatcggatcggggccgggtgcgggcttcctcctgaacgaagttgcggcgccggcgatgcctcgaggatggcgcggggaaaggaggaggaccagccggtcggggtggggactggggaacggggagggaggcagtggtgggttgggttgggttgggttggccgctccctattgaaagtggacgcggttatggc

SEQ ID NO: 259838 - DNA, 837 bp, Zea mays
agcggcccattcgacctccctcgacccaccccctcgtctcgtctcgtctcgtctcgtccacctccccagcggcgcgtgcgcgtgaagcttgaggcaatccccgctccgtctagcggccctgcgcaatcagtcagggttccatggccaacagcaacctcccgcgccgaatcatcaaggagacgcagcggctcctcagcgaaccagcgccggggattagcgcgtcgccgtcggaagagaacatgcggtacttcaatgtcatgatccttggccccgcacagtcaccctatgaaggtggagttttcaagcttgagctattcttgcctgaggaatatccaatggctgccccgaaagttaggtttctcaccaaaatttaccatccgaacattgacaagcttggtaggatatgcctcgacattcttaaggacaaatggagtcccgctcttcagatacgtacagttctgctcagcattcagggcgcaggtaattgcttattttatcgtctgtttggctaaatagctgtgatggtgggtggtatatgatgatgtactctgcattgtatcaatactgcatccaatttttggcttgcatatggttctagcatatcagtgtgctaccacactgcccccctgacaatatttggtcttcagcattcaggcacttctgagtgccccaaatccagatgatcctctctcagacaacattgcgaaacactggaaatcaaatgaagctgaagcttttgagacaggtacttgtagttgcagtaaacacagttatgaacatagtgttggtatggtttctgcttcacgtctatattacagatgtcctaacatggcagtc

SEQ ID NO: 259839 - DNA, 460 bp, Zea mays
aggagtatcgattattttggaccattaatcaagacatgatacgagttccaaagctatttggttttaagagactccccggccattgcaagttcctccagcttcttatcaatctgtgcttccgtcagcccatccaagttcacgcatctctccacacccatatcgtagcgcgcccagagctggggctggacaccggagcactcgcggacaaggaaggggagggaggggttgcgggccttgatgtcaccatagttcttcttcacgaactcccgggcgggggcgctagcgggggaggactggcagaagaggacgcgtatctcctttacactccgagacaggctcgcccgccatgccatcgccgccgtctgctcgcgttctactggattctcgccgccgcctgcttcctctcggctatgcggcgaaacggagcaatttgtcaccattcttgcggctttgcaaaata

SEQ ID NO: 259840 - DNA, 712 bp, Zea mays
ccgcgccccaccgcttccccgttccccaccccgaccgactgctccccctcccccgcaccagcctcaaggcatcgccggcgccgcaacatcgctgaggaagcccgcacccctgcccggatccgatggccaacagcaacctcccgcggcggatcatcaaggagactcagcggctgctcagcgagccagcaccggggatcagcgcgtcgccctcggaggagaacatgcgctacttcaacgttatggtccttgggccggcgcagtcgccctatgaaggtggagtttttaagcttgaactctttttacctgaggaatatccaatggctgccccaaaggttaggtttctgacaaagatctatcatcccaacatcgacaagcttggtaggatatgcctcgacattttcaaggacaaatggggcccagcacttttgatttaacagatcttttgagtatacacgctctactgagggcgccaaatacagacgaccctctttttgataacattgtagaacactgttgagacactcaatgaaaaaatgtctgaacaaataaagagtgggctctcctgtatgtgagcggtgcatgagaacgcacagatgttttttttgtaataacccatcaacttcagtcctcatctattgtcatgtgcttgataaaaaataagctggagatatttgccatggaatgaagactctacatgactatcactctgaat

SEQ ID NO: 259841 - DNA, 483 bp, Zea mays
gtgcctggaattaagtctttaattggcttaactttgtgaaataatcactactcttttacttgccatgcacaactacagataacgatagagtaacaattgcttacccatatggcatcatttatttgggaacgttaaacatggcaggatagagttccaaaactatttggttttaagagactcgccggccttggcaagctcctccagctttttatcaatctgtgcttccgtcaggccatccaagttcacgcatctctccacacccatatcgtagcgcgcccagagctggggctggacaccggagcactcgcggacaaggagtggactcgcctgtatgcgagcggtgcatgagagcgcagtgctgttctttgtgtaataaccccatcatacttcagtcctaatccgttgccatttgcttgataaaaatagactggagatatttgccatggaatgaagtctctaaatgactaccactctgaattggtt

SEQ ID NO: 259842 - DNA, 592 bp, Zea mays
  unsure (1)..(592): unsure at all n locations
tcgaatcatacttagtttctgacaatgttactttcacttattgattggtcaggtggagtttttaagcttgaactctttttacctgaggaatatccaatggctgccccaaaggttaggtttctgacaaagatttatcatcccaacatcgacaagcttggtaggatatgcctcgacattctcaaggacaaatggagcccagcacttcagattcgaacagttcttttgagtatacaggctctactgagtgcgccaaatccagacgaccctctttcggataacattgcgaagcactggaaagccaatgaagctaaagcttttgagacagcgaaggagtgaactcgcctgtatgcaagtggggcattgtaaccaagtgttgtttcagatgtgatgttataacatttccatagtttggggccgactgaatacccctcttgcttgatgagagcaaatttgtgaaatgttgcaatggggtcaaaaaaaattgtctaatcgtgataagaacatgtgaaagaaccccctcgctgcagtgcccgtgagcataaangcaggtgttcctttgtataaaaaaaaaaaaaaaaaaaaaagggcggcg

SEQ ID NO: 259843 - DNA, 762 bp, Zea mays
ctctgtagtttgtgtttgtctcaaaaagcctttgaccctgttcgctgcaattgtggtggttgatggaaatgcatatcatggtgaatctgcacccaacaagaaagatgcagagcagaatgcagctcgtgttgtgatcaagtcgattttagctaagcatgacacttgtatggtgagaattgttagatcgaagaaacaacttataactgctgtcagatcttctggaaacaccccagctacttttactcctatacagtttacacggcctgtttcatatgcagcatatggcagaccagatgatacaacacctgttttgccaaatgaatcttcctcattagctgttcaacgaggcatcaatgttgtacctgcagttgggacatctgtgaacccatcgtcagcaaatgtaagtcgctcaaagaagcgcaagggcagagttgaaggagcaggaggcaacgacacatgggttgccaagggtcattaacttctcagccatcaacatctaggatcctgtggtcaaccttttggcattcgattcgtcttggtacctctgcctgtcatgttgtttgctcaaaccactgcatatcgttgtaggttgcttttttaaccttaactttaattcgtaaccactgcattttgtaactgcataacaattcggctggatcagtttccaccaaagatataacgaacgaatggtaacagcctttatcttaaaaaaaaaaagaataaggaaaaaaacttccaaaaaaaaacaaaaaaggggggccc

SEQ ID NO: 259844 - DNA, 1038 bp, Zea mays
gtcggcgtttggggcggcggcgtgactggccgctggtcgcggcgcgcgtccggcctggtgggatcccttcggacttccgcagattcccgcgcgggggtgtttgatttggatgagaggagcgcggcggcgggatggggaccccttcgcagggctcggcggccgtgacggcggcccgggtcgacctctgcgcgctcgacctcatgcccgtctttgccaaggagatgatcgccggcggcgtcgccggcgccttctccaaaaccgccatcgcgccgctcgagcgcgtcaagatattgctgcagaccagaacaaatgagtttgggtctcttggagttctcaaatcattgaagaaactgagacaacttgatggagtcatggggttttacaaaggaaatggtgccagtgtgatgagaattgttccttatgctgcattacatttcatggcatatgagcggtaccggtgttggattttgaataactgtccctcactgggaacagggcctttagtagatcttttagccggttcagcatcagggggaactgctgtattgtgtacttatcccttggatttggcccggactaagcttgcctttcaggtcaatagttcagatgaactcagcagagctttgaaaaggggaagtccccagccagcatatggaggaatcattgatgtctttagatgtgtttactcagaaggtggagtgcgggctctttaccgaggtgtaggtccaacactcatggggatacttccttatgctggtcttaagttctacatatatgaagggctgaaggtacatgtaccagaagattacagaagttctgtaacattgaagctgtcatgtggtgctgctgctggtttatttggacagactctgacatatgcattagatgttgtcaggaggcagatgcaggttcaaaaatcagcaacaacatgagcaatttggtgccccacgaataacgggcacattccagggtcttgtgtccattaaacaaacacagggttggaaacaattatttgctggcttgagcctcaattacatc

SEQ ID NO: 259845 - DNA, 1571 bp, Zea mays
atccaccaccaccatgtgagcagacaaaggttggctacacaaacaggaaaagaatagtatatccgcccccatattgatcctccccacgtcgccgtgctcgttttgcgcgtccaccagcccgccccccaaccccacccagcgcgacgaagccggggggcgatcgctccagcgccgccggcgacctcgccccgggagccgccggcggtaccccgctctctgtcccgcctcaacgaaccctcaggtccaagtagttcgtttcgtgagttatccaaagttgcgccgcaaagatgagtactgctaatcgctaccaacacatcaagtcaactaagcctgttgtaggcaaagcaagaaaattgaaggatctcatgataaaaagtgacaataggatatgtgctgactgtggtgcacctgatcccaaatgggcatctgctaatattggagtgtttctttgcttaaaatgtggagatgttcatagggcacttggacctgacatctcaaaggttttatctgtaactttggatgattggtctgatagtgatatcgactccatggttgaggttggtggaaactcatatgcaaattcaatttatgaggcttttcttccaaaagatcacccaaaacccaaaccagattcaacgatggaatataggacaaaatttataagagctaagtatgagacacaagattttttgaagccaagtttgcgcatttcatcaagatcatcttttaaatctaccacttctgtgaagagtgtagatagcaatttctctagcacttcaaggaaggatgtctttgaagatacaagagaatttgttggagagttgaatatcacactggtcaaaggcaccaacttggccgttagagacatgctaacaagtgatccatatgttgttttaacgctcggagggcagaaagttcaatcaacggttaaaaaaagtgatctgaatccggtatggaatgaagtgcttaagatatctgttcctcgaaattatggacctctaaaacttgaagtgtatgaccatgatatgttctcagccgatgatatcatgggtgaagcagagatagatctccagccaatgatcacagccgccatggcctttggagatacttcacgtcttggtgacatgcaaattgggcggtggttcacgaccaaagacaacgccctgatgaaagatagcacggtgaatgtcgttgcaggcaaggtaaaacaggaggtgcacttaaagctgcagaacgtagaatctggtgagctggagttggagctagaatgggttccgatcctctagactaatgataactcccctgatccttttgtctaaaaatctatactcaagatgcatcgatgtttccaagctgtccacttgatggtcttggacatttttgctggatggtttgaatttgttaaaaatgtcactgtagaatatcatggtgtaactgtcggttgtactcgcgcctttcacccccctcccggtaactggttatcatgccttgtaagcactcgctgtctcttgattgttgttgcattgtcccattgaaaggacctgtgtcttgtaagagatggcaattatagc

SEQ ID NO: 259846 - DNA, 444 bp, Zea mays
ccggaattcccgggtcgagccactcgtccgggctaacgtacaatctggtgagctggacttagagctagaatgggttccgatcctctagactagggttactcccctggtcctgctggctaacaaactatcctcaagatgcatcaaaattttcaagctgtccacttcgatgatcttggacatttttgctggatggcttgaatttgttaaaaaaattgtcattgttaaatatcctggtgtaactgtcagctataatcacagcctttcattttgcccccctttggttgtcatgccttgtaactactcgccgtctcttgactgttgttgtattgtcccatcgaaaggacacgtgtatcataagacatgggcaattatagctaaaagacagctcagcgttcagacctactcagcatgatgctctgagtgcatatacgctacaagcctaca

SEQ ID NO: 259847 - DNA, 494 bp, Zea mays
cggacgcgtgggcccaaccccacccagcgcgacgaagccggggggcgatcgctccagcgccgccgcgccagcgacctcaccccccgggagccgccggcggtacccccctccctatcacgcctcatcgaatcctcaggtctaagttttttttggttttgtgagttatccaaagttggaccgcaaagatgagtactgctaatcactatcagcacatcaagtcaaccaagcctgttgtagatctactaatattggagtgtttctttgcttaaaatgtggagatgttcatagggcacttggacctgacatttcaaaggttttatctgtaactttggatgattggtctgacagtgatatcgactccatggttgaggttggtggaaactcatatgcaaattcaatttatgaggcttttcttccaaaagatcacccaaaacccaaaccagattcaacgatggaatataggacgaaatttataagagctaagtatgagacac

SEQ ID NO: 259848 - DNA, 941 bp, Zea mays
cttccggccgaattgcgagcgagcgttcctctccgtccgcttccgccgtttgcccgtcgatcagttgttggctgccggccgggtactaccgcctgcacgagcagcggctagccacagcccacagacagacgacgtcaggtcttggcaggtgtgcaagcagacagagctcgctcggtcgccatgtctttcaccggcacgcaggacaagtgcaaagcctgcgacaagacggtccacttcatcgacctgctcaccgccgacggcatctcgtaccacaagacctgcttcaaatgcagccactgcaagggcgtcctctcgattagcagctactcttccatggacggcgttctgtactgcaagacgcactttgaacagctcttcaaggagacagggaacttctccaagaaattccaaggtggaggtggagcatcttcaaacaagaacgacccggcaaaggctccaagcaagctatcatctgcattctctggaactcaagataaatgcgcggcctgccagaaaacagtgtatccattggagaagatgaccctggaaggcgagtcctaccacaagagctgcttcaaatgctcgcacgggggctgcatcctcaccacgtcctcctacgccgcgctcaacggggtcctctactgcaagatccatttctcgcagctggtcaaggagaagggcagctacaaccacctcatcgagacggcgcagaccaagaagaacgaggccgcggaggccgcaccggagccaccggcggacgcaggcgccgcggctgaggcggaagcgcccgcggaatcggcgtagaacgaagagtagccgcgtgtgtatctcctaattatacgaactctgcattcagtaagtagttttcacaaatctatatatgttgttgttatgctgcagcttgggtttggtcagtctgggattgtaacacgtgtatgttg

SEQ ID NO: 259849 - DNA, 938 bp, Zea mays
cggacgcgtgggcgcacgcgtcggtccggattgtgggcgagtgcgtgcgttcgtgcagccacagacaggcgtccgggcaccatgtctttcaccggcacgcaggacaagtgcacggcgtgcgacaagaccgtccacttcatcgacctcctcacggccgacggcgccatctaccataagacatgcttcaagtgcagccactgcaaaggggtcctctcgatgtgcagctactcctccatggacggtgtgctgtactgcaagacccacttcgagcagctcttcaaggagaccgggagcttctccaagaacttcacgccaggtggcaagtcatcagacaagggtgaactgacaagggccccaagcaagctgtcgtctgcattttctggtacccaggataagtgcgcagcatgccagaaaacagtgtacccgctggagaagttaactctggaaggcgagtcctaccacaagagctgcttcaagtgctcgcacgggggctgcatcctcaccacctcctcctacgccgcgctcaacggcgtcctgtactgcaagatccacttcgcgcagctgttcatggagaaggggagctacaaccacatgaacaagaagagcccgtcccaggaggttctgccggacgtggctgacgaggagcaaccgccggaaccagcgccaccgcaagatgagaaagaagaggacaactaggatcggagcgaccaacaaccacccatgcatatatatcacgcagactgaagtctacacgtttgccatatttctttacgacgacgacgcttctttattccctcctcccttttttttcctcttaatctctctgtgagcccggtttatcatcacgctgcaatcaagtgtgccagatgccttcgttacgtctgaggctcacgacaatggaaaatctgacatggacctgtcttagcctcgccgaaaaa

SEQ ID NO: 259850 - DNA, 477 bp, Zea mays
  unsure (1)..(477): unsure at all n locations
gccgacccaagcccctacgcgggcgcgggaggcgagagtgcgtgcgtgcagccacaggcaggcgtcggcgccatgtcttctttcaccggcacgcaggacaagtgcgcggagtgcgacaagaccgtccacttcatcgacctcctcacggccgacggcgtcacctaccataagacatgcttcaagtgcagccactgcaaagggatcctctcgatgtgcagctactcttccatggacggtgtgctgtactgcaagacccacttcgagcagctcttcaaggagaccgggagcttctccaagaacttcacgccaggtggcaagtcttcagacaagggtgaactgacaagggcccccagcaagctatcatctgcgttttctggtactcaggataagtgtgctgcttgccagaaaacagtgtacccgctggagaagttaactctggaaggcgagtcctaccacangagctgcttcaagtgctcg

SEQ ID NO: 259851 - DNA, 474 bp, Zea mays
cctccccctaatcgcgaacgagcgtctttctcctccgtccgcgcccgtttgctcatcggtggtgcctgccggtgggggaccgcctgcacgagcagcggctagccagacgtacggccttcgtttgaggctggagtcctgattggcaggtgcaagcacagagctcgatcgccatgtctttcaccggcacgcaggacaagtgcaaagcctgcgacaagacggtccacatcatcgacctcctcaccgccgacggcgtctcgtaccacaagacatgcttcaagtgcagccactgcaagggcgtcctctcgattagcagctactcttccatggacggcgtcctgtactgcaagacgcactttgaacagctcttcaaggagacagggaccttctcaaagaactttcaaggtggagcatcttcaaacaagaacgacctctcaaaggctccaagcaagctatcatctgcattctctggaactc

SEQ ID NO: 259852 - DNA, 460 bp, Zea mays
acaagatccacttcgcgcagctgttcatggagaaggggagctacagccacatgattaagaagagcccgtcccaggatacgctgccggacatggcagccgacgagcaaccgccggaaccggcgccaccgcaagacggggaaggagaggacaactaggaggaagggaccgccaccaatatatatcacacacacacacacacactcacacattctcacactcaagtctgcgtttgccatttttcttttctttttctctacgacttcgttattccctcctttcatctatctctccgtgaactcggtttgtcgtccagctggctgtaagtgtaccagatgccttcgttacgtctgatgaggctcatgacaatggcgattttggcatggagctgtgttagcctcgcggaaaaactgtaactgtgtaagcagaactgctatatattgttcctaacaatgttgtcctt

SEQ ID NO: 259853 - DNA, 2233 bp, Zea mays
tccatcgcgtccgtcccacacctaccaggaaaccaatcaaaacttaaaaccaatcgaaattagaccggcgacgaggattagcgctcgccggcgatggattctgactacggcgtgcctcgcgagctctcggaggtgcagaagaagcgcacgctctaccagcccgagctgcccccctgcctccagggcaccactgtcagggtggagtatggtgatgctgcaattgcagctgacccggcaggtgctcatgtgatcagccatgcattccctcatacctatgggcagcctattgctcattttctcaggaagacagctgttgtccctgatgctaaggtcatatctgaacaccaggcggtcagggttggcattgtcttctgtggcagacaatccccaggaggccacaatgttgtttgggggctctatgaggctatcaaggcccacaaccaaaacagcaaactcattggtttccttggtggatcagatggtctgctagcacagagaaccttggagatcactgataaagttattgcttcatataaaaatcaaggtggatatgacatgcttggtcgaacaaaggatcagattaggacgacagagcaggtcaatggtgctatggctagttgccaagctttgaagttggatgctctggttatcattggaggtgtcacttccaacactgatgctgctcaacttgccgagacatttgctgaggcaaagtgtgcaacaaaggttgtaggtgttcctgtaactttaaatggggaccttaagaaccagtttgttgagacaaccgttggctttgacaccatatgcaaggtgaacgcacaacttatcagcaatgtatgcactgatgctctatctgctgagaagtattactactttattcgcctgatgggacgcaaggcttctcatgtggcattggaatgtgctcttcaatcacatccaaacatggttatcctaggagaggaggtggctgcttccaaacttacaatttttgatattacgaagcagatttgtgatgcagttcaggcaagggcagaaaaagacaagaaccatggggttgttcttattcctgagggccttgtggagagtattcctgaactatatgctctgcttcaggaaatccatggcctccatggcaaaggtgtttctgttgagaatatctcttctcagctttcaccttgggcatctgcactctttgagtttttgcccccttttatcaggaagcagctactactacatcctgaatctgatgattcagctcaactttcccagattgagactgaaaagctgctagcccagttagttgagactgagatgaacagacgtttgaaggagggcacttacaaaggaaagaagtttaatgcaatctgtcacttctttggctaccaagctaggggagcactgccttccaagtttgactgcgattatgcctatgtcttggggcatgtgtgctaccacatcatagctgccggtttgaacggttacatggccacagtgacaaatgttaagagtccagtgaacaagtggcgatgcggtgcggctcctatttcgtctatgatgactgtgcagcgatggtcgcgtggcccttcagccacccaaattggaaagcccgctgttcacatggctagcgttgacttgaaaggaaaagcatacgatgtgttgagacagaattcttccagctttttgttggaagatgtctacagaaacccaggcccgctccagtttgaaggaccaggtgccgattcaaagcctatttcattgtgcgttgaggatcaagactatatgggcagaataaaaaagttgcaggaatacttggagaaggtgaagaggattgtgaagcctgggtgctcgcaggatgttcttaaagcggcgctgagtgccatgtcttctgtgacggaaacactgaacatcatgacttcatcttctaccggccagactccactgagtcattaggtaccatttcatggtatggatcataatccccacttttttcagtggtggcgattaacgagtttaggaacagcaaccctggtatcatacgggttattctttttgtagccttttggagagttctatcggttttggattcggtagtttatgaaggcttgttgatgagtttgagctcgaatagcttttgaaacagccggatgatgccatctttaataaaccaaattctgtgactgcattcaaattaaaaaaaaaaaaaaaaaaaagaacaggcgcgcgccgcccggga

SEQ ID NO: 259854 - DNA, 395 bp, Zea mays
gcagaatttgtgctgtaatactgctgatgaataggaacgaactatacaagattggggggtcctatacatcagcaatatgagagctggaatactacatggaattggtgaaatatgagggaatatgctacaaagaatagaggcaaaattcttacaagtttatgttggaagatgtctacaggaacccaagtccgctccagtttgaaggaccaggtgccgattcaaagcctatcgcactgtgcgtcgaggatcaagactacatgggcaggataaagaagttgcaggaatacctggagaaggcgaagagcacttatactggtgaggagtatatcgataatgcatctcaatcctctctgcattgtaaactcctacattgaagttagacaaaagtctcatct

SEQ ID NO: 259855 - DNA, 521 bp, Zea mays
tcccttttttttttttttttttttttttttttttttttggaaagttttgtggtgctttatttagacactcatgagtcatgaccatagtattaaaccatgtttcgcttcgaaatttccagccttcaaagtttgattgcgattatgcctacgttttggggcatgtgtgctaccacatcatagctgccggattgaacggttaacggatacatggctacggtgacaaatcttaagaatccagtgaacaagtggcgatgtggtgcgactcctatttcgtattactactttattcgcttgatgggacgcaaggcttcccatgtggcattggaatgtgctcttcaatcacatccaaacatggtcaaattttcaccattgatccaacctctgctacggcaatttccagcatcggcggtgtgctctttacaaagccttagagcttgctctcctgcaaaggtctgaacttgcagaggatagtccacaagaaaaaatcaccaaagaatttcattcaaccaatgtacccgagt

SEQ ID NO: 259856 - DNA, 478 bp, Zea mays
attggccgaacctgaaaggcgaacgggttcgattggcatcttattggtgaatatgatgactgtgcagcgggggtcgcgtggcccttcagcctcccaaatcggaaagcccgctgttcacatggctagcgttgacattgaaaggaaaagcatacgatgctccgacgcagaaactgcttccagctttgtgttggaagatgtctacaggaacccaggcccgctccaggttgaaggaccaggtgccgattcaaagcctatctcactgggcgtcggggatcaagactacatgggcaggataaagaagttgccggaatacctggagaaggtgaagagcattgtgaagcctgggtgctcgcaggatgtccttaaagcggcgctgagcgccatggcttctgtgacggagacacttgacaataagacctcatcgttcacccgccagactgcactgtgacttcgttggtgcccttttgtggtgcggatc

SEQ ID NO: 259857 - DNA, 418 bp, Zea mays
ctcgagccgcagtgcgccacccgcacccaccaacgaggcaacgaaacccagtcggaagctagaccggcgacaagtgcagcgctcgccgcgatggattctgactacggcgtgccgcgcgagctgtcggaggtgcagaagaagcgcgcgctctaccagcccgaggtgcccccctgcctccaggggactactgtcagggtggagtatggtgacgccgcaattgcagctgaccaggcaggcgctcatgtgatcagccatgcgttccctcacacctatgggcagccccttgcacatttcctcaggaagacggctgttgtccttgatgcttaggtcatatctgaacacccggtggtcagggttggcattggcttctgtggcaggcaatccccaggaggccacaatgttgtttggggactctatg

SEQ ID NO: 259858 - DNA, 652 bp, Zea mays
gttgcatgtcatcgatgggtgtcctcagcttatctttgtcagatcaaattatacaattgagactgtagaggctgagaggatgtctgtggaccatgttgcccatctcaaaccttctgatggtggctcagcagcaactcagttggctgctcatctttacaggattacacagtgccatcaagatgctcaatagcagggtccgtgttatccatcagtatcttgttgccatgcaaaaaggtgacattccattagataattcgctgcttaggcaagtctcaagcctcgtaagaaggctaccagctatggagtcacagaaattccaagacgacttcttaatggaatacaacgacactctcctcatgacctaccttgcaatggtcactaaatgttcaagcacaatgaacgagttggtcgagaagataaacacgagctatgagagaacgactagcaggagaggaggtcgaggtgctttcatgtagctcaccggccgtgatcctgctgctgctttcatctgtggagattttttgaaagagctaatgttctcgaggcagttttttgcatacattctattatgtgcaacctgctatacgcatgagaggaggccgaggtgcctgccttcatgcatgctacccggaggcatttttttttcatgcaa

SEQ ID NO: 259859 - DNA, 1119 bp, Zea mays
cggctcgagtccacacttacagagttacagttacagccaaccaaccacatcgcatatcaaagaccagaaagctcaaaccaagaccggcgtgcgcggacgaagcacagatccatcggagtgacagcgagcgagagcgagagagacagagagattgtccgcgcgtcagcgactcccggcgaagacgatggggaaggggttcgcatcctacctggcgatgaagacggggccggagggcggcgacgcggcggcggcgcagcaggctctgatcgacgcggacctgcgggagctcggcgtcgccgcgcggaagctcgccaaccacgcattcgtcctcggcggcgggctggggttcggcacctccttcctcaaatggctggccttcctcgccgcagtgtatctcttgatattggatcgcacaaattggaagaccaacatgctgacagctctcttggttccttacattttcttcaccctgcctaatgtgctgttttctctgatcagaggagaggtggggaaatggattgcgattattgctgttattctgcgtctattctttccacgccacttcccagattggttagagcttcctggttccatcatcctgctcacagtggtcgcccctagcctgttcgcggacaccttcaggggagacctcgttggtgtcttcatatgccttgtgatcggatgctacctgctccaagagcacatcaaggcgtcaggtggattcaggaacgccttcaggaagggcaatggtgtgtccaactccatcggcatcctcctgctcttcatctaccctgtctgggccggtgtgctgcaagtcctgtaggcacaccattgcctcagtgtttcccctgtgcgttcgtgcccgtgcaaatgtttcctctatggtgatccgtgatcctgtgtcacgagtaggtgatgtttttatgtgtgcttgagttgatcggggttgggcatgttgccatgttggtggacagttttgtttatctcatttgttgtagttcgatgtcagcatttggttcgttcgagtacataaacgccaataaaatcagtagccgtggcttgatgtagattgacatgttggtcatattatcccgtgtaaatccctgcgtctattctgtt

SEQ ID NO: 259860 - DNA, 574 bp, Zea mays
cgaagcacagatccatcggagtgacagcgagcgagcgagagcgttagcatgatatacagagagattatcctcgcgtcaccgactcccggcgaagacgatggggaaggggttcgcatcctacctggcgatggagacggggccggagggcggcgacgcggcggcggcgcagcatggctctgatcgacgcggacctgcgggagctcggcgtcgccgcgcggaagctcgccaaccacgcattcgtcctcggcggcgggctggggttcggcacctccttcctcaaatggctggccttcctcgccgcagtgtatctcttgatattggatcgcaccatatggaagaccaacatgctgacagctctcttggttccttacattttcttcaccctgcctaatgtgctgttttctctgatcaggacttacatgttggttacttgttgatgtgaagtatgctgtagtggtagcacatagcgctttcaggagaggatgttctctctttgtcactcgatctataacaagagatttgaaagttaaaatttttacaggattaaacctttgaaattttagaggagaggtgg

SEQ ID NO: 259861 - DNA, 1234 bp, Zea mays
cccacgcgtccgagaaacggcaacgcaataacgcaaagattcggctgacaatggggaaggggttcgcgtcgtacttggcgatgaagacggggccagagggcggcgacggcgcggcggcggcggcgcagcaggcgctcatcgacgctgacctgcggaacctcgccgtcgccgcgcgaaagctcgccaaccacgccttcgtcctcggcggcgggttggggttcggcacttctttcctcaagtggctggccttcctcgccgcagtgtatctcttgatattggaccgcacgaactggaagaccaacatgctgacagctctcttggttccttacattttcttcactctgcctaatgtgctgctttctatgatcagaggagaggtgggggaaatggattgccgattatttgctgttattctgcgcctattttttccgcgccacttcccatgtacatctccagcctattggtttcatcctatcaaatttccagatatttgtttcatttacattttattaacattttgcggttttgcgcttaaaataaaatagccacggttaatacattttgcttagcgactctttagcactgtttcatcctgtgcaccagattggttagagcttcccggttccatcatcctgctcacagcggtcgcccccagcctgttcgcggacaccttcaggggagacctcgttggtgtcttcatatgccttgtgatcggatgctacctgctccaagagcacatcaaggcgtcaggtggattcaggaacgccttcaggaagggcaatggtgtgtcgaactccatcggcatcctcctgctcttcatctaccctgtctgggccggtgtgctgcaagtcctgtaggcacccaccattgcctcagtgtttcccctgtgcggtccaggcgtccagctccgttcccgttcgtgcccgtgcaaatgttccctctatggtgatccgtgatcctgtgtcacgagtaggtgatgtttttatgtgtgcttgagttgatcggttgggcatgttgccatgttggtggacagttttgtttatctcatttgttgtagttcgatgtcagcatttggttcgttcgagtacataaacgccaataaaatcagtagccgtggcttgatgtagattgagatgttggtcatattatctcgtgtaaatccctgcgtctcttctgttatagtgttatgcaagctacaggacgcatgtttatatgtcaactaattattttctat

SEQ ID NO: 259862 - DNA, 572 bp, Zea mays
gccaaattacacgattcttcttctggggcaatattttttgcagtttgccgtggcaaagttagtgagggtcttgattttgctgatcgtgctgggagggcagtaatagttactggaatgccctttgctactccaactgatgccaaggttcggctcaagcgcgagtatttggataagcaggggacaccatctaataaaaacacaaagatgttgacaggagaagaatggtatgtgcaacaagcagcacgggctgtcaatcaggctgttggacgtgttatcagacatcgccatgactatggagctattatttattgtgatgaaaggtttgtgtggccaaattatcaatctcagatgtcatattggctccgacctcatataaagtgctactcaaagtatggggaagtagtccaaggattgacccgattttttcgagataaagcttcttcagatcctttgacactagagccaacagattgtaatagaggccaacaacagggactgtttcttgagcctatttttaagccagctttcggccggagcgagggtcatgtgatcttgagcgatttcaagtttat

SEQ ID NO: 259863 - DNA, 1916 bp, Zea mays
cacagccagtgagcccacagccgtcgccgcctccatcagtgaaatctccacccgcacccgggccagctccagcaccagcacctattagctcgcctcccccacttatcaaatctcctcctccaccggttccggttagctcaccaccaccactactaaaatcgcctccacctccagtatctatgagtttaccacctccatctgtgaaatctccaccgccgttgccaccaaggtcacctccagcgccagtgaaatcaccacctcctccaccaccagtaagttcgccgccaccaccagtaccggtgaggtcaccaccaccgccaccaccatcaccgattagttcaccaccgccatcaatgaaatctccacccccaccagcacctattagctcgcctcccccacctaccaaattccctcctccaccggtttcggttagctcaccaccactagtaaaatcacctccatctccagcatatgtgagtgaaccgcctccaacggtgaaatctccttcaccaccatcacctccaccgatgattaaatcaccgccaccaccggtgccggtgaggtcacctccatcgtcagtgaaatcaccacctccttcaccactgttaagttcgccgccgccaccagcgccggtgaggtcacctccaccgctaacgaaatcatcacctcctccaccaccgataaggtcgccacccccaccacaagcaaactcacctcctccatcagctctaataagctcacctcctcctccgatgcaatcccctccaccgcctgctccagtcagctcaccaccaccacctataaaatcaccaccaccggctccagtaagctcaccacctcctctggcgcaatcccctccaccacctgctccagtcagctcactaccaccacctgtaaaatcacctcctccaccggctccagttagctcaccaccgcctcctgtgaaatactcttcaccacctactccagtcaactcaccgccaccacctgtaaaattacctcctccactagctccaatgggttcaccatcgtctcccatgaaatcccctccaccaacggcacccgtcagctcgccgccaccgcctgtaaaatcacctcctccaccggctcctgtgatttcaccatcacctccggtgaaaatcctcccaccaccggcaccagttagctcacctcccccgccagttcccgtgagctcagcacccccatttgcaaaatcccgaccgccacagttcaaatcacctgcaccaccaacttcgagaagatctccacctccactggtgaagcccccgccaccaccgccacttgtaagctctccaccactgccaccaatgacctccccacctccaccagccgtcccatcaccacctccacctgcaccatcatcacctccaccgtcggcacctgaggagttcatcttgccaccaatcatggcgcagcagtatgcgtcgccaccgccgcctctgttccaaggatactaagcggtgatcacagcgcgctctactgacgatgagagtaatcgcgacgagggaggccaggagaagcagtgacaagtcgatcgcaccatgcaatgctctagcgacctgaattgaatgctatcggataagcgcatgtacgtttgtgcgtaagggtataacagcataggtaatgtaacgagtgtgtgcacatgtaacatgatgaccgagaagagaaacatgcaaatggagaaggaattgtttctgcctttctagcattcttcttagctcaatgtgcaaaactttttcataatgtaagagagttctggcgtcaaaaaaaaaaaaaaaaaaaaaaaaatacataaaaataaagtctgcattaaaagaatagacgccacaaacatacagaagatactcatggcattcgaagacaacacaaaaaaaaaaagggggggccccccaaaa

SEQ ID NO: 259864 - DNA, 445 bp, Zea mays
  unsure (1)..(445): unsure at all n locations
cggacgcgtgggcggacgcgtgggcggacgcgtgggcggacgcgtggggtccccgacggcacggtgatgaagacgatccacacggagaagggcagctgcctcgccaccgacagccacatcacgtgcaaggacggcaaggtctcccaggacatcctgctcaggctcagggacaccgagaccggcgacctcgtcctgcgcctgacctgggtcaacatccccggcgtcgcgcggtgaatcatcccctcgatcggcggggacggggccagggcatgaggcggcggcgacccgaccgacgcctgcccagctgattatacatccgtttacctggtattggcataaggagacccttggatgcgtgtaatgtttgtttgcagttctgataaggtgtgcaagaaagctcatgctactgggagcaatgcttgtatctcagttntgcttctgcggg

SEQ ID NO: 259865 - DNA, 621 bp, Zea mays
acccacgcgccaagccggagcacaaagcttgtgcgtctggctgtctccggccggccgggcttgtcgtacgtcctccaatccgttgacggtcaggccctctagcttttgctcggcgttctggagacagagcgagagcgagagagagagagagagagagaggtagacggagatggagtgcctgctggggctgctcaaggtgcgggtggtgcgaggagtgcacctggccatctgcgacccgctcacccacagcagcgacccctacgtcgtcctccgccacggaaagcagaaagtgaaatcaagtataaaataccgcacgatcaacccagaatggaacgaggagctcaccctgtccatcacgaacatgatgaacccggtcaagattggactcttcgaccacgacacgttcaccaaggacgacagcatgggcaacgccgagttctccatcctcaacttcgtggagatcgccaagcaggacctgagcgacgtccccgacggcacggtgatgaagacgatccgcccggagaagggcagctgcctcgccaccgagagccacatcacgtggaaggacggcaaggtctcccaggacatggtgctcaagctcagggacaccgagaccggaga

SEQ ID NO: 259866 - DNA, 454 bp, Zea mays
aaacacgcatgataacgcggattaccatttctcaaagatcagatcaaaacatggatcaagatccaacacgtccatgtacaaaaactagccactacacatcacgcgaggtggctcccgattattcgacttgctgcacggctccaattcagttcatcaccatacacgcatgcatcgtggcgcacgccactcacgagcgcggcgcccatgcgcccacaacttattacgactcgtcaccaaccaaccaaaccaagccacccagcaggtccagtccaggcgtgtgtgctgtgctctcctctaccggccgccggccacatcacgccgccgaggcgcccttggcgtcgccgctgcagtagtcgcgaacggcctcgagcttgaagggcggggcgtcggtggcgagccactgctcgacggtgaacagctgctgcccgcaccccttgtgcgggcccgtggtggt

SEQ ID NO: 259867 - DNA, 2123 bp, Zea mays
cgagaaggtcaagccgcgaagagaagagacgcacgtcacagatccctctccactgtctcaccctttctctctcctcgaccctcccgacgcggcaaagcaaaaacacaaggaggagaggagggagagaaggaagaaggcgaggccaaaaatcccctccccctccccaaatcctagcccaataatctctcaatcaggggattcttaggtctgatcaagtcggaggattcggcagggcgcagccatgaacgagaaggcgtccgtctccaaggagctcaacgccaagcacaagaagatattggaaggtcttctacggcatcctgagaatagagaatgcgcagactgcaagtcaaagggtcctcgatgggcaagtgtgaatctaggtatctttatatgcatgacatgttctggcattcatagaagcctgggggtgcacatatctaaggtaagatctgccaccctggatacatggctgccagagcaagttgcatttattcaatcaatgggaaacgaaaaagcaaatagctattgggaagcagagctgcctcctaactacgatagggttggaatagagaatttcatccgtgcaaaatatgaggacaagagatgggtaccaaggaatggaacatcaaaatcttcgtccagtgttcgagatgagaagagccaagagtctccggctagtgctaataggagtggacatggtcatagatcttcatttgagcaaaaccgtgcttcaccagctcttccgagcaaagttgcacatgcagcttcaaggatatcctctcaggcatcacctcagcccccgaaggtagaaacaccagttccaaaggtggttttacctcctcagtcacagaaatcccccgccaaagttgatgcaacaccgcctaaagttgagaagccatcggttacaccacctcctaaagttgattatgccactgatctctttaacatgttgtcaatggatggaacaacagagaaagagtcagcgtcatcttcaaacgacgataatggctgggatggcttccagtctgcacaaccagtacctagttcagagaaaaaagattctgccaaaccagcagaaagcaagacccagtctacatctggaatggaagacttatttaaagactcaccagctgtgccattatcctcagctccagctgtttcccaagtaaacgctaagaatgatatcatgagtttgtttgagaagtccaatatggtatcacctttcgctgcccatcaacagcagctggcgctcatgtctcagcagcaagctcttctaatggctgctctcaaagctggaaatgcaccacaaatgatgattccagggactgccaatcagctaaatgctaacggaaccttgcctttccaaaactggacaaatctttatcaaaatcctgggtcgactccagcagcagcacagaatggtgccaccaaggttgctaacaacaatcaggacttctcttctggtaccttcggttttggcacacctggggtgtacaacattagcccagctgtcccagcaaatggggccacgacagcaggtgctatcaacaacggcactgcatcaactgcctcttctactctcccctcacaatctggcaaagactatgatttttcgtccttaactcaaggatttttcaccaaacgatgagcgcctagtgagcttgaaaaccaaacagaccacaggatcatgttggacgaggcatattgatttagggagcacaaggggcttacacatgcttatttcgaggcagattttcttctggtggatatattgttgtttcatgaccttgtagctgtcggacaataagagtggaaatatgccgcaaaatagctttgttgtttctaaaagcgaagaatacattgccggttatgtcaacggcttttactcgaggaccaccttgtcagttatacaagtctaatgcagtcttttcactatgttggtcttgatttatctacgacgtcgatactgattacagattgttttgtattgtattttacgacaattggattttatttgtttctacatttgtatattgtttgtgagatgagagaaacctcttcaaggcgttgaaccaaacgtacttttccaacatttcatatatatcttaataattacatttacc

SEQ ID NO: 259868 - DNA, 1156 bp, Zea mays
  unsure (1)..(1156): unsure at all n locations
tcgcgcacgcgtaaacgcaaaaccatatcctggggctttatctccggccacagctgggcaggttagcggcgaaagatgagcaggaactggagccgaacgatctacgtagggaacctccccggcacatccgggagagggaggctaaggtttagaagccatcggttacaccacctcctaaagttgattatgccactgatctctttaacatgttgtcaatggatggaacaacagagaaagagtcagcttcatcttcaaacgacgataatggctgggatggctttcaggttgtacaaccagaacctagctcggaggagaaagattctgccaaaccagcagaaagcaagaccctgtctacatctggaatagaagacttatttaaagattcgccagctgtgtcattatcctcagctttagctgtttcccaagaaaatgcaaagaacgatatcatgagtttgtttgagaagtccaatatggcatcaccatttgctgtccaacagcagcagctggcgtttatgtctcagcagcaagctcttctaatggctgctcttaaagctggaaattcaccacaaatagttccagggaatgccaatcaactaaacaacgtttctaatccccctcttggaaccttgcctttccaaaactggacaaatcttggctatcaaaatcctgggttgactctagcagcagcacagaatggtgccaccaaggtttcgaacaacaatcaagacctctcttctggtacctttggttgtggcacacctgggatgcacaacattactncagctgtcccagcaaatggtgccacggcagcaggtgctagcaacaacggcactgcatcaatttgcctcttccactctcccctcacaatctggcaaagattacgatttttcctcgttaactcaaggatttttcaccaagcgatgagtgcctagtgggcttgaaagccaaacggatcaccgggggagcttgcacatgctttatttcgaggcagattttattctggtggatatatatatagttgtcacatgaccttgtagctgtcagacaataaaagtggaaatatgcggctaaatagctcatgttgtttggacaagtgaagaattccttgccgttttatgtcaacggttttgactcgaggactacgccttgttccgct

SEQ ID NO: 259869 - DNA, 585 bp, Zea mays
cgatcagctgcactgcaccttcgtcgtctccgaagaacgtcgatcgtactcgtacaccatgaaggcagtcgtcgcggcgacgatgcttctgctggtgctggtggccgcggcgacggtggcgagcgcagaccaccgtgatgacgacggccaccaccaccagcgccaccgcggccagagctggcaccgccacagcggcggcggccgagatggccgccggtcgacccctctggccgggctgacgcagtgcgtgacaagctgcgggtccggggtcacctcctgcatgctggactgctaccagccgctggtcgacctggaccccgtggagctgcccgtctgcctcctcaagtgcaccaacgacgccatggtctgcgccaccggctgccccgtcaccgggaacgtctagcttgctatagctagcccatcattatatatatatatctatactcatcttagttattaaccccgccatttatttatttaactagccaccgaaccaatccaacgtgttactcctatataataaggatatgcatgatgactaaaggatgttggtgaaatacgtagtatgtaagtcgcgtgttcaca

SEQ ID NO: 259870 - DNA, 1357 bp, Zea mays
gtgtctccccgcggcgcgcctccgccgcctcgccccctccctctcaccgccaccgcccagatggcctgctcccacatcgtcgccgccgcgggggtctcctcccccgccgcagcggcggctcgttccccggcgcattctcccgctgccgccttcgcgcgcctccggtcgacgcctcgtttcgcgagcgctggcttgtcggttaagggaaacggagcggcgttcccgttggtcgccgccgcggggccggccgcggcggcaccggtggccgacctggacggccgcccggccacggagaagcagcccatcatcgtcatcgacaactacgacagcttcacatacaacctctgccagtatatgggggagcttggattgaacttcgaagtataccgcaatgatgaactgaccatagaagatgtgagaaggaagaacccaaggggaatacttatttctccaggacctggtgaaccacaagattcgggaatatcattgcagactgttcttgaattaggcccaaccatcccaatttttggagtttgcatgggtctgcaatgcattggagaggcatttggaggaaagattatccgtgctccttctggagtgatgcatgggaaaagctctccagtttattacgatgaggaattaggaaaggcattgttcaatggcttgccaaacccttttactgccgcgaggtaccacagcttggtcattgagcaagaaaccttcccacatgatgctttggaggctactgcatggactgaagatggacttatcatggctgctcgccacaagaagtacaaacacatccagggtgtccaattccacccggagagcatcatcacccctgaaggcaagaaaatcatcctcaactttgtcagattcattgaggaactggagaagcagcgttcgtaatctaggggaggtagatgcgacaggtggtttcatttcatagatcagacggaagcagagacaaggcgcttaaagctgcgccaggttccggggctggcagttgaagcatagctaggaaacagctttccctctcttaattcgttgtgttcgtggtgacataatctgtgtgcggaccgaatttagaataaagtacaggcgtccgtctgatcaaataagcaccggtgttggtgctctatagatgaatatatccggtgattttcggcatgggaggcattggcacatttttgtctgagttctggcggtagcaaccccggagtaataaccatcaggcgtttctatgttggttacgtgccgcacgcatgccgggcgtgcggaggatttatgccctgagaggctgagactatctccctcgtcccttattttaaacagtatcattatacaattccgcgtt

SEQ ID NO: 259871 - DNA, 475 bp, Zea mays
cccacgcgtccgaaaacctcttgtcggaattcagtgccagttacttactctagtttatggtaatcccaagtaagccttctgagccgacaccgccgtttacttccatggacagcccttttacagcggctaggtaccacagcttggtcattgagaaagaaaccttcccacatgatgctttggaggctaccgcatggactgaagatggactcatcatggctgctcgccacaagaagtacaaacacatccagggtgtccagttccatccggagagcatcatcacccctgaaggcaagaaaatcatcctcaactttgtcagattcattgaggagctggagaagcagcgttcctaatctaggggaggtatatgcgaatgcgacgggtggtttcatagatcaggcggaagcagagacataagcccatgcgaagttccggcactggcagtggaagtttagctaggaatcaacgtttccctctc

SEQ ID NO: 259872 - DNA, 446 bp, Zea mays
attcttcttctattctattctttcaccccagaccaccgctttcctctacgagtacgtcgctaaaggaagcatcctcgacatcctgtgtagccaggaggatttcccgctggatctacgcatgaggatcgcgatcaagaccgcggaagcgttgcagtacctgcattcgtcggaaactggcgtcaccggacacggcagcgtctcggcgtccaccatactcctcgacaacaacctcgtaccgaagctcaccgagttctcgaggtcatgtacgctgttcaagaagagcgagactacttctgttgttggtgctggagtgatgatcactggcagccttctagagaaagctctgaacgacgacccgtcccgctacggctcggtgttgatgaacctggagagcgacgtgtacaggttcggcggcgtcctgatggcgctggtcagcagggacggcg

SEQ ID NO: 259873 - DNA, 629 bp, Zea mays
cttggtgtatgactatgtcccactaggtagcctttgtgctgctttgcatggtaacaaagctgctggaagaaccccattggactgggagaccagggtgaagatagctctgggcactgcacgcggaatggcttatcttcactccgtgggtagcggcgggaagttcattcacgggaacatcaagtcaagcaacatccttctctcacaggaactcggcgcctgcgtcaccgagttcggccttgcccagctcatgtccacgccccacgtccacccgcggctcgtcgggtaccggtcgcccgaggtcctcgagaccaggaaaccgacgcagaaatctgacgtctacagcttcggcgtcctcctcctcgagatgctcacaggcaaagcccctctcaggtcccccgggcgcgacgactccatcgagcacctcccgaggtgggtgcagtccgtggtccgggaggagtggacgtcggaggtcttcgacgtcgacctgctgaggcacccgaacctcgaggacgagatggtccagatgctccacgtcgcgatggcatgcgtcgcggtcgtccccgacgagcggcctcggatggaggagggggtcggcaggatcgaggagatccggagctcctactcggaca

SEQ ID NO: 259874 - DNA, 844 bp, Zea mays
ccaaaaaccaaaataatcgccaccgctctccgcaccgaaccgaagcagcggcgatggcggcggagaagccggctcccgtgcgcgtgctctactgcggcgtctgcggcctcccggccgagtactgcgagttcggccccgacttcgagcgctgcaagccctggctgcgcgcgcacgcgcccggcgtctaccccgacgaccttgtcgccgcctcctcctcacccggcggcggcgacaaggacgtcgacaaggtcggggatcgcctccagggcgtcgggatctccgacggctccaccagcgccgcaggggatgcttccgcgtctaagccccaagaggcgaaacgcctgcctggtggtaagctcaagaaaaaggagaagcaagaagtggtcattgagaagattgtccgtaacaagcgcaaatgtgttactgtggtgaaggggcttgaattgtttggtgtaaagcttagtgatgcttcgaagaagcttgggaagaagtttgcaaccggagcttctgttgttaagggcccgaccgagaaggagcagatcgacgtgcaaggggacatctcatatgatattgtggagttcattacagatacatggcctgatgtacctgagtcggccattttcttcattgaagatggaaggaaggttcctgccgcttgatgccattatgaggcgcaggaccaatggatttacaattataacacagagataaagcaaaggcgtggctgtcaaggcatgtagcggcccataccagtcgtctctttgtccgaagtcatggactggtcttccaagttttatcaggagtggcgttttgttaccaccgtcacctgcttcatgtatgagat

SEQ ID NO: 259875 - DNA, 601 bp, Zea mays
gtaccggtctcggaattcccgggtggacgcacgcgtccgggagaagcaagaagtggtcattgagaagattgtccgtaacaagcgcaaatgtgttactggggtgaaagggcttggattggggggtgtaaagcttagtgatgcttctaagaagcttgggaagaagtttgcaaccggagcttctgttgttaagggccctacggataaggagcaaatcgacgtacaaggggacatctcatatgatattgtggagttcattacagatacatggcctgatgtacctgagtcggccattttcttcattgaagatggaaggaaggttcctgctgcttgatgccatatggtttataaggcacgagaccaatggatttacaaatataatacagaggtaaggtaagggcatggctgttaaggcatatatagggccataccagctcatctcttgtctgaagtcatgaactgttgttccggtttttaggcttacttcataagtggcattctgtttaccatcgtcacctgcttccatgtatgaaatcaaatctatacagttaccaatttactatgactaggaataaaaaaacccacgcgtctcgccacgcgtccg

SEQ ID NO: 259876 - DNA, 1311 bp, Zea mays
cgaccatggagaaaaccggcctagcttgaccgcttgcaattcaaggaggctagctagatagcatgtatataagcccgtgcgcgtggtgcctttcctctcatcaccagcgcccggaaccacagaccacaaaggaggggacacacacacacacacacaccgtctccgcccgcccgccgcgacgcgccatggctatggctcgctccgtcgcgcacctcttctttcccatcctccttatctccaccgcgcccgccgtgcgggccatcaccgacgccgccggcggccccggatacctccaggaggcgtgcaacaagacgctgttccccaaggtgtgcatgcacgcgctcaaggacaacccagagtgccaggcggagacggcggtcaccccgcgccggctggccgagctgctcgtgtacgtgtcggccgaggtgggcatgaccgtggccgcgttcgcgcaccacgagctcaacgccatcaaggacgacgacgtcctgtacaagtgcatcgacacctgctccgaggacatcgaggaagccgtggcgcacctcagcgccctctcccgcgacttctccgacgccaggttcctcgaggtcaagtcctggctcacctccacgctcggcggcaccgccacctgcgaggacgcctgcaaggacgcccccgtcagcgacatcaagaacgtctgcataaccaagagcttcgagttcgagaagctgctgcgcgtcacgctggacctcatcaccgaggcttccggctccatgtcggccgaggtcgcactgccgccgtcggacgccgccggcgggccgttcggagggtacggctcgtcggctggcgcccccgcctacggcgctccgtctcctgatgccccagcttatggcgccagcgtaccagcaccgacctcggagcagagtactgcttcgactgcatgagtgatatcgtggcggcacacacgcatcttggtcactcctatccatggttcgaattaccgaccgaaaagtctggttcctcggccaatttctcgttcccggtcagctaggggaagcatttctcggcccggtatcacattttaaaaatatgaaagtcaattttttttgttcaaaacgaaatttcggaacagtgaagcgaaaaagtgaagcctgttccttactatgttcaaggatttttgctctctccatcccacaattttcgagcagtatgtcagcttagaattaggattatttggtgctgcatcattgatgcagattaatataatgaggcccagaacatggcacatgttacttttgacaaactaaaaatgaatcatcactgattcttaaa

SEQ ID NO: 259877 - DNA, 412 bp, Zea mays
gctaggaggaggggacacacacacgtacaaaccgagagcacacaccgtcccccgcccgcccgccgccgcgacacgcgcgccatggccatgctggctcgctccgccgcgcacctcttcttcttccttctcctcgtctccaccgcgcccgccgtgcggaccatccccgacgaagcccgcggccccggaaacaacatccacgaggcgtgcagcaagacgctgttccccaaggtgtgcctgcacgcgctcaaggacaaccccgagtgccaggcgggggcggtcacgccgcgccggctggccgagctgctcgtgtacgtgtcggccgaggtgggcatgaccgtggccgcgttcgcgcaccacgagctcaactccatcaaggacgacgtcctgtacaagtgcctcgacacctgctccg

SEQ ID NO: 259878 - DNA, 819 bp, Zea mays
ccgccgcggcggaaccgctgcgacccacgcggccaaaaaaaaactgtttgttagcgtgacgtgcgtgaggagtctggagtcggacggaaccgaaaactcagggtctcgaatttcctaggagcggaggcgatggctgggaagggaggaaaaggattgctcgccgcgaagacgacggcggccaagtcggcggagaaggacaaggggaagaaggcccccatctcacggtcctcccgcgcgggcctccagtttcctgttggacgaatccaccgtcagctgaagcaaaggactcaggcaaatggccgcgttggtgccactgcagccgtctactctgccgccatcctggagtacttgactgccgaggttctggagctggctgggaatgctagcaaggatctgaaggtgaagcgtatcacccctcgccatttgcagctagccattcgtggagacgaggagctggacaccctcatcaagggcaccatcgcaggcggaggtgtcatcccgcacattcacaagtccctgatcaacaagtcctccaaggagtgaagactagggaatgcgcattgttagtttaaactggacatttctgtgtgctcctctgcgagtccttgtcgtcgtgtaggttttagttgagctgtcaggttggagtgacccttctcctgtgtaacgcttgcctggtactgcttcagttatttggacactgtttgtgttgagttgttaacttcaagggtgcaaacctggataattatttagttattatatgactatctggtattcggtttatgttgtggaaaaaaaaaaaaaaaaaaactcaagactagc

SEQ ID NO: 259879 - DNA, 434 bp, Zea mays
cactcacgtaccggtccttacttgctcgccccacgcggggtgcggaaggagtcggagggaaccgaaaactcagggtctcgaatttcctaggagcggaggcgatggctgggaagggaggaaaaggattgctcgccgcgaagacgacggcggccaagtcggcggagaaggacaaggggaagaaggcccccatctcacggtcctcccgcgcgggcctccagtttcctgttggacgaatccaccgtcagctgaagcaaaggactcaggcaaatggccgcgttggtgccactgcagccgtctactctgccgccattctggagtacttgactgccgaggttttggagctggccgggaacgctagcaaggatctgaaagtgaagcgtatcacccctcgccacctacagttggccattctcggagactaggagctggacacc

SEQ ID NO: 259880 - DNA, 302 bp, Zea mays
tcgagggagtcggagggaaccgaaaactcaggtgagggcttcttccgccgcacccgccgtcttatccgaactcctcgacccgattggcgcgattcgccgtttgttttcccgaatcggcgacgggatccgcccgattcggccgtcgatctgcgctgattcggcccgcgcgccgtcggggttcgctttcttctgcgcagggtctcgaatttcctaggagcggaggcgatggctgggaagggaggaaaaggattgctcgccgcgaagacatcggcggccaagtcggcggagaatgacaaggggaa

SEQ ID NO: 259881 - DNA, 493 bp, Zea mays
gaagtgcgttgttcgagtgaagggggagaaagaaaccgctgtgccgccggcgtgcagaggaagggacgcaggaggcgctgcgtgagcgagcagcacaagtggaagcccaagggagctgtggacgaggacctgtacaagatctccccgcagcttctctgcaaggtgaagaagaagaagctgctgaggaatttgcttggagggtgcctcggcttgggctgcatcgcctgagagtgagagatgcagagcttaataagtttcttgaaagttcgcttgcttggtgctctggagagagttgtatagttgtctacgctaatatgagattaatggaaacttactactgctaaaaaaaaaagtcctccaaggagtgaagactagggaatgcacattgttagtttaaactggacatttctgtgtgctcctctgcgagtccctgtcgtcgtgtaggttttagttgagctggcaagttggagtgacccttctcctgtgtaacgct

SEQ ID NO: 259882 - DNA, 277 bp, Zea mays
aataactgtttgttagcgtgacgtgcgtggggtgtctggagtcggacggaatcgaaaaggcgacgactcagtgcctcgagttgcctcggagcggaggcgatggctgggaagggagggaaaggcttgctcgccgcgaagactacggcggccaagtccgccgagaaggacaaggggaagaaggcccctatctcacgctcctcccgcgccggcctccagttccctgttgggcgtatccaccgtcagctgaagcaaaggactcaggcaaatggtcgcgttg

SEQ ID NO: 259883 - DNA, 1538 bp, Zea mays
aattacggtatcgaccccgcgtccgcggaagccctacccgcgccgccgcgccgattcagccgcgcgtggtgctgcgggtggcgtcgtccggcgcgccagcctcgtcctcctccgcccgcccgcgcaggggcgccgtggcagaggccgcaatgcagccggccaaggcggtcgccgcggaggcggcctcccccgctgccgcgctggagatggggaacggcgccgcggtcgcggggctgcagcggcccgacgccatggggaggtttgggaggttcggcggcaagtacgtccccgagacgctcatgcacgcgcttaccgagctcgagaacgccttccacgcactcgccaccgacgacgagttccagaaagaacttgacggtattctcaaggactacgttggacgtgagagccccctttacttcgcggagcgcctgacggagcactacaagcgcgctgatggcacaggcccgctcatctacctcaagagggaggacctcaaccacacgggcgcccacaagatcaacaatgctgtggcgcaggccctgctcgccaagcgacttgggaagcagcgcatcattgccgagacaggggctggccagcacggtgtcgccaccgccaccgtgtgcgcccgtttcgggctgcagtgcatcatctacatgggcgcgcaagacatggagaggcaggcgctcaatgttttccggatgaggcttcttggtgcagaggtcagggcggtacattctgggacagcaaccctgaaggatgcaacttcagaggctatccgtgactgggtcacaaatgtggagaccacacactatatcttgggctctgttgccggtccgcacccgtacccgatgatggtgagggagttccataagggtcttggcaaggaaacccggaggcaggccatggacaagtggggtggcaagccggacgtattggttgcctgcgtcggcggtggatcaaacgccatgggcttattccatgagtttgttgaggatcaagatgtgaggctggttggagtggaggcagctggccatggcgtagacaccgacaagcatgcggcgactttgacaaagggccaagtcggagttctccatggatccatgagctatttgctgcaggatgatgacggacaagttatcgaaccccactccatcagtgctgggctggattaccctggcgttggacccgagcacagtttcttgaaggacattggacgtgccgaatacgatagtgtgactgaccaggaggcactggatgctttcaagcgcgtgtcccggctggagggcatcatccctgccctggagacctcccacgcgctggcctaccttgagaagctctgcccgaccctgccggacggcgtgagggtggtgctgaactgcagcgggcgaggcgacaaggacgtgcacaccgctagcaagtacctggacgtttagaacaccggagaggagggctgaatgagagttttgcatgccaatttttgaagggttcagcagttatgtagcgctggtttttttttgtgaatagagtacaaataacct

SEQ ID NO: 259884 - DNA, 788 bp, Zea mays
attcccgggtcgacccacggggacccgtaccccgcctcccggttcaaccaaatccctctcgcctcatccccaccagcgcaaagccgccctatcgtcctgtcgtgagaagcaatggcgggccgtggcaaggcgattggcgctggtgccgcgaagaaggcaacgtcaaggagctccaaggctgggctgcagtttcccgtcggcaggatcgctcggttcctcaaggccggcaagtacgccgagcgcgtgggcgccggcgcccctgtctacctcgccgctgtcctcgagtacctcgccgctgaggtcctggagcttgctgggaacgcagcgagggataacaagaagacccgcatcgtgccgcgtcacatccagctcgccgtgcgcaacgacgaggagctgaccaagctgcttggtggtgccaccatcgcgagcggcggcgttatgcccaacatccaccagcacctcctccccaagaaggctggctcgtccaaggcttccaccgtcgatgacgatgacaactgaagctgcccactggagaaggcattcgctaccgtcttgtttcctaggtttagcacgcagttagtcggcatgtctttgagagctcgatgtgtttgggaatgacaatagctcctttcttggttccctaagttcgttgaatcagatgtgaatacggctaaggtttctcgcctatgcaactatgggacgcacgccagttgatttgatcgtttgaaaagaaatgaaaggacgttaaagcttgaacaaaaaaaaaaaaaaaaaaagggcgcgccgca

SEQ ID NO: 259885 - DNA, 508 bp, Zea mays
cggacgcgtgggcacggctccccaaagatagcatagcagcagcactcacaatagcaaaaaccaccatccgtcgtcgccaaccgtagcaaggagccaaggacatcaccaccgcccagcaataatggcgcagagcatgaggattgtggcgctggccttggtggccctgctggtggtggcggcggcggcgcccgtggccaccgcgtacggctgctacgacgactgctacgagcgctgcgccaacggcaagaaagaccccgcctgcaccaagatgtgcaaccaggcgtgcggctccacggaccagggcgccggtgccgccggcgccgcgccggcttgatcgcccagcgcattcatcgcttcagctcgatataatcgctgctccgtcagcaacccacatatgattcgatcaatcttcctcctctaatttctcgaccccgtcgaatttttttcctttctattcttctactatactactactatctgtttgtcgcgttgaattcttctcatacat

SEQ ID NO: 259886 - DNA, 542 bp, Zea mays
cggacatcgacgaaagctatagccagctagtaacaagagcaaaaacaccatcatctcatccgcccgtctcaacgccaccccaatggcccagagcacgaggatggtggcgctggccctggtggtcctcctggtggcggcgacggcgtcggtgcccacggccaccgcgtacggctgctacgacgactgctacgagcggtgcgccaacggcaagaaggacgaccccgcctgcaccaagatgtgcaaccaggcgtgcggcagcaccgacaagggcgccgccgccggcgcgccggcttgatcgacccgggcttcatcggcgcgcgggctcagctcgatatcagcatcatatacaatcgctgctccgtcgctcacgtcagcccatgcatgatctctcgacccggcccattgaatcttctccttctactatagtatatctttgttgcaggtcttcgttctcatacatcgatccactcatctttttttaaatcctaccattaagtgagatgacctatataaatatatatatatgcatgattcagtttttt

SEQ ID NO: 259887 - DNA, 440 bp, Zea mays
cggtcgcgtgggatagaatagcagcagcactcacaatagcaaaaaaccaccatccggcggcgccaaccgtagcaagaacatcaccaccgcccaacggctggaaagaccccgcctgcaccaagatgtgcaaccaggcgtgcggctccacggatcagggcgccggtgccgccggcgccgcgccggcttgatcgcccagcgcattcatcgcttcagctcgatataatcgctgctccgtcagcaacccacatatgattcgatcaattttcctcctctaatttctcgaccccgtcgaatttttgtcctttctattcttctactatactactactatctgcctgtcgcgttgatttcttctcatacatcgatcgaggatcgactcatcgttttgtaattcctgcaatttgtaagtgtaatgacctatatgacttagtcttcctttt

SEQ ID NO: 259888 - DNA, 436 bp, Zea mays
acccacgcgtccgcggacatcgacgaaagctagccagctagtaacaagaacaaaaaacaccatcatctcatccgcccgtctcaacgccaccctagccctgtgatatacaatggcggcccagagcacgaggatggtggcgctggccctggtggtcctcctggtggtggcgacggcgttggtgcccacggccaccgcgtacggctgctacgacgactgctacgagcggtgcgccaacggcaagaaggacgaccccgcctgcaccaagatgtgcaaccaggcgtgcggcagcaccgacaagggcgccgccgccggcgcgccggcttgatcgacccgggcttcatcggcgcgcgggctcagctcgatatcatcatatacaatcgctgctccgtcgctcacgtcagcccatgcataatctctcgacccgggccattgaatc

SEQ ID NO: 259889 - DNA, 398 bp, Zea mays
cccacgcgtccgcccacgcgtccgcggacgcgtgggtcgcccacgcgtccccccggccctccgggctccccagagatagcatagcagcagcgactcacaatagcaaaaaccaccatccgtcgtcgccaaccgtagcaagaacatcaccaccgcccagcaataatggcgcatagcatgaggattgtggcgctggccctggtggccctgctggtggtggcggcggcggcgcccgtggccaccgcgtacggctgctacgacgactgctacgagcgctgcgccaacggcaagaaagaccccgcctgcaccaagatgttcataccaggcgtgcggctccacggatcagggcgccggtgacgacaacgcctcgccggtttgatcctttagcacattcatcgctt

SEQ ID NO: 259890 - DNA, 403 bp, Zea mays
gacacacgcgtctacaatcagtctccctcccccaagatcctccactcgatcccaaacaaaccaacaaatccatccatcgcacatggacgcgttcttctcggcctcctccgcgtcggcgccctacggctacggcgccggcggatggagctacgactcgctcaagaacttccgccagatcacccctgccgtccagacccgcgcaattagcatttcgtatttttttaaaaatatatatcagtcgctggtttcgtgcgttccagaaattctcctgcgggttgcgtgtagctgatgcgtaattccctgacgtaatctatgattcgcgcgcgtcgtgttccttgcatttagaactgcaactgtgcggatgccaccgattcgattgattcgtcactttaagaacatgatc

SEQ ID NO: 259891 - DNA, 898 bp, Zea mays
cctactttttccgcggacgcgtggtcggcctccctcccccaagatcctccactcgatcccaaacaaaccaacaaatccatccatcgcacatggacgcgttcttctcggcctcctccgcgtcggcgccctacggctacggcgccggcggatggagctacgactcgctcaagaacttccgccagatcacccccgccgtccagacccacctcaagctcgtctacctcaccctgtgcgcggcgctggcctcgtcggcggtgggcgcttacctgcacgtggtctggaacatcggcggtacgctgacaatgctcggttgcgtcggcagcatcgcctggctcttctcggtgcccgtctacgaggagaggaagaggtatgggctgctgatggcggctgccctcctggaaggcgcttcggtcggacccctcgtcaagctcgccgtggaatttgacccaagcatcctggtgacggcgttcgtggggactgccatcgcgttcgcgtgcttcaccggcgcggccatggtggccaggcgcagggagtacctctacctgggtgggctgctctcgtcggggctctccatcctgctctggctgcagctcgccgcctccatcttcggccactccgcaaccagcttcatgttcgaggtctacttcgggctgctcatcttcctgggctacgtggtgtacgacacgcaggagatcatccagagggcgcaccgcggcgacatggaccacgtcaagcacgccctcaccctcttcaccgacttactggctgtacttgtccgcattcttgtcatcatgctcaagaacgcggctgacaagtccgaggacaagatgacgaataggatgaggttgtgaaaatctgtgttcgaacacagcacttcaaggaaaggaaggaaagcact

SEQ ID NO: 259892 - DNA, 480 bp, Zea mays
gtacgacacgcaggagatcatcgagagggcgcaccgcggcgacatggaccacgtcaagcacgccctcaccctcttcacagacttcgtggccgtcctcgtccgcgtcctcgtcatcatgctcaagaacgcggccgacaagtcggaggacaagaagaggaagaagaggtcgtgagcgtcgagaacggaagctctcccacatgcataggagtaactgccagggttccttcctggggtggaagtgtggaactgagcttgaatgttaagaagtgttcctttgttctcttcctctcttgatgactctgtaaatagctatgtcaatctggttaagtttggtttggttgcatgtgcctgtgttcgctgccctttggatagaatgcaaattaaagatgttgctattgcacaaaagaaaccaactttaccaaaaactgaagcataataaagttttacagtttttgagctaataaaaaaaaagggcgccct

SEQ ID NO: 259893 - DNA, 537 bp, Zea mays
cccgttccccagctgcaacatcctctgtgtgtctctctgtctctctctacctgccccgttcctcaccaaacttgtcgcatcgtcgacttgtgagtctcttccgccggcgtcgacgagagctgcgctaggtgatctcgactgcttcctcgtcccccatggcgacggcgctcaaatcgttcctgaacagccccgtcggccccaagaccacccacttctggggccctgtcgccaactggggcttcgtcatcgcgggtttggttgacatgaacaagcctcctgaaatgatatctggcaatatgacagcagccatgtgtgtgtattctggactctttatgaggtttgcatggatggtacagccccgaaattatttgcttctagcatgccatgcttccaatgaaagcgtccagctctatcagttatctcgctgggctaggtctcaggggtacctggagaagaaagagccagaggccaaacagtaaagagggtgtccaacactgcagtcatttgttcaataaagaaaatatgctgtggaaaaca

SEQ ID NO: 259894 - DNA, 2197 bp, Zea mays
tcgatgtcgcctgggcggacgcgtgggcggacgcgtgggtgtgagcctgctgccgtcttcttccgccgccgtcttcgtccgtagagcagagcagatcagagagcggggaggaagaaaaaccgatcgatggcgtccaactacgtggacacaacgggcgaggagggacggttccacggccctcacagccacagcaccagcacgaccccgacgggcggcgcggcggcggcggcatcgccgcgcaacttccggcgcagcttctcctccgcgtcctccgcgggccacagccacggcggcggcggcggcgaagacattggagctaaattggtcacgcaagctgcagctaagaccaacgatcttgctggagatgggacaaccacctctgtggtccttgctcaggggctgattgctgagggtgttaaggtcgtggcagctggtgctaatcctgttcagattactcgtggtatcgagaaaacagcgaaagcactagttgaagaactacggaagttgtctaaggaggtcgaagatagtgagcttgcagatgttgctgctgttagtgcgggcaacaactacgaaattggtaatatgatagcagaggccatgagcaaggtcggtcggaagggtgtggttaccctcgaagaggggaggagttctgagaactttctctatgttgtggagggaatgcaatttgaccgtggttatatctctccgtactttgtaacagacagtgagaaaatgactgcagagtacgagaactgcaagctgcttttggttgataagaaaatcaccaacgcaagggatcttatcaacgttttggaagaagccatcagaggtgcatacccaatcctgataattgcagaggatattgagcaggaggctcttgctacccttgtcgtcaacaagctcagaggatcactgaagatcgctgccatcaaagcccctggttttggagagcgcaagactcagtacttggatgatattgccatccttactggagcaactgtaatcagagatgaagttgggctgtcacttgacaaggctgacaaatcagttcttggaacagctgcaaaggttgtccttacgaaagagtcgacaacaattgttggtgatggcagcacccaggaagaagttactaagagggttgcacagattaaaaatctcattgaggcagcagaacaagaatatgaaaaggaaaagctcaatgagaggatagcaaagcttgctggtggtgttgctgtcattcaggtgggagcacaaacagaaactgaactaaaagagaagaagttaagagttgaggatgccctaaatgcaaccaaggctgctgttgaggaaggtattgttgttggtggaggatgcacccttttgcggcttgcagctaaagtcgatgccatcaaggatacactggagaacgatgagcagaaggttggagctgaaatagtaaggagggccctgagctacccacttaaattgattgctaaaaatgccggtgtcaatggcagcgtcgtcactgagaaggtcctttctaacgataacttcaagtatggttacaatgctgctactggacagtacgaggacttgatggctgctggtatcattgatcctaccaaggtggtgagatgctgcttggagcacgccgcgtcggtggccaagaccttcctgacatcagatgttgtggtcgtcgatatcaaggagccggaggctgcacctgtcgcaaacccgatggacaactctggctatggatactgatgagatgctatggccatgccccatgggacgaaggtgatcaccatattaattttttggtaggcgaggagtcgggtcgaggtagctttttagacgaccgaaaggcgaaaataagttgaggatctgcatcccaaatttgtgatgtaaactgagacagaacagcagccaaatgaagcagagatatgctgaaagattctgtaactggttgcagctaatgttgaatgcagtttgcacacgaccgaacgcgaattcaaatggctccggcaacgtcagattgtgctgcgtcgaaaaactgatttgaaactgatacaccggagcggtgtcctctctgggagcgatccacatttttgtgtactttctgatttgatgaacaactttctagaagatgtattagtatttgagggcgtctgtttttaaaagaaaagtttgcatgagtacccagttgctacagttctcg

SEQ ID NO: 259895 - DNA, 609 bp, Zea mays
atgaacaagcctcctgaaatgatatctggcaatatgacagcagccatgtgtgtgtattctggactctttatgaggtttgcatggatggtacagccccgaaattatttgcttctagcatgccatgcttccaatgaaagcgtccagctctttcttctccaggtacccctgagacctagcccagcggcctgctgccgtcttcttccgccgccgtcttcgtccgtagagcagagcacatcagagagcggggaggaagaaaaaccgatcgatggcgtccaactacgtggacacaacgggcgaggagggacggttccacggccctcacagccacagcaccagcacgaccccgacgggcggcgcggcggcggcggcatcgccgcgcaacttccggcgcagcttctcctccgcgtcctccgcgggccacagccacggcggcgcggcggcggtaccaatttcttgaacttttcctttacctattcttttgtagattaaaatgtttggtattttccacttacttggaagatccattttactttggaagatatcaataacctttggttgtgattctaatgttttttcactgtttttattattttattttacttcttgttt

SEQ ID NO: 259896 - DNA, 620 bp, Zea mays
cccacgcgtccgaacccctctcgatcgacgcacgcagccgcgacccatcgcgacctgacccgaccctcccgaggccgccagccttatcctctccgcctccgcctcccgccgtcccccgcgacccatcgcaagcgcgagtagaagacatggcctcgacgttcggtgccacttctacagttggccttatggctgctccaacggggaagaatgtgcgccttcagaggagggctaacttcagagtaaaagcggctaaggagctgtacttcaacaaggatgggtcagctatcaagaagctccagactggagtcaataagcttgcagacctagttggagttacactcggaccaaagggaaggaatgttgttttggagagcaagtatggttctcctaaaattgttaacgatggcgttacagttgccagagaggttgagctggaggaccctgtggagaacattggtgctaaattggtcaggcaagcagcagctaagaccaatgatctagctggagatgggacaaccacctctgtggttcttgctcaggggctgatcgctgagggtgttaaggttgtggcagctggtgctaatcctgttcagattactcgtggtatcgagaaaacagcg

SEQ ID NO: 259897 - DNA, 369 bp, Zea mays
gcctgctgcccgtcttcttccgccgtcgccgccgtcgtcttcgtccgtagagcagcagatcagagagcggggaggaagaaaaaccgatcgatggcgtccaactacgtggacacgacgggcgaggagggacggttccacggccctcacagccacagcaccagcacgaccccgacgggcggcgcggcggcggcggcggcatcgccgcgcaacttccggcgcagcttctcctccgcgtcctccgcgggccacagccacggcggcggcggcggggccaagtgcgtgtgcgcgcccgcgacccacgccgggtcgttcaagtgccgggtccaccggaccaacttccagggccacggtcacccgcacccgttcccg

SEQ ID NO: 259898 - DNA, 341 bp, Zea mays
cctctatctctctctctctctctctccctctctacctgccccgttcctcaccagtctcttccgccggcgtcgacgagagctgcgctaggtgatctcgactgcttcctcgccccccatggcgacggcgctcaaatcgttcctgaacagccccgtcggccccaagaccacccacttctggggccctgtcgccaactggggcttcgtcatcgcgggtttggttgacatgaacaagcctcctgaaatgatatctggcaatatgacagcagccatgtgtgtgtattctggactctttatgaggtttgcatggatggtacagctccgaaattattgcttctggcatg

SEQ ID NO: 259899 - DNA, 488 bp, Zea mays
cggaattcccgggtcgacgcacgcgtccgccctcacacaagagacgcagctgcgagtccgccagccttatcctcctccccgtctccggctccaacccgcaagcgcggtaaggtatggcttcgacattcggtgccacttctactgtcggccttatggctgctccaacagggaagaatgtgcgccttcagaggagggtgaacttcagagtaagagcagctaaggagctgtacttcaacaaggatggctcagctatcaagaagctccagactggagtcaataagcttgcagacctagtcggagttacactcggaccaaagggaaggaatgttgttttggagagcaagtatggttctcctaaaattgttaacgatggtgttacagttgccagagaggttgagctggaggaccctgtggagaacattggtgctaaattggtcaggcaagcagcagctaagaccaatgatctagctggagatgggacaaccacc

SEQ ID NO: 259900 - DNA, 561 bp, Zea mays
gccggtgtcaatggcagcgtcgtcactgagaaggtcctttctaacgataacttgaagtatggttacaatgctgctactggacagtacgaggacttgatggctgctggtatcattgatcctacgaaggtggtgagatgctgtttggagcatgccgcgtcggtggccaagaccttcctgacatctgatgttgtggtcgtcgatattaaggagccagagtctgcgccccttgctaacccgatggacaactctggctatggatactaatggagatgagatggccaagccgcatgggaagaagggtgatcaccattttttttttggtaggcgagaagagtcgggtcgaggtagtttttcatcatcagataaaaaaagcgagtttgttgtacgaccattaggcgaaaaataagtgggaggggctgtgtagcccaaatttgtgatgtaaactggagacagacagcagctaaaaacaagcagaaattgctgagtgattttgtaactgatttgcagctatgctgaatgcagtttgcacgcgactaaacaggactctaaaaaagagaaaaa

SEQ ID NO: 259901 - DNA, 358 bp, Zea mays
gtccggaattcccgggtcgaccgacgcgtccgcccacgcgttctcggacgcgtgggccatgccccatgggacgaaggtgatcaccatattaattttttggtaggcgaggagtcgggtcgaggtagctttttagacgaccgaaaggcgaaaataagttgaggatctgcatcccaaatttgtgatgtaaactgagacagaacagcagccaaatgaagcagagatttgctgaaagattctgtaactggttgcagctaatgttgaatgcagtttgcacacgaccaaaaaaaaaaaaaaaaaagggcggccgcgcgcggcggctcgcgatctagaactagcccacgcgtccgccacgcgtccg

SEQ ID NO: 259902 - DNA, 498 bp, Zea mays
tttcattcgtccgcccacgcgtccggcaaggtcggtcggaagggtgtggttaccctcgaagaagggaggagttctgaaaactttctctatgttgtggaggggatgcaatttgatcgtggttatatctctccgtactttgtaacagacagtgagaaaatgtctgccgagtatgagaactgcaagctactttggttgacaaaaagatcaccaacgcaagggatcttatcaatgttttggaagaagccatcagaggtggatacccaatcctgataattgctgaggatattgagcaggaggctcttgctacccttgttgtcaacaagctcagaggatcattgaagattgctgccatcaaagcccctggttttggagagcgcaagactcagtacttggatgatattgccatccttactggaggtcagttaaacttccgttctagagcattcttatgatcatgtatgctccttgtttatagcattctttgtttctgcagcaact

SEQ ID NO: 259903 - DNA, 413 bp, Zea mays
ggcgagcggcagttcctccgccgcgcggcgtggctggtgatgaggacggacgggtacttcgtgccggcgctgttcctgaacccggcgtaccaggacgagctcgacgggatgttccctcggaaggactcggtgttctacctcctggcgcactacctgttccacccgacgaacgaggtttgggggctggtgacgaggttccacaggtcgtacctgaggggctcggacgaaaggctgggcatccaggtgagggtgttcgacggagacgccccgttccagcacatcctggaccagatcctcgcctgcacttcgcaggaacacctgctccccgacgtggcggtgacgcaagagccgtcggcgggccgcggcgcgcggtccaaggccgtcctgatgaccggcctcagctcgtggtacta

SEQ ID NO: 259904 - DNA, 518 bp, Zea mays
gggccgacgcccgcgtctacagatagtcctaacggaaccagaaagcaaacgcaaacaagaagcaaaccagcaatggcccgcgcctgcgtcttcctcgtcgtgctcctcctagccgccgtcgccatggcgccgttcgcgggcgcggcgcgcatcgacgtcgtcgagggcaggtccatggcgtccgcggacgcaccggaggccgccgccgacgctcccgctcctgctcctggccccgactcctcctcgaccccgtcgccggcaccctccagcagcagctcttccgactagccgcccggcagagatatctacggcgtccgatcagtctttggcgccacctataacctatcggatcctgcaaagctatatatgattctatggtataatgtgtggttgcggcaaacgcgcggaaataatgtgcttgcgtgattggttttctctctctttttttggttaataatgtaaaacaggcataccggcgatggtttaacatggtaactgagaatgtggtactctttctc

SEQ ID NO: 259905 - DNA, 728 bp, Zea mays
cgagtccgacgacatgggctatgcatttacgctcaaggatggcagcgctctatagcttccgtgtctccttcactgtctccaacaacatcgtttcaggcctcaagtacaccaacacggtctggaagactggagtcaaagtggagaaccagaaaatgatgctagggacattcagtccccagcaagagccgtacgtttacgagggtgaagaagagaccacacctgctggcatcttcgcaagaggttcctattctgctaagctaaagttttttgatgatgatggcaagtgttatttggagacgagttactactttgagattagaaaagagtggccagggccagcaacctaatgatatatggagcggcggtggtggattcgttaaacacatacatgttagaactcttagttaagacaagcagaagatctattatattctactgcttctagctagaggatgattgcttcacatgcatatcgtcatgtttaaccaccgtacgtataatttgtttggagtccattattctacgctatttgggtattattattgttaattcacattatagaatcagtcgtgtatggagattcaaagatatatttatatacttatgtgaccttcttattgaaaaaaaaaagaacaaagagggaccccgacaagtaagccggtaaccccggaatttattcccggcccgttacctgcaggggaaccaggttccccaataggaaggcgtat

SEQ ID NO: 259906 - DNA, 551 bp, Zea mays
cggacgcgtgggcggacgcgtgggcggacgcgtgggcggacgcgcaaaccgacgatggcgtcgaataagacggtcctcatcgtcgcggcgatgcttctcatcacgctcgtgctggaggccgcccctccggcgaccgccatggactgcaaggccgggtgtgacgaggtcacgggcccactccacatgagcatggaggactgcatgaagaggtgcaaggagatcgctgctaagcaggggcctagggacccttacaaggataacaaacttgacatcccatgaactaattaatgctcctatatcatctgcctatccatgcatgcattgcattgcgtatgcacactgtgcgtgcctgcccacaaagttcgacaacacaccgatctcgacggatttgtaatcgtgtccactcgatcgagagatcgatcgatgcttgttattatatttgtattccacattatatataagaaatacagattaaattaaatttattccaaaatgcacgaacgccgcaacaaagaactcatcaccgtcaagtacatcaaaacgtggcaaaa

SEQ ID NO: 259907 - DNA, 758 bp, Zea mays
cggacgcgtgggccacgagaccacaagccacaccaaacccgcgttcatcgacggacgagctcgccggcgagagagcgactgagatggaggcggcggcagcggcggccggcgtggagctgggctcttcgaagccccagatcgcgacgcaggcggagatggcggaggcccgggtgccgctcgcctaccgcgaccagtgcgcgcacctcctcatcccgctcaacaagtgccgcgtcgccgagttctacctcccctggaagtgcgagcccgagcgccacgcctacgagaagtgccagtacgagctcgtcatggagcggatgctccagatgcagaagatccgcgaggcgcaggagaccaaggtcaagggcggcgcctccattggcctcatcccggccaccgccaagctcgcctgatacgggtcccagcccgatccgcttgatttaggtctgcctgttggctatagcagcgtccagaggcgttgcgccgtgcaaggatcctcaatgtttgttgtgtgaacagagatacgcgtttgaatttggcataaagttaactgttgtcttctttttcccttcccctctctctctctctatctccctgatgggtatcttcaggtttcagtttgatgatggaataaggaaagatcattgtcgtattaccgatgactggatgacttttttgaagttttgaaaacttgttcgccttgtggcttgtgttgctgcctaagccaactactgccggcaggcatggcaattgcagcgatt

SEQ ID NO: 259908 - DNA, 487 bp, Zea mays
tcgaccacgcgtccgaacgtatacattagatagtttaggtttgataatggatccaaaatatgttagcctatgcatcttcgtattacttgtattgcatggagatactactttggcagaaacttgcagggagtttgctaaatggcatccattctgctttagtgcaatgtgcaaggcaaattgttttatagaaggaaaaagctccgatggttcctatgcaaagggatatagatgtgattcacatggatttcattctatgtgtatttgccttttgtgtaaaagttagttatcttaagacaagcggggatatattctatgttcatatccgtcatttaggagtgttgtccaaataattttatgggataatagttaactagtatttgtttacttctagatatatgtagcactagttaactagttggtatttcttaaattatcagctatgtaccaagaaacatgttttcagcgcttcaataatatatctttggtc

SEQ ID NO: 259909 - DNA, 1137 bp, Zea mays
cggacgcgtgggaaatccctagtcgggcttcatacgccgccaccgcgccgcttcctccctcgccatggccctctttgctgccgcacgccgcgccgcgtcctcctccgtgcccgtcctcctccgtgcctccgcctcctcggggtcccaccgcagcgccgtcctgctccggcccctcgctgccgccgtggcgccgccgaagccccgcgcgatgccgttctcctcggcgcccgcgacgagacccagctccgacgccgagctactcagcgtcatcgactccgagatcaagtacgccgaggactgcgatgaccacgacagggttgaggagattccagaaaatttccctttcaaaatcagcgacgagaaggggacgaatgcagttacccttaaaagaacatatcagggtgagcagattgaggttgtggttcacatgcccagccttgtcactggagatgagcctgatcatgaccgtgatggtgaggatgaggacacggcgggagatgacaatgacgaagatgaaggccagaagcctgaacagtcaagcattcctctcacagtcactatatccaagggtgacggtcctgttcttgaattcacctgcactgcctatcctgacgagtgaccttgatgagaacctgcagagggaattccacaggtacctggatctgcgtggcatttcacccaggaccacaaatttcttgcacctgtacatgatcaacaaggacagccgtgagtacctgctctggctgagaaagctgaaggatttcttcaagcagtaggtgtgaagacctgaagatcagctttatctctcttttgttcctgctagggccttctcggttattccaattccatgtggattgaagtgtattaaaatggattttgacttgttatggatttaaatcaacttaataccactcaatccacatggattattggtgaaacaaacaagccctagtcgaaattcttgttaagttggtagtttgtcagacccgaaatagagttttttgggtttcgaatggaaacactagacaaaataaaggatttagtatttttttctataaatttccaagatttatttaactgatgacaatttagggtgagaaagtgtggctatataaaagctttcatgaagttaatttg

SEQ ID NO: 259910 - DNA, 646 bp, Zea mays
tatccttaagagtacatatcagggtgagcagattgaggttgtggttcacatgcccagccttgtcactggagatgagcctgatcatgaccgtgatggtgaggatgaggacacggcgggagatgacaatgacgaagatgaaggccagaagcctgaacagtcaagcattcctctcacagtcactatatccaagggtgacggtcctgttcttgaattcacctgcactgcctatcctgacgaggtcatcatcgactccatgtctgtgacacaacaatcaggggatgatgaacgtgacatgattgcatatgagggtcctgatttcaatgaccttgatgagaacctgcagagggaattccacaggtacctggatctgcgtggcatttcacccaggaccacaaatttcttgcacctgtacatgatcaacaaggacagccgtgagtacctgctctggctgagaaagctgaaggatttcttcaagcagtaggtgtgaagacctgaagatcagctttatctctcttttgttcctgctagggccttctcggttattccaattccatgtggattgaaatgtattaaaataaattttgacttgttatggatttaaattaacttaataccacccaatccacatggattattggtgaaacaa

SEQ ID NO: 259911 - DNA, 1737 bp, Zea mays
  unsure (1)..(1737): unsure at all n locations
tttcctccttcctcgcctccagccaccatgttatggttgagttctacgcaccttggtgtggccactgccaggagctcgccccggattacgccgccgccgccgcgcatctcgccgctcaccaccaccaggcccacctcgcccttgccaaggtcgacgccaccgaggaaaccgacctcgcccagaagtacgacgtccagggcttccccaccatcctcttcttcatcgatggcgtccccagaggctataacggagccaggaccaaggaagccatcgtcgactggatcaacaagaagctcggcccagccgtgcaaaatgtcaccagcgtcgacgaggcccagagcatactcaccggagatgacaaagccgtccttgccttcctcgacacactatccggtgctcacagtgatgagcttgctgctgcttcgaggctggaagatagcatcaacttttatcagacttcgactcctgatgttgctaagcttttccatatcgatgcagcagcgaagcgtccatccgtagtgctgctgaagaaagaggaggagaagttgaccttctatgatggggagtttaaagcatcagccattgctggttttgtgtctgctaacaagcttcctttggtgaccacactaactcaagaaacttccccttctatttttggcaatccaatcaagaagcagattttactatttgctgttgcaagcgagtccaccaaatttctgcccatctttaaggaagcagcaaaaccatttaagggaaagttattatttgtctttgtggaacgagacagtgaggaagttggtgaaccagttgccgactactttggtattactggacaagagaccacagttcttgcttacactggtaatgaagatgctaggaaattttttcttgatggtgaggtgtcacttgaagctataaaggacttcgctgaaggtttcttggaagacaagcttacaccattctacaaatcggaaccagtgcctgaatctaatgatggggatgtgaaaattgttgttgggaagaatctggatctaatagttttggatgaaacaaaagatgtacttcttgagatatatgcaccatggtgtggtcattgtcaatcgctggaacctacttacaacaatctagccaagcatctacgtagtgttgactcccttgtggtagccaaaatggatggtactaccaatgagcatccacgtgcaaagtctgacggatacccaacaattctcttctatccagctgggaagaaaagctttgagcctgtcacgtttgagggggagcggacagtggtagatatgtacaggttcatcaagaaacatgctagcatccctttcaagttgaagcgccaggagtcaagaagggagagcatccagacggatggtgtcaaggacgaactgtagggcaggccatgcattgatagatagctgagttttgaattttggttttataaaattaggtccgccaccgaatttcgcgttttcagcttaaacatcacctaaatctgtttctttactatattaaagcaccagtttcaacggtagtcccgcgtcaatatttttcaaaagacctcttacatttttttagaatcaacctcactcttataatttcttttatactactataatatgagagttactctaccaaataagttaaaattatgtataaaaaagagtttgaatcttggttgaaaaaaaaaaaaaaaaaaaggccggccgcaccggtnnttccggnccggtg

SEQ ID NO: 259912 - DNA, 405 bp, Zea mays
ctcttctatccagctggagtgaaaagctttgagccaatcacttttgagggggagcggacagtggtagatctgtacaagttcatcaagaaacatgctagcatccctttcaagttgaagcgccaggagtcgagaaccgagagcactcgggcggagggtgtgaagagctctggtacgaactcaaaggacgaactgtaaagagctcagggttggatgtgtgttggagtggatcagggtgaaagtttccatctcaatacaagtagatcgatcttggtggatgcgagtgcagtgttggcctgagggaggagcagcagagatgagtgcttactgcttagagagaggaatgaaatcagcaactaatcaaataaaatcaaattccattattccttttatgcgtctgttttgctg

SEQ ID NO: 259913 - DNA, 1649 bp, Zea mays
cctgttctctctccccacttcgagacttcctccattcgcggtttgcctctctgcctgcctccctcagatcctccctaagattgccatggcggaccagctcaccgacgaccagatcgccgagttcaaggaagcattcagcctcttcgacaaggacggcgacggctgcatcaccaccaaggaacttggaactgtgatgcgctcgttggggcagaaccctactgaggctgagcttcaggacatgatcaacgaggttgatgctgatggcaatggaaccatcgacttccctgagtttctcaacctgatggcacgcaagatgaaggacacagactctgaggaggagctcaaggaggccttccgcgtgttcgacaaggaccagaacggcttcatctctgctgctgaacttcgacatgtcatgaccaacctaggtgagaaactgacggacgaggaggtggatgagatgatccgtgaagccgacgtggacggtgatggccagatcaactacgaggagttcgtgaaggtgatgatggccaagtgagatgatgtgcctgttttgaagctagttcctctcttgatggtagtagctagtctagtgttggagactgactgcatttggtccgccttgttcctctcgctgcatcaatggacatatccgtttgttttctcccaagggattttaccatgtcggtaatttcgttcaaatttgtttatggttgtattaacatttgtgttatcttggtacaatgatcatgcctttcccttctacatttaactcctaaatttggaagggaaaggcatgatcattgtaccaagataacacaaatgttaatacctctccctcctaatttgagcgaaattacagacatggtaaaatcccttggttgaaaacaaacggatatgtccattgacgcaaggataggcgtaagacacaaccaaaagcagtcagtctccaaaactagactagttactaccatcaggagaggaactagcttaaaaacggcgggcatatctcacttggccatcatcaccttcacgaactcatcgtagttgatctggccatcaccgtccacgtcggcttcacggatcatctcgtccacctcctcgtccgtcagcttctcgcctaggttggtcatgacatggcgaagctcagcagcggagatgaagccgttctggtccttgtcgaacacacggaaggcctccttgagctcctcctcagagtcggtgtccttcatcttgcgtgccatcaggttgagaaactcaggaaagtcgatggttccattgccatcagcatcaacctcattgatcatgtcctgaagctcagcctcagtagggttctgccccaatgagcgcatcacagtgccaagttccttggtggtgatgcagccgtcgccgtccttgtcgaagaggctgaaggcctccttgaactcggcgatctgttcgtcggtgagctggtccgccatggcaacccgagcggggatctgacggagggagggaagcaggcaggaaggcagagaggcaaaccgcgaatggaggaaatctggaagggggacaggggagagagagaaagacagaagcagaggacagtgcggtcagcggtcagagacagtcgcagaccgaccagtctctcgtggtcgtgtactcgtgtgtcccac

SEQ ID NO: 259914 - DNA, 1151 bp, Zea mays
cccacgcgtccgctaagctgtcgtcgcagaatcgcacgtacgcgcgatcgagaagccaggaccaggacgacgatggcccggccgcgcctcctcctcaccttcctgctcgccgcggcggccgtgctgaccacggtgcccggcgtcgcgctcgccaagtcgaagctcgccaagaagagcgacgacgtcgtgaacgggcccctcctgaccgagaagatccaggcgaagaagacgctgatcgtggggccggacgaggagttcaagaccgtgcagtccgccatcgacgcggtgcccgccggcaacgccgagtgggtcatcgtccacctccgctctggcctgcacaggggcaaagttgtgataccggagaacaagcccttcatcttcgtgaggggcaacggcaaaggccggacctccatctcccacgagtccgcctcttccgacaacgccgagtccgccgcgttcaccgtgaactcggacaacgtcatcgtcttcggcgtcagcttcaggaacagcgcccgcgtcggcctggtgaacgacccggagatccgttccgtggcggcgatggtggccggcgacaaggtggccttctaccactgcgcgttctacagcccccaccacaccctgttcgacagcgccggccgccactactacgagagctgcgacatccagggcaacatcgacttcatcttcggcagcggccagtccatcttccagtgccccgagatcttcgtgaggcctgaccggcggacggagatccgcggctccatcaccgcgcaggtgcggcaggaggaggacagcagcggcttcgtcttcctcaagggcaaggtgtacggcgtccgggaggtgtacctgggccgcgtcaccgcgccggactcgcgcgtcatcttcgccgacacctacctctccaagaccatccagccggccggctggacaaccatatgctacagcggcatcaccgacaaggtgacgctcgcggagttcaactgcactgggccgggcgctgacgtgacgaaccgcgtgccatggtcgcggaggttctctctcgacgacgcggccaagtacctcaccatcgacttcatcaactgcaaggactggctgccggcgtactactactgatccgaccaacgactgctggatccatcaaacatgcatgc

SEQ ID NO: 259915 - DNA, 1972 bp, Zea mays
cccacgcgtccgctcatgcccagattacatgattaaggctgaggagtgtttaaagcgggagaaggacgcgagttggtcactatttgcatattagcagcgaacagaagttattggagaaagtgcaaaatgaattgcttgctcagtatgcaaccccgctgttagagaaggagcattctggatgttctgctttgcttcgcgatgacaaggttgaggatctttctaggatgtacaggctcttctccaaaatctcccgtggtctggagcctatttctaacatgtttaaaacgcatgttacaaatgagggcacagccttggtcaagcaagcagaagattctgctagcaataagaagccagagaagaaggatatagttggcatgcaggagcaggtctttgtgtggaaaatcatcgagctgcatgacaaatatgtagcttatgtgacagaatgtttccagggacatacactcttccataaggcacttaaagaagcctttgaggtcttctgtaacaaaggtgtctctggcagttcgaatgctgagttgttggctaccttctgcgacaatattctgaagaaaggctgcagtgaaaagctcagtgatgaagccattgaagatgcccttgagaaggttgtgagattgctggcatacatcagtgataaagacctgtttgccgagttctataggaagaaacttgccagaagattacttttcgacaaaagtgctaatgatgagcatgagagaagtattctgacaaagctcaagcaacagtgcggggggcagtttacttccaaaatggagggcatggttacggaccttactgtcgctagagatcaccaaactaagtttgaagagtttgtagctgggcatccagagttgaatcctgggatagacttagctgttactgttttgacaacgggattctggccaagctacaaaacttttgacataaaccttcctgccgagatggtgaaatgtgtagaggttttcaaggagttctatcaaacaagaacaaagcacaggaagctgacatggatttattccttgggaacctgcaacatcaatgctaagtttgatgctaaacctattgaacttattgttacaacatatcaggctgcattgctactactgtttaatggatctgacaggcttagttattctgagattgtaacacaattaaacctgtcagatgatgatgtagtgcgtttgctccattctctttcttgtgcgaagtacaagatccttaacaaggaaccggctagtagatccatctctcccaatgatgtttttgagttcaattcaaagtttactgacagaatgagaagaatcaaggttccactccctcctgttgatgagaagaaaaaggttgttgaagatgttgacaaagacaggaggtatgcaattgatgcatcaattgtgcgcattatgaagagccgcaaagttatgggtcatcaacagctggttgctgaatgtgttgagcagctgagccgcatgttcaagcctgacttcaaagccataaagaagaggattgaggatctcattacaagggactacttggagcgcgacaaggacaacgctaatacgtacaaataccttgcctgattggtggtcagtggcaaaagtccaaaacagctcccagactagtgcaataccacgggggtggcgatctcctgcaaggtggtggtgcgtcaacttttaccatgatttgaggtgcgttatggtgatttgcgtgcttatgggtcctgccacagcaagggctgctcgcatttgtaaattggccgttaaaatagacaatcttgacctgcattagatgatatgatgatgatatgaggaataggagaggcactcaagtacttgtttgccatctatgccaatgttttacctatatgtctgtatcaatgtttcagtcaattgatatgagatgatgcttggagtcgttttgctatatgaagtgacggatacaatgggaatttgcagcc

SEQ ID NO: 259916 - DNA, 1073 bp, Zea mays
gcggtccaaccctcgttctatgccttccttccatcctccctccctccttccctccctcgctcgcctctggaggaccctcgccatcctgcccaagcgcaccaccaaacccccagcagcggcgctagggttcgcgcctcggcgcgtcggcaccgtcacctgcggcgatggcggggcaggagcgtaggacaatcgatctggaggagggatgggcgttcatgcagaagggcatcaccaagctgaagaacatcctcgagggcaagcccgagccgcagttcagttccgaggactacatgatgctctacacgacgatatacaacatgtgcacgcagaagccgccgcaggactactcacagcagctctacgacaagtatcgggagtcgttcgaggagtacatcgcctccatggtactaccttcattaagggagaaacatgacgagtttatgctgagggagctagtgcaaaggtggtcaaaccataaagtcatggttcgctggctgtcacgcttcttttattaccttgaccgatacttcatatcaaggaggtcacttaccccacttaaagaagtgggtcttacttgcttccgagagttgatatatcaagagattaaagggcaagttaaagatgcggtgatagctctgatagacaaagaacgcgagggtgaacagattgaccgggctctgttgaagaatgtattggatatttttgttgaaattgggctgggtcaaatggagtgttatgagaatgactttgaagatttcttgctcaaggatactacagagtactactctgtcaaggctcaaagctggattcttgaggactcatgcccagattacatgattaaggctgaggagtgtttgaagcgggagaaggagcgggttggtcactatttgcatattagcagtgaacaaaagttgttggagaaagtgcaaaatgaattgcttgctcagtatgcaaccccgctgttggagaaggagcattctggatgttctgctttgcttcgtgatgataaggttgaggacctttctaggatgtacaggctcttcttcaaaatcagccgcggtctggagcctatt

SEQ ID NO: 259917 - DNA, 473 bp, Zea mays
gaggattgaggatctcatcacaagggactatttggagcgcgacaaggacaacgccaatacgtacaaataccttgcctgattggtggttagtgacaaagtccaaaacagctccgggactatgcgataccactgggatggcaatcttcctgcaatgtcgtggtgcgtccacttctaccatgatttgcagcacgttttggtgatttgccctgccacagcacgggctgctcacattttgtacattggtcgttaaataggataagcgtgttggcctacattagatataatgatgattgatgatatgaggaataggagaggcattcaagtacttgtatgtgtcttctatgccaatgctttatctatatagctgtatcagtgttccagtcaattgatatgagatgatgcttggagtcgttttgctatatgaagtgacggatacaatgggaatttgcagcatccgtttgacatttcagagc

SEQ ID NO: 259918 - DNA, 369 bp, Zea mays
accagtctaagccaccacccaggcccagctcacctctttcctctcttctcatgcccacgcgctcgcccatctcatagtccttccccattccgcctctctagctggcctgtcgaggaccctcgccatcctccccaggcgcaccaccaaacggtccaaacccccagcggcggcgctaggatttgagtctcagcgcgccggcaccgccaccgccaccggcggtgatggcagggcaggagcgtaggacaatcgatctggaggagggatgggcgtttatgcagaagggtatcaccaagctgaagaacatcctcgagggcaagcccgagcctcagttcagctccgaggactacatgatgctctacacgacgatat

SEQ ID NO: 259919 - DNA, 876 bp, Zea mays
cccacgcgtccgcagacgcgtgggcggacctgggccgcaccctttcatcagcctgcctgtccactgttggcttggtgacttcctccgctccgctccgctcccctccgctcccgaacggtcgatctttgcatggcagcagcagctggctccaaggggcgggcgatcgctggaagcttcgtcagccgcgtcctcgccggcaaggccgcctcgccgaggagggccgtgcacgcctcggcgtacgacaagaacctggaggaccaggtgcgcccggcgttcgtgccggacgatgtgatcggcagcgccgggagccccgacaagtactggagcccccaccccaagaccggcgtgttcggcccggcggcggtggaccccaagctggccgctggtggcgcgccggacgccggcgcggatgctgcaggaggcacggtgctggaccagaaggtgtggttccgcccgctcgaggacgtcgagaagccgccccccgccgcgtgagccgcgcggcgctgctaggccagcccacactgctgctcgctcataaaaagggcggcgggagagcctggcagtggcaggcactctgctcgtgctcggctgggctgggctccctgcttatatcactacaatattatactactagtagtggtgcttgatagcagtgtgtggctgtgctaataccagtataatactggttctactataatacagtcgtatcaggcatggcgtgcatcaggactggttgtgatagtagcaacgtgatgctcgtgcctgtaataagaacaagcaggcgatgtgtgcctgtgatgtaccggtgtcgtcagtgttataagtacttgggtcaatgttttgtgcccttgttgcacttgaaaaaaaaaaaaagga

SEQ ID NO: 259920 - DNA, 558 bp, Zea mays
ctcgtgtctcgccggcggcacagcgcagcgcttccactgttgggtgtggtggatttcctccgcccccgaacgatcgatcttttgcatggcagcagcggctagctccaaggggcgggcgatcgctgggagcttcgtcagccgcgtcctggccggcaaggccgcctccccgaggtactgggacgacggcaacacgaacgcggtttcgccccgtggttcattctctttcggtttgctcgtctgtgctagtagaactactgtgtttttttttaggatgcgcgttcttgttaagttggtccaatccaagttcctgtggtagttgcagcagagcagagcgatttgcttgcttgcttcttagctctgtggatgactctgattctcaatgtgtgtgctgctgctggtggcaagattttgctcggcagaaaatctactggaatgtgccaactggccgaggaggagctactattatcttctgtcccatggtctacgactacgactctacgtagagtcgtagacatggcaactgtctgctttgggccatcaccagcttgttaatccact

SEQ ID NO: 259921 - DNA, 653 bp, Zea mays
ccgggccggaattaccgggccgacccaacccggaacctctctccctcggcctcgccggcggcacagccacgcagcgcttccactgttgggtgtggtggatttcctccgcccccgaacgatcgatcttttgcatggcagcagcggctagctccaaggggcgggcgatcgctgggagcttcgtcagccgcgtcctggccggcaaggccgcctccccgaggagggccgtgcacgcctcgtcgtacgacaagaacccggaggagcaggtgcgcccggcgttcgtgccggacgatgtgatcggcggcgcggggagccccgacaagtactggagcccccaccccaagaccggcgtgttcggcccggcggcggtggacaccaaccagctgggcgtcgccgctgacgctgccgccgcgaatgcggctgcagcaggaggcacggtgctggaccaaaaggtgtggttaccgcccgctcgaggacgtcgagaaagccgccccccgtcgcctgaaccgcgccacgcccacgcgacgcgacgctgccagcccacactgctgatacaagggcggcggccgggagggagagtcctggcaacgtcatgctcgtgcctgtaataagaacaagcaggagatgtgtgtgcctgtgatgtaccggtgtcgtta

SEQ ID NO: 259922 - DNA, 558 bp, Zea mays
ccaggtaccgattcggaattccgagggacgacccacgcttacagtggacgcgtgggcgccggcgcggattctgcaggaggcacggtgctggaccagaaggtgtggttccgcccgctcgaggacgtcgagaagccgccccccgccgcgtgagccgcgcggcgctgctaggccagcccacactgctgctcgctcataaaaagggcggcgggagagcctggcagtggcaggcaccctgctcgtgctcggctgggctgggctccctgcttatatcactgcaatattatactactagtaggggtgcttgatagcagtgtgtggctgtgctaataccagtataatactggttctactataatacagtcgtatcaggcatggcgtgcatcaggactggttgtgatagtagcaacgtgatgctcgtgcctgtaataagaacaagcaggcgatgtgtgcctgtgatgtaccggtgtcgtcagtgttataagtacttgggtcaaaaaaaaaaaaaaaaaagttaaaaataaaccaaaaactgataaataaataaaaaaaaagggcggc

SEQ ID NO: 259923 - DNA, 461 bp, Zea mays
cccgccccccccgcctccgcaacctctctcccctcgactgttgggtgtggtggatttcctccgctcccgccgaacggtcgatcttttgcatggcagcagcggcggctagctccaaggggcgggcgatcgctgggagcttcgtcagccgcgtcctggccggcaaggccgcctccccgaggagggccgtgcacgcctcgtcgtacgacaagaacccggaggagcaggtgcgcccggcgttcgtgccggacgatgtgatcggccgcggcgcggggagccccgacaagtactggagcccccaccccaagaccggcgtgttcggcccggcggcggtggaccccaaccagctgggcgtcgccgctgacgctgcagcagcaggaggcacggttctggaccagaaggtgtggttccgcccgctcgaggacgtcgagaagccgccccccgtcgcctgaaccgcgccacgc

SEQ ID NO: 259924 - DNA, 1585 bp, Zea mays
cggacgcgtgggcggacgcgtgggcgccgcaagctcaggcccctcggctccggcctgtcccccaatgggatcgcgctctcccgcgctgggatggtcaacctcgcgctcatggacaaggtgctcgacgtcgacgccaagaagaagaccgtcacggtgcaggctgggatacgtgtcgcggagctcgtagacgcgcttcgggaacatggcctcacgctgcagaactttgcgtccattcgggagcagcaggtcggagggttcactcaggttggtgcccatggcactggtgcaacattacctcctgttgatgagcaagtcattagcatgaaactggttacccctgccaaagggacaatagagctgtcgagggagaaggatcctgagttgttttatcttgctcgctgtggacttggtggcctaggtgttgttgcagaagttacccttcagtgcgtagaaagacaccagcttgtggaacacacatttgtttccaatgcagatgaagtcaagaaaaaccacaagaagtggctatccgaaaacaaacatattaagtatttgtggattccatatactgacacggttgttgttgtccaatgcaatcctccctcaaagtggataaccccaaagttggcatcaaaatatggaaaagatgaagctttacagcatgttcgggacctttatcgcgagtcactgaaaaaatatagaactgaaacagaaagtaaagacccagaaatagatacactttcatttactgagctgagggacaagctgcttgcccttgatcctctggataaagatcatgtggtgaaaatcaataaagcggaagctgagtattggaagaagtcagaagggtatcgcatgggctggagtgatgaaatactgggcttcgattgtggtgggcagcagtgggtttctgaaaactgcttccccactggaaccctagcaaagccaagtatgaaggatcttgattatatagataagctgctgcagttgattgaaaaggaggagatacccgcacctggacctattgagcagcgttggactgcccgcagcaagagcccgatgagcccggcatcaagctctgaagaagatgatgtattttcatgggttggtattataatgtatctgccaacatctgatgctcgccaaaggaaggaaatcacagaggagttcttcagttacaggagcctggcgcgaagtctctgggatgattattccgcttatgaacactgggccaagatcgaggttccaaaagacaaggacgaacttgccgaactccaggcccggctgaggaagcgtttccctgtcgatgcatataacaaggcacgtatggagctggaccccaacaaggtgctctcaaacgccaagttggagaagatgttcccagtgttggagcctgctcaccagacaaagtaatacgtgttgaagagcgcagagcaagggcacgtacgcagaacttggttgcaggaggcttaacccatacacatttgtagcactgttagttcctgtcatgattctgggaccctaccctggctgtcaaatgtgatggcgattaagattggtcactgaaataaagttttttttgaagatc

SEQ ID NO: 259925 - DNA, 2282 bp, Zea mays
aacaaaacgacctcctccgcccgcccgtccgcccgcctgcccgtcggcgttgtttcgtctccaccgccgctctcctctccagtctcccaccaccgctcgtctccccgtaccgcccgcaacccccctcccctgcgagatccggggcgcgatgtggcgcagctgcgtctcgcggggcctctccagggccaaggcctccgcctccaggctcctctccacggcgtcgtcgtcctacacggtggtcgaccacacctacgacgcggtggtggtgggggccggcggcgcggggctccgggcggcgatcggcctctccgagcacggcttcaacaccgcgtgcatcaccaagctcttccccacgcgctcgcacaccgtcgcggctcagggaggcataaatgctgcacttggaaacatgagtgaagatgactggaggtggcatatgtatgacactgttaagggaagcgattggctgggtgaccaggattctattcagtatatgtgcagagaggcaccaaaagctgttatagagctgtgagaactatggactaccattttcaagaactgaagagggaaagatataccaacgtgcctttggagggcagagcttagattttggcaaaggtggacaagcctaccgttgtgcctgtgctgctgacagaacaggacatgctatgctgcacacactatatggtcaagcaatgaagcacaacactcaattttttgtggaatactttgctttggaccttctcatggacaatgaaggaaaatgtcagggaatcattgccttaaacatggaggatggaactcttcaccgtttccgtgcttctaatacaattctagccacaggaggttatggcagggcatatttctcagcaacctcagcacacacttgtactggagatggcaatgctatggttgcacgtgctggtttacctcttcaggatcttgagtttgtacaattccatcctacaggcatttatggtgctggatgcctgattactgaaggttcccgtggtgaaggtggtatccttagaaatagtgaaggtgaacggttcatggaacgatatgctcctactgcaaaagatcttgcttctcgtgatgttgtttcaagatcaatgacaatggaaattagagaaggacgtggtgtagggccattgaaggatcacatttatttgcatctgaaccatctgccacctgaggttctcaaggaaaggcttcctggtatttctgaaactgctgctatttttgctggtgttgatgtcaccaaggagcccattccagttttgcctactgtgcactacaatatgggcggtattccaacaaactaccatggggaggtagtggatatcaagggtgataatccagatgctgttgttcctggtctaatggctgctggtgaagcagcctgtgcatctgttcatggtgcgaataggctaggcgcaaattcgcttcttgacatagttgtttttggcagagcttgtgcaaacagggtagcagatatttctaaaccaggtgagaagcagaaacctctggaaaaagatgctggagaaaagaccatagcctggttggacaagctgaggaatgcgaatgggtcattgccaacttccaagatccgtctcaacatgcagcgtgttatgcaaaataatgctgctgtattccgtacacaagaaacacttgaagaaggttgtgagctgattagcaaaacatgggaaagtttccatgatgtgaagctcagtgaccggagtctcatttggaactctgacctgatagagacccttgagctggaaaatcttttgataaatgcatgcataaccatgtattcggcagaggctcggaaggaaagcagaggagctcatgctcgtgaggatttcacgacaagagatgacgagaagtggatgaagcactcactggggtactgggaaaacgagaaggttcgattggcatacaggccagtgcacatgaacacattagacgatgaagtagagtccttcccgccgaaagcccgtgtctattgatcgattcaagcctcacaccctcgggaattccgtgtaaggtgttaataaagcagatgggcgttcctggctgagaacatgatctgaactcgtgacccccctttttctgtggttctgtattttgtctgatttgctagaaataaaaggaacacatgctaatgcctgacagacgtttgtgtacatgaaattttgcatgggtttgttacttgttgatgctgtacctgctgttttgagctcgcatgattcatgaacgttgcctgattcacggtgcaaaaa

SEQ ID NO: 259926 - DNA, 431 bp, Zea mays
tctatcacgcgtccgtgagaacatgacctggatgggtgtccctcattttctgtgtttctgtattctgcctagtttgctagaaataaaagggtaagatagaacacatgctaatccctggctgatgtttgtgtacatgaaattttgcatgggttgttacctgttaatgctctgcctggtatcattaacccatgattcatgaaatgttttggtgattcatggcatggtgcgacgttgtcaaacaacgtagatttgtacgcctgttccttggatatagtataatatatatgtacacatgtgttggagcagaataaaaaagccacttctccagtttagacagtgtagtataatgcaaccttatggagagctgctgctacgtactggcacaactacagctagagactagagtgtatgttctggatgctaaataggag

SEQ ID NO: 259927 - DNA, 811 bp, Zea mays
accggtccggaattgacggatggatgcacgcggtcgcgagcgcgtgcctttgcagatgtgaaggacataaagtgtgtgataaattatgatgttccagcaactcttgaagattatattcacaggataggtcgaactggccgtgctggtgctagcggaactgcatttacttttttcacacacgcaaatgcaaagttctcaaggaatctagtgaagattctgcgagaagctggccaagttgtgaatcctgccttagaatccatgtccaggtcttcgaactcaacgggaggaggcaattttcggtcgagaggcagaggtgggtttggtaaccggggccatatgtctggatcaaatacctttcctttaggaggaagaaggccatattgatgtgtgcaaaagaactgtgggagtatgggactatttgtatactactcggcattaagtgcattctttgggaaatttctgagaaatttcccctactaccaggattgataacaccatcgattttcgctacagtacctggagcttcttatatgaaagaacaacacatcaactatctagcaacagcatatgcattccattcagatatttcttttggaaggaccctgtcttgttttagtggagtccctgtgatcgtttaaagtcgtctgtatacttgtactgaacttcttgtggtgttactgttaggatttatggttgctctctattggtgtgcggtgttactgaacaaatttagttaagaagttaggcatttccatatttaatctgattctgaaatcaactagcaaatttatgatgggccctttataatagt

SEQ ID NO: 259928 - DNA, 799 bp, Zea mays
ccacgcgtccgtgacgtggtcgcccacgcgtcgcccacgcgtccggaagcacatgtgtctatggtggtgcacctaagggtccacaaactacgggagcgtagctgaagtggagctgaaattgtcattgcaactcctggctcggttgattgatatgctggaagctggtcacacaaacctacgtagagtgacataccttgtgttggatgaggcggaccggatgctagatatggggtttgagccccaaattcggaaaatagtagcacagatccgcccagacaggcaaaccttgtactggagtgccacatggcctagagaagttgaagccttagcaagacagtttctacaaaatccttacaaggtaatcataggctcacctgaacttaaagctaatcattccatacaacaaattgttgaagttatttcagatcatgagaagtatccaagactcagtaagctcttgtctgatctaatggatgggagccgtatcttgatattcttccaaacaaaaaaggattgcgataagatcacccggcagcttagaatggatgggtggccagcattatctatacatggtgataaagctcaagctgaacgggactatgttcttgcagagtttaagagcggcaagagccccataatggctgccacagatgtggcagcacgtggtcttgatgtgaaggacataaagtgtgtgataaattatgattttccaacaactcttgaagattatattcacaggataggtcgaactggccgtgctggtgctagcggaactgcatttacttttttcacacacgca

SEQ ID NO: 259929 - DNA, 1097 bp, Zea mays
cggacgcgtggcgtgacgcgtgggcctccgtcgccatctcgctcccgtgacccacccaccccgtcgcgtctcggcctggcttcctcctcctcgaggaccgccgtgcaggagcggagctccccgccgcttctctctccgccttccgagaggcccgacccctgataccacgctgagggcggtggtattaggagattagcgatggcgaggtggcggccggcggcgctgctggtagtggctctggcggcggttctatcggcggcgtggcgggcggatgcgctatcggttacggtgaccgacaccgagtgcatccacgagttcgtgccctatgagggcgacaccgtgtccgggaacttcgtcgtcgtcgaccacgacatcttctggagctccgaccacccaggaatcgacctcacggtaacgtcaccaggtggcaacactgtgtacacattgaagggaaaatctggtgagaaatttgagtttaaagctccaagaggtggcatgtataagttctgcttccataacccatatggagcacctgaaactgtttctttctacatccatgttgggcacatacccaatgagcacaatctggcgaaagatgagcacttggaccctatcaacgttaaaatcgcggagctgaaggaagcattagaatccgtcaccgccgagcagaagtacctaaaagcacgcgaagctcgtcaccgacacaccaatgagagcaccagaaagcgtgtcatgttctatacgatggcggagtacctggctttcatggctgctagcgcgttgcaggtcctctacatccgccgcttgttcagtaaaaatgtgggatacaacagagtgtaggatagaaatctacttcaaaggcgacggtggaagcaccttatatggtcggaacgggaaacattctctgccagtttgacaaattgtagttctgcaccctctttttttttgttagtttataagaaacactttaatttatcatcatgtacttttagcaacacttgtggtatgttaagtgcatttggtgctgaacattgttccataactgatcttcagaggattgttatcaaagttagtattgttctgctaccggtttagat

SEQ ID NO: 259930 - DNA, 398 bp, Zea mays
gtccttcatcattgcaaaaacacgcataacttacattgtcatcttcgctcccgtgacctacatcgtcgtgtctcggcttggcttggcttcctcctccccgacgaccaccccgcgcttctcctctccccccgtcccaccttccgagaggctcgagccctgatcccacgctgagggcggcggtgttaggagtttagcgatggcgaggtggcggccggcggcgctgctggtagtggcgctgacagcggttctgtcggcggcgcggcgggcggatgcgctctcagtgacggtgaccgacaccgagtgtatccacgagttcgttccgtacgagggtgacaccgtgtccgggaacttcgttcgtgtcgaccacgacatcttctggagctccgatcacccaggca

SEQ ID NO: 259931 - DNA, 435 bp, Zea mays
tcgcccactcgtctcggcctcgaggagggagacgaggccggcgacgttggagtggacgtacgccgccgggttctccatggcgtagcgcacgccggcctgcgccgcgaggtggagcacgtgggtgaagggcacgacgtcgaagagcttggccaggaggcggccgtcgttgatgtcgccctccacgacgaaactcgtcgtggctgcccagcagcgcgcgctgcgccttcttgagcgaggggtcgtagtaggagttgaagctgtcgatgccgacgacgccgactcccggatctggcgctcccagtgcaacccgccccaggacgcccggatctgtcgcgcccggtgctggtcatgtcccactccagcaaccgcctctaccagtcgcccgcgcaccccgtgctcgtcatgtcccgctccagcaaccggctggaccagtcc

SEQ ID NO: 259932 - DNA, 496 bp, Zea mays
gtcatggcgacgaggaacagcgcccacaggaacatggtgctggtggacgcgaagcagcggtggagctgccggttcatggcgcccgcccgctcgatcttcaccttgcctggggtggaggggaagaggtcctcctccaacacccgcatcttcaacgccgccgtcttgccgttgccgtgcgaaggacgcagagcgcctgtccctcctcgacgcaacgctagcaccgcaaaaaggtctcgccggcgcggcgcaggggcggagacgcaagggatcaacccgcgccgcgctggacggactccggctctcctcctcctcctaacgtttcactggccggttgattgattattccttgctctccctggacgggaagatggatcgaccgccggaatgcttagataagtttccttgggaggcgggggagcgcgatgcgcgctccgggtccaggaaatttcctccgggaaccgggaggagaggaagcaaggcaggagctggatgcgcg

SEQ ID NO: 259933 - DNA, 399 bp, Zea mays
cgtagcgcacgccggcctgcgcggcgaggtggagcacgtgggtgaagggcacgacatcgaagagcttggccaggaggcggccgtcgttgatgtcgccctccacgacgaaactccccgtggctgcccagcagcgcccgccgcgccttcttcagcgacgggtcgtagtaggcgttgaagtctgtcgtcgccgaccacgccgtcgccgcgcctgcggagcgccagcgagcagtgcgcgcccccgaagcccgcggtgcccgtgacgagcacggacagccccgcgggcgccccaggcgccgaccgccgccgcggcgacgccgacgcccggatctggcgcttccagtgcaacccgtcccaggacgcccggatctgtcgcgcccggtgctggtcatgttccacttc

SEQ ID NO: 259934 - DNA, 613 bp, Zea mays
  unsure (1)..(613): unsure at all n locations
gtcgttaatgtcgccctcgacgacgaacacnccgtgggaggcgagcagcgccctgcgcgcattcttcagcgacgggtcgtagtaggcgttgaagttgtcgacgccgaccacgccgtcgccgcgcttgcggagggcgaggcagcagtgggtgcccacgaagcccgcggcgcccgtgacgagcaccgacatcccggccccggcggctgacccggggggccgcctcggcacggcggacgcgcggatctgcctctcccagtgcaggccgccccaggaggcggcgaagtacttggaggaggtgtcgacgaaggactggaagctgaggtaggacgccgtcatggcgacgaggaacagcgcccacaggaacatggtgctggtggacgcgaagcagcggtggagctgccggttcatggcgcccgcccgctcgatcttcaccttgcccggggtggaggggaagaggtcctcctccagcacccgcatcttcaacgccgccgtcttgccgtgcgacagacgcagcgcaacccgatgaacgcctctccctccttctcctcgtcgcggcttctgcttcctcgacgcaacgcaagaaccacaaaagacggcgcggacgcgtgggaga

SEQ ID NO: 259935 - DNA, 893 bp, Zea mays
acactctagaagagcatgacgtcgatgcaccctacctagcctggatccctttaaagccgcccaaacccaaaggcaaagcagaagttgcggttggcctcgtcctcctcttctccgtcgcggctcagatctctgcgtgcggcgatggcgtcgttctcggaggctccccccgggaacccgaaagccggcgagaagatctttaagaccaagtgcgcgcagtgccacacggtcgacaagggcgccggccacaagcaaggtccaaacttgaacggtctttttgggagacagtcgggtaccactgcaggctactcctactctgcgggaaacaaaaacaaggctgtagtctgggaagaagacactttgtatgagtacctgcttaaccctaaaaagtacattcctggaaccaagatggtcttccctgggctgaagaagccgcaggagcgtgctgatctcatcgcgtacctgaaggaagcaactgcatagttcattgacatgccttttgccatgaagagaaaaattgttttgcagtttaataaaaaacattttagacaatttgggtcaccctgtttgaacagggtgcaaccacgtctcattattttcgttcttatggtgtccgtatggaatgcctaggtgtttagctgtgcacaaataacagttaaactttgacggctcctatttcaactgctggagaaatgccagtgccctatttttgaccaccagggtgtggaatggaaatcggtaatgcgtccattttgaagggcctgagatgtttaaaagacagaacactaatgaagatcaacaatatctcaaactaaagacttatatccaattaactactctagctccatggtcctagtgagcgtaggtaaaaaagtgcatttactgcataaaggaca

SEQ ID NO: 259936 - DNA, 509 bp, Zea mays
agggcacaagcagaagttgcggttgtacttttcttcctccgccgtcggctcagatctctgcgtgcgggctagcgatggcgtcgttctcggaggctcccccagggaacccgaaggcgggcgagaagatcttcaagaccaagtgcgcgcagtgccacacagtcgagaagggcgccggccacaagcaaggtccaaacttgaatggtctttttgggaggcagtcgggtaccaccacaggctactcctattccgcgggaaacaaaaacaaggctgtgatctgggaggagaacactctgtatgactacctgcttaaccctaagaagtacattcctggaaccaagatggtcttccctgggctgaagaagccgcaggaacgtgctgatctcattgcgtacctgaaggaagcaactgcgtagtataatgacaccgccttgccttccgcaggaacgtgctgatctcattgcgtacctgaaggaagcaactgcgtagtataatgacacgcctttgccatg

SEQ ID NO: 259937 - DNA, 458 bp, Zea mays
gcgtttctcctacgcggtccgtgggctgtgcctgcctgcctgctgttgccccgtctcctcgtttaaacgggcgaactcaagattgcaacagggtcgtccgccgccaccaattgctagcgcaatcctagccctagcccagcgccccctccggccctccctgcttcgtgcttggtagcgatggcgtcgttttctgaagcgcccccggggaacccaactgctggcgagaagatcttcaagaccaagtgcgcgcagtgccacaccgtcgacaagggcgccggccacaagcaaggtcctaatttgaatggtctgtttgggaggcagtctggtacaacacctggctactcttactcttcggctaacaagaacatggctgtgatttgggaggagaacactttgtatgactacttgcttaatcccaagaagtacattcctggaaccaagatggtattccctggact

SEQ ID NO: 259938 - DNA, 727 bp, Zea mays
  unsure (1)..(727): unsure at all n locations
acgtttacgtttgcgcacggagtcaccacgaacctatcgactttttatctccagatccagattagctaccacggcaccgccagcccggacggctataaagacgaggcccatctcgaaatcgacggcgatgaagaagaccagttcccctctcctgatcgtcctgttcctcacagcagcagccatggcggccgagccggagaagcaggcggcccccgcggcacaggagacggccgtgcacatcgtgtacgttgaccgccccgaggacgccgaccctgaggagttccacatccgcaccctcacccccgtcctcggcagcgaacagaaggccagggacgcagtgctctaccactacaagaacgccgccagcggcttctccgcgaagctcaccccccagcaggtcaaggatctcaaggagcaaccaggtgttctccaggttgtgccgagccagacttaccagctacatggtcctgggtctggcactcaccagggcacgacacacaccttgggccttatgtgaaggcgtatgagaatcaagaagactgtgtttagtatggctgtatggcacaggtctgacgaatgtgtatagtacagtactatgtaagaataagggacgtatcgtctatatactgctttgcgcatgttcagccctgttctaaagcttgtaatgcaccaatgcgtatgttttcaatacaatgacaagtatgctaaagaaaaaggtcaacannaa

SEQ ID NO: 259939 - DNA, 2067 bp, Zea mays
ttgatctttctcaagtgatgaagagtggtccatacttagcacaccacgaaaaacaagattacaagaccatggaaaatcatcagttactgaatcacttcgttctgcaaaacggtgtttcagaagagcaccagctagggagcagaataatgaacgtattcagagtgagcagcttcatggttctgcaagtgagcagcaaactgaattttttcgctccaatgtcagcagcggcaaggtctcaaaatatcattttggccctatagttagtcagaagcttaaggaacattttgaaaaagatccatatccttgccgtgcaacaaaagagagtctggcacaagagctaggactgacatttaatcagatcagtaagtggttctctggcactcgtcattattcaagagatgctgctgccaagaatcagaaacgcccgggagaaaatactactgtgaataataatagcacaacctttgatgacatacaagtaatagaacccaatgttgggttgatagataaaccagctgcagatgtaaatgacatgatttctgaaaagttgatggtccaaataaatcttaacgaaggcattgaagaggatatcccaccgagccaatatgccaggtgtgaagagaaaataactatgactccagctgccatctcaagggaagctggtcttccaggttatggtcctggagaaaactttcttcaggtcagttcaaggattactagctgtgagcagagtgtgataatggctcctagcgctatcgcaagaggagttggtccaccaggatatacgcctggagaacaccagggcaatggggctccatggaatacaagctatgagcgaagaccgtttacgagtcctgcgactagctcaagagaagtcggacctccaggatatgggcctgaagaaaaccaaggcagtggcatttcctgtaatacaagcagagagcaaatattgtttatgagccctacaaccatctcgagagaacttggtccaccaggatatttgcccagagaaaaccagcgcagtgacacttcatggaatacaagctgtgagtcgggactatttatgagtcctgcgaccacctcaatagaacatggtccaccaggatatgggcctggagaaaaccaggagaatgacagtacaagctgcgagttgagaatgtttacaagtcctacaatcgtctccagagaagttggcccaccaggataccagcagggagtgtttatgagtcctaaaaccatctcaagagaagtctgtcctccaggatttggcgtctggagcagaaccagggcaacgacactacatggtacaaacagagcgcgtttacaagtcctacgaccatcccgagagtaggtccgccagggtatggacaggaaaaccagggcagtcgtgtttcttggaatacgagttatgagcagggagtgtttatgagttctacaaacatctcaagagaagccggtccgccaggttatgggcctggggaaagtcagggcaatatcacttcatggatttcgacaggcgggcagagaatgtttacaggtccttcaactatcccgaacgaagtcgggcagcaaggatatggcccttcaggaatcccgggaacggatggctcaaggagtatggacttgaaagcctttccaccaggatatggacctgctggagaaaaccagggcggtggtgcttcagggagcgtcataagcccccaagctcggtctgcagagaacgtagagttttcagacgacgctagaaaaaaggctatacagcgggagctgagacggcggcagaagttcaggtgatggccgtgatgcgaatttctgatcctgctcatcgaattttgactacggattactactttttaagactacatatccagtcttgatggctgaatgagtgacgaccctagttgtcgagacgcaaaaccttttgttgtatgtgttccttttacagacttccttggcttgtcatgaatttctaatgtgaacttgtgctgtgaacttgttgcaaaacctcttgaacctgaagcattcaacatgctgtgaacttgtgcagctgctcttcttctgcatgag

SEQ ID NO: 259940 - DNA, 684 bp, Zea mays
gttaacttggtccaccaggatatgggcctagagaagaccagtgcagtggcacttcatggaatgcaagctgcgagttgggagtatttatgagtcctgtgaccacctcaagagaggacagtccgccaggatatgggcctcgagaaaaccaggagaatgacaatatgagatgcgagttgagaatgtttacaagtcctacaaccatctccagagaagttgccccgccaggatatgagcttactggaaaaaacaagggcaacggcgcttcatgtactacgaattaccagcagggagcgtttacgagtcctgaagccttcccaagagaagcctgtcctccaggatttgtgtctggagagaaccagggtaacgacactccatggtatatgagcagcaaacagatggcgtttacgagtcctacgaccaaccctagagtaggtccgccagggtatggacaggaaaaccagggcagtcgtgtttcttggaatacgagttatgagcagggagtgtttatgagttctacaaacatctcaagagaagccggtccgccaggttatgggcctggggaaagtcagggcaatatcacttcatggatttcgacaggcgggcagagaatgtttacagggtccttcaactatcccgaacgaagtcgggcagcaaggatatgggcccttcaggaatcccgggaac

SEQ ID NO: 259941 - DNA, 818 bp, Zea mays
atcgttgacgcgtgggcagactcgtggacaggggggtgattttactgcaatagggggggtcaaccgtgcttcatgcactacgaattaccagcaggctgcgtttacgagtcctgaagccttcccaagagaagtctggcctccaggatttgtgtctggagagaaccagggtaaccacactccatggtctatgagcagcacacagatggcgtttacgaggcctaccaccaacccctagagtaagttcgccagggtatggacaggaaaaccagggcagcccgggctcttggaacacctgttgtgagcagggagtgtttacgagtcctactagaggcatctcaagagaagtcggtccgccaggatacgggcccggggaaagtcagggcaataccacttcgtggatttcgacctgccagcagagaatgcttgcaggaatccagagaactggtggctcaaggagtatggacttggaagcctttccaccgggatacggacctggtggtgcttcagggagtgtcataagcccccaagctcggtctgcagagaatgtagaattttcggacgaggctagaaaaaaggctatacagcgggagctgagacggcggcagaagttcaggtgaaggcaatatatccagtcttcaagacaagacaatatatccagtcttgatggctgaatgagtgggcgaccttagttgccatcaagcaaaacccttgttgtatcagctgcttatcttccttttacagacttgcttggtttgtcaaggatttcttatgtgaaccctcttgaacctgaagtattcaatgcgctgtgaatttgtgcc

SEQ ID NO: 259942 - DNA, 541 bp, Zea mays
gccttcccaagagaagcctgtcctccaggattcgtaaaccctccctgctggtaattcgtaggatatgagcttactggaaaaaacaagggcaacggcgcttcatgtactacgaattaccagcagggagcgtttacgagtcctgaagcacttcccatgagaagcctgtcctccaggatttgtgtctggagagaaccagggtaacgacactccatggtatatgagcagcaaacagtgggcgttgacgagtcctacgacctaccctcgagtaggcccgcctggtactgtaccggaagaccggggctgtcaggttaattgtgatccgagtgaccagctgtttaggcctgtgagttctacaaacatctgaagagatgccggtgcgctaggttatgggactggggagagttatggcgatattactttatggatttcgacaggcgggcagagaatgtttacaggtccttcaactatcccgaacgaagtcgggctgcaaggatatggcccttcaggaatcccgggaacggatggctaagggagtatggac

SEQ ID NO: 259943 - DNA, 1095 bp, Zea mays
gtcagaaaacccacaacgtgatttaacactctggtatagattggaagactcgatctttagactcagaaccattgcaaactcattaactttagacaaaaaaacatcagtaccgctgtttttaagataaatgtatattgaaaaaaactggcaccactcaacaataaactcagaccaagatgtttataatagactcagctccgaacaacatttctgtaatagactagaagggataaactggcatcccagcacaaacttgacgagctgagccgctgccgttgcccaaactcagaaactgaactctagatcttgttgaaagccacaatgtcgcaactctggacgtactcattgatgggctcttgcgtaaggtggtcctcaattagagtgtcgatggacacaagatcgtcgacaattgtcaacatgatagtcatcttcttgatgccgtatccaacaggcacaagctttgatgctccccaagtcagaccctccatctggacactgcggacagcctcctccagcttcttcatatcagtctcatcgtcccatggtttgacatccataaggacggaggatttaccactttctttctttttagaagaggccttggcagcggcggcacgctcatcagctgccttcttgtcctcctcagtttcatcaccaaaaagatcaaggtcatcatcgtcctcagcctcatccgcaggagcagctgccgcaggagctgatcccgcaggcagatttacaccaacagccttaccagggaatcttgaggctacagccgcagagacggtctcgtaccagcgggcggcattaggaaactcagcgccaggcttcgacggcaccgcggcgaagaccttaatgtcatccttagtaatggagtcaccagacacataggttttgccggcgaggtgagcctcgagggacttgaggccgtcggcggtgtggaggtcggagaagacggccatcgtatcgatcggcgaggagcaggcgtcttctcgagggatgtgagatgagcagcggcggcggctaaaatcaaaaaccctagacgcgcggacgcgtgggtgcacgcgtgggcggacgcgtgggcggacgcgtgaacga

SEQ ID NO: 259944 - DNA, 1070 bp, Zea mays
ttcacgcgtccgcccacgcgtccgcccacgcctgtcctcgcgtctcccttcccagatccatcgactcgctcgggccgcccctcccgtcgtccccgttcgaaggtgcggcagccggcaggcgagcgatttgattcgacatgaatcccgagtacgactaccttttcaaacttctgcttattggtgattctggtgttgggaaatcatgcttgcttctcagatttgcagacgattcttatttggacagctatatcagcacaattggggttgatttcaaaattcgcacagtggagcaagatgggaagaccataaaacttcaaatttgggatactgctgggcaagagcgcttcaggacaatcactagcagctactaccgcggagctcatggaatcattattgtatatgacgtgacagaccaagaaagcttcaataatgtgaagcaatggttgaacgagatagaccgttatgcaagtgacaatgttaacaagctccttgttgggaacaagagcgacctaactgccaacaaagttgtggcaactgagacagcaaaggcgtttgctgatgagatgggcatcccattcatggagacgagtgccaaaaacgccatcaatgtggagcaggccttcatggctatggctgcatccatcaaggacaggatggccagccaaccagctgcggctaacgcaaggccagcgaccgtgcagatccgcggtcaacccgtcaaccagaagacgtcttgctgctcatcctaaggttgcctgattttttttggtaccttggggaaactcaaacacacaaccactaccttttgtgggcgctcgcaaatgtatttgcattattcctgatagcatctattcgttggccagatgattagagagctgaaaatatgttaagaacaataccatagagagaagttcctcagtgctctcgcagcttaaggagcaaacagcaacactttacttcgttttttatactttattatagccgcactgtttattactcgggctacatttgtgaacagcgactgtaatatttttttactctatattcgtagtgagatgcaatcctgtgtg

SEQ ID NO: 259945 - DNA, 423 bp, Zea mays
agcgctgcgctcgcgtctctcgtccccctcagatccaccgactcgctctgagtctctgaccgccccttccgtcgtccccgttcgaaggcgcggcaagcgagcgattcagccagattcgattcgacatgaatcccgagtacgactaccttttcaaacttctgcttattggtgattctggtgttgggaaatcatgcttgcttctcagatttgcggatgattcatatttggacagctacatcagcacaattggggttgattttaaaattcggacagtagagcaagatgggaagaccataaaacttcaaatttgggatactgctgggcaagagcgcttcaggaccatcactagcagctactaccgtggagctcatggaatcattgtaagttggccacctgaactagcaacttttgaaacttgtcaac

SEQ ID NO: 259946 - DNA, 1050 bp, Zea mays
aacctccgacgttttgcatctccaagcagcatcgtctcctccccagatccatcaattcgttcggaccgcccttctcgtgtccccgttccaaagcgcggcaggctgagcggttccgtcagatttgagtcgtcatgaatcccgagtatgattaccttttcaaacttctgcttatcggtgattctggtgttggaaaatcatgcttgcttctcagatttgcagatgattcatatctggacagctacatcagcacaattggagttgactttaaaattaggacagtagagcaagacgggaagaccataaagcttcaaatttgggatactgctggacaagagcgcttcaggacaatcactagcagctactaccgtggagctcacggaatcattattgtatatgacgtgacagaccaagaaagcttcaataatgtgaagcaatggttaaacgagattgaccgttatgcaagtgacaatgttaacaagctccttgttgggaacaagagcgaccttactgccaacaaagttgtggcaactgagacagcaaaggcgtttgctgatgagatgggcatcccattcatggagacgagtgccaaaaacgccatcaacgtggagcaggccttcatggctatggctgcatccatcaaggataggatggccagccaaccagccgcggccaacgctaggccagcgaccgtgcagatccgcgggcaacccgtcaaccagaagacgtcttgctgctcgtcctaagattgcctcatttccttggttccttgtgactatttctacggtttgtgcgcgcacgcaaatgtatttgcattattcctgatagcatctattcgttggccagatgattagagagctgaaaatatgttaagaacaataccatagagagaagttcctcagtgctctcgcagcttaaggagcaaacagcaacactttacttcgttttttatactttattatagccgcactgtttattactcgggctacatttgtgaacagcgactgtaatatttttttactctatattcgtagtgagatgaaatcctgtgtg

SEQ ID NO: 259947 - DNA, 719 bp, Zea mays
taatttaagaaattcaaccaagtgagagtaaatggcgagagtatctattactcttttaaggtagcctaatgctttgttattttagacaaaaagacatcagtaccgctgtttttaagataaatgtatattgaaaaaaactggcaccactcaacaataaactcagaccaagatgtttataatagactcagctccgaacaacatttctgtaatagactagaagggataaactggcatcccagcacaaacttgacgagatgagccgctgccgttgcccaatctcagaaactgaactctagatcttgttgaaagccacaatgtcgcaactctggacgtactcattgatgggctcttgcgtaaggtggtcctccattagagtgtcgatggacacaagatcgtcgacaatcggcaacatgatagtcatcttcttgatgccgtatccaacaggcacaagctttgatgctccccaagtcagaccttccatctggacactgcggacagcgtcctccagtttcttcatatcagtctgattgtcagatggtttgacatcaataaggaagcaggttgtaccactttctttctttttagaaaagcccttgacaacggcggcacgctcatcagctgcgttctcgtcgtcctcagtttcatcgccagtaaggtcaaggtcatcccaagcgtccgcccacgcgtccgcggacccatcggtcaatccgggaccggta

SEQ ID NO: 259948 - DNA, 536 bp, Zea mays
cggacgcgtgggcggacgcgtgggcagcgactaccttttcaaacttctgcttattggtgattctggtgttgagaaatcatgctagcttctcagatttgcagacgattcttatttggacagctatatcagcacaattggggttgatttcaaaattcgcacagtggagcaagatgggaagaccataaaacttcaaattgtaagattactatgctgtattgttcttttattcatcatatgtgcatggtttgatgtcttgtgatgcatatgtgacatatgttttcctaggtgaactggaaagtaaaaggtaaaatttatccttttcattacagtcagtagagaaactggagcattaatatctgttgactgatcatctacgaaataagtttgaacgtaatgtaacataagttcccactagttagctgatgaactatggaaatgatatttctactcttcatttttttatctaaattttgtttaacctgttacattatctagaagcgcaatttgcatgaagtggtagaattatagctgcatca

SEQ ID NO: 259949 - DNA, 498 bp, Zea mays
ttcatggctatggctgcatccatcaaggacaggatggccagccaaccagcgcggcgcaacgcaaggccaacgacggtgcagatccgcgggcaacccgtcaaccaaaagacgtcctgctgctcgtcttaagcttgcctgatttctctggttccttgtgactattactaccgtttgtgcgagcacgcaaatgtatgtgttgcattattgctgatagcatctgttcgttggccagatgagtagagagctgaaaaaatgttaagaacaccatagagagaagtccatccgttctctctcaacttaaggagcaaacagcaacacttaattttttttctgctttactgtttattagtcgcgttacatttgtgaacagttattgtaatatctttttttttaactctgtattcgtagtgagatgaaattcgtgtgtgggcaacaaaaaatacaaagataacgaacgaatgcatgcaacgacataacaataatatagagaaaactaaa

SEQ ID NO: 259950 - DNA, 510 bp, Zea mays
cacgcgtcctcccagaatcataaactcgctcattccgcctttaccctcgccctcgttcgaaagggccggggacggctttctagcgatttgggtcaacatgaatccccagtactactaccttttcaaacttctgcttattggcgattctggtgttgggaaatcatgcttgcttctcagatttgcccaccattcttatttggacagctacatcagcacacttggggttgatttcaaaattcgcacagttgagcaagatgggaagaccataaaacttctcatttgggatactgctgggcaagagcgccttcaggaccatcacttgcagctactaccgtggagctcatggaatcattattgcatatgacgtgacagaccaagaaagcttcaataatgtgaagcaatggttaaatgaaattgatcgttatgcaagtgacaatgttaacaagctccttgttgcgcacaagatacggtctcttgattaaaacaccatccatgcatttgctgatgaga

SEQ ID NO: 259951 - DNA, 874 bp, Zea mays
gaaaataatacacgagaaaaagaagacatggaaaatatgtagttctacacgcatattgttgatgcaccatcggcaatcctcgcggcggcgcggactacgacggtggctgactcgtagcgagaccttctccctcctcccccgcctgacgcccggcgaccactactcactcgctgctctggaagtctggcaggggtttcgcccggttcgacaacatcagggacgacagcggcgccatgccgctacacctcgccgccatgcaaggccgccccgcctacatgcaggtgctactagagaacgacgccattgtctccgttctcacaggctcatacagctgctgcaggtttaaaatctctcctgcgacagcaactgggcactaaactcaagcaatccctccagagcctcagctctctgctggttagtgccttactggtgtctaccactggctagggaccggtaatatctatgctgtctgacaagtcatctggccactcccttaaggaccaattaactcgcatggctgagaatgactatctacttagcggtggccttgaaggtattggttctactggaaagaagtgtgaagtcgctcgccgaagaaatggtttagataccaacaagccaaaaaaaggtggtgggccaacaggaagagagctgaatatcggacaagcatgtttccattcagaaccgagcaacgcttcaaaccagttcatcctagcccaattgatgcaggtgaattcattcttaagcaggacaacaactattactatacatcccttgtttagtctgcacagcttggacaagggccagctctacaggatggtgagattggattggacaagcttcttgataatagttctgtagaatcaatgaatga

SEQ ID NO: 259952 - DNA, 647 bp, Zea mays
cttatacagccgctgggcactaaacacaaggaattaatgcagagcctcaattctaggttggttagtgcctcactgtagaataccactggctagggaccgaccatatatatgctgcctgacaaggcatctggccactctgttaaggaccaattacctcgtatggttgagaatgactatctacttagcggtggccttgaagggattggttctactggaaagaagtgtgaagacgctcgccacagaaatggataagataccaacacgctaaaaaacggtgcaacctgatacatcaggtggtgcgccaacaggaagagagctgaatatcgcacaagcatgtcttcattcagaaccgaacaacgcttccaaccagctcatcccagcccaattgatgcaggtgaatgcattcttaagcaggacggcaactattactatacctcccttgtttagtctggaaagctggtacgtcagccaggggcggaggggcggcgggtggtccatatgggccacggcacaccctaaaatcacataagagtagttagtatagtggtgtaagtgctatattttgaacttggtagtcaaggttcgagtcctgttgatccctggtttttttttttctggcacactctaagcatagctgctaggtccgc

SEQ ID NO: 259953 - DNA, 734 bp, Zea mays
  unsure (1)..(734): unsure at all n locations
tcagcaacggctaccactacatggagggcgagacgatgagggtgcagttcgagcgctggatcgtcgccgccaaggccgacctcgtcgtcgccggccacgtccacgcgtacgagcgcagcaccgcgtgtccaacgtcgcctacgatatcatcaacgcccggtgcacgcccgtccggacaagggacgcgcccgtctacgtcacggtaggcgatggcggcaacatcgagggcatcgcggacaacttcacgcagccgcagccgagctactcggccttcagggaggccagcttcggccacgccaccttggagatcaggaaccggacacacgcatactacgcctggcaccgcaaccaggacggcgccaaggtcgtcgccgacggcgtctggctcactaacaggtactggatgcccaccgacgacgacatcaactgatgagtgatgatcacatcatgcatatgccatcgccaccactcatcaccggatccgggagttcggccgtatagattagatctcgcttcgttctcggttcagttcgtccatgtgtcctctcatgataattgtgtcagcaaactttcaatttatttggcttgtgctaaagcacaatatatcatatgtttagtactgcataagttagattttttctgtgatctagtaaaacttttaaagactcgtctgaaataaacgtataagaaaaaccacggccatgggggtcgaagtgtccanannaaaaannnaa

SEQ ID NO: 259954 - DNA, 2076 bp, Zea mays
gcaaaagctactgctgaagatttcaacttatttcaattcaatgatggtcaatatgagtcagctgcccaacttcatgctagggctcaacagatatgtgccgttctttatcccggtgatgctacagaagaaggaaagcttctaaggctgaagcagcagtttttcctttgcagcgcatcacttcaggatatgattgccagatttaaagaaaggaaatctgatagagtttcagggaagtggagtgagttccctactaaagttgctgttcaactgaatgacactcaccctactcttgccatccctgagctaatgaggttacttatggatgaggagggacttggttgggatgaagcttgggacattacatataggacaatttcctacaccaatcatacagttctccccgaagctcttgaaaaatggtcacaaatcgtgatgaggaaattacttccccggcacatggaaattattgaggaaattgacaagcggttcaaagaattggtaatctccaaacataaggaaatggagggaaaaatcgattcaatgaaagttttagataattcgaatccccagaagccggtagtgcgcatggcaaatttgtgtgtggtgtcttctcatacggtgaatggagtggctgagttgcatagcaacattttgaagcaagaactatttgcagattatgtctctatatggcctaccaaattccaaaataaaactaatggaatcacgcctcgaagatggctccggttttgtaaccctgagttgagtgaaatagtcacaaaatggctaaagtcagatcagtggacaagtaatcttgatctgctcactggacttcgcaaatttgcagatgatgaaaagcttcatgctgagtgggcagcagccaagttatcttgcaagaagcgcctggccaaacatgtgttggatgtgacaggtgttacgattgatccaactagccttttcgatatacagattaagcgcatacatgagtacaagagacagctcctaaacatattgggagctgtttacagatacaaaaaattaaagggaatgagtgcagaagagaagcagaaggtcacaccgcgcactgtcatgataggagggaaagcgtttgcaacatacactaatgccaaaagaatagtgaaattggtgaatgatgttggtgctgttgtgaacaatgatcccgaagttaacaaatatctgaaggttgtctttatcccaaattacaatgtatcagtggctgaagtgcttattcctggtagcgaattgtcacagcatattagtactgctggtatggaagcaagtggaacaagcaacatgaaattctctctgaatggttgtgttatcattggcacccttgatggagctaatgttgaaataagagaggaggttggagaagataatttcttccttttcggtgccaaagccgatgaagttgctgggctgaggaaggacagagaaaatggcctgttcaaaccagacccacgttttgaagaagccaagcagtttataaggagtggcgcttttggcatctatgactatgaacctctcttggattcccttgaagggaattctggatttgggcgtggtgattatttccttgttggctatgacttcccaagctacatcgatgcacaggaccgggtggatgcagcctacaaggataagaagaagtggaccaagatgtccatcttgaacacagctgggagtggcaaattcagtagcgatcggaccatcgcccagtatgccaaggagatatgggacatcaaggctagccctgtcgtgtgaacgagggggttgcgattcaacaccaaacgtagtttcttggggtgctataatagtaaggaagaataatgacccacggtgcttgacgcccacttgcgttgtaggcatggaacgggggcacctagcttgttctacagcgctgtctattttgaattggtgcgactttgttgctcttttttcctcccccttatatcttatgaaacaagatccttttgatctgtgctctgaaataaaataattcagttatgatattcgtcaccataatattatataattaataataataaatataaaaat

SEQ ID NO: 259955 - DNA, 1287 bp, Zea mays
gcaaatgaaggtttcctcagaggtcaaaggcacctgctgaagatgataaagagaaggaagccaccatcagctgtggcaccattgcgacagcaacgtgcccctgcttcttgcctggaggttggtgagtttggatttgaggaggagattgataggctgaagcgtgacaagaacattttaatcacagaagtagtaaaactaaggcaggagcagcaaagtactaaagatcatgtgagagccatggaggaaaggctacgagtggctgaacagaagcaggtacagatgatggggttcttggcaagagcaatgcggaacccagagttcttccagcagttggcccagcagcaagacaagaggaaggagctcgaggataccatctcaaagaaaagaaggcggcccattgacaacacaccattctacagtgatggggaaagcgaacagcttgattcacagttgaaaatgttcgagtcaggtgttctcaatgggctcaatgaacctgagctggagaatttagcagtgaacattcaggagcttgggaagggaagcatagatgatgggaacttgactcaagttagtgaccagtcagagctgaacgacgacttctgggcagagcttttggtcgaagattttggagacaaggcaggacagccagagttggagggaagaactgaagacgtgaatgaccttgctcaacaactggggtatctgagttcttctagcccaaaatagagccagttcctaatggttgccccccacaatcactggtgctttccctacacgactgttgcagaccatcctgatcaaaccgttgacaggtggtgcagaggtgttcacactgaaggcgtgctgtggagaggtcactgccttgacgttgaaggcttagcgctgtactctgctgtgggacttacgtgtggggtgttggctaaatgtctcttccggcgtcttctggcaaaatgatctcgtggacggtgactggcaaaaatgcctaggggccaacgtatacgtacacagctgttatcagatcttgttcaaagtcattgcgcggttttgacggtgctatgtatcgatcagggttctggccttctggggttgggttgtagaattgactggctgatctagtgttctccatgtatgactggtgtaaccttaaaacaccctcagcttgttgttgaactgtgacaagcatctcgtttttttgttgtactccattttcatcatcattgtacatcaaattgctgaattatgaacagatccctaataatttggtggactgcgtcttggcatttggct

SEQ ID NO: 259956 - DNA, 635 bp, Zea mays
caggtcagggatgaaatagaacatcttctacttgataatgaagacatggaacatctgtgtctagacaaggaagcaagtacaaaaccaacaggttgaggctttaatgtcatctgctgcttccaacagcattgttcttgccggaacaggtgtgcccaggctgaactctagcttccggcgtagcttgagcgttgctacgagcatgcatttggataatgatgtggaagacctagagatgttacttgaggcctacttcatgcagctggatggaattcgcaacagaatcttgtcggttcgggagtatattgatgacacagaagactacgtcaacattcaactcgacaaccagcgtaacgaactcattcaactccagcttacacttacgattgcatcctttggcatagctgccaacactttcattgctggagcttttgcaatgaacatcccgagctctctgtacaacaccgataacaccctcttctggccatttgtcgggggcacctcatccggctgctttgtgatcaccatcctcttgtttgggtatgcctggtggaagaagttgctgggtccttgaacacgaaacaagatggcagagggccttgtcatgtttgcagaaagggagcaggcgctcgaaggat

SEQ ID NO: 259957 - DNA, 2336 bp, Zea mays
tttactcgtgcgcccgttccccgcggcctgcgcgcgcgttctctccctcacctccgcccctctctccctctctctcgctccgggcgacggctgggcgaccgccgctttatccgtgcggcccttccttttgttctcccgtccccccacccccccttcccccggcgagctctctctctctcttcctctcgaggcgacgcctgggctaccgcgccgctactgcggcctcccgcgacaggtgcctagtctccatcaggtgccatgtcttcttcgggctcttcaccggcgacgtgcactgccagctctgcatgtatacacccaagtcctttactgggtccgccgccgcccctacgtacttcgttaggtttagtatgttgttaagtttgtaattctagggtctggagggaagcatagatctcaagaggggtgaaatttggtggtaatttcctgagaatttcaaggagacaagggcgtggaggttgtttctggagggatctgtgagcaaagcagcagaaatttgaggttggtggtagcctgtggatccaccatggtgggtaaggagctggtggtgcaaaggaatggccctgttgacatacgtgagattgctgcaaaggccacgcttcgggaggtgcggcagagcgggcacacctacgtcgaactacggcgtgtcgggaagcgtgtcatcttcttctgcaccatctgcctcaccgagtgcttcagcgacaatgtgctgtttgaccacctcaagggaaacctgcattcacggcggtatgctgaggccaaggttacgctgtttgggcccatgccatggccgtttaatgatggtgtgctcttcttcaacaactcacgcgagaaggatccgctcctgctggactcaagctcacagagcaccagagagcttgccctggttccagagcctgaggtttcagggaatgatactgaggtgacatcaaggctgagagatggttcaacctcctctaatggtgtgaaaggtgcaccctatggtgcaaaaggccgtgctaatggtagaactgctgctgtatctgaagatcacatactttcaaaccatggaactgatggtcctgttgctattcctggcgtattgctaaaggatgttgtttcagatttgcctgtgcatcgtttgggctatgggaatattgtcatacaggatctgtgaagctagcaagaactgcaggaagataagcaagatctggtgtgcttgggtaggacaaggctcccgatgggtttgagagttgtaacacttatgagcaatctggatttgccatagtcaacttctcttatacctatgattgatgcaggaagtggtcttatgaggaacaagacctgtctgtctctgctggatctttctttgtaattgatgatgctggacaccgtggaaagcgaatgagaaaatcattctctgatcaagaagcatcttcagaagagtcaaacggtcagaacagctctttacagggcagtaggcaagctattgtgacttgttcaccggtaggtacctcaaatgatcttcaagttggtctcttatcaagcaaggcagcaaggagagagttgaggaagcagaagcgaatagcagctgagaaagtgtgtgatctttgcggcagaccaatgctctctggaaaggatgttgccaccttgctgaactgcaatacaggaaaactagcttgcagcagtagaaattcaagtggggcttaccatctatttcacacttcctgccttttacactggactattctgtgccaatacgagatgctgaacgatgaaatagctaggaaggggaagagcaaccgaggaaggaaggcaaagaatgcacctaagagaagcaaaataacgtccatagtttgcccagaatgtcagggtactggaattcacgtcaacggagatgaacttgagaagccaagcatttctttatcagagatgtttcgcttcaagatgaaagcaatcgaagctcacaaagcatggctgaagagacctgaagtgcttgaaaactgttccactgggcttcatttcccctcagaacatgtggagaactctgaggagaaggtgatgccactcaagtcacttcccttctatgccgctgatgggtagaaagatagttgatggcagctactggaggatgctgcagttgttgatgtaaataagctcgcttgacagttgtggaacagtgttgttagatgctcacctacgtgcattatctcagttaacctgtgtccgccagatgataactaagacatttaaactggcaactggctgaactattgtttttagctggattcactaaacatgtacgcagcccatttcgttgggttgggtttgctgcttac

SEQ ID NO: 259958 - DNA, 447 bp, Zea mays
ttcattttcttgcaaattacttctatagcagccgtgcacctgaattggctggatattggcacttgcagatgtttcgcttcaagatgaaagcaattgaagctcacaaagcatggctgaagagacctgaagtgcttgaaaactgttccactgggcttcatttcccctcagaacatgtggagaactctgaggagaaggtgatgccactcaaatcacttcaattctatgcccctgatgggtcgagagatcgttgatggcagctactggaggatgctgcagctggtgatgtaaataagctcccttgacagttgtggaacagtgttggtagatgctcacctacgtgcattatctcagttaacttgcgtccgccagatgattacttagacatttaaactggcaactggcaactacacgtacgcagtccatttcgttgggttgggtttgctgctt

SEQ ID NO: 259959 - DNA, 411 bp, Zea mays
aagatgaaagcaattgaagctcccaaagcatggctgaagagacctgaagtgcttgataactgttccactgggcttcatttcccctcagaacatgtggagaactctgaggtggaatcagaggcacactgttcgcaatgttctgttaacacaggtataaatccactcacaccagtctccatttccctttgcaggagaaggtgatgccactcaaatcacttcaattctatgccgctgatgggtagagagatcgttgatggcagctactggaggatgctgcagttgttgatgtaaataagctcgcttgacagttgtggaacagtgttgtcagatgctcacctacgtgcattatctcagttaacctgtgtccgccagatgataactaagacatttaaactggcaactggcaactac

SEQ ID NO: 259960 - DNA, 1400 bp, Zea mays
  unsure (1)..(1400): unsure at all n locations
gcgacccacgcgnccgaaaaggcccaacaaccccccgacccgtcacctgacccagccgatcgagaatacccggaaggccggaacccacctgctgcgcacctgcaagcctcgagtggagctcttccacggccgcggtggagatggcggcgaatctggaggacgtgccgtcactggatctgatgcacgagctgctccgccgcatgaagtgcagctccaagcccgacaagcgcctcatcctcatcggtccacctggctctggaaagggaactcagtctcctattatcaaggatgaatattgcttgtgccatttagccactggtgacatgctgagggctgctgtggcggccaagacacctctaggtatcaaagctaaagaagctatgaataagggagagcttgtttcagatgatttggttgtgggcattattgatgaagctatgaagaaaccctcatgccagaaaggtttcattcttgatggctttcctagaactgtcactcaagcacagaagcttgatgagatgttggcaaagcaaggtgccaatgttgacaaagtcctgaactttgcaattgatgatgctgtattggaagaacggattactggtcgttggatccactcagccagtggtaggacttaccactcaaaatttgcacctccaaagtctccaggagttgatgatgtaactggagagccattgattcaaaggagagatgacaccgctgaggtcttgaagtcaaggcttgaagctttccacagacaaaccgaacctgtgattgattattactccaagaagggcttagtggtgaacctgcctgcagagaaaccaccgaaggaagtgactgctgaggtgcagaaagccctctcgtgatgaaatgtccactcttgaggttaaacatgacatctaccaaaacccctttgtttgggtttcttcaaaatttgcactaggccaacatcatgaggttttttattttcagtatccttattgtgcggatgcaccattttttgttatcacacctttcacaagctcggcaattgtctgaataatttctgtgtctaatgatggaactgtttttcagtaacaaactgatatgattacaacaattcatctttgggaaaatttccctgcaaaccttgttccagttcttacaagactgctatgttactggctatgataatcaggaagataccttgctctgtcgagccttgagcggagagattgatgtgctgcgagctcaagtaaatgtttcatgttgtatggctctgaactcgtgcgtgatgttattcgtacctgctataatttccagtgagttatgtagactccncncactttgccnncnngnncnnacangagaagtacctngcccaactgcttgcngagaggcagaagcttggaccggtcgtc

SEQ ID NO: 259961 - DNA, 410 bp, Zea mays
ccattttgtcgtcgtcgttccagctgcagtccagagttggaacccaagcgcacgcagcaccgtcgtcgaactcttcccttttcggcggcattggagatggcggcgaatctagaggacgtgccgtctctggatctgatgcacgaactgctccgtcggatgaagtgcagctccaagcccgacaagcacctcatcctcatcggcccacctggctctggaaagggtactcagtctccccttattaaggatgaatattgcctgtgccatttagccactggtgatatgttgagggctgctgtggcagccaagacaactctaggtatcaaagctaaagaagctatggataagggagagcttgtttcagataacttggttgtggggattattgatgaagctatgattaaaccgtaatg

SEQ ID NO: 259962 - DNA, 336 bp, Zea mays
tgcagtccacagttggaacccaagcgcacgcagcaccgtcgtcgaactcttcccttttcggcggcattggagatggcggcgaatctagaggacgtgccgtctctggatctgatgcacgaactgctccgtcggatgaagtgcagctccaagcccgacaagcacctcatcgtcatcggcccacctggctctggaaagggtacccagtctcccgttattaaggatgaatattgcctgtgccatttagccactggtgatatgttgagggctgctgtggcagccaagacaactctacgtatcaaagctagagaagtatggataagggagagttgtttcaga

SEQ ID NO: 259963 - DNA, 274 bp, Zea mays
gtttttcagtaacaaactgatatgattacaacaattcatctttgggaaaatttccctgcaaactttgtttgggtttcttcaaaatttgcactaggccaacatcatgaggttttttattttcagtatccttattgtgcggatgcaccattttttgttatcacacctttcacaagctcggcaattgtctgaataatttctgtgtctaatgatggaactgtttttcagtaacaaactgatatgattacaacaattcatctttgggaaaatttccctg

SEQ ID NO: 259964 - DNA, 960 bp, Zea mays
cctcactcgtccgcacaagttcacagtcctgtccccgccctcaaggccacaagacccaagtggacgcctaccctaccgcagtgccgccccccgccctcatgatacagctccaaccttctaggcggacactcaagctccactgctggtgcctgcaagatccaacaaaatccgccgtcttccaggttcaagcatcgtcgcccaggcccaactcttgtgtgtctgtctgcatcaagcaacgatagacacaatcccaaaacccaaaagatgagctcatcagcagatgagaattcctttgacatatgatgaggagaaaggagcttggtttcttgagaaagagttgcctgacggtatgaatacaaatacgtagtggatggcaaatggctatgcaacgagcatgagctgataacgaaaccgaatgctgacggccacgtgaacaactatgtccaggtctccagagacggcacgagcgatgaagagaaggagcttagggagcggttgactggtccggaccctgatctcacggaccaggagaggctgatgatcagagagtacttggaacagtacgcggatgccgccgagcgctaggaggtccaaagaatgatgatgcctgacgaagagacgacggtccgaagccgacctgaccgcaccttcctttacggcgaagtcgggctttcccctctcttgtcgatcgaatactcgtagcttaaccgtgcaaaagggcacgttctgctcgcatacttggagaatgatgatgaaggagcaaactgtacgtattgttgaacagcagctgtgcagcaataacaaaggtagtagcgtaaaactactgtactgaccataatgttactactgtatgctccttcttggctatgaataataataataataatataagagtaaataaacctcagaaaaaaaaaaaaaaaaaaaaagaaaaaaaaaaaaaaaaaaaaaagaagaaaa

SEQ ID NO: 259965 - DNA, 1584 bp, Zea mays
gcgagctcgtccccgtcttgtttcgtctcctctcgtctcgtcacgcgagatatttctacgggacgggacccgcgttgcttccccgcctcgccgtcccgcgcgcgccagccgggcccggggaagccatgaactgcctccagaacctgctcaaggagcctccaatcgtggggtccaggtcgatgaggcggccctctccgctgaatctggcgatggtccgcggcggcagtcgccgatcaaacaccgtcaaaactttgcaggcccctggggcgtccacttccggtgccgagagcagcgccgtggagatgggcaccgagaagtccgaagtgtacagcactaacatgacgcaggctatgggagcagcgttgacatatagacatgaactcgggatgaactacaatttcatacgcccagacttgattgtaggatcctgcttacagagtccacttgatgttgataagcttcggaagattggtgtcaaaactgtattctgcttgcagcaagattcagatcttgaatattttggagtcgacatccgtgccattcaagattattctctacaattcaaagatattgtgcactgccgtgcggaaattagggattttgatgcttttgatttgcgattgaggcttcctgctgtggctagcaaattgcacaaacttatcaactgtaatggtggtgtaacatatatacattgtactgctggacttggaagagctcctgctgttgcattggcttatatgttctggattcttgggtacagtctcaatgaaggacatcggctgctacagagtaaaagggcttgctttccgaagttggaagccattaagttggcaactgctgacattctgacaggattatccaaaaacacaatcactttgaagtgggaagctgatggttcttcctctgttgaaatttctgggctcgacattggctggggtcagagaattcctttgacatatgatgaggagaaaggagcttggtttcttgagaaagagttgcctgaaggacggtatgaatacaaatacgtagtggatggcaaatggctatgcaacgagcatgagctgataacgaaaccgaatgctgacggccacgtgaacaactatgttcaggtctccagagacggcacgagcgatgaagagaaggagcttagggagcggttgactggtcgggaccctgatctcacggaccaggagaggctgatgatcagagagtacttggaacagtacgcggatgccgccgagcgctaggaggtccaaagaatgatgatgactgaggaagagaagagacacaccatgagacgacggaccgaagccgacctgaccgcaccttcctttacggagaggtcgggcttcccctctcttgtcaatcaaatactcgtagcttaaccgtgcaaaagggcacgttctgctcgcatacttggagaatgatgatgaaggagcaaactgtacgtattgttgaacagcagctgtgcagaaataacaaaggtagtagcgtaaaactactgtactgaccataatgttactactgtatgctccttcttggctatgaataataataataataataaaagagtaaataaccccc

SEQ ID NO: 259966 - DNA, 663 bp, Zea mays
  unsure (1)..(663): unsure at all n locations
gcgacatatttctacgggacgggacccgcgttgcttccccgcatcgncgtcccgcgcgcgccagccgggcccggggaagccatgaactgcctccagaacctgctcaacgttgacatatacacatgaactcgggatcaactacaatttcatacgcccagagttgattctaggatcctgcttacagagtccacttgatgttgataagcttcgccacattggtgtcaaaattgtattctgcttgcagcaagattcagatcttgaatattttggagtcgacatgcgtgccattcaagattattctctacaattcaaagatattgtgcactgccgtgcggaaattagggattttgatgcttttgatttgcgattgaggcttcctgctgtggttagcaaattgcacaaacttatcaactgtaatggtggtgtaacatatatacattgtactgctggacttggaagagctcctgctgttgcagtgattcattgcagttgataccgcctttgtggaatgttcaacaatcagcacttctgtttgtttgaagataagataatatacctattatctgtgcacccgaaaaccaacatctaatgattgcctgcttgtgggaattttgatggtcccccgcatctgttctctatagtccatttatgttgggatacggg

SEQ ID NO: 259967 - DNA, 906 bp, Zea mays
ctcggcttaacgcgtttcgggtgcccttggccactggcccctagccctcgccctcccttttctattgctccgaagcccgagttgcgagctgtctcctccactcttctccttcactgtcgcagccgccccttgtagaagcttcgaggctgctgctgctgcgcccatggccgcggaaggcaagacgccgtccctcgccgaggagtattcacttccaccacaggaagttccagtggaaaaggcagctgaggagaagccctctagtggtactgagtctgaagctgctccctcaaccaatgatgaaactcctccatctgtagaagacaagaatggaacttctgaagtacaagatgctgctgaaaatccagaggcagaagaaactaacactgctgcagaggaaacacctgctgtagaggaagcaagtgagactaccgaggaggaagaggctgagaaacctgagatcaagatcgaaacagctccagcagattttcgtttcccaacaacaaaccaaacaaggcattgtttcacacgctatgttgaatatcacaggtgtgtggctgcaaaaggtgaggatgcacctgagtgtgataagttcgccaagtactatcgatccctgtgcccaggtgaatgggttgatcgctggaacgagcaacgcgaaaacggcaccttccctggacctctgtaatcctacaatgcaaaagaagtatgaactcacgatgttgtgccggcttctcttccttggtaactggcgccaagttaccttttttggagctctctacagaataagaaatcccttttggcttgaagaatgccctgttgctcttcctaacggtcatgttgtgcgctgctgagaaaccagcgtcccagttaacaattttctttatacagttcagaaaatgatccgtgatt

SEQ ID NO: 259968 - DNA, 917 bp, Zea mays
cccacgcgtccgcggacgcgtggggagagcagctgactgcgtgctcctgccttcggtgggcgacggcaggcgatcccagtccagcaccccccctccctccctatcgctctgatctctccctcgctctcgcagccgccactgtagaagcttcgaggctgctgctgcgcccatggccgcggaagccaagacgccgtccctcgctgaggaatattcacttccaccacaggaagttccagtggaaaaggcagctgaggagaagccctctagtggtactgagactgaatctgctccttcaaccaatgatgagactccttcatctgtagaagataagaatgaaacgtctgaagtacaagatgctgctgaaaagtcagacgcagaagaaactaacactgctgcagaggaagcaagtgagactgccgaggaggaagaggctgagaaacctgagatcaagattgaaacagctccagcagattttcgtttcccaacaacaaatcaaacgaggcactgtttcacacgctatgttgaataccacaggtgtgtggctgcaaaaggtgaggatgcacctgagtgtgataagtttgccaagtactatcgatccctgtgcccaggtgaatgggttgaacgctggaacgagcagcgtgaaaatggcacgttccctggacctctgtaatcctacaatgcaaaaagaattaggaactcacgatgttgtgccggccttctcctccttggtaactggcgccaagttagcagggagagagacaaatcatcctctttggagctctctacaaaataagagattctttttgacttgaagaatgccttgttgctcttcctaacggtcttgttctgcgctgctgagataacagcgtcacagttacatttttgtccgtatatacagttttaaaaaatgattcatg

SEQ ID NO: 259969 - DNA, 613 bp, Zea mays
gattagttcagtcaaggagatctcttcctgcagatatgttgtaacgattcaaagtcccatgctttgcaaaaacccgttattccaggaagaaaaacgaaccctctccatccactgcaatgagttgcctgctagagcggaatccagcgcggaggatgactcgcttccaaaagaagctcagatttccatcatccccgatcaggatgagctacatgatttcccagcctatgctacttgatttgcctccaataattatgtttgatgtagaaaaaaacaccattttggaggcgcaggggcaactgagcaacactatgtattaactatctcgtagatactacagcagaggctccttgtaaagcaggttgagacgatcattctgcagttcttattatataggatgattacgaaggtaacatgtttgggacagtaacatttgcttgaaatgtatatagtctacaacaagaataatgccagcattcttgaaatgtatcgcctaggagaatgctagcacttacgggtgtgacgaacgatctgctgtcggttgagatgaaaaggcgttcgccttctattaaggatgtaaatggtacaaaaggatgtaaaaggtacagatattatc

SEQ ID NO: 259970 - DNA, 1645 bp, Zea mays
ctgatgacttgagtaatccagagatcagtaacccgctgtatactctgggacaaagacgcttttatcagagttcttttgctgcaggggatgatttttcatccgttactgatgatagaaagacaagcgcattggttcatgctatggtggagattctttttttatgtggaactggaaaaagagctgttgtagcatctgttgcacgtgccaatcgtggaaaaattgatgcagctttggaagatctttctgtcgaatcagcagtggatctgcagaaagttcttaaaacaagtacatttacttcaaggaaggatgcattcaacacccttttggctaacattcctttgtttcaaagtcgactgggagccatgctatttcttatttctgctttgctttcacgaggattggaagacatccaagcagacagggatgatccaagccagccattggtcactgctccatttggtcatgcttcacaggaaattgtgaatttattactctgtggagaggctgttccaaatgtatttgatggcaagatggaccttggtggtggcatgtccttgaagggcataccaaacaatgttgaagttggttttcttaccctcctggaatcactaaatctctgcaaggttggtcagtacttgaagtgcccaaagtggccgatatgggttgtgggaagtgaaagtcactacacagtcctttttgccttgaaccccaacgttcaagaggagaatgagctggaagagcgcgaatcaaaaataaggagggcttttgatgcccaagatcaaagtggaggtggaggctttatcagcgttgagggcttccaacaagtcctcagggatactgacataaattttgcttcggataaactcgaggacctatgtaatgctgggattatagtatggagtgaattctggcaggcattgctacagttggataaaagggctggaggcatgaaggatccaactggtcttatgggcaagaagcaattcaccatcttccacttcaatggaattgccaagtctgtgctgaatgggaatgcaagtgcaggtggttcatgtcctatacagagacccaggttatgcaagctaaatgtcactgtccccccaaggtggactcaagatgagtatctggctgatgttgtaagcgcatcaaccagcagcagcaaggacgatagtattctttctctagctcccccaggtcagactaatcagcacgcaccattggtggactgcattaggacacggtggccacgagctgtttgtagctgggttggagatgttccaagcattgtctgacacagtggatgtcgtgtgcgcactagtcgctctagctatgttgctcgtaacctcgttctgaagaatctgctcagagcaagccacttggagcttcctgattgttcatgccctggaaaaaggaatcgcccaattacatggtttgttcggtcaaaatgagtgatgttttaaaatgcgtgttattaatcaagggcctggatattctttttttttgcttttattgacattagatgtacacttgatttatggatatgttttgtgtcttgggttacattcttttctgtacacatatagtttcgtttgtgtttatcatgtcatctgacacagtgagttgtctagccagaagccggttgagt

SEQ ID NO: 259971 - DNA, 2252 bp, Zea mays
ttccttgttcgcccacgcgtgcgcgctcccacctactgtcccaccccacgccgccgcctctcccagtgggtcctccgcatctcccatctcccatctcccgtctcccctcttcctcctcccctgcgatcttctccaccgcatcacctccctcgaaccctagacccacccacgcgcccattgccttcggtcgccatgtccgccgctcagcttctccgtcactcgcgcaagctgcggagtttgcaaaatgctgtaggttgtgagaattttagttttgttcggcatttctccagcggttctgggtcctttatcgccagggaaaatggtattggaaaaagaaccagaggtaccagattttcccagcataaccagcctgcaaaacagctcgagacattctcagcaggagtaaatggaagctgcacttggagaatagcatccaacagccttaccccaagtgctgctagctggctcagtggttcattctcatgtggacaggtagtctcagcgcggccattctcaagtagtgcagacctgcctccacatcaagaaattgggatgccgtctctttcacctacaatgactgagggaaacattgccaagtggcttaagaaggaaggagacaaggtctcccctggtgaggttctctgcgaggtggaaactgacaaagccactgtggagatggagtgcatggaagagggctatcttgctaagattattcatggagatggtgcaaaggagattaaagttggtgaggtcattgctataactgtggaagaagagggtgacattgagaagtttaaggattataagccgtcatcttcagctgaacctgtagctcctgctgaatcaaaggctcaaccagaaccttcacaaccaaaggtggaggaaaaaaagcttacccaggctcctgaggttaaggccccaaagattgaagaagcttctcaatctggagatcgcatatttgccagccctcttgctcgtaaactggctgaagataacaatgtcccactatcaagtgtgaaaggtactggtcctgatgggcgtattttgaaggcagacattgaagattacttggccaagggtgggctgagggaggcttttgcagctccagggttaggttatgttgatattccaaatgcacagataagaaaggttactgcaaaccgcttgctagcatctaaacagaccattcctcattactacttgacagtagatgcacgtgttgacaaacttgtccagttgcgaggtgaactgaacccactgcaggatgcttctggtggaaagaaaatatctatcaatgatcttgtcatcaaggctgcagctttggctcttagaaaggtccctcagtgtaacagctcatggatgaatgattttattcggcaataccacaatgtgaacatcaacgtggctgtacagactgaacacggattgtttgttccagtaattagggatgcagacaagaagggacttggtacaattgctgaggaggtgaagcagttggctcaaaaagcaagagacaatagcttaaaaccagcagattatgagggtggcaccttcacggtatcaaacttgggaggtcccttcggaatcaaacaattctgtgccatcataaatcctcctcagtcagcaattttggctattggttctgccgagaagagggtgatacctggttccgccgatggtctgtatgagtttggttcgttcatgtcagctacactgagctgtgaccacagggttatagatggtgcaatcggtgcggaatttctgaaagcattcaagggctacatcgagaacccaacttcaatgctgctgtgaagttaggatggatgacctaacacaattttttgtcatgttaaataaccaggccaccaaagagtggcgtctccaaaccaagagcacagagccgtcttctccgttttgatattgccattgctaagtaggatcaacgtatacatgcattattggggtcatttttgggttttgtcctcacggataattgatggaaataaatatgaaagcagccaatcttggaaagtactctttgattttgaggtcattgctatgcgtttaaaaaactgcagatccgttgatgctctcctcggtaagcgtgatttgatgttgatgatgatatcttgataggagggaggggtagtcaagaactcggttaatatgttacgatgcatggtcggaagttataatgtaagcagagtggaacgaaggtcgggaacatattttgtgcaatcgtgattgagtgg

SEQ ID NO: 259972 - DNA, 575 bp, Zea mays
gagacgacgacctcgatcgcgttccctgtaatgccaccaccaccgtcaccgccatcgctcgcccggatcgtcaacatggcagccgccctccgtgtcctcatcgccgtcctcgccgtcgtctcggtctctctccggcgcgccacggcgactacggcccccaccgtcgtcgacgaggcgtgcaagcagtacaccaagtacccggagctgtgcgtcaagtccctgtcgtccgcggcgccggaggcgaaggcgaaggcggagcggggcgggctggcggggctggccgggctggcgctggcgcaggcggcgcagtgcggtgccgagacggtggcgttcgtcaagggcctggagaaaatgccggggggcatgccgcccgtgtgcctgaacgagtgcgtggccaagttccagggcgcgctggtcgacctgcagcggtccaaggtggcggtgcagaaggccaaggacgaggccgccgtccacatgttggtgaccgtgcttagggtcaacacatactcagccctgattatagacgatcgcacatgcatggcgactaactacgtcgtcctggatttactctggcg

SEQ ID NO: 259973 - DNA, 695 bp, Zea mays
gtccgtaattcccgggtcgacccactcgttcgggcattgttgatattggagcagaaattctttgatcttctaagaaatgacaatgtcatgggcgctatgaagactttacgatgtgagatcacaccccttggtgtgaatagaaaaagagtgcatgaactgtcgacttgtatgatttcttgttctccacagcagttgttccttgggttttcaaaacttggcattgattcttctagttcaaggtttaagcttctagaggaattgcaaaaggtgctccctccaactgttatggtgccagagaggaggttagaaaatttagttgagcaagcacttactgtacaaagagatgcttgctacttccataattctgttgatgggttgtcactttacattgatcatcattgcgggaaagatcagctaccatctcgcacgttacaggttttgcatgcacatcatgatgaagtgtggtttgtccaattttcaaacaatgggaagtatttagcctcagcgtcaaatgataaatctgcaattatatgggaggttaatgaagatggagagctattactgaggcatacattgagtggtcatcaaaagtcagtgatgatggttgcatggagttcagatgattgccagctcctcacatgtgggcaggaggaagccatcagacgctgggatgttaaatctggcaaatgtcttca

SEQ ID NO: 259974 - DNA, 966 bp, Zea mays
cccacgcgtccgaccggaccacccctccccggtccattcctccctctccctacacctccgctccctctcgccgctttcccccacccaatccgaccgctgggccgcctcctctccgccggggccggcgattccccggagattccgcgcgattcggctcagattctgggctcctcttgtggtttctcggcgaatcggcgggatcgggactcccggctggagaatcttccgtctctttcgctaactgtttggatcattttacgtggagattgcatgccatcaccttccttgaagtgaaaaatatatgggctgatcttggcatttcatgggaggttttgaagatgatgaaccaccctcaaaacgcgcaagagcatcctcagtagaatctgcaagtttaccagactgtttcttgttttcaaaatctgccaatcctttgggaagtacaatggctagacctttgccttcccaagggaaagaagttatggttggttccaagggtgttattaagaaggaggaatttgttaggataatcaccaaaactctgtatagtcttggatatgaaaaaagtggagcagttctggaggaggaatcagggattattttacataaccctatggtgaaacttttcagagaacaggtgattgatggaaattgggataatgcggtggttaccatgaatacaattggccttcaagatgaaaacatcttgaaatctgcggcatctttgatattggagcaaaaattctttgaacttctaaaaaatgacaatgtcatgggtgctatgaagactttacgatgtgagatcacaccccttggtgttaatagaaaaagagtgcatgaactgtcgacttgtatgatttcttgttcttcacagcagttgttccttggtttttcaaagcttggaattgattcttctagttcacggttgaagcttctagaggaattgcagaaggtgcttcctccagctgt

SEQ ID NO: 259975 - DNA, 1126 bp, Zea mays
cggacgcgtgggcggacgcgtgggcggacgcgtgggcggacgcgtgggcggacgcgtgggggagttcagatgattgccagctcctcacatgtgggcaggaggaagccatcagacgctgggatgttaaatctggcaaatgtcttcatgtttacgagcagcctgccactggtttgagatcatgtgcttggttcccagatggaaagcaaatattgtctggtctagctgatcaaaccttttgcatttgggatttagatggtaaggaagtagattgctggaaagggcagagatcggcaacaacatctgattttgctgtagcaaaagatggaaatcttataataagcttgagtagggacaatgcaattcttctatttgatagggagacaaaacatgagagaataattgaagagggtagtacaattacttcattttctctatcagaagatggtgatttcctgcttgtaaatcttgtaagtgaagagattcatttgtggaacataagaaatgatcctgttcgagtcaaccgatacaatggccataagcacagccggtttgtgataaggtcttgttttggcggatctgagcaggcgttcattgctagtgggagtgaagattcacaggtctacatatggcatagagccactggcgctctcattgagactcccgctggtcactcgggcacagtcaactgcgtcagttggaatcctgcgaatccccacatgctcgcctcagcgagcgacgatcacacagttcgtatatggggggcacagaagtccagtcttaagcgcaaggatgttgggagcagcaattgcaacagtaacgggttccaccgctcgaatggaaatgcacatggcaatggtttcgctcaccagtgcaacgggaacagcaccaaatgatttgccaaggcaatgtacccccatggatggttgactggcatctgtaaatccccctttacttccctcctagaacaagagtcgccgccgaaatagtaaaagaaaagaaaagcaaaaaagaaagctgcagcacaaagtgtgggcaacctgctgggtttcgtgcgccatctttcccttgttctatcatgacagccatcacatttatttcttaattcaagatgggatggaattatgat

SEQ ID NO: 259976 - DNA, 1254 bp, Zea mays
gttcgatttttttttttttttttttagtgcaaaacaagattcttccatagtaagattaaaatggttgggcgaccggaaagtagcgaagagacaatatagctcacgacatcaaaaacttgacaaacattacaatgttttcccccgaaagactgcctagaccaagctgatttcaacatctagcctgcgtagccgtacccggagatcttccaaaccctgatagacccatcggtgtagccagtgtagagggtgcttccagtccgcactccagctcaagcttgtacagtacaggatctggttcttggagacctggatgtcgggcttgaggtcctgcacaacgtgcttcgactcgaggtcccagatcttgacagagtcctgcgtcgcagcgcagagccagtagcggttgggtgagaagcagagagagtggatgatggagcccgcgtccagcgagtacagcctcttcccctcagccaaatcccacagcagagtaacaccgtccttcccgccggaggcgcacagcgacccgtcggggctcacagcgacggcgttaacatagccaccgtgcccatccagagtgcagcgcagcttgcagttggtaaggttccagaccttgacggtgcggtcccaggatccggagacaatggtgggctggaaggtgtttggggagaacctaacgcaggagacccacccgttgtggccctcgccgccgccgaggtcgccgccgatggtgtacttgcactcgccgagagtgttccagagcttgatggtcttgtcgcgggacgcggagacgatctggcggttgtcgacggagaaggcgacggagatgacgtccttctcgtggccgacgaagcggcgggtggtgaggccggtggagaggtcccagaggcggagctctccatcccaggagccggaaagggcgaactggccgtcggaactgaggacgacgtcctggacgaagtgggagtggccggtgaggcggcggaaggggacgccgtagtcggcggtggcgccggattccggggtggagtggaccgggttggtcaggtcccacaccagcagggacttgtcgcgggaggaggagacgatgaacggcgagttgtcgatcggggtcgcgatcgccgtcacctcgccgttgtggccgcgcatcgtgcccaccagagagagggactcctgcgcgccagccatggttgctgtgagggattggggctgcaagggttgcgttggcggcggcgcgagggaaaggcggacgcgtgggga

SEQ ID NO: 259977 - DNA, 630 bp, Zea mays
aataaatagatggagtaaacgaaagaaatgattaattttttttgccagctgaggaagtcaccatttccgcagttttcttcgccaaaaaacactataagtaaacagattataaactcagacaaacaccccctttcacaaggtaaaaccaaacaagcaaatttaataaacttcattaacaaagctaagcttagatagttgggcgaccataaagtaccaagcagacgatgtaactcacataaaaaaaactatgttccgcattgcaatgtttcgcagaacaagacctcctagaccctcgactggatttcgacatctagcctgcgtagccatatccagagatcttccagaccctgatagacccatcggtgtagccagtgtagagggtgcttccatcggcgctccagctcaagcttgtgcagtacaggatctggttcttggagatctggatgtcaggcttgaggtcctgcacgacgtgcttcgactcaaggtcccagatcttaacagagtcctgcgtcgcagcgcagagccagtaacggttgggttaaaagcagagagagtggattattgaggccgccttcaacgaggacaggctttttccccaaggggccggccagggtgccggccacgggtccg

SEQ ID NO: 259978 - DNA, 500 bp, Zea mays
tcttggtttttttttttgttcatgtcttcagacagagccgggggaataaacttcattaacaaagctcagcttagttagttgggcgaccataatgttgcaaggaaacgatgtaactcacataaaaaaaaactatgcggaacattgcaatgtttcgccgaacaagacctgctagaccctcgagtggatttggacatctagcctgcgtagccatatccagagatcttccagaccctgatagacccatcggtgtagccagtgttgagggtgcttccatcggcgctccagctcaagcttgtgcagtacaggatctggttcttggagatctggatgtcaggcttgaggtcctgcacgacgtgcttcgactcaaggtcccagatcttaacagagtcctgggtcgcagcgcagagccagtagcggttgggcgagaagcagagggagcgtatgatggagcctcgcccgtccgcgctgcgggcgtggtgacccggaattccgacctactg

SEQ ID NO: 259979 - DNA, 673 bp, Zea mays
tggacgcgtggacagacacaaaccacgagcgcgaggcacgacctacatcgaatcggccacgaaccaccatggcggcctcacgcgcgctcctccccagcccgcaggtgagccctgcgagcgcgcgggtccgcctggccgcggccgtgccgtcgtcgctcacgctcgcggcgcgcggcggggccggggccggcgcgcgtctccgcgtgcggtgcgcgatcctgtcgtcgcccgcgcccgtggcgcccaccgagtcgaggccggcgcgccggatctcgccgtccgcgccggacggcgcgctgcggcccaagccggcggtgctggtcgccgagaagctgagcgaggccgggctggccgtgctgcggcagttcgcggacgtggagtgcgcctacggcatgtcccccgcggagctcctcgccaaggcggcgcagttcgacgcgctcatcgtgcgcagcggcaccaaggtgacgcgggaggtgctggaggccgggcagggccggctgcgggtggtgggccgcgcgggcgtcgggatcgacaacgtcgacctccaggccgccaccgaggtcgggtgcctcgtcgtcaacgcgcccaccgccaataccatcgccgcggccgagcacggcatcgcgctgctcgcctccatggcgcgcaacgtctcgcaggcggacgcggcgct

SEQ ID NO: 259980 - DNA, 1810 bp, Zea mays
ctcctcgcccgcccccgtacgtgtccatctctccactcctttcctttccttgttggtaagagcaaggcgagacgtaacgtaatccggccatggcgttcttccggggcctcaccgcggtctcgagactgcgatcccgcatggcgcaggaggccaccacgctgggtggtgtgagatggctgcagatgcacagcgcgtccgatctcgatcttaagtcccagctgcgggaactgattccggaacagcaggaccgcttaaagaagcttaaatcagagcatgggaaggttcagcttggaaacataactgtggatatggtccttggtggaatgagagggatcattggaatgctttgggagacatccctactcgacccagaggagggtattcgttttaggggcctctcaattccagagtgccgaaaagtgctgccaacagcagttgagggtggtgaacctttgcctgagggtctcctctggcttcttttgacggggaaggtcccaaccaaagagcaagttgatgctctatcaaaggaattgcttgcgcgctcaactgtcccagctcatgtctataaggcaatagatgctctcccagtaactgcacatcctatgacacagtttaccacaggagtaatggctcttcaggttgagagcgaatttcaaaaagcttatgacaatggattgccaaaatcaaagttttgggagcctacttatgaagactgcttaaatttgattgctcggcttccaccagtggcttcttatgtttaccggagaattttcaagggtgggaaatcaatagaagctgataattctctggattatgcggcaaatttctcacacatgcttggttttgacgacccaaaaatgctggagctgatgcggctctatgtaacaattcacactgatcatgaaggcgggaatgtcagtgctcatactggtcatctggttgggagtgctctgtcagatccttatctttctttcgcagcggctctaaatgggctagctgggccactgcatggccttgcaaatcaggaagtgcttttatggatcaaatctgtaattgaggaaactgggagtggtgttaccacagatcaactcaaagactatgtctggaagacactaaagagtggaaaggttgttcctgggtttggtcatggagttctgcgtaagacggacccacggtattcatgtcaaagggagtttgccctgaagcatttgcccgaggatccacttttccaattggtgtccaagttgtatgaagttgtacctcctatcctcactgagctgggcaaggtcaagaacccatggccaaatgttgatgctcacagtggagttttgctgaaccactttggactatctgaagcacggtattacactgtcttgttcggtgtttcaagaagcatggggataggatctcagctcatctgggaccgtgcccttggcctgccacttgagaggcccaagagcgttaccatggagtggctggagaactactgcaagaacaaggctgcctgaagcttttcacaaatgcctgcttttttcccccaaccttggctgttaatgattaaacatgagttgtagaactattctttttcccccattggccgttgaataacgcaatagcaacgtgctgctctcggacgctagaattctgtatcttccgtcacttggtggacgtccagatagacagttcatctgcggcaacactgtgcagaagagattaggacatgctgattgatctttgtatgccgacacttgagcttttgtttaacgttatgtttggcagagttgattggtaattaaaaaaaaaaaataat

SEQ ID NO: 259981 - DNA, 453 bp, Zea mays
cccacgcgtccgcggtcccattccccccgccccaacttgtcaggactcaagaggctcccctcctccctcgccgcggaacacgcgcgccgtcgtcgccagcccgggttcatttctccgttccttggtgcggtggtagccgagcgctccggccatggcgttctatcggggcctcaccgcagtctcgagactgcgatcacgcatggcgcaggaggccaccacgctggggggtgtgaggtggctgcagatgcagagcgcgtccgatctcgatcttaagtcccagttgcaggaattgattccggaacaacaggatcgcttaaagaagctcaagtcagagcatggaaagacccagcttggaaacataactgtggatatggtccttggtggaatgagagggatgactggaatgctttgggaaacatccctacttgatccagaggagggtattcgttttag

SEQ ID NO: 259982 - DNA, 783 bp, Zea mays
  unsure (1)..(783): unsure at all n locations
gaagccagaggagaccctcaggcaaaggttcaccaccctcaactgctgttggcagcacttttcggcactctggaattgagaggcccctaaaacgaataccctcctctgggtcgactagggatgtctcccaaagcattccaatgatccctctcattccaccaaggaccatatccacagttatgtgtccaagctgaactttcccatgctgtgatttaagcttctttaagcggtcctgctgttccggaacccacgcgtccgcccacgcgtccgcccacgcgtccgcccacgcgtccggccgctcgtttcattcgctgggattgggatctattctcccatcgcgagccctcgaatacaaccccagattcgtctctaatctgccctccccgctctgtcgggctgtctcggattcgttcgctgcgtggtggggcggtgccgattaaagcgcaagtgcggtggtagccgagtgctccggccatggcgttcttccggggcctgaccgtggtctcgaggctgcgatcccgcatggcgcaagaggccaccacgctgggtggggtgagatggctgcagatgcagagcgcgtgcgatctcgatcttaagtaccagttgctggaattgattccggaacagcaggatcgtctaaagaagcttaaatcagagcatgggtaggctcagcttggtaacataactgtggatatggtccttggtggactgagagggatgactggaatgctatgggaaacatgcctacttgacccagangagggtattcgttttaggggtctc

SEQ ID NO: 259983 - DNA, 564 bp, Zea mays
cacgcagatgaactgtctatcgagccgacacccaagtgaccgaagatacagaatcctagcgtccgagaagaagcacgttgctattgcgttactcaacggccaatgggggtaggatcccacctcatctgggaccgtgcccttggcctgccgctcgagaggcccaagagcgttaccatggagtggctggagaactactgctagaacaaggctgcctgaagcttttcacacatgcctgctgctttttggcaaccttggctgttaataatttaaacgcgagttatagaaatagtcattttccctttggccgttgaataacgcaagagcaatatgctcaggcggaagaattttgtatcttccgtaacttggtgaacatccagatacttgatctgcggcaacaatgggcagaagagattaggacatgctgattgatctttatacgccaacacttgtttttctttaacattacttgttcgctgcagctttaagccagctgtttgtaactgcaatttatagcaatttatagagatttgggctatgacatgtatcatcatgtatgccagttaa

SEQ ID NO: 259984 - DNA, 446 bp, Zea mays
cggacgcgtgggcgaatccagcctcatcttcgtctccgatctgccccccgctcagccgggcgggttctttcgctgcgtggtgggacggagccgagtagtgcggtggtagccgagcgctccggccatggcgttctatcggggcctcaccgcagtctcgagactgcgatcacgcatggcgcaggaggccaccacgctggggggtgtgaggtggctgcagatgcagagcgcgtccgatctcgatcttaagtcccagttgcaggaattgattccggaacaacaggatcgcttaaagaagctcaagtcagagcatggaaagacccagcttggaaacataactgtggatatggtccttggtggaatgagagggatgactggaatgctctgggaaacatccctacttgatccagaggagggtattcgttttaggggcctctcaattccagaat

SEQ ID NO: 259985 - DNA, 406 bp, Zea mays
aagcatggggataggatcccagctcatctgggaccgtgcccttggcctgccactttagagcccgaagagtgttcccatggagtggctggagaactactgcaagaacaaggctgcctgaagattttaacaattgctgctttttcccaaccatggctaataataattaaacatgcgttatagagttttttccccttttgactgttggataatacaagagcaacatgctctagaattttgtatcttccatcacttagtcggcatccagattgttgatctgcggcaacactgcagaagagattaggacatgctgattaatctttgcagagttaattggtaattacagaattgggctgttgcatgtatcatgtatgccaattatctcgttgtggcagttctgttttaagtt

SEQ ID NO: 259986 - DNA, 530 bp, Zea mays
cccacgcgtccgcatcagccgcacccgagctagccagttgtatagcgacgcccacgcccggagcacacacgtatgtggcgcgcgctcgcacttgcggtcctcctcctggccgccgccgcggtggcgccgctggcctccgccgacggcgtgaagtccgtccccatccccggcgccaaggaggccgccagcggcgccaagatgttcgacagggaggccgacgccggtcacgacccggtcagcggcctgccggccgacccggcgcccgacgcgcgcccctaaggctacgcaccgtcgtcgttgtcgtcaccgccgtcgccgtcccgacccgtttccgctgaacaccacgcgccttgtacgtgtgcttgtgatgttcggcctctgcgtgcgttttgcattgcttgcgtgcgttttccttcggctgccgtgccgattggtcgtggtggacgcagcgccatggataacgggatctaagtactcacccgtgcttgctgtacctgtacccatttattttgccattctctctttttttt

SEQ ID NO: 259987 - DNA, 558 bp, Zea mays
ctcgtaggtcgatacaagcctctaagccacaacacatacaggaaagcaagcaagaatcatcggaataatggcccgtgcatgcgtgttcctcgtcgtgctcctcctggccgccatcgcggtggcaccgttcgcgggcgccgcacgcgtggacgttgtggagggtaggtccatggcatccgccgatgcaccggaggcggcggccgatgctcccgctcctagccccgactccgcctcatccccagactcatcgtcagaggcgccctccagcagcagctcctccgactagacgcaaaaacctcttcattctctggaataactaacagtatatacgttgcaccctgatgatatagaaacatgtacgtgcatcagtgtatggaatgcgagtggcaaacacatggaatgtgcttgcctaattattgtttatttctttatttattatatgtctctctcggttgttttttatttttcttaatgcatgtaatataatttgttatacccaatatagacaatgtgtgctatgcgctttaattctatggtgacgatggcaccgttttctca

SEQ ID NO: 259988 - DNA, 1263 bp, Zea mays
tggacgcttcgatgtttgtactaaacatatatctaaatttgcagaaatgcgacatgaggtggtgcggcttcaggtggagcaagaaagttgtatgttgccaatcttcactcaaatattactgaagaccaattgagacaggtatttgaaccatttgggcaagtggagcttgtacagcttcctgtagatccaatgactggattgtgcaaaggttatggttttattcagtttgcacggcttgaagatgcaaaagctgcacagagcttgaatgggcagcttgatatcgctggcagagttattaaggtttcagctgttaccgatcatgtgggaatgcaagctagtggagcaactactggagatctagatgatgatgaaggtggaggcttggcgctaaatgcaagctccagagctgctctaatgctcaaattggacaggagtggtacagcaaccagcttaactggtggtattggtgctgctggagtggctgtaccagctacttcagttattggggcagcaggagctgcttctcttctgtcaccaacagtttctgctgttggatcagttcctggggcacctgtgcttcctgttaccactcagaatgtgaccatgtctacacctacagaattcttgttgcttaaaaacatgtttgacccatcattggagacagatcctgattttgacttggatattagagatgatgtccaagatgaatgttccaagtttggtgcagtgaagcatatttttgttgacaaaaatactgcaggcttcgtgtatctgcagttcgatagtgtaactgcagcagggaaggcccaacaagcacttcatggaagatggttcgccggaaagatgattacagcgacatttatgtccgatcaggaatacagtactaagttcccaaacttgtgagcatatgcggggaagagttggtcagacccgcatagttcgttcggagagtttgctagtgctgtatcgttggatggtagactagacgaacaccttattgattgtatgacaggatagtttcagttgcagcgctggtcgtgcgtacaatgtttgatgtactttatttacggcatcacacacagtgaccatcccttattttgtccaccgaatgaaatgccctatgatctccaggcacgttggcatatggtttatttatgtacgatctgttggcactggtacgtatttgtatactaagcaaaagcgttacataatcacaatggtacctttattaatcccctgtcgtggaatatgcgcccgctctag

SEQ ID NO: 259989 - DNA, 705 bp, Zea mays
catcatttgcatttatattacttacgtttgtttcaatgaacttgatactatctgtcacactcacacatctgcttcttactgacctggctgatgactgatgagaagtcttttcgtttttttgggcggatcctgattttgacttggatattcgagatgatgtccaagatgagtgttccaagtttggtgcagtgaagcatatttttgttgacaaaaatactgcaggctttgtgtatctgcagttcgatagcgtgactgcagcagcaaaggcccaaaatgcccttcacggaagatggttcgctgggaagatgattacagcgacatttatgtccgctctggagtacagtacgaagttcccaaacttgtgagcatatgccgggaagagttggccagacctgcatagttcgtttggagtattcgcaagtgctgtatcgttggatggtagacgaacaccttattgattgtatgacagggtagttgcagcaccgggcgtcactatcagtacaatgcttgatgtactttatttacggcgtcgcagtgaccaaaccttatttttgtccaccgaatgaaatgccctatcatctccaggcttgttggcatatggttgattttctggacggtcaccataacacatttttgtcagatttccaatgtgctttattttttattctcttatgtttcaggatgttttgatatgttcttgctttc

SEQ ID NO: 259990 - DNA, 1456 bp, Zea mays
tcgccctcgcgtccgcgtccctccccaagcgcgccgtctagggtttcacagccgtgccccgatccattcgagcgccccgcaccgccgccatggagtttgacgaatacgagtacttggagaaggcggtagagcccgctcccccacaggccaatggttccggctccggctccggcgagaaggaccgcggctcgcgccgccgcgagggcggcgaggaccgcatatcgaagcgctctcgctcgggggaggaccgcgaccgggacaggcaccgcagcggccgggagcaccgtgaccgggacaaggatgacgtgaaggaggagaggagccgcgaaagccgcgggaaggacagggacagggaagggagagaacgggagaaggagaggggtgacaggcaccggctgagagagagggaagtggaacgggagcggaggagccggagccgctcggagcggcgccgtgccgaggaagaggagatggttagggagctggagctggagcgcgagcgcagcgagcgacaccactatcgcgaccgtgatgtcaggcgtaggaaagatgacggggcagagccagaagttgatccagaaagggaccagaggactgtatttgctttccagctatctctgaaggcagacgaaagagatgtttatgagttcttctcaagggctgggaaggttcgtgatgttcgtcttatcatggaccgaaactcaagacgttctaaaggagttgggattacacactgaaattttatagtttgctctacatgctgggattatcggcaatttacaagtaagatggaatattagatcattctgatgtcagtcagcagttgaggacagtctgattccagtgtatttgacaaacacttggtgcaagccctaggcaataagggggcacccaagatccaagttcgaatcctctacaatttttgatcaaaatgcctgaagttttctgtgaaaaattgaaattaaatttgcaggtacattgagttttacgatgttatgtctgttccaatggcaattgctttgtctggtcaaccgctgcttggacaagcagtgatggttaagccatctgaggctgaaaagaacttagttcagtcaaatgcgacatcaggtggtgcggcttcaggtggagcaagaaagttgtatgttggcaatcttcactcaaatattactgaagaccaattaagacaggtatttgaaccatttgggcaagtggagcttgttcagcttcctttagatgcaatgactggactgtgcaaaggatatgtttttattttttttgcctttcttgtcatcctattctctttcattctttgtattattccttttttttttctttagattaatttattctatgttttatctttcatttctgtttcttttgttcttattcttctcctgatttctttcttacatcttattttcttttcttctctatacattatttttttctttttatt

SEQ ID NO: 259991 - DNA, 1280 bp, Zea mays
tctgtcttgcgactatacaattctcgtgtctcgccctcccccgacgcgccgtctagggtttcacagccgcaccccgatccactagagctatggagttcgacgaatacgagtacctggagaaggcggtggagccggctcccccgccggccaatggttccggctccggcgagaaggaccgcggctcgcgtcgccgcgagggcgacgagggccgcatatcgaagcgctcccgctcgggggaggaccgcgagcggggccggcaccgcagcgttcgggagcaccgggatcgggataaggatgacgggaaggagaaggagaggagccgcgatagccgcgggaaggacagagacagggaagggagagaacgggagaaggagaggggggacaggcaccggcccagagagagggaggtggaacgggagcggaggagcctgagccgttcggagcggcgccgtatcgaggaagaggagatggtgagggagctggagatggagcgcgagcgcagcgagcgacaccactatcgcgaccgtgacgtcaggcgtaggaaagatgacggggcagagccagaagttgatccagaaagggaccagaggactgtatttgctttccagctatctctgaaggcagacgaaagagatgtttatgagttcttctcaagggctgggaaggttcgtgatgttcgtcttatcatggaccggaactcaagacgttctaaaggagttgggtacattgagttttacgacgttatgtctgttccaatggcaattgctctgtctggtcaaccgctgcttggacaagcagtgatggttaaaccatctgaggctgaaaagaacttagttcagtcaaatgcgacatcaggtggtgcggcttcaggtggagcaagaaagttgtacgttggcaatcttcactcaaatattactgaagaccaattgagacaggtatttgaaccatttgggcaagtagagcttgtacagcttcctgtagatccaatgactggattgtgcaaaggttatggttttattcagtttgcacggcttgaagatgcaaaagctgcacagagcttgaatgggcagcttgatatcgctggcagagttattaaggtttcagctgttaccgatcatgtgggaatgcaagctagtggagcaactactggagacttatatttctatgatatttctcaaaaggcactcttttgaaaggtccacggggtggtctataaaaataaaaatggtttagagatgatttttttttccccggtttttttttttggatttttttttttt

SEQ ID NO: 259992 - DNA, 825 bp, Zea mays
gcgagcgacacctctatcgcgaccgtgacgtcaggcgtaggaaagatgacggggcagagccagaagttgatccagaaagggaccagaggactgtatttgctttccagctatctctgaaggcagacgaaagagatgtttatgagttcttctcaagggctgggaaggttcgtgatgttcgtcttatcatggaccgaaactcaagacgttctaaaggagttgggattacacactgaaattttatagtttgctctacatgctgggattatcggcaatttacaagttttctaggcaataaagggggcacccaagaaccaagttcgaaaacctccactagttttgatcaaaatgcctgaagttttctgtgaaaatttgaaatgtcttaacatatgatgccccacttattgttcttcttttcttttttacaggaagacatcttttcttggacgcttcgatgtttgtactaaacatatatctcaattcgcaggtacattgagttttacgacgttatgtctgttccaatggcaattgctctgtctggtcaaccgctgcttggacaagcagtgatggttaaaccatctgaggctgaaaagaacttagttcagtcaaatgcgacatcaggtggtgcggcttcaggtggagcaagaaagttgtatgttggcaatcttcactcaaatattactgaagaccaattgagacaggtatttgaaccatctgggcaagtagagcttgtacagctttctgtagatccaatgactgggatgtgcacaggttatggttttattcagtttgcacggcttgaaatgcaaagctgcacagagcttgatg

SEQ ID NO: 259993 - DNA, 844 bp, Zea mays
gacccgcccgtccaaccacgcgatcggaaatctcgccctcgttgcggtcgtccacatccttttctctcctcctcgccggcccaacctgattgttcttcaaccaagaggaagaaaggaaggaagggaccggaagcatcagccatgtcgaactcggcgtcgggaatggccgtctgtgatgaatgcaagctcaagttccaggagctcaaggcaaagaggagcttccgcttcatcgtgttcaagatcaacgagaacgtgcagcaggtggtggtggacaggctgggggggccaggcgagagctacgacgccttcacggcctgcttccccgccaacgagtgccgctacgccgtgttcgattttgacttcgtcactgacgagaactgccagaagagcaagatcttctttatctcttgggccccggatacatcgagggtgagaagcaagatgctgtacgcgagctccaaggaccggttcaagagggagctggatggcattcaggtggagctacaagcaaccgacccgagcgaaatgagcatggacatcgtcaagtcgcgagccctctgaaacagccccggccgctgcacctgcacgctgcaggggcgcatcggctcctgcatgcccgtgggtcgtcgaatccttgcttgtgtgttgggaacggtcttgtgttttcgtgtccttgttttcctggaagcaaaagccctgcattctatatgagactgtatgccattttccatctttttctctccccatatctctgccctagtcctgctaccgctgtagactagaacttatttggtgtttgatctcgtggcattgtcgagtcttttatgtgtctatgcaatgctag

SEQ ID NO: 259994 - DNA, 1077 bp, Zea mays
cggacgcgtgggcggacgcgtgggatcgccatcgccatcgcgcaccgcctccccgtgtcccctccttctcgcccggcaccgtcgagctcggctgtggaaacagaacaaacccatcaaccatggcgaactcggcgtcggggatggccgtgagcgacgagtgcaagctcaagttccaggagctcaagtcgaagcgaagcttccggttcatcacgttcaagatcaacgagcagacgcagcaggtggtggtggacaggctggggcagccgggcgacacctacgacgacttcaccggctccatgcccgagagcgagtgccgctacgccgtcttcgacttcgacttcaccaccgacgagaactgccagaagagcaagatcttgttcatctcctggtccccggacacctcgagggtcaggagcaagatgctgtacgcgagctccaaggaccggttcaagagggagctggagggcatccagctggagctgcaggccaccgaccccagcgagatgagcatggacattgtcagggcgcgagctctctgaagaggaagacgcgcatccgctcgcgcgatcgccatgcatgccccggaacgacagagcagtgctagctgtttgtcttgcatcatcgaccggcggcctctgcatgtacccgtgtgccgttttttgcaccgccggtgccagtgttctcttactccatgtaaactactctagacagtgctcggtgagtacagctgctcggtgagtacggtgtcacagtcactccgtgtaggcagtgccatttcgaagacaatattgcaaaatttaactaacttggatttacagtgcgtttggttggaagtaaaaataataaactggattgtaataccaactataaataaaatcacagaaaaatcacaacaccaacaaaaaaactctcaatgatcgtgctgatcaaatacataccaagagtcaatctaataatatccttgaactcaaagatagtcggggcaacctccagtggtgaccagataagcctgcgcgagggcggagtacaacctgcttctctacacgctggcaatccatgtcctcggtgctctctgaa

SEQ ID NO: 259995 - DNA, 899 bp, Zea mays
ctaggactcgtgggtcgatacaacccttcgcgcgcgcattacttgcacgtacgagctcagaaggaaggcagaggcaaaagcagccatggcgaactcgtcgtccggccttgcggtgaacgacgagtgcaaggtgaagttccgggagctgaagtcgcggcggagcttccggttcatcgtgttcaggatcgacgacacggacatggagatcaaggtggaccgcctcggcggaccgaaccagggctacggcgacttcaccgacagcctccccgccaacgagtgccgctacgcgatctacgacctcgacttcaccaccatcgagaactgccagaagagcaagatcttcttcttctcctggtcccctgacactgcacgcaccaggagcaagatgctgtacgccagctccaaggacaggttcaggagggagctggacggcatccagtgcgagatccaggccaccgaccccagcgagatgagcctcgacatcgtcaggagccggaccaactgaccgtcatcgtccaataacgaccaagcaacaacacattcacactatatactcaattcacattgcatgcatcgttattattacatcatttatttcagaccccccccccactgctaaccgtagtccataagagattcatcatccgtggactatgctcgatctctttccgtacgatacaattctcaaatatttctatttatttcctaagtgaattattatatatgtactatttcattccaggttcattttactggtgaccattcttcagttcttttttctgtaaggatcggtatatcggagcatatgtgcatggctatgccagttgttgggcgtaagaatgtatttttttctgtaatatagaaaaaaactattttaagcaacaggttattgtcaagtt

SEQ ID NO: 259996 - DNA, 505 bp, Zea mays
cccacgcgtccgcccacgcgtccgggcgtcgggaatggccgtttgtgacgaatgcaaactcgagttcctggaactcaaggcgaagaggagcttccgtttcatcgtgttcaagatcaacgagaacgtgcagcaggtggtggtggacaggcttgggggaccaggtgaaagctacgatgcgttcagggcctgctttcccgccaacgagtgccgctacgcggtgtttgattttgactttgtcactgatgagaactgccagaagagcaagatcttcttcatctcttgggccccagatgcatcgagggtgagaaggcaagatgttgtacgcaagctccaaggaccggttcaagagggagctcgacggcattcaggtggagctacaagcaactgagccgagcgaaatgagcatggacatcatcaagtcgcgagccctctgaaacagcccggcatcagctcctgcatgcccgtcgattccttcggtgttggtaacggtcatccgttttcgtgt

SEQ ID NO: 259997 - DNA, 444 bp, Zea mays
  unsure (1)..(444): unsure at all n locations
tccgaccacgcgtccgcccacgcgtccggcttgcgcgagcgctgataggcacacacgtacagccatggcgaacgcgtcgtccggcctggcggtgagcgacgagtgcaaggtgaagttccgggatctgaaggcgcggcggagcttccggttcatcgtgttcaggatcgacgacaaggacatggagatcaaggtggaccgcctcggcgagccgaaccagggctacggcgacttcaccgacagcctccccgccgacgagtgccgctacgccatctacgacctcgacttcaccaccgtcgagaactgccagaagagcaagatcttcttcttctcctggtcccctgatactgcacgcacccggagcaagatgctgtacgccagctccaaggacaggttcangagggagctggacggcatccagtgcgagatccaggccaccgaccccaa

SEQ ID NO: 259998 - DNA, 1380 bp, Zea mays
cagacgcgtgggaaaatggagggaaaatccatcatctagagaccatgttatattacttgacatatcataacgtgtggaaaataaccctgtctgccttgtaaatgaggttgacgatgaaaagggccctagccgcttcacttatacaactaatttgacatatgggaatccgctcagctcgatgagaaagatgcaaggttgcaaatgcgtaagtgtatgcctccctggtgataacaactgctcctgtacgcatcgaaatgctggtgaccttccttacagtgcttcaggcgtacttgttagccgaatgcccgttttatacgagtgtggtgattcctgcacatgttcacaaaattgccggaaccgagttgtacagaaaggtacgcagatccgttttgaagtttttaagacaggagatcgtggttggggcctccgtagttgggatccaattcgagcaggcacatttatctgtgaatatgcaggtgaaatcattgacataaatagagtgaatggtgaagatgactacatatttgagacttctcctttagagcagaatttaagatggaactatgcaccggaattgctgggtgagcctagtctttctgactcaaatgaaacaccaaagcagctgcctatagtcatcagtgcaaaacgaaccggcaacatagctcgctttatgaaccacagctgctcacctaatgtgttttggcaaccagttctctatgatcatggtgatgagggatatccacatattgcattctttgcaattgagcatattcctccaatgacagagcttacctatgattatggccagaaccagcgtaatagtattcaaatgggaacccattctggttttcggaagtctaaaagttgcttatgttggtccccgaagtgtagaggttcctttggctaataaccagccctataaggaatatattggatcataatactccatttcaaagttacacctaagatatctgctggtcgacttttatattcagctcccaaaaatctgtcacaagtttgtgagagcaactgaattgtctttaccagcagaagcagcccgtcatggtggcctgtatgaagcagcaggggtctcctatgtcctaggtgttccatgcaccatcgaataaatccacccctcttcatgttagaatgggaaacggggatgtgttttgcacaaattatctgtcatgcagtcgtcgtattaagttttcttgaactagtttgtagtcatcctcagagaatgcatgatgtgcactttgtagtaatatatgcaggttgttatcccacctactatataaccatcaaaatttcagtgtttgtacaggacgccctatgtagtggcgctgcttgcaaatgttagttagtacactgatattccat

SEQ ID NO: 259999 - DNA, 577 bp, Zea mays
gcgctggacaaggggcagatggcttcggcggctgcagcggtgatcccggacggccggcgatggagcaaaggtccgggctcctcgtcgtcgccggtgacgacggccattttcctcttcttcttcggtgtcgtggtcggcgtcctcgtgtccgcccgctggatcaccaccacgactcatctgtcgaccaccaatctggatcagtggagctcaaagctggctatcttaaccgcgacgcacaccacctcctgcatcccggccatccccgcggcaccgccgccgcctcggccgacctactccctctcctgcccggcgccgccgcttcaccgtgacccgaccatccccagcaacatctcccagaccctcgacctcgtgctctcccccaacgcctcctccgccttcacttgcgccgcctttcccgaccccccgccgctccctgccaactccaacgcctcctccacctgccctgcctacttccgcttcatccacgaggacctccacccatggcgcgccgctgggggcatcacccgctccatggtcgaccgcgcgcgcgccaccgtcaactttcgactcgtcgtca

SEQ ID NO: 260000 - DNA, 370 bp, Zea mays
gaaggtcaggaaaattcatgatggctgctcaagcgctgtgaataggctccatactgtccttgagtgaacagagcagcagctcggatcaaacagaagacaagctaactcatctagcacaagtcgctgcaaaatctctacccaagggtctccattgccttacactgcggcttacaaatgagtactatttcactaactcaaagaataaagactttccctacgtggagaagctggaagaccccaaactctatcattatgccttgttttcagacaatgtattggctgctgcagtggttgttaactcaactcttgtccatgctaagaaaccagaaaaacatgtattccacattgtgacagatagtcttaactatgc

SEQ ID NO: 260001 - DNA, 383 bp, Zea mays
caacaaccggctgacggaggccaaggccaacttcccgccgtacgggcaggacttccccggcggcgtcgccacggggaggttctccaacggcttggtccccggggacctcctagcttccaagctgggcatcaaggagctgctgccgccgttcatcggcaccgacctgcagctcgaggacccgctcaccggcggcgccttcgcctgcggcggcagtggctacgatccgctcacgtccaagctcgcggcgaccttacacgtcgtcctccggaagctagctagctagctagctgcattaacacactcacgtactcctacgtactgactactgaagatgttatctgagactgagaacaataaaacccgtactactactactacgtacg

SEQ ID NO: 260002 - DNA, 647 bp, Zea mays
gaacccgagcccctctccgcctccctccccgccgcacagcctccacagcccgaaaccctcgccgccgatcggtttcggagaagagaagcaaatcaagatgtttctcggctcgctcccgcggcgcccgagcaaggaggctgcttacaagcagctgcggtcgcacatcatcatcatggcctcctgcgccgccgtcatccgcgccaccccttacatcctccatttcctcgcccgcgacggcgacatccaggaactcaagctagatctgtaggcccgtccgttgcttccccacctccagaggtgctacaaaggcaaccgttagttcgagcccactgcaaggtactatggagttagtggctacagtgcctgcttaagtttctttgttgttccaagtttagtgacaaaactgacaatggtgtagcaactgggttgtgctgcgaccagtatttcgtttttgcctacctgtatggtctagtctgtgtttgcactggtggatttgcagagatgttatcattcaacaatgttctgtggtcaaaaaaaaaaaaaaaagtaaaaaaaaaattatgaaaaaaaaaaaaaaaaaaaaaaaaaaaaaaaaaaaaaaaaaaaaaaaagggggggcgcccccctattattttccccccccggga

SEQ ID NO: 260003 - DNA, 449 bp, Zea mays
gccccgagaagtacgagaacgaggagcgcctcgaggaccacaaggcgcagtgcagcttccgccccgtcgcctgcgccaacgacggctgccgcgccaaggtctccgtccgctgcgtcaaggaccacgacgccgcctgcgtgtacaagctgctccagtgcgagcagggctgcgacaagcgcctgctcaggcgcgacatggaccgccactgcgtcaccgtctgccccatgaggcccatgaagtgccccgtcggctgcgactcctccttccccgaccgtgacctcgagaggcactgcgcccagttccttcggccgcatctgctcatggtcctcaaggccatccataagaaaggcgcggtcggaacatgacctcaaggacctcgctctgaagctggaaaagttcgatggagatggtaaactggctaaagctctggatgcaacgactctcactaa

SEQ ID NO: 260004 - DNA, 1458 bp, Zea mays
aggccaaactaagaaacgccaagttgccagccaaacgaaccagctaaaacaagggggggcagcaccgcggcgcggcgcggcgtggggacagagccctcgtggtcgatccgcccgtgggatctcgcgcacgccaggattggagagctgcggcctccctccgccccaaccagccatgggttcccgcgttgattgcggcgcttagacgcggaggaggagagagacacggggagggggggaggccgaggcctaggaggcgtagcgctgtgcagggcgcgagcgcgttcgttcggcatggaacagaacgccggctcgttcctcgccgtgcgtcgcctctccggtggcgccatccaccaccatcgtcaccactcttccccggctgaggtcgtgggcgtgtccactgcgtggctcggtaaggggctttcatgcgtctgcgcgcagaggagggagagcgacgtgcgcctgtccttcgatttgagtcccattcaggaagagtgcttgaataggttgcagaaccggatagaggtgcagtatgatggttcaaatctggagcatcagaaagcactggaagccctttggcgttcttcttttcctggaactgaacttctagggttagtatcagaccagtggaaggagatgggatggcaagggaaagatccatctacagatttcaggggcggtggttttatatctttggagaatttactgtatttctctaggaactatccaaaatccttccaggagctccttcgtaagcagaatggtgatagagcattgtgggaatatccctttgctgtagctggtgtaaatattacattcatgctgattcagatgcttgaccttcaagcagctaagccaacgtcgttggttggagcggttttcctaaatctactcttagaaaatgatcgagcgttcgacattctttactgcataaccttcaaactgatggatcagaaatggcttgaaatgcacgccagttacatggatttcaatacggttattaaatcaacacggcgccagctcgagagggagctgttgctagaagatatccagagaatcgaggacatgccatcgtacaggtttctcgcctgctagcaattgaacctcctggtcgtaccgaacattgccacaagatagtgcagctccatacactcgaagaagaagctgagaggttggaaccacgtacaccgagcgaagggtgaatctaggttcatggactgtggatgtgttgttgctttgaattgcgctgtcgtgtttacctactccgagtccgacaacagcctcgacgccgagtgccttttcgtttcaacgatgtgctatatcttggggccacggaacggcagatcctagctttctttgtaaacaagaggatgtggaaagttggctgcgtatgctttgtggccatgtgcatggataatcctcctgctcgcctgaaagaaaaaccggccgatcttaagcctg

SEQ ID NO: 260005 - DNA, 570 bp, Zea mays
acgatctctgcccctccttccccaaaatcatctctctcccgatcttggcctccccagattcaccacctgctctcctctccggctacgaccttggctcatcctgattcggacacgcaacatggtttaccactctagttgcgctgatgatgatgggatcacaaaagcttgcagctgtcctttgcttccactgaaaactcatatcaagggcccggcaccagcctctgaccctgataaagcggacattgttgatgaagccataactttctttcgagccaatgttttcttcaaaaatttccatgtgaaaagctcagcagacaagttattgatctatctgacgttttatatcaatattgccttaaaaagactagacggttgccggacactagctgttgggactaaagcaatcattaatctgggattggagaaagttcctgtacctggggaaccagggtttcctttccctggacttttcactcttccccagtcccaggaggaagcagaattgttgaggaattatttgaagcagataacggaggaaacaagtggaagattgctcaactgtgcatacag

SEQ ID NO: 260006 - DNA, 620 bp, Zea mays
agcatctggtctcgtctctctccgatccctctcctctccctccccctagccactacccacttgagcgagccctaggccctagcaggcgaaagccatggcgtccttgggtgttcgtgccgccgccgccgctcgtcttccctccctccgtcctcgccgcgacggcagcagggtgctcaccggcttgagggtcgggacagggcactacggcgtgcggctcgcgctttcttcgtccacatcagcttctcccagagagttcaaggtcgctggccttcctgtcgatgacagcagtttgggcccgggggatgaatatgagtttggactctatactcctaagctgcttgcagttactggagatgattatgtgtctaacccccgcatgccagacgaggatgagttcgaccatttctaccgtgttgtcgccaagaagactgacatgctgctcagctgccaccttccaaagccgcttgcagtttctgaagaggagaaggccgtgcaggagaagttcaaggagatggcgaacgaatgcatcgacctcctggttgatgcgatgcgccgcatcccagcggagaaaaggcgcccactgttctcggtgtttggtgagcttgacccggtatttgagt

SEQ ID NO: 260007 - DNA, 292 bp, Zea mays
cgacccgagccgctcgtccctctccctctcctctctcctctccctccccagttgcgcgacccggcgagccctagcaggcaaaagccatggcgtccatggttcttcgtgccgctgccgccgctcgtcttccctccctccgtcctcgccgcaacggcagcggggtgctcaccggcttgaggatcgggacagggcactacggcgtgcggctcgcgctttcttcgtccgcggcagcttctcccaaagagttcgaggtcgcttgccttcctgtcgatgatagcagattgtgcccggg

SEQ ID NO: 260008 - DNA, 880 bp, Zea mays
gtcttgtcgttccctttccatccccgtctccgtctccgcccgccacaacaatatcgcattgacacatcgttcatcggatccagtcttctcccgggatctcctccggctataaatttccggccccaattcacccaatccagatgcgcaaacatcgaatcgtctcgctcgtggctgccctgctcatactgcttgccctcgccgtatcgtccacccgcaacgcacaggaggattccatggccgacaacaccgggacgttggcgggcggcatcaaggacgtgccggggaacgagaacgaccttcacctccaggagctcgcccgcttcgccgtcgatgagcacaacaagaaggccaatgctcttctggggttcgagaagcttgtgaaggccaagacacaagtggttgctggcacgatgtactatctcactattgaagtgaaggatggcgaagtcaagaagctctacgaagctaaggtctgggagaagccatgggagaacttcaaggagctgcaggaattcaagcctgttgaagagggtgctagcgcctaaggatctctccttctccatgtgcaagcctgaagcgcaaaactaagttgcagaataaggagctgcttcgtaacatgccagagcatgcaccctcgcgtaatttcataaaatcacagggctcttaatgtaatatcttgaattgccgtgccatgtgtaataagtaatatcatgaataacagttgctattatgggttctaaaggtttattaacagccatccatgggccatggcagagttctcatattactttgttgaagtctttgttggaatatacatgacagaattctcaaaaaaaaaaaaaaaaaaaaaaaaaaaagggcggccgctcctggaattccg

SEQ ID NO: 260009 - DNA, 687 bp, Zea mays
atcgaatcgtctcgctagtggctgccctactcgtgctgcttgccctcgccgccgtttcctccacgcgcagcatacaaaaggagtccgcggctgacaacgccgggatgttggcaggcggcatcaaggacgtgccggcgaacgagaacgacctccacctccaggagctcgcccgcttcgccgtcgatgagcacaaccagaaggccaatgctcttctggggttcgagaagcttgtgaaggccaagacacaagtggttgctggcacgatgtactatctcacgattgaagtgaacgatggcgaagtcaagaagctctacgaagctaaggtctgggagaagccatgggagaacctcaaggggctgcaggaattcaagcctgttgaagagggtgctagcgcctaaggatgtctccttctccatgtgcgagcctgaagctcaaagcaaagttgcagaataaggagccatgctcccttgtgtaatttcataagactacaaccctattagggcttgtttggttgtgtctgtatcgaagggaattgaaggtgattaattttccttctattctaatagaggggttttaatctcctccaatactcttcaatccacacctaaccgaacaagcccttaatatgatatcttacattgccgtacctgtgtaatatcatgaataaaatttgctattatggattct

SEQ ID NO: 260010 - DNA, 437 bp, Zea mays
  unsure (1)..(437): unsure at all n locations
cacatccgcttggctgccctactcaagatgttggttcttccgccgnatcctccacgcgcggcgcacatnatgaggccgtgggtgacaacgcctccatgttgccgcgccgctgtctacaagtgccggcgaacgagaacgacctccagctccaggagctcgcgcgcttcgccgtctatgagcacaacttaaaggcctttgctcttctggggttcgagaagcttgtgaaggccaagacacaagtggttgctggcacgatgtactatctcactattgaagcgaacgatggcgacgtcaagaagctctatgaagctaacgtctgggagaagccatgggagaacttcaagcagctgcaggaattcaagcctgttgaagagggtgctagcgcctaaggttgtggccacagcccggctctcgcaggatctgtcgtctccctgtgc

SEQ ID NO: 260011 - DNA, 566 bp, Zea mays
gctggcacgatgtactatctcactattgaagtgaaggatggcgaagtcaataagcttctcgaacaccaaaaggccaatgctcttctggggttcgagaagcttgtgaaggccaagacacaagtggttgctggcacgatgtactatctcactattgaagtgaaggatggcgaagtcaataagctctatgaagctaaggtctgggagaagccatgggagaacttcaaggagctgcaggaattcaagcctgttgaagagggtgctagcgcctaaggatctctccttctccatgtgcgagcctgaagctcaaagcaaagttgcagaataaggagccacctcccaacatgctagaccatgctcccttgtgtaatttcataagactacaacccttttagggcttgttcgtttgtgtctgtgtctaagggaattgaaggtgattaaatttccttctatacaaatagaggggctttaatcccctccaatactcttcaatccactcctaatcgaacaagcacttaatatgatatcttagattgccgtacctgtgtaatatcatgaataacatttgc

SEQ ID NO: 260012 - DNA, 886 bp, Zea mays
acctgaccaaggccaagagcgaggggtacctgtgggggaacaggactgcagctgtggactccgacaagaagcagcagcttcttgccgtcattggagtttacactgggtttggctcccgtctcaagaggaacgtcttccgtggctcctggatgccaagaggtgatgctctgaagaagcttgaggaaaagggtgtagctattcgttttgttattggtcggagtgcaaatcgaggtgatagcttggaccgtaatattgatgatgaaaatcggcagacaaaggacttcttgattcttgaaagtcatgaagaggctgcagaagaattaccgagcaaagcaaaaattttcttcagtgctgcagttgaagcctgggatgcagaattttatgtcaaagttgaagataacattaatcttgacttagctgggttaattgagatgctcgaaggccgtcgaggtagccaaggattgtacatgggttgtatgaaatcagggatggtcataagtgaagagggccaacaatggtatgaacctgagtggtggaaatttggagattcaaaaacgtattttcgacacgcttctggttctttgtttatcctctcaaaaaatttggctcgctacatcaacataaatagtgcgtcactgcagagttatgcacacgatgatatatcagtaggttcatggatgatgggactgaatgcaacttacgtggatgatgaccggttgtgctgcagcagttccagacaagagaaaatctgttccaatgcttgagcggaaggcgtggctgctggcctgttgctgtacatcccgatgaagattttgcacacctgtcattttgtatacactgctttcgtgaaccggaacttgcaccaaaatttaggaacttccatcag

SEQ ID NO: 260013 - DNA, 283 bp, Zea mays
cccacgcgtccgcccacgcgtccgcccacgcgtccggactagttctagatcgcgatctagaactagtccgcttctggttctttgtttatcctctcaaaaaatttggctcgctacatcaacataaatagtgcgtcactgcagagttaggcacacgatgatatatcagtaggttcatggatgatgggactgaatgcaacttacgtggatgatgaccggttgtgctgcagcagttccagacaagagaaaatctgttccaatgcttgagcggaaggcgtggctgctg

SEQ ID NO: 260014 - DNA, 3402 bp, Zea mays
gcatcgcctcctccggccggctcgggctccccctgcccttccgccccttggtccggccaatccggccccttcggcggggccaccgccttcgccgggaaacggccacgttccgcgggcgcaagggcccagattcggggccgccgtgcctgccgtcgagcagttccaccgcaggatggcaacccaagccactgtgcatgccttcaaggatattctgaccagcctccctaagcctggaggtggtgaatatggaaagttctacagccttcctgcactaaatgatccaacgattgataagctgccgtactccgtccgtattcttcttgagtcagctatccgtaactgtgataacttccaagttaccaagaatgatgttgagaaaataattgactgggaaaacacatctccaaagctggccgagataccattcaagccagctcgagttcttcttcaggacttcactggagttccagcagttgttgatcttgcagctatgcgtgatgcgatggccaagttgggcagtgatgcgaacaagattaacccattggtcccggtggatcttgttattgatcactcagtgcaggtggatgtagcaaggtcgcagaatgccgtacaagcaaacatggaactggaatttagtcgcaacaaggaaagatttggtttccttaaatggggctctagtgctttccaaaatatgctagttgttcctcctggttctggtattgtgcaccaggtcaatcttgagtatcttggcagagttgttttcaacacagatggcattctctatcctgacagcgtagttggtactgactcacacaccactatgattgatggtttgggtgttgctggctggggggttggtggtatagaagcggaggctacaatgcttggtcagccaatgagcatggttttgcctggtgttgttggcttcaagttaactgggaagttacggagtggtgtcacggccactgatcttgttcttacagtaacacaaatgctaaggaaacatggtgttgttggcaaatttgttgaattctatggtgaaggtatgggtaagctgtctttagctgacagggccacaattgcgaacatgtcaccagaatatggagctaccatgggcttctttcctgtggaccatgtgacattggattaccttaaactgacaggccgcagtgatgaaactgtgtcaatgattgaagcatacctgcgagccaataaaatgtttgtggactacaatgagcctccaacagagagaatatactcatcttatcttgagctgaaccttgatgaggtggagcctagcatgtctggcccaaagaggcctcatgatcgtgtccctttgaaggaaatgaaatcagattggcatgcttgcctggacaacaaagttgggttcaagggttttgcagtgccaaaggagcagcaggataaggttgtcaaatttgactttcatgggcagccagcagaaatcaagcatggtagtgttgttatagcagcaataactagctgcacaaacacctcaaatcctagtgttatgcttggtgctggtcttgtagctaagaaagcttgcgagttgggtcttgaggttaaaccatgggtgaagacaagccttgcccctggatcaggagttgtcacaaagtacttgcttcagagtggtcttcaagaatacctcaaccagcaaggattccatatcgttggctatggctgtaccacttgcattggaaactctggtgatctcgatgaatccgtatcaactgccattacagaaaatgatgttgttgctgctgctgttttgtcgggtaaccgtaacttcgagggtcgtgtgcaccctttaactcgggctaactatcttgcttcaccacctcttgttgttgcttatgcacttgccggaactgttgatattgattttgagaaagagcccattggatttggaaaggatggcaaggaagtctacttcagggatatatggccctcgacagaagaaattgcgcaggttgtccaatccagtgtgctgcctgacatgttcaagggcacctatgaggctatcacaaaaggcaacccaatgtggaaccagctaactgtcccagaagcatcactctactcatgggattccaaatccacttacattcatgagcccccttactttaaggacatgaccatgtccccacctggcccctctacagtgaaagatgcctactgcttgctgaacttcggggacagcattactacagatcacatttcacctgcaggaagcatacacaaagacagtcctgctgccaagtatttgatggagcgtggtgtggaccggaaggacttcaactcatatggtagccgtcgtggtaatgatgaagtaatggcaaggggaacgtttgcaaacattaggatcgtgaacaagtttttgaacggagaagttggacccaagaccattcatgttcctactggggagaagctttctgtttttgatgcggccatgagatacaaatctgagggccatgctactataatcctcgctggtgctgagtatggaagcggcagttctcgtgattgggctgctaagggtccgatgctcctgggagttaaagctgtaattgccaagagctttgagcgtatccacagaagcaacttggtggggatgggaatcattcctctgtgcttcaaagctggtgaggatgctgattcgcttggcctcactggacatgagcggtacagcatcgatctccctaccaacctcagtgagatccgtcccggccaggatgtgactgttactaccgacaatgggaaatctttcacttgcatcgttcgctttgacactgaggtggagctggcgtacttcaaccatggaggcatcctcccttatgtcatccgcaacttggcagctgcgcataactgaggcaagatcacacaccgtttgacccacaatggcagtggcaggctccatgttcccagggctagcgacctggttctcaatgtagtgacatttgtgatggatctaggggtctctttgtcgattcagcccataaataaagtgtgaaataaaagccgcaggtggaggcaggaacctgctgattgagggaacagttttgcctgtgtttggttacatgaaatatctgtttcacagatgtgtagagcatggtgtaaatgcttcctgtgctgttactttcgtttcgacaaattgattatgctgtagcccttcaggtttcatctagacatttcggtgtcttggagcacattcttttttctgacgttggtaatgttttctgtaggctagtagtagccaatattatgtttggtttatatccccctctaataatctttattactttacaagaaattgttgcttggagggcaaacgttgctcacggtttagcttgatcagagctgaaaatttgatccagctgttgagcccga

SEQ ID NO: 260015 - DNA, 2038 bp, Zea mays
ccttctctaaaccaccaccaccaccaccgaaaacgaatcccagaacagtaccgcagcggcagccatggtgctctcgcacgcgagctccggccgggacgacgacgacgcggtggcctccaccttcgcgtcgcgctacgtgcgcgagcgcctgccgcggtaccggatgccggagcggtcgatcccgcgggaggcggcgcagcagatcatcagcgacgagctcatgctggacggcaacccgcgcctgaacctggcgtccttcgtcaccacgtggatggagcccgagtgcgacaagctcatcatggactccatcaacaagaactacgtcgacatggacgagtaccccgtcaccactgagctccagaaccgctgcgtaaacatgatagctcacctgttcaacgcgccgatcaaggaggacgagacagctattggggtcggaacagtgggatcctcggaagcgatcatgcttgcaggtctggcgttcaagaggaaatggcagaacaagaggaaggagcaggggaaaccgtgtgacagacccaacatcgtcaccggtgccaacgttcaggtctgctgggagaagtttgcaaggtattttgaggtggagctgaaggaggttaagctatcagaagggtactacgtcatggaccccgtcaaggctgttgagatggtggacgagaacactatctgtgtcgcggcgatcttggggtcgactctcaccggagagttcgaggatgtcaagcagttgaacgaccttcttacagagaagaacaaggaaactgggtgggacgtgcctatccacgtcgacgccgcgagcggagggttcatagcgcctttcctctaccctgagctcgagtgggacttcaggctgcctctggtgaagagcatcaatgtcagcgggcacaagtacggcctcgtctaccctggtgttggctgggtcatctggcggagcaaggatgatctgcctgaggagctcatcttccatatcaactacctggggacggaccagcctacgttcacgctcaacttctccaaaggttcctgtcagatcattgcgcagtactatcaactcattcgcctaggcttcgaggggtacagaaacatcatgcagaactgccaggagaacgccgcgatactgcgggagggcatcgcggcgacgggccggttcgacgtcctgtccaaggacgccggggtgccgctggtggccttctcgctcagggacagcagccggttcagcgtgttcgacgtctccgagaacctgcggcggttcggctggatcgtgccggcgtacacgatgccggccgacgcggagcacgtggcggtgctccgagtcgtcgtcagggaggacttcagccgcagcctcgccgaacggctggtctcggacgtccgcaagatcctgcgcgagctggacgcgcgcgcgacccacgccgtgagggtcgccaccgccaccgccgagcagtcgggcgacggcgtcgtggccaagaaaagcgtgctggagatcgagcgggaggtcgccgcgcgctggatgaacgccgtgaacaagaagaagacgggggtctgttgatgcgtcgtgggtcggagactgggaggtttcgccatggtagcttcgtctatatgtcgcgtgcttgtttgtgtctgtgcagggcgcttggatgcgttggtccagttccgcgtatgtgaacaaggtgtcgtatgcagtatgcaaatgttcaggatccaggaaccacaaataatggatgtaaatgttgggtttggtgccgtatgttgggtgtggagtatatttcttcgccaggtatttgctgtaatcctgtccctttacgttcgtgcactgcaatgagaataaaaaaaaaataagtgtcgttcacaaaaaaactgagtcaatgattgaaacatacctgcgaaccaataaaaatgtttgtggactacaatgagcactacatcagagagaatatactcatattgagctgaaccttgatgaagtggagcctatcatgtctggcccaaagaggcctcatgatcgtgtcccttttaatgaaatgaaatc

SEQ ID NO: 260016 - DNA, 2705 bp, Zea mays
atcgtcctgaaacgaggagctggagttccaacgcaacagagaatggtttgcttttcttaaatgggcatccaatgctttccacaacatgcaggttttccctcctggttcgggcactgtacaccaggtaaatcttgagtatcttgcccgagttgtcttcaacgaagatggcattctttacttcgacagcgtggttggcacagactcacacaccactatgattaatagtcttggagttgctgggtggggagtaggcggtattgaagcagtcgttgcaatgcttggccagccaatgggcatggttttgcctggtgtggctggattcaagttgagtgggaagttacgggatggtgtcactactactgacattgttcttaccatgacccaaatgctaaggaagcacggtgctattggcaaattcgttgaattctatggtgttggtgtgggcgagctatctttgcctgctagggccacaattgccaacatgtctccagaatatggagctaccatgggcttcttccctgtagaccaagtagcattggactatctcaaactgacaggccgaagcgatgaaactgtgtcgatgattgaagcatacctgcgagctaacaaaatgtttgtggacaagcatgagcctgagacggaacgcgttttctcttcacatctggagctggaccttagtgaggtggagccttgcgtttcaggccccaaaaggcctcatgatcgtgtccctttgaaggaaatgaagtcagactggcatgcttgcctggacaacgaagttggcttcaagggctatgcggtgccaaaggaacagcaaggcaaagttgtgaaattcgacttccatggaaggccagctgaaatcaagcatggcagtgttgttcttgcagcaatatgtagctccacaaacacatcaaatcccagcgtcatgattggtgctggccttgtggcaaagaaagcctgcgaattgggccttgaggtgaagccatgggtaaagacaagccttacccctggatctgtggttgctaccgagtacttgaaacatagtggccttcaagattatctgaaccagcaagggttccatgtcgctgcgcatggctgcgccacttgtgtgggcaactctggtgacctggatggatctgtatccgctgctatcacagaaaatgatatcgttgctgctgcggtgctgtcggccaaccgaaacttcgaggggcgtgtgaaccctctcactcgggctaactaccttgcctcgccgcctctggttgttgcctatgctcttgccggcactgttgacattgactttgagaaagagcccattggagttggaaagggtggcaaggaagttttcttgagggacatatggccttcaaaccaagagatcgatgaggttgtggagtccagcgtgcagactcacctgttcaagaaagtgtacgactccatcatggaacgtaaccctaggtggaaccagctgccggttccaaaggaggcactgtacccatgggacgacaggtccacctacatccgcaagcctacttacctggagggcatgtccatgacgccgcctgcagccccgcccacggtgacggaggcctactgcctgctcaaccttggggacagcatcaccacggaccacatctcctactcggggaagatccccgagggcacacctgcggccaagtatctgctcgagtatggcgtggagcccaagaacttcagctcctatggtggccgccgcgggaacaatgaggtggtgatgaggggagcgtttgccaatatgaggatcgtgaataagcttcttgatggcaaggctggtccctggacgatccatgttcctaccggggagaagctctatgtttacgacgcggcaatgaagtacaagtcggaaggtcatgacatggtcatcattgctggctccgagtacggcagtggcagctctcgtgactctgctgccaagggaccaatgctactgggtgtcaagtcggtgattgcaaagagcttcgagcggatccaccggagcaacttggtggggatggggatcattcctctctgctttaaagcaggagaggatgccgattcactcggcctcaccggacgtgagcgctacaccatccacctccctaccagcaccgccgagctcagtccaggccaggacgtgaccgtcacaacccacgacggcagatccttcacttgcactcttcgcttggacacacagcttgaggtcacatacttcaaccatggaggcatccttccctacatggtccgcaacctggcagcacagatgaaataagttaaaaagcaagctagcttattggcgcggtgggaataaattaaaaaggtactcagtgccccacgtatttgacgtatgtctgtaaataagtggcacattcgagcgctcttcgctctgccattgaggtggatcgaagctgccacatattttctccgcaggacatcggcacgaattttgtcttagcaaaccagttaattttgtactctttagattctttaattggttccatgctctctttggtacttttcatgtcagtttgctttgcaaacattatcagcgtgcccttgtagatttcgtaatggttatatgtatatgccctattgaaattgtcattttgctttgcaaaaaaaaatcagcgtgccgttgtagattttcaaatgtaaaaaaaaaaaaaaaagggcggccgctcgcgcccacgcgtccg

SEQ ID NO: 260017 - DNA, 595 bp, Zea mays
tattaatgcgagtacgcaaagccagcaactggaccgcgtcgggcatcggttcctgctctgtgctatactgctatcccctcccccaagccgtcaccagcccaccaccagcagcggaaccccccgccctcgttcctcccccgccggcgagagatctacgagatggtgctgtcacacggcgtcggtggctccgatgagtccgtccactcgacgttcgcgtcccgctacgtccgcacctcccttcctaggtaccggatgccggagcagtcgatccccaaggaggcggcgtaccagatcatcaacgacgagctgatgctggacgggaacccgcggctgaacctggcgtccttcgtcaccacgtggatggagcccgagtgcgacaagctcatccaggcctccgtcaacaagaactacgtcgacatggacgagtaccccgtcaccaccgagctgcagaaccggtgcgtgaacatgatcgcgcatctcttcaatgctcctctcggggacgctgaaacggctgttggagtgggcaccgtcggctcgtccgaggccatcatgctggctgggctagcgttcaagaggcgctggcagaacaagatga

SEQ ID NO: 260018 - DNA, 1068 bp, Zea mays
ccggttttccctggtctgtcccactcgtccttttacgttttcgcccacgcgtccggcggagcccaagaacttcagctcctatggtggccgccgcggtaacaatgaggtggtgatgaggggagcgtctgccaatatgaggatcgtgaataagcttcttaatggcgaggctggtccctggacgatccatgttcctaccggggagaagctctacgtttacgacgcggcaatgaaatacaagtcggaaggtcatgacatggtcatcatcgctggctccgagtacggcagtggcagctctcgtgactctgctgccaagggaccaatgctactgggtgtcaagtcggtgattgcaaagagcttcgagcggatccaccggagcaacttggtggggatggggatcattcctctctgctttcaagcacgagaggatgccgattcactcggcctcaccggacgtgagcgctacaccatccaccttcctaccagcaccgccgagatcagtcctggtcaggacgtgaccgtcacgacccacgacggaagatcattcacttgcactcttcgcttggacacacagcttgaggtcacatacttcaaccatggaggcatccttccctacatggtccgcaacctggcggcacaaatgaaataagttgaagtttattggtgggaataaattaaaaggtactcaatgccacgtatttggcgtatgtatgtaaataagtggcacattctaatcttcaattgtattattcgctctggcattgaggtgggtcgtagctgcattatactttctccgcaagacatgagcatggattttgttttagcaacagattatttgtactcttgattctttggttccatgctctcttcggccatctccatgtcaatttgctttgcaaacaatataatatcagcgtgccgtgcccttgtagatttccaaatggttatatgcatatgtactattgaaattgtcattttagtttgcaaacaataccaacgtgcctttgtagatttcaaaatggatatatatgttgtattcaagtttgctaaaaaaaaaaaaaataataaaaa

SEQ ID NO: 260019 - DNA, 436 bp, Zea mays
  unsure (1)..(436): unsure at all n locations
acgcgtcggcagctgcgctagccaccgtcaacccgggccgcgccgcctcctccgcccgcctcgcgctctcgctgccgtgcggcgcgtgggtcggccgaagcgggctcgtccgccgcgccgccgccttctccgggacacggccgcgtttcgcgggcgccagggcgcagatcggggccgccgtgcctgccgtcgagcagttccagcgcaggatggcaacccaagctactgtgcatgccttcaaggatattctgaccagcctccctaagcctggaggtggtgaatatggaaagttctacagccttcctgcactaaatgatccaaggattgataagctgccgtactccgtccgtattcttcttgagtcagctatccgtaactgtgataacttccaagttaccangaatgatgttgagaaaataattgactgggaaaacac

SEQ ID NO: 260020 - DNA, 898 bp, Zea mays
tgcacttaattagttttgtctaaattataattattaaaatggaattcaattccaacgaaacaaacagggcctaagagaatttgatgtgctagatcccataaactctttattttcatctttgatttgaaataaaaatttcaggtaaaccttgagtatcttgcccgagttgtcttcaacgaagatggcattctgtacttcgacagcgtggttggcacagactcacacaccactatgattaatagtcttggagttgctggttggggagtaggcggtatcgaagcagtcgttgcaatgcttggccagccaatgggcatggttttgcctggtgtggttggattcaagttgagtgggaagttacaggatggtgtcactactactgacattggtcttactatgacccaaatgctaaggaagcacggtgctattggcaaattcgttgaattctatggtgtcggtgtgggcgagctatgtttgcctgctagggccacaattgccaacatgtcttcagaatatggagctaccatgggcttctttcctgtagaccccggggcatgggactatctcaaattgaccggcccgaagcgagaaactgtacatttcactatgtgcagactactcttttaccatacccgttccatcattctgatatgtatatatttttattaataaagcaaagttgtatatattgcattaaatgtgattcaggtgtcgatgattgaagcatacctgcgagctaacaaaatgtttgtggacaagcatgagcctgagacggaacgagttttctcttcatatctggagctggaccttagtgaggtggagccttgcgtttcaggccccaaaaggcctcatgatcgtgtccctttgaaggaaatgaaagccagactgggcatgcttgcct

SEQ ID NO: 260021 - DNA, 289 bp, Zea mays
ctggttctcaatgtagtgacatttgtgatggatctaggggtctctttgtcgattcagcccataaataaagtgtgaaataaaacccccaggtggaggcaggaacctgctgattgagggaccagttttgcctgggtttggttacatgaattatctgtttcccagatgtgtagagcatggtgtaaatgcctcatgtgctggtcgtttccccaaattgattatgctggagccctcccggtttcctcttggaaaaccaaaacaaaaaaaaaaaaaaaaaaaaaagagaaaaagc

SEQ ID NO: 260022 - DNA, 452 bp, Zea mays
gacccacgacatccacgtgccgcgtagggcgggtagtaacagtcacatcctggccgggacgggatctcactgagggttgggaaatctttcacttgcatcgttcgctttgacactgaggtggagctggcgtacttcaaccatggaggcatcctcccttatgtcatccgcaacttggcagctgcgcataactgaggcaagatcacacaccgtttgacccacaatggcagtggcaggctccatgttcccagggctagcgacctggttctcaatgtagtgacatttgtgatggatctaggggtctctttgtcgattcagcccataaataaagtgtgaaataaaagccgcaggtggaggcaggaacctgctgattgagggaacagttttgccaaaaaaaaaaaaaaaaaaaaaaaaaaaaaaaaaaaaaaaaaaaaaaaaaaaaaaaaaaaaattaa

SEQ ID NO: 260023 - DNA, 217 bp, Zea mays
tcgcgatctagaactagtttgatattgattttgagaaagagcccattgggatttggaacggatgccaaggaagtctacttcagggatatatggccctcgacagaagaaattgcgcaggttgtccaatccagtgtgctgcctgacatgttcaagggcacccatgagtagagtcatgcttctgggacagttagctggttccacattgggttgccttttg

SEQ ID NO: 260024 - DNA, 1556 bp, Zea mays
  unsure (1)..(1556): unsure at all n locations
gctagttctagatcgcgagcggcgtcctttttttttttttnttttttttaagctacaggtcaaagcccataagcacatcaaacagacagagaacagagcacaacataatgttatgtacatattattcaaatgttgtcgattaaaaagcgtatacagctggtgataacgttgctacatccaaatagcgtgtagcatgcctagcaagccaaacatattaccttacagcaagcatcccattgccgcttcacacatctttgctgccttcgatacataaacagcacaaatggattactagcagggattatagttctacaatatatggaatcacgattatcaccgctgaccagagtctactccttcgaggcgtggactgcggacacggtagagaccatggaatcgacgccgcacttgttgcgaacgttggaacccctgcatatcttgtagtatccgttctccccccagttctcgccccacgagttcttgatgatccagtaaggcttgtccttcaggcgaatgggggcgaaaccagaagcaccatatccaacaaggagaacaccatggtcaaggtgcctgccacagatgtatgggcatgacacgcctccgatgtatgtctgcatgtaggcagcattgatgccgattgccaatggcccatgtttgatgaggttagcagaaatttgagcctcgtccacagacacaacactgaagttctgaactgaagcaacaatcttggacttgtcaaacttgcatttgccatcactcccagtgtaagggtaatccttctcactctcaaggccaccggccttctggagataactgaatgccgtcgtcattagcccaccattgcaacccgaatcacatgaatcaggctccgatgaatcacactcgtggtcacagtcgacgaactgctgctccgaaagcacctccagcttgccagttgcgaggtagtgcgcaccctccagcgctccagacgcgctgaacgaccagcacgacccgcacgaaccctggttcttgacggggccgacggcgccgtggtccctccagtcgaaatcgtcggggagaccatcggtggggagcacgggcgcctcgtgcgccgactccccgagttctctgaggagagcgcgccgggacttgcggaggccgaggtaggtccggcggaactctgccggcgtgaggtcggagaacttagtgacgccgtgctccgccgacgggtccagcagctggtgccggcgcgcgcggcgcaggttggccttgaaaacggacagccggtacgcgtgctcgtcggcgtccttgtaggacttgccgaaccgctgcacgaagctcaggaagtgggactccgcgttcagctccagatcgttgtcatctccaccgggaaccacctgccggatcagcgggtcctccgcgtcgacggcggcggcaaccgcggcggccgacgcgagagagaggaggaggagaacgcgatgagccatcgggggattccttgcttgtctggtttggattgggttgcttggccgcggttcccttctcccccgcaactgtcactttatactaggaagtag

SEQ ID NO: 260025 - DNA, 1664 bp, Zea mays
gactcggacgcccacgcgtccgccagactaccccctggctgcaggctcctgcaactgctttgtcggcgctcgggacgctctccggcggggccggcggtgtctccggcctcatccgcctccgccgtcgggtggcccccgcgctcgcggcgccgtcgcaccacgccgctgggacgttgaactgcgccgccttgcccgatgccgccccgctcgtctggggacgccagctccgcccgtcgctcctcctccccgccacactgctcccgtcgtcgtcgcagcccgccaggaggcacacgctgcagccgcccgccgcagccgccgagtccgcaggggaggccaagtctgtgggtttcctggagaagtacccggccctggtcaccggcttcttcttcttcatgtggtacttcctcaacgtcatattcaacatcctcaacaagaagatctacaactacttcccatatccatactttgtgtccttgatccatctagtagtgggtgtcgtatactgcctcatcagctggagtgtcggtctccccaagcgagcgcctatcaatggcacgctcctcaagcttctctttccagtcgccctgtgccatggtattggtcacatcactagcaatgtgtccttcgctgctgttgcagtctcatttgctcacactatcaaagctctggagcccttcttcagcgcagcggctactcagtttatccttggacagcaagttcccttctctctgtggctttctcttgcccctgtggtcattggtgtttcaatggcatcccttactgagctttcattcaactggactggcttcatcaatgccatgatatcaaacatctcattcacttacaggagcatttattccaagaaagctatgactgacatggatagcaccaacgtgtatgcttacatctcaataatcgctctaattgtttgcattccacctgcattgatctttgaagggcccaagctaatgcagcatggatttagtgatgccattgcaaaagtaggtttgacaaagtttgtcagtgacctattcttggttggactgttctaccatctgtataaccagattgctacaaacaccttggagcgagtggctcctctgacacatgctgtcggcaatgtgttgaaacgtgtttttgtcatcggtttctcaatcattgtttttggcaacaaaattagcacacaaactggaattggcacgtccattgccatagctggtgttgctatgtactcttacattaaggctaagattgaagaggagaaaaggaaaaagagcgcatgactgctgtgaataatattatcgggaccttcctcggacacaacatcgtcgacaatcacgacctacttctataccttgttttgttttcatcttgagtcagtcggtccattgtttgttcccagtctggtgattaaaagtctgcaaattctgtttgtggaattggcagcgatacaaatttggcttctttaagtaaatccggttgccggtacacagcggtattaattcacctgtaactgaatggaataccgtgatgcaaagggcacaacactctgcctgactaaaataaaatggtgaaggttcagccttgaaaaaaaaaaaaaaaaaaaaaaaaaaaaaaaaaaaaaaaaaaaaaaaaaaaaagggcggcggctcgcgatctagaac

SEQ ID NO: 260026 - DNA, 964 bp, Zea mays
ccagctgtatacgctttttaatcgacaacatttgaatagcgtgtagcatgcctagcaagccaaacatattaccttacagcaagcatcccccacgcgtccgctcacgcgtcgtgcgaaggcgaccctccctccttcgctccttccgcgccgcctcccggccgtcgccgccatggtgaagtactcgcaggagccgggcaaccctaccaagtcggctaaggccatgggcagggatctgagggtccacttcaagaacacaagggagacagcctttgcgcttcgcaagttgtctttgaccaaggctaagcgataccttgaggatgttattgctcacaagcaggcaattcccttccggagatactgtgggggtgttggtcgcaccgcgcaagctaagtcgcgccactccaatgggcagggccgctggcccgttaaatcagccaggttcatcctggatttgctgaagaatgctgagagtaacgctgatgtgaaaggcttggatgtggacaacctctatgtttcacacatccaggtgaatcaagcccagaagcagaggcgccgcacctaccgtgctcacgggcgcatcaatccctacatgtcctcaccttgccacattgagctgatcttgtcagagaaggaagagcctgtgaagaaagaggctgacaacattgtcgcagcaaggaagcagtgaagtatatcagcatgctgatcgaggccattttgtcgaagtattatagccgtagctcttttatgtaccttttcaggcagccttgcctctcgagacgtttccggcaccgatgttttaaatctggattatctatgttctgtactgaactactgtgttggactgtaagttcagctcgtaatacaatagctcttaagatatctgggcacttaatctgcatggactaatttggtttacttagggtctttggttttaagaataagctagtccatcatcttctcactc

SEQ ID NO: 260027 - DNA, 1123 bp, Zea mays
gaattcccggctggacgcacgcgtccgcccgcgcgtccgcccacgcgtccgcccatgcgtccgcccacgcgtccgaaggagccgagatcgggaggtgcctgctcaacaccaggatcaccggcgaccaagcgcccggggagacgtggcacatggtcttcagcacagaaggcgaggtcccctacagagagggccagtccatcggcgtcatcgcggatggcgaggacaagaacggcaagccgcacaagctcaggctctactccatcgccagcagcgccctcggagatttcggcgactccaagacggtgtcgctgtgcgtgaagaggctggtctacaccaacgatcagggggaggtcgtcaaaggagtctgctcgaacttcctctgtgacttgaagccaggcgctgaggtgaagatcacagggccagtgggcaaggagatgctcatgcccaaagaccccaacgcaacaatcatcatgctcgcaacgggtaccggcatcgctccgttccgctccttcttgtggaagatgttcttcgaggagcacgaggactacaagttcaccggcctggcgtggctgttcctgggcgtcccgacgagcgacaccctgctgtacaaggaggagctggagaagatgaaggagatggcgccggacaacttccggctggacttcgcggtgagccgggagcagacgaacgcggccggggagaagatgtacatccagacgcgcatggcggagtacaaggaggagctgtgggagctgctcaagaaggacaacacctacgtctacatgtgcgggctcaagggcatggagaagggcatcgacgacatcatgctcgacctcgcagccaaggacgggatcaactggttggactacaagaagcagctcaagaagagcgagcaatggaacgtcgaagtctactgatgatgatccttcattgtattgttcagctcaagcaatctggtggtgatgagtttgcattgcattgtacgtagtattgcggagatcaatcgaatcgtttggctcgtcgtcattctatcgatgtacatacattatatatgatgaaagacatatataatcgtttctttcaggaaaaaaaaaaaaaacccacgcgtccgcccacgcgtcct

SEQ ID NO: 260028 - DNA, 854 bp, Zea mays
cggacgcgtgggcggacgggtctgtctgtgcgaaggcgaccattccttcttcgctccttcgccgccgctatggttaagtactcgcaggagccgggcaaccctaccaaatcggccaaggccatgggaagggacctgagggtccacttcaagaacacaagggagacagcttttgcgcttcgcaagctgcctttgaccaaggctaagcgataccttgaggatgttattgctcacaagcaggcaattcccttccggagatactgtggaggtgttggtcgcaccgcacaagcaaagtctcgccactccaatgggcagggtcgctggcctgttaagtcagccaggttcatattggatttgctgaagaatgctgagagtaacgctgatgtgaaaggcttggacgtggacaacctctatgtttcacacatccaggtgaaccaagcccagaagcagaggcgccgcacctaccgtgctcacggacgcattaacccttacatgtcctccccttgccacattgagctgattctgtcagagaaggaagagcctgtgaagaaagaggctgacaacattgtcgcggcaaggaagcagtgaagtatgttagcctgctgataatggcatcctttcgaagcattatagccgtagctcttttatgtaccttttcaggctggtaccgataccgtggatctggatttgctatgttttgtactgtgctcgagtgtaaggtcagttcgtaatacaatcaatctgcgtggaacaatttgatatccttgaatatgttagtgagatcatttcgacaatgaaagttgagaacagaagttacaatgtcaaaaaaaaaaaaaaaaatcgagattagttctctc

SEQ ID NO: 260029 - DNA, 542 bp, Zea mays
gaccggtccggaacacctttgtttacggcccttggttcccctccattattcgacctcacctcaccttgccaccagccatggctgccgtgaccgccgcggccatctctctgtcctcctcctccgcctcctcccctgcggctgctgccaaggccaaggcggcgtccccgtcgtcgtcgccatgcaggcacctccagttcctgtcggcagcgagcccgcggcggcggtggcgggccggcgcccgcgcggtacgggcgcaggtgtccaccaccgagaccgcggcggcggggccggcgaagacgtccaagaagcaggacgaggggctggtcaccaacaagtacaagcccaaggagccgtacgtcgggaggtgcctgtccaacaccaggatcaccggcgacgacgcgccgggggagacgtggcacatggtcttcagcaccgaaggcgagatcccgtatagagaggggcagtccatcggcgtcatcgccgatgcgtcgacaagaacggcaagccgcacaaggtcaggctctactccatcgccagcagcg

SEQ ID NO: 260030 - DNA, 775 bp, Zea mays
ctctcttccactcatcccctccctcgccctttcgcctcgcctctcttcttcggatcgagcagcagtactgcactgcatgccgccgatacaaatcccatcctctccctcctctactgcacctgcaccacagtagctagctagctatctttgctacggcggctctgtaatctggtccactagcgctccattcgaccccacccacagccatggctgccgtgaccgcggcggccgtctctctgccctcctcctcctcctcccctgccgccgccaaggccaaggcgtccgcgtccgcgtccccgtcgtctccatgcggccacctccagttcccgcggcggcacggcggcccgcgcgcggtgcggctgcgggtgcaggtgtccaccaccgagaccgcggaggcggagccggtcaagaagctggagaaggtgtccaagaagcaggaggaggggctcgtcaccaacaagtacaagcccaaggagccgtacgtcgggaggtgcctgctcaacaccaggatcaccggcgaccaagcgcccggggagacgtggcacatggtcttcagcacagaaggcgaggtcccctacagagagggccagtccatcggcgtcatcgcggatggcgaggacaagaacggcaagccgcacaagctcaggctctactccatcgccagcagcgccctcggagatttcggcgactccaagacggtgtcgctgtgcgtgaagaggctggtctacaccaacgatcagggggaggtcgtcaaaggagtctgctcgaacttcct

SEQ ID NO: 260031 - DNA, 488 bp, Zea mays
aagtaaatccggttggcggtacacagcggaattaattcacctgtaactgaatggaataccgtaatgcaaagggcacaacactttgcctgactaaaataaaatggtgaaggttcacccttgttgtggatgctaagggccggccggtttgtttgggatttacaattcatcaactacccacccaccggaaaacctattttaattcgtgcccttatttttgtcagggtcctcatttttacccttagtcatatttttttcatcagttttacccctctgctctatagaacactggaagagcaaaactttagaaaaaaaaacacgactaagggtaaaaatgaggacatccgcacaactaagggcaccactttaaaaaactaaactgtgacaaacaaattactggcaatattcacaaacaactttcatcataaagaagatgtcatttgaggtggcggcctaagaacccaatagcctcttgatccgggccttctgat

SEQ ID NO: 260032 - DNA, 622 bp, Zea mays
ctgtacaaccagattgctacgaacaccttggagcgagtggctcctctgacacatgctgtgggcaatgtgttgaagcgtgtgtttgtcattggcttctcaatcgttgtttttggcaacaaaattagcacacaaactggaattggcacgtccattgccatagctggtgttgctatgtactcttacattaaggctaagattgaagaggagaaaaggaaaaagagcgcatgatgagctgactgctgtgaatattttaccttctgcgtctgggacacaacaacaacatcgtcgacaatcaagattatgccttgttttgtagtattcgtcttgagtcgctttgtttattaccaatctattatctggtgttgaacagcagcacattgcagaacagatgatcgtcgagtgaccttcatatacgcctgtaactctctctctctccctctctctcagctcagcagtttagatcgactatactcattggacatggacctatctatatatcttctttgtaaacaggacagagtcggactcctgctgcagtattatcaactcatctattttaaactctttaagttggatttattttcaatttttttttgtgcttcaataaattactagattttat

SEQ ID NO: 260033 - DNA, 445 bp, Zea mays
  unsure (1)..(445): unsure at all n locations
ttttttttttttttttttttttttttttttttttttaagggtatgtacatattattcaaatgttgtcgattaaaaagcgtatacagctggtgataacgttgctacatccaaatagcgtgtagcatgcctagcaagccaaacatattaccttacagcaagcatcccattgccgcttcacacatctttgctgccttcgatacataaacagcacaaatggattactagcagggattatagttctacaatatatggaatcacgattatcaccgctgaccagagtctactccttcgaggcgtggactgcggacacggtagagaccatggaatcgcccccgcccttgttgcgaacgccggaacccntgcatatgttgtagtatccgttctccccccagttctccggacgcgtgggcgcacgcgtgcctccacccgggaattccggagcggt

SEQ ID NO: 260034 - DNA, 305 bp, Zea mays
cagacgcgtgggccggcgtccccctgtgccgccccgcacttccgcccgagggccgtgcgggccgctatccgggcgcaggcgtccgccgtcgaggcgcccgccacggccaaggcgaagaaggagtccaagaagcaggaggagggcgtcgtcaccaacctatacaagcccaaggagccgtacgtcggcaggtgcctcctcaacaccaagatcaccggcgacgacgcgccgggggagacgtggcacatggtcttcagcaccgaaggcaagatcccgtacagagaaggccagtccatcggcgtcatcgt

SEQ ID NO: 260035 - DNA, 588 bp, Zea mays
caaggtctcaaactctcaaataattgatgaaatgaactaattaattaatgaactgaatctatatccaacatgatatacatagtacaccgggctcgcgtggctgttcctgggcgtcccgaccagcgacaccctgctgtacaaggaggagctggagaagatgaaggagatggcgccggacaacttccggctggacttcgcggtgagccgagagcagacgaacgcggccggggagaagatgtacatgcagacgcgcatggcggagtacaaggaggagctgtgggagctgctcaagaaggacaacacctacgtctacatgtgcgggctcaagggcatggagaagggtatcgacgacattatggtgtcactggctgaaaaagacggaatcgactggttcgactacaagaagcagctgaagaggggagatcaatggaatgtggaggtctactaaccgctgaattttgcagctgacatgttgtgttgtgcctatctgtaagtgaggccagggtgtactgcgtatataatgtagatagtgagtgtgttctgagtttttttttactattgccgtctctgtttatagattggtataag

SEQ ID NO: 260036 - DNA, 494 bp, Zea mays
taccggtgctcggaattcccgggtcgagccactcgtccgcacaaactggaatttgcacgtccattgccatagctggtgttgctaggtactcttacatgaaggctaggattgaagaggagaaaaggaaaaagagcgcatgactgctgtgaataatattatcgggaccttcctcggacacaacatcgtcgacaatcacgacctacttctataccttgttttgttttcatcttgagtcagtcggtccattgtttgttcccagtctggtgattaaaagtctgcaaattctgtttgtggaattggcagcgatacaaatttggcttctttaagtaaatccggttgccggtacacagcggtattaattcacctgtaactgaatggaataccgtgatgcaaagggcacaacactctgcctgactaaaataaaagtgtgaaggttcaaaaaaaaaaaaaataaaaagggcggccgctcgcgatctagaactagccacgcgtcc

SEQ ID NO: 260037 - DNA, 627 bp, Zea mays
accgtacatgcacgcacgaatcctcccatcgctcacttgccggggatacacttttttttctgaagagcacaacataatgttatgtacatattattcaaatgttgtcgattaaaaagcgtatacagctggtgataacgttgctacatccaaatagcgtgtagcatgcctagcaagccaaacatattaccttacagcaagcatcccattgccgcttcacacatctttgctgccttccccacgcgtccgcccacgcgtccgcccacgcgtccgagcaccaacgtgtatgcttacaggtcaataatcgctctaattgtttgcattccacctgcattgatctttgaagggcccaagctaatgcagcatggatttagtgatgccattgcaaaagtaggtttgacaaagtttgtcagtgacctattcttggttggactgttctaccatctgtataaccagattgctacaaacaccttggagcgagtggctcctctgacacatgctgtcggcaatgtgttgaaacgtgtttttgtcatcggtttctcaatcattgtttttggcaacaaaattagcacacaaactggaattggcacgtgcattgccatagctggtgttgctatgtactcttacatt

SEQ ID NO: 260038 - DNA, 515 bp, Zea mays
  unsure (1)..(515): unsure at all n locations
atcttgtcatataatgaagagcctgtgaataaagaggctgacgacatcagctcaatgtggcaaggtgatgacatgtagggattgatgcgcccgtgagcacggtaggtgcggcgcctctgcgtctgggcgtgagtcacctggatgtgtgaaacatagagctgatcttgtcagagaaggaagatcctgtgaagaaagaggctgacaacattgtcgcagcaaggaagcagtgaagtatatcagcatgctgatcagggccattttgtcgaagtataaaagccgtagctctttttagtaccttttcagaaagccttgcctctcaaaacgtttccggcaccaatgttttaaatctggataatctatgttctgtactgaaaatctgtgttggactgtaagttcagctcgtaatacaatagctcttaagatatctgggcccttaatctgcatggcctngaaaaaaataaaaaaaaaataataaaaaagaaataaaaaaaaaaaaaaaaaaaagggcggccgca

SEQ ID NO: 260039 - DNA, 924 bp, Zea mays
gcacgcgcgcgaaacgagccagcagctagctagcgatggctggagcctgggcactgctcatcgtcctcgcggctgccgtcgcggtcctggccgcgcggccggcgtctgcaggcgggggagccgcggcggtggcggagatctgcatgaagactccgtcccccgacctgtgcaccaggacggcggggaagcacgccaacaagtacaaggtggtggacgcggtgacggtgctagagatgcaggtggacgcgttcaagaagcgcgtgaaggcggcgcggaggctcgccaaggaggaggtcaagacggccgcgacgcccgaggcgcggagggcgctgaacctctgcaagacctactacctggacgccgccgacaacctcggcgcctgcaagcgcgccatcggcttccgcgacgccgtcaccatccgcgccacgatgagcatggtggcgcaggacacgcagaactgcgacgaggagttcaggaaggccgtctccaagaaccccatggaggaccacaacaggtcgctcatcgagatgtccgagatctgccgcacgctctccaacatgatcccttacgaacatgtccattgatttgtttgtttctttttcccgaccccctactacgttcggtaacgtcgtcgtcgtcgtcgtcgtcgtcggccggcctaaaacatatgtaatttgatgctggtcgcgtgtgtctgtcagtcgatagactggacgcatgccgacttcatgcggacctagcgcgtgtgcttcttttcggtgttgcctcatgcggcgtggcacatgtcttgagaccgtgggatggaacggctcgttgagaggcacgcgtgtagggcagcctatatatatgattctataacatgctaaatttgtgcttctttattactatatatatagccattcatcattcaattcactaggaaca

SEQ ID NO: 260040 - DNA, 1318 bp, Zea mays
cggacgcgtttgcgggccggctgcatctttctcctcccaccagtattatcacctcctccacctcctcctctttatccatctgccagggcgcacgaggagaacggcggcgtctgagatcgcgaggccgaggcttgtcccgtctccgctccgctccgcccacccacggtttctggaggacaattctttgctatctagccttcctcaaaagtaaaaagggtaaatgggatcagaaggaccttcagttgtcactgtccatgttactggatttaagaagttccatggggttgctgagaacccaactgagaaaattgtgaccaatcttaaatctttcttggaaaagcgagggttgccaaaaaatcttgtcctcggaagctgcacagttctcgaaacagcaggggaaggggcacttgccacattatataaggttttagagtctgctgttgcagacagaggaactgggtcctcggcacagggacaagtaatttggatccactttggggtcaacagtggcgcaataaggtttgcccttgagaaccaagctgttaatgaggctaccttccggtgtccagatgagctaggatggaaaccacagagggtccctattgtgccctctgatggaagcatctcacggacgagagagactaccctgccagtcaatgaattaaccaagtcactccggaagataggctacgacgtggtgccctccggcgacgccggtcggcttgtatgcaactacgtgtactaccactctcttcggttcgcggagcaacacggcatcaaatccctgttcgtgcatgttcccctcttcttgacgatcgacgaggaggtccagatgcacttcgtcgcttccctccttgaagtcatcgctttctcatccaactaggaacagcagttggaagatcagcgtctggattcctatctcaaggatggatgtaaagctggaatgctgcatgtaggctgaataaggtggtgtggtcattggcgatagatgttaatcttgctccacaggttgtgtttgggaatcgggagggaaaaaaagagaggtcattggcgatagatgatgatcttgctccagagggtgtgtttgggaattgggaggggggaaaaagaggaaattgctgcatagagtcagacggtgtatcagcttgtacgccatcaatcaagtgctgtaaacatgcctgggaaataattggggacctggatttgaataagatttgagttgttgggcgccgacgtgctacattaggccttgttcggttattcctaatacccttcggtgcaataaaggaaatcatcttgcgcgtgaccgagcgtgcac

SEQ ID NO: 260041 - DNA, 748 bp, Zea mays
gtctcgttcgagaaaaccctcgaactttggcccccatcattaacagaccgggtataacttcccactctgcaacggctcagtcggagggttgcacacaggacattgatgcctgagagcgagcggagcacagcgaggggatttttttgggtgtggaaccaggggtcgaatccctgatctggtgaaagggacaacgccgccttcaccactgggctatcaacccaactgcaggttgttggtcatgttactgaggcatccctcttcctatttgaagataaataacttcggggaagcattgtttgacattagttatcttttctgcaagcagaccacatcatttgacacaatttatgttgcttcagatattttaagaatcttgtttctcttgaagtctgtggtgggttcgttactgatgctggagtgaagaacatcaaggatctgaaggccctgacgttgctgaatctttctcaaaatgctaatctgacagacaaaaccttggagctgatctctggcctgactgctttgatcaacttgaacgtgtcaaactcacgggtgtccaatgctggcctcaaacacctgaatgacctgcacaacctgcgttcactgtctctagattccacccgggtgacggcaaacgagatgaggaagcttcgagcaacagcctgctcgaacctaatgattatttacagcaggtgccaaatgggtactactctggccgcatgctgatccgattaggcagcactggccgcgt

SEQ ID NO: 260042 - DNA, 1095 bp, Zea mays
gaagctcactcacttgaacctagagggctgcccagtgactgctgcttgtttggaagctatttcaggattgacttcattggtattgttgaacttgaaccgttgtggtatatacgatgatggctgtgaaaactttgaaggtcttaaaaggttgaaggttttaaacttggggtttaactatattacagatgcttgtttggtgcatctgaaagaattaatcagtttggagtctttgaacttggattcgtgcaagattggagatgatggtctatcacatctgaaaggtcttgtgctactgcaaagcttggagctttctgatactgaagttggaaacaatggactccagcatctatctggtcttcgtaatctgcaaagtattaatctctcatttactttggtcacggacattggtgtgaagaagatctctgtgttgaattcgctgaagtcagttaaccttgacaatcgccaaattactgatgttggcctggcagcacttataagtctcactaggctgactcatcttgacctttttggagcttgcataactgacaatggcacaaattgcttcagatattttaagaatcttgtttctcttgaagtctgtggtgggttcgttactgatgctggagtgaagaacatcaaggatctgaaggccctgacgttgctgaatctttctcaaaatgctaatctgacagacaaaaccttggagctgatctctggcctgactgctttgatcaacttgaacgtgtcaaactcacgggtgtccaatgctggtctcaaacacctgaatgacctgcacaacctgcgttcactgtctctagattccacccgggtgacggcaaacgagatgaggaagcttcgagcaacagtgctgcataatctgatcagcatgcggccagagtagtacccatttggcacctgctgtaaataatcattaggttcgagcaggttgttctgttggtaagtactgccttcgctctcgagtatttgtcgtccgctagttcatttttgaactagaccgcgataaataaaaaagaacggagggaatatcttgtaagaacctgaattgaaggcaggcatataattatataagttaac

SEQ ID NO: 260043 - DNA, 435 bp, Zea mays
gtatatattgcaaaggtacactgtcttatcaagaaaagatgttccgtttgaaagaattgataagagcttcagggggaaggttggagttactaaatcatacagacagaaaatgttgttaacgaaaactatgaaagtagttcgccaggcgtgtatgtcaaaagcagggtacgataaggcgatggatgtgttggatgagctcgatgtcgttctaagccgattggagccagatattggatgtaatgagtcaacagatgttagtgataatgaggaagacaaggaagaagagttgaataaaattaatgctggcgatgggatggaagatgacaatacaattacatgtcataataaggattcgcataacaccaggtctggatgtgaacatgcattaacaataataacaactggtaaccaagaagacaacatgggattttcaca

SEQ ID NO: 260044 - DNA, 859 bp, Zea mays
agcgccttcgccaccggcggctacgcgtgtcatccaacgcgtgacgcagtggaaccttgacttcactaaacacagcgagcagggtgacaggtaccgtgaattggcacatcgggttgatgatgcccttggattcatgggtgcagctgggctgacagtggaccagcctttgacgacgatgatcgagtttctggacctcacatgagtgcctcctcctaccttacgagcaagccttaacccggcaagactccaccaccggtcttttctacgactgctccgcccacatgctctgggtcggcgagcgcacccggcagcttgatggcgcccatgtggagttcctgagggggatcgccaacccccttggcatcaaggtgagcgacaagatggagcccggcgagctggtgaagctgatcgacatactgaacccgacgaacaagcccgggaggatcaccgtcatcacaaggatgggggcagagaacatcagggtcaagttacctcaccttatccgcgcggtccgccaggctggacagagtgtcacctggatcactgacccgatgcacgggaacaccatcaagactccttgcggacgaaagactcggccatttgactccattctggccgaggtacggtccttcttcgacgtgcacgaccaagacggaagccagcctggaggtgtccaccttgagatgaccggtcagaacgtgaccgaatgcacgggcgggtcaagcaacgtcaccttcgacaacctgagagaccgctaccacacgcatggcgaccccaggctgaacgcgtccaagtccctgaagctcgccttcatcctcgccgagaagctgaggaaccgaaggatccgccggtcgtcgtt

SEQ ID NO: 260045 - DNA, 527 bp, Zea mays
ggaccccacaaggccacaaacacaaaaactacacttcggtgtccctatatgaatatgatccgcatacccccattccccgaaggccgagctcatccaatccagtcgcctgattgcattgggatcccatggccaagctcgccgtcctcctcctcctcgccgtggccgcgtccgccacagtgccggcgcacggccgcgataccccgactgagatcaagctcatcaaaggcacggacgcctccggcgtgggcgacgacagcatggagtgcgtgtacacggtgttcatccggacggggtcgatcttgaaggccgggacggacgcgaacgtcacgctggagctggccgccgcggacggcaacggcgtggggatctcgaacctgcccgcctggggcgggctcatggggcagggctactcctacttcgagcgcagcaacctggacatcttcagcggccgcgggccctgcatggagaaggcgccatgctggatgcggctggccaccgacggcaccggcgaccaccacgggtggtac

SEQ ID NO: 260046 - DNA, 1618 bp, Zea mays
cccccgcgccccgcagctcgcaccaacccgccgccggctactaactgccactccgcctcctcatggcctcccctacggcaggtgatgctcccctcgcgtctccttctccatctccagcggctgacgcgacggacgcagcccttgccgccgcggccacggtgccggatccagacatatctttcgggtttcgcccggagctcgggaaggagaagctggtcgggacggtgggattccacgagcgccacgtgttcctctgttacaagggcccggaggtgtggccgtcccacgtcgaggccgtatactctgaccgactccctcgcctcctcgccgccgccatcaaggcccgcaagcccaatctgaagaagaccatcaaattcaccatctgtgaaggagaagatggcactgaatcatcaaatggagatgtgttgatctttccagatatgatcagatataaagggctgacccattttgacgtggacaactttgttgaagaagtgcttgtgaaggatattgactggcttcctggatctcctgagcctatgagcggttcctatatttttgtttgctcccatggaagcagggacaaaaggtgtggtgtttgtggacctgctttgattaaaaggttcaaggaagagataaatgaactgggacttgatgatcaggtggctgtcagtgcatgctcacacgtgggaggtcataagtatgcaggaaatgtcatcattttcagttctgatgccaagggagaagtgacgggtcattggtatggttatgttgtccccgacgatgtgcctgttttgctgcataaacatattggacaaggagaagttgtggaccatctatggaggggacagatgggtttatctgtggagcagcagaagcgagctctcgagcttcggaacatggtaaatggtggcgaagaatcccttgaagaaaccagaacagatggtgcttctttcaaccctgcagcagctggtggatgctgccaaggcaatggtggcttcacctgctgccaaactgacctgccaaaggaaaaacaagacaagagcatcatagctgagcagaaccccaagagctctgacaaggagggtggtgctggcagcaagaagggggatacaaagacttgcccagtgcccatctggtttgagacctgggagagagctgacacatatgccgctcttgctgttgttgcagctgccgcagcggtgcttgtctccttcagaatctacaagaacctcaactgaagaacatgggagatcctggaagaggtgaccaaaacaagtataggtgaaacagcgtactgtgataaaagtctgggatgagaataaatttacctgtgcataatgctaggcttaggctatggctagcaaatcgttgtgcaaaatattgttgtgcattgtttacaaagtgatgtttgaaatagaagataacggcgatgaacaagccgttggagataaccttagaacctcaaagtagcttatctggagatggagacggtgttgaaaagatgttgctgccagtgttctcgtatgtgaactccttgtgaacctccactccactgcaatcgaagtttcgatgccttagctgctgtttatcataagcaaggcgatgggatcggcat

SEQ ID NO: 260047 - DNA, 741 bp, Zea mays
tcagatataaagggctgacccattttgacgtggacaactttgttgaagaagtgcttgtgaaggatattgactggcttcctagatctcctgagcctatgagtggttcctatatttttgtttgctcccatggaagcagggacaaaaggtggctgtcagtgcatgctcacacgtgggaggtcataagtatgcaggaaacgtcatcattttcagttctgatgccaagggagaagtgactggtcattggtatggttatgttgtccccgacgatgtgcctgttttgctgcataaacatattggacaaggagaagttgtggaccgtctatggaggggacagatgggtttatctgaggagcagcagaagcaagctctcgagcttcggagcatgacaaatggtggcaaagaatcccttgaagaaaccgaaacagacggtgcttcttgtaaccctgcagcaactgctggatgctgccaaggcaatggtggcttcactcgagcttcggagcagcagaagcaagctctcgagcttcggagcatgacaaatggtggcaaagaatcccttgaagaaaccgaaacagacggtggtgcttgtaaccctgcagcaactggtggatgctgccaaggcaatggtggcttcacttgctgccatcctgacctgccaaaggaaaaacgggacaagagcatcgcaattgagcagaaccctaagagctgtgaggagaatggcaaggagggtggtgctggcagcaa

SEQ ID NO: 260048 - DNA, 879 bp, Zea mays
gccattcaagatgttgtttccttgctccggtgcacaaggcagagcctaggagtcatggcatcaagcagaggggcactcattgggcgccttgtgttgcatgaaccggacggggagcagattgactgctccattcttggagcttcagggcatgcaattacgggggacctgaacctgttgagcaaattaaatttgtcttcgggctctcggtacatcattgtggtggagaaggatgccgtatttcagaggctggctgaagaccgcctgtataatcagctcccttgtattctgatcactgcaaaaggatatcctgatattgccacatggttcatcttgcatcgactgagccagacatttccgaatatgccgattttcgcattagtggattggaacccagcagggcttgctatactgtgcacttacaaatacggaagcatatcaatgggcctagagtcatacagatatgcttgcaacgtgaaatggctcggggtgagaggaggtgatctgcatcttatccccgaggacgcgtttcaagagctgaagccacgtgatctgcagattgccaaaggcttgatgtcgtcaaagttcctgcaggagagtcacagagctgagctggcgctgatggtggagaggggcaagcgtgcacacatcgaagccctctactcccacgggttcggtttcttggggaagtacatcgcgagaaagatcgtgcagggcgattacatctgacgattggccgctggaatgttagcatggttgcacggaacaatgagctgcatggactgtagtacagtagctatatatgtccaaccgcctgtagactgaaacgatggtctgtatgggaatgtacataaatacaacaagagtagtctaatatcgatc

SEQ ID NO: 260049 - DNA, 1149 bp, Zea mays
gctctcttcggagtagtatgctgcgtccgatatagggtacctggaagtgtacgtacgtctgtcatgcgttatccagaactttgggctcagaatgcagcaagcgtttgtgtcaggctcgctgttcggaatcgttcccgaggaagcagccaaatcacgggatatctcgtccaacaccatctccagcccgttcacccttgtctccaaggaacgtatcccattctgggagctccccatgaatttctggagaagattaagcaaactggcttgctgattctcattctgaacgagcctgcatcctgatcttcgacaggtcctcatctttgtgagctgactgaaattcttcgggcgcgtcctcagtctcagccgtctcttccgagtcaccatccccttccccgctgtatggaacaactctggatcctgacttgggaccagccaccttcttgtaacctttgtcaccagtcttctgaaacagcacccgccgcgcttcaagcctctccctaacattgccttctttcagcagcttctcctcagccaccattttgattggcgttgcatctggagccgtagtaacaacaatcttgtcctcagatttcttgaattggtctgtgctgcggcgtgaaggaggcagatttttcttagccacgatggaaggagggctgccttttctgttgatggcattgttcgatccatccggttggggctgcctgttagtcggccatgagttcctccttgtaattgaagggctagaggtggagcccgaggaatcagccgggtatcggccatcacttgcagtatctgtgagagaagatctagactgggacgatggtaaggagcagacctcctcatccaaatccgggatctccttccatgcttcgatcaaccggttcatggactcgcgcactattttcaccttatcaaatctcttggcttcgaagacggtaatgcaggaagatttgtgtgagacgaggtcgtctccgtgctcgagggccaacaaagcgagcgcctcggcggcagccttcctggcggcccaatcgtcggcagtgagcgcgtcgcggaggcaaggcacggcggcggaggcggctccaccgccggaggctgccgaggcagcgccgatgagggagatgagcgcgggcttggccttgaacgccg

SEQ ID NO: 260050 - DNA, 1373 bp, Zea mays
cccactcgtccgcgggcgcacgcagcagcaagctctgaccctgaaagctgaaaccgctccacgccctccccctccgcgcagagccagccaagccaaccagccagtcagaagaggaaccggggagcggcagctgcagcggccgagggcggagcacgcgaggcatggatagataccaaagggtagagaagcctcggaatgacacgccaatcagccagaatgagatcagaatcactactcaggggaggatgaggaactatatcagctatgggatgtcgctgcttgaggaaaatggacatgatgagattagtatcaaggccatgggacgggccataaataagacagttatggttgttgaattgatcaagagaagggttggaggtcttcatcagaacactgctactgaatctgttgatatcacagacacatgggaacctttggaagaaggccttctcccactagagacaactcgccatgtgtcgatgatcactgtgacactgtcaaagaaccctctggatacatcatctccaggataccagccacctatcccagctgaagaggtgaaacctgcttttgactatgatcatgaagaatcgtatcccactggtcgtggaagaggacgtggtggtggcagaagaggcaggggaagaggcatgagcaatggcccccctccacctgcttatggttacaacgaagagtgggaggaggaaggagattattataacagagggcgcgggagagggcggctacgtggacgaggtgggagagggcgtggtggctactacggaggtgggaggcgtggtggctacggttatgattatggctatgcccccagaggcgggtactatgaagagcaagacgaatactatgatgagcccgaggaatatgctcctccccctggccgcggacgtggcagagggagaaggggcggcatgccttggcgtgggcgtggaggccgcgggccaccgcgcggtggccgagggagctactactaggcgcgagaaatgcgacgtgccgaatgcgtgtgcttattagttatctgttagcgtttgctgcagtgctcttctatggagctccgaccccggactggaattatctcgtaggcccttccaggtgctactctacttcagctgctgtccctgtgcaactcgtccgggcaagttttgtggctcgctcgtggttttgtagctaggttaagcgagtgaagttacactcggtagcgcagtatttcctgcgagattgtttattcttctgttaatgtacctaccttactatttcgtttggattatggatactgggtgcatccgtttcatgtttaaacaaaaaaaaaaaaaaaccccccaaagaaaaaaaaaaaaagaaaaaaaaaaaaggaa

SEQ ID NO: 260051 - DNA, 849 bp, Zea mays
cggaccggccggaattcttggcgacccacgcgtcagttacgcgtccggtcgatgatcactgggactttttcttttaaccctctggatacatcatccccaggataccagccacctatcccagctgaagaggtgaaacctgcttttgactatgatcatgaagaatcgtatcccactggtcgtggaagaggacgtggtggtggcagaagaggcaggggaagaggcatgagcaatggcccccctccacctgcttatggttacaacgaagagtgggaggaggaaggagattattataacagagggcgtgggagagggcggctacgtggacgaggagggagagggcgtggtggctactacggaggtgggaggcgtggtggctacggttatgattatggctatggccccagaggcgggtactatgaagagcaagacgaatactatgatgagcccgaggaatatgcccctcccccccgccgcgggcgtggcagagggagaagggggcggatgccttggcgtggccgtggagtctactactagacgagagatgcgatgcggtgcgacatgccaaatgggtgtgctgaagctagcaatggcgtgcttggttggttatctgttctatggagttccgacccaggactagaattacccagcagggtccttccaggtgctgtgcctgtgcaactcgtctgggcaagttttgtggctcgctcgtggttttgtagctaggttaagcgagtgaagtttaatcactcggtagcagtgttttcccccttcggacggcatgcatgttgttctattttgctgctaatctacctaccttccaattttgtatggatggtgatggatactgga

SEQ ID NO: 260052 - DNA, 478 bp, Zea mays
  unsure (1)..(478): unsure at all n locations
nnnnaactgaaaccggtccacgcccttctttttcgcgcagagccagccaagccaaccagccagtcagaagaggaaccggggagcggcagctgcagcggccgagggcggagcacgcgaggttcaagattatccggtttaaagacatcagaagaggctgcggcatggatagataccaaagggtagagaagcctcggaatgacacgccaatcagccagaatgagatcagaatcactactcaggggaggatgaggaactatatcagctatgggatgtcgctgcttgaggaaaatggacatgatgagattagtatcaaggccatgggacgggccataaataagacagttatggttgttgaattgatcaagagaagggttggaggtcttcatcagaacactgctactgaatctgttgatatcacagacacatgggaacctttggaagaaggccttctcccactagagacaactcggcatgtgtc

SEQ ID NO: 260053 - DNA, 486 bp, Zea mays
aaattatttaagaaataataatgctgatgccatgtgcatgtgttgtttcttcgccttgttcattgttcttctgaaactttgcacctgcttcattctagcattcacaatatatataattgtcaaatggtagctttacttcattctagcaatcttaccacaattgaagtgatacaggttccaactttttcttattaagaacttattcacttccacttttacaggaaaatggacatgatgagattagtatcaaggccatgggacgggccataaataagacagttatggttgttgaattgatcaagagaagggttggaggtcttcatcagaacactgctactgaatctgttgatatcacagacacatgggaacctttggaagaaggccttctcccactagagacaactcgccatgtgtcgatgatcactgtgacactgtcaaagaaccctctggatacatcatctccaggataccagccacctatcccag

SEQ ID NO: 260054 - DNA, 747 bp, Zea mays
acggacgcgtgggcggacgcgtgggctaatctcaggtttggggggaaaaggcctcgcgggtcgcaaaccgctctctgttgatttgggatttgggaggcgctcgagttttcaggtaaaccatagtttagtgacccatggctcgtactaagcaaactgctcgcaagtccactggagggaaggctcctaggaagcaacttgccaccaaggctgcccgtaagtctgcacccacaactgggggagtaaagaagcctcatcgttaccgccctggaactgttgctcttcgtgaaatccgcaagtatcagaagagcactgagctgctgatcaggaagctgcccttccagaggctcgtcagggaaattgcacaggacttcaagactgatttgcgtttccagagccatgcggtgcttgccctccaggaggctgctgaggcataccttgttggcctgtttgaggacaccaacctgtgcgccatccatgctaagcgcgtgaccatcatgcccaaggacattcagctggctaggaggatccgtggtgaaagggcctagattctctgtttactgctactgggagtggctccgtagtatggtttgcatctgttcgatgcttgctttttgtggaagtttacatttgtgggtgttcgaattcgtaatattcatccgtagtggacgagtggtaggaagtgctccaatctgcctatggtttaaaatttaaaattgttgtcaattagtgttggtgttggtttccccc

SEQ ID NO: 260055 - DNA, 850 bp, Zea mays
  unsure (1)..(850): unsure at all n locations
gntgtaaatcacgagcggcttcccttttttttttttttcgcggatcccattcctcgcgcggcgaccacccgattcgaagcgtgcggagagaccgaagaagcgggagagatggctcgtaccaagcagactgctcgcaagtccacgggagggaaggctcccaggaagcagcttgccaccaaggctgcccgtaagtctgcccccaccactggtggagtgaagaagcctcaccgctaccgccctggaactgttgccctccgtgagatccgcaagtatcagaagagcactgagctgctgatcaggaagctgcccttccagaggctcgtcagggaaattgcacaggacttcaaaactgatttgcgtttccagagccatgcggtgcttgccctccaggaggctgctgaggcataccttgttggcctgtttgaggacaccaacctgtgcgccatccatgctaagcgtgtgaccatcatgccaaaggacattcagctggcaaggaggatccgcggcgagagggcctaatcgccacctcaaacatcgtgacaaaaacatgaagtcctggggttattgttaatctggtgccattgtaaggacatatgagtagggtttgttttgtggatcgcaagtttctcttctgctactgttgctgctacctttgctggtgttattgctagggtcgaatacttaagttaactatgcgctgacagtctggactagcagtgttatgtgcgctgctggaccttgcgcgcaatgctgtggccgatttgttcgttaatgtcaagaattgtgttacagtgcgtgtataaaagaatgacgacgcatttttatttttgagaattgttttaagctgaaa

SEQ ID NO: 260056 - DNA, 1765 bp, Zea mays
  unsure (1)..(1765): unsure at all n locations
gnggaattctttagcccctcttcctcttctttttctttccttccgcatgtctttggactcgctgctgttcttttgcttggtacccttggatctctgactccagcccgttccccgaaatttccagttcttgcttcttcctcttggaggaggagggctgcagcctgcaggggccggagagagcaggaggaggcggagacatgggtagcttcgctaagctggcgaggagggcggtggagacggacgctccggtcatggtgaagatacaagaactgctccgaggggccaaggatgtgatgtcgcttgcgcagggagttgtttactggcaacctcccgagtcagctatggataagatcgaaaagatcatcagggaaccaatagtcagtaaatatggttctgatgatgggcttcctgagcttcgagaagcacttctcgaaaagctaagcagagagaacaagcttaccaaatcatcagtcatggtcactgctggtgcaaatcaagcttttgtgaacttggtcctcactctttgcgatgctggtgattccgttgtcatgtttgcaccgtattatttcaatgcctacatgtcattccagatgacaggtgttactgacatattagttggtggctgcgatcccaagacacttcatcctgatgttgattggttggagaaggttctgaaagaaaatgagcctatccctaaacttgtcactgttgtgaatccggggaacccctctggagcttttattccaaggcctatgcttgagaggatttcagatctgtgcaaaaatgctggtgcatggcttgtggttgacaatacctatgagtactttatgtatgaaggaatggagcactactgcttagaagatgctcatattgtcaacctcttctcgttctcaaaggcttatggaatgatggggtggcgtgtaggatacattgcatttccaaatgaagctgatggcttccatgatcagctcctcaaggtgcaagacaacataccgatctgcgcctccatcatcgggcagcgcctggcgctctactcgctggaggccggccccgagtggatcaaagaacgggtgaaagacctggtgaaaaaccgggcgctgctcgtggaggcgctgtccccgctcggcgaggacaacgtcaagggcggggagggcgccatctacctctgggcaaagctaccggacagctgctcggacgacttcgaggctgtcaggtggctcgcgaacaggcacggcgtcgccgtgatccccggcagcgccagcggaggccccgggcacatccgcgtctccttcggagggctcaaggaggaagacaccaggctggccgctgagaggctacggcgcggcttgcaggaactggtcgctgatggaacggtacagtaacggctccattggtgtaggtaaaaagcacagcattgtagttttacacaacgactccgatttttcaatggcataactccggcgggattgattcgggagaaaaaaaggaacttgttttcaagaatgccctgcgttgctcggaccaaaaacgggacggaataaaatgcgtctggtctgcaaagtcccctatgttatgaatcatatgtagggcctatgtcctgagtgccacagtgagtaattgtttctgttcgacttcccgttttacatattactgatcgatggcagcccctgttccccgtccaaggtatacccgtattagcaagaaccgtgagctgttcttttaaaacaaccaaaaaaaaaaaaaaaaaaaaaaaaaaaaaacaaaa

SEQ ID NO: 260057 - DNA, 814 bp, Zea mays
ctagttagtcatacatgaaccgtctgctgcagatcgcatttccaaacgaatcgatggcttccacgaccagctcctcaaagtgcaggacaacatacccatctgcgcctccatcatcgggcagcgcctggcgctctactcgctggaggccggccccgagtggatcaaagaaagggtgagagacctggtgaaaaaccgcgcgctgctcgtggacgcgctgtccccgctcggcgacggcaacgtcaagggcggggagggcgccatctacctctgggcaaagctaccggacagctgctcggacgacttcgaggctgtcaggtggctcgcgaacaagcacggcgtcgccgtgatccccgggagcgccagcggaggacccgggtacatccgcgtctccttcggagggctcaaggaagaagacaccaggctggctgctgagaggctcaggcgcggcctgcaggagctggtgaccgatggaatggtacagtgacggctccatgggtgtaagtaaaagctccaattttccaacggtgtaattccgccgtgattaattcgggagaagaaaaggaacttgttttcaagaatgcactgcgttgctcggacgaaagacgggacggaataaaatgcgtctggtctgcagagtcacctatgttatgaatcatatgtagtgcatatgtcatgagtgagtaattggtaattgtttctgttcgacttccagttctacatattactgatcgatggcagcacctgttcccagtcaaagggataagcaaaaaccgtgagccctccttgaaaaaaaaaaaaaaaaaaaaagtggatt

SEQ ID NO: 260058 - DNA, 433 bp, Zea mays
gtttttctctgtcttcatgtgtgtttgttatagagaccctgccttgtcggggcagcacacttgggacgcgagggggaggagttggtgagcgaactcgggatcagtgggtgaccgcagagttcttgcttcttcctcttggaggaggagggctgcagcctgcaggggccggagagagcaggaggaggcggagacatgggtagcttcgctaagctggcgaggagggcggtggagacggacgctccggtcatggtgaagatacaagaactgctccgaggggccaaggatgtgatgtcgcttgcgcagggagttgtttactggcaacctcccgagtcagctatggataagatcgaaaagatcatcagggaaccaatagtcagtaaatatggttctgatgatgggcttcctgagcttcgagaagcacttctcgaaaagc

SEQ ID NO: 260059 - DNA, 517 bp, Zea mays
aagagatagaaaaagagtaaacagtccccctcgaacctttcagtttttccctgtctgtcttcacttcatgtgtctgggtttagagaccttgccttgttggggcaggggacttgggacgacagagaggggagggcggagttggtgagcgagcacgggatcagctggtgacctcagaggctgtttgcctcggggggcgggggaattctttagcaccccatcttccacatgtctttcgactggctgctgctctttcggttggtaatatccttggatctctgactctagaccgttccacgaaatctccagtcctttcttcctcttggaggaggagggctgcggcttgagcaggagacgggagacatgggtagcttcgttaagctcgcgaggagggcggtggagacggacgcgccggtcatggtcaagatacaagaactgcttccaggggccaacgatgtcatgtcgcttgcgcacggagttgtttactggcaacctgctgattcaccaatggctaacgtcg

SEQ ID NO: 260060 - DNA, 825 bp, Zea mays
tcggtcgcgtgggttcggctgcgcggcggcggcagcagcggaggaggttgaggagatgctgtccggcgacatccccccgagccagaccatctacctcaacaacctcaacgagaaggtcaagaaagaagtatggaaggatactggatgtggtggccctgaaaacacaaaaactgagagggcaagcatgggtggcgtttagcgaaattacagctgctaccaatgctttccgtggtttgcaagatttcgatttctacagcaaaaaaatgcgagtacaatatgcaaaaacaaaatcagactgtattgcaaaagaagatggtacttatgcacctaaggagaaaaggaagaagcaagaggagaaagctgctgagaaaaaacgacgaacagaagaggcacaacaagctggcctcaatgctgctgctgcccaaagcaatggaactggctatcaagcgtctcgtctgggcaaggcttcacaggagccacctgcgcctccgaacaacatcctcttcatccagaacctgccagaccagaccacgagcatgatgctccagatcctgttccagcagtaccctggcttccgggaagtacggatgatcgaagctaaaccaggcatcgcttttgtggagttcgaggacgacggccagtccatggtcgcgatgcaggctctccaaggcttcaagatcaccccggagaaccccatggctatatcctatgccaaaaaatgagaaccctaggggactccctgtaccggctttgttattgacacaatccaatgtggattatgacttaaattagtttaagttgcactctaatccacctcaataatag

SEQ ID NO: 260061 - DNA, 598 bp, Zea mays
ttctctacccgtatcctatacccgatgtggggtacccgaccctgtgttcacccatactcatagacaaaggaaaaaaccaacacactctcgcttgcggcaggaattttccggcccgaaaccgaaagcacccgcaccaatctctgcgtctcttcgtcttcggctgcgcggcggcggcagcagcggaggaggttgaggagatgctgtccggcgacatccccccgagccagaccatctacctcaacaacctcaacgagaaggtcaagaaagaagaattgaagagatcgctttatgccttgtgctcacagtatggaaggatactggatgtggtggccctgaaaacacaaaaactgagagggcaagcatgggtggcgtttagcgaaattacagctgctaccaatgctttccgtggattgcaagattttgatttctacggcaaaaaaatgcgagtacaatatgcaaaaacaaaatcagactgtattgcaaaagaagatggtacttatgcacctaaggagaaaaggaagaagcaagaggagaaagctgctgagaaaaaacgacgaacagaagagggacaacaagctggcctcaatgcttgttgctg

SEQ ID NO: 260062 - DNA, 428 bp, Zea mays
aaaagaacccaacacgctctctcgcgcggcaagagcttcccggcccgaaaccgaaagcaccaccaccaccaccaccaccaatctctgcgttttccgtctgcggcggcggcggcagcagcggaggaggtggacgagatgctgtccgccgacatccccccaaaccagaccatctacctcaacaacctcaacgagaaggtcaagaaagaagagttgaagagatcgctttatgccctgtgctcgcagtatggaaggatactggatgtggtggccctgaaaacacagaaactgagagggcaagcatgggtggtgtttagcgagattacagctgctaccaatgctttccgtggattgcaagactttgatttctacggcaaaaaaatgcgagtacaatatgcaaaaacaaaatcagattgtattgcaaaagaaga

SEQ ID NO: 260063 - DNA, 2361 bp, Zea mays
cgttcatccatcacagtatcacaccatccccactctcttctctccacccggcgagcggacactcccctgtcctcttgacccgatcccgtccccgcccgcccgccccgccgccgcgcgcgctggtccggacgctcgggcgctggtgatccggttgatgcagcagcggggcctcgcccacaactgccgctcccgcggcttctcccgctcccgccgcgcagtcgagggcgcctgaaacgcacccgccccacgcacgcagggcaaccgaaaacccctcgatccggctctcctcgcgctgtagcttttataacgccgtagacgacaacgaaagagaacggaaagaaataaaacccaacacacctaccgtcgtccgtagaggaaggaaggactcgagatggacaccgtcagcgtccccgtggtggccgttgcgaatgggatcggggaggtggagcgcaaggtgcagaagagctactgggaggagcactccaagtgcctcactgtcgagtccatgatgctcgactcccgtgccgccgacctcgacaaggaagagcgacccgagatcctgtctttgcttccctcttacaaagggaaatcagttctagaacttggtgctggaataggacgctttactggagatctggcaaaagaagctgggcacgttctggctctagacttcattgaaagtgtgattaagaagaaccaaagcataaatgggcatcacaagaacataaccttcaggtgtgccgatgtgacatctaacgacttgaagattgaagataactctgttgatctgatattttcaaactggctattaatgtacctttcagatgaggaggtccaaaagcttgtggggaaaatggtaaaatggttaaaggtcggaggccatattttctttagagaatcatgttttcaccaatctggagattccaaaaggaaggtgaacccaacacactatcgagaaccaaggttttataccaaggtatttaaagagggccattcatttgatcaagatggaggttcgtttgaactttctctagtgacctgtaaatgtattggggcttatgtcaaaaacaagaagaatcaaaaccagatatgctggttatgggaaaaggtaaaatcaacagaagacagagattttcaaagattcctggacaacgtgcaatacaaaacaagtgggatattacgttatgagcgtgtctttggtgaaggttttgtgagcactggtggaatcgagactacaaaggaatttgtgggcatgctcgatcttaaaccgggccagaaagtacttgatgtcggatgtggaattggaggcggcgacttttacatggctgcaaactatgatgtccatgttcttggtattgatctttcggtgaacatggtttcatttgcaattgaacgtgccattggacgcaagtgctctgttgaattcgaagttgctgattgcaccacaaaggattacccagaaaatagttttgacgtcatctacagccgtgacaccatccttcacatacaagacaagcctgctctgttcagaagcttcttcaaatggctaaagcccggcggcaaagtcctaatcagcgactactgtaagaatcctggaaaaccatcagaagaatttgctgcgtacattaagcagagaggctatgaccttcacgacgtgaaggcttatggacagatgctgaaggatgctggttttcataatgtcatcgcggaagatcgcactgagcagttcttgaatgttctacagagggagataggtgaagttgaaaagaacaaagacgctttcctggcagacttcacccaggaggactatgacgacattgtgaatggctggaacgcgaagctgaaacggagctctgccggcgagcagaggtgggggttgttcattgccaccaagtgatttggcctggcagcaggagggctcttcggaataagaatggatgtggctctaactctgcttctagaccggtgatggttcagcttagaagcaggggatcttcatcatcagaataaaaacgtgtgttgttgtgttgctgtgtctacgccactagtatttctgttgttacttatgttctaggtaaactgcgcagccagagcagagctgaagaatatgtactgcttgctcgctcttgtgtggttgtgtctacccctactagcatttcagctttgttgtaggtaaactgcgaacccagagttgcagaacccgtactgctcgtttaagttcatggtgaactacgagctaaaaggctgttgccagagtcgatgtcacttgtcactggaggtccccggttcaattcagatgttgctttggcacgtgctattcttttggacggaggcagctagtcgccaagtacttcgttcggg

SEQ ID NO: 260064 - DNA, 701 bp, Zea mays
aaccggggcgacccacgcgttcgcggacgccttggttgcttcgtaccttaagccaattaggctatgaccttcacgacgtgaaggcgtgggtggacagatgctgaaggatgctggttttcataatgtcatcgcggaagatcgcactgagcagttcttgaatgttctacagagggagctaggtgaagttgaaaagaacaaagacgctttcctggcagacttcacccaggaggactatgacgacattgtgaatggctggaacgcgaagctgaaacggagctctgccggcgagcagaggtgggggttgttcattgccaccaagtgatttggcctggcagcaggagggctcttcggaataagaatggatgtggctgtaactctgcttctagaccggtgatggttcagcttagaagcaggggatcttcatcatcagaataaaaacgtgtgctgttgtgttgctgtgtctacgccactagtatttctgttgttaacttatgttctagctttgttgtaggtaaactgcgaacccagagttgcagaacccgtactgctcgtttaagctcgtggtgaactacgagctaaaaggctgttgccagagtcgatgtcagtatgtcacttgtcactggaggtccccggttcagttcagatgttgctttggcaaaaaaaaaaaaaaagaaaggaaaacaaacaaaaaaaaagaaaaa

SEQ ID NO: 260065 - DNA, 1093 bp, Zea mays
ccttggaagtacacttgctgtcatgaagaagtcatccaagttccttccagtcattggctggtcaatgtggtttgcagagtacctctttttggagaggagctgggccaaggatgaaaagacactaaagtggggtctccaaaggttgaaagacttccctagaccattttggctagctcttttcgtcgagggtactcgctttactccagcaaagcttctcgcagctcaggaatatgcggcctcccagggcttaccggctcctagaaatgtacttattccacgtaccaagggatttgtatctgctgtaagtattatgcgagattttgttccagccatttatgatacaactgtaatagttcctaaagattcccctcaaccaacaatgctgcggattttgaaagggcaatcatcagtgatacatgtccgcatgaaacgtcatgcaatgagtgagatgccaaaatcagatgaggacgtttcaaaatggtgtaaagacatttttgtggcaaaggatgccttactggacaaacatttggcaacaggcactttcgatgaggagattagacctatcggccgcccagtgaaatcattgctggtgaccctgttttggtcgtgcctcctgttgtttggtgccatcgagttcttcaagtggacgcagctcctgtcgacgtggaggggtgtggcgttcactgccgcagggatggcgcttgtgacaggggtcatgcacgtcttcatcatgttctcccaggctgagcggtcgagctcagccaaggcggcacggaaccgggtcaagaaggaatgaaaacggagggtggagatgtgattctgggctctatttatgggcagctttcaaaatgactcgattcatattaatgtatacagcaccaaattccagacattgatatgctctgaaacaggatgctctgctcctcttgtatttgtgtgcaggaaagaattttagggagttcatttttgcccccctcttttgggcagaggaactgtaggacatgaacttgatgttggtacatttgccctgtagacattctggaagcctttcagtagttcatttatttatcagtaaagcttgcatctttcttcc

SEQ ID NO: 260066 - DNA, 696 bp, Zea mays
gacgcattcagctcctcgttttttctctctcctctcttcgtccccgcgtggagaaggagagagagaaacaggggagcgcccccccactcctcttcgctgccaagaaaccaccattcctaacggatttctacccagtcttctttaggatttccgattcggttctccggtgagagggtgggaattttattttcctccgctgcaaccggtgcaaacatttcgaatccctccattccattcctctccgtgcaatcggccattcatatgttccttggctgcattgaggcatcggtacgcgaattttgatgtgagctgaccagacatggctgcgaaagacggctcgggatcacaggatctgggggggcacacgttctggcccatgctgtcctacgcttgcggcgagctgtgtgtgatcgtactgctcgacgggtctgccctggcgtcctatgcggccacgaggctggcgcgcgtctgcgggctccggccgccctgcatcctgtgcgggaggctggaccacgccctccacgggaagccatggttctcttcggacttggtctgtgccgcgcatcggtctgagatctcgtctctggctcactgcaagacccatgaccagcttgttgcatgctccggcgatctctctcggcctacgtcggccaggtcaagaaggttgtgttcttgttcggatccactcaagaatgc

SEQ ID NO: 260067 - DNA, 541 bp, Zea mays
cccacgcgtccgcccacgcgtccgcccacgcgtcaagcgtcgccgagccatgacgatgacaatagccgccgtgctctgcctgctcctcttctctggccgtctcgccgcggcggagaagactttccgcggaggcggaggcggaggctacggcgggttggaggccggtggcggaggcggcggcggcggctactccaccccgagcgaggcagcgccatccacgcctgccgctggggagacgacgaccccttcgtcaggcggcggttactccacccctagcgaggcagcgccatccacgcctgccgctgaggagacgacgacgactccttcgtcaggcggcgggggttacggcggtgcaaccggcaaggcttcctcaggcggcggcgggctggaccccgacggcgacccagaggttgggctgaacgggaaggcgatcgaggagatcgtgaacgagcacaacgtgttccgcgccaaggagcacgtgcctccgctggtgtggaacgcgacgcttgccaaggtcttgcaacaataccccgagaacctt

SEQ ID NO: 260068 - DNA, 2172 bp, Zea mays
ccttcttgtccgcggacctccttccctccacccgtgccgtcgcctcgcctatccgatctgccacctcctcccgtctcgcacgttccttcccaactccgcagcgtacctctccgcggcgcgatccagatccaggtttttcagcatgggcctggtgaaggaaggcatcgacatggaggagggaacccttgagatcggcatggagtacaggactgtatctggtgttgctgggcctctggtcatattggataaagtaaagggcccaaagtaccaagaaattgtaaacatccgacttggagatggcaccaatcgccgtggtcaagtcctggaagttgatggcgaaaaagctgttgtgcaggtctttgaaggaacttctggaatagacaacaaatacacaaccgtgcagtttacaggcgaggttttgaaaactcctgtctcacttgatatgcttgggcgcatttttaatggttctggaaaacctattgacaatggccccccgatattacctgaagcctacttggatatctctggaagttctattaaccccagtgagagaacctatccagaggagatgatccaaactgggatatccaccattgatgtcatgaattccattgctcgtggacaaaagattccactgttttctgctgctgggctccctcacaatgaaattgctgctcagatttgtcgtcaggctggtcttgtgaagacattggagaaaggaaagcatgctgagggtggtgaagatgacaactttgctattgtgtttgctgctatgggagtgaacatggaaacagctcaattcttcaaacgtgattttgaagagaatggttccatggagcgggtcaccctttttctgaatctggctaatgatcccaccattgaacgtattatcacccctcggattgctctaacaacagcagaatatttggcatatgaatgtgggaagcatgtacttgttatcttgacagatatgagctcttatgcagatgcacttcgtgaggtttctgcagcccgagaagaggtgccaggtaggcgtggttatcctggatatatgtatactgatttggcaacaatatatgagcgtgctgggcgtattgaaggaagaacaggctccattacccagattcctattctaacaatgcctaacgatgatatcacacacccaactcctgaccttactggatacattactgagggacagatatacattgataggcagctccataacagacagatttatccacctattaatgtcctgccatctctttcacgattgatgaagagtgctattggtgagggcatgacacgtcgagaccattcggatgtatctaatcagctttatgccaactatgctattggaaaggatgttcaggccatgaaggctgtcgttggagaggaggcactctcgtctgaggatctgctttacttagagttccttgacaagtttgagaggaagtttgtgacacaaggagcatatgacacacggaacatcttccagtcactcgatcttgcatggacattgcttcggatcttccctcgcgaacttctccaccgtattccagcaaagaccttggaccagtactatagcagagatgcttcccactgaatcactgatcgttgatcagtgttccaatattttggcaagtgcagctttgaataaattgaacagattggcctcgtggccattttcctgtatttatctgtagtcaggtccaattcttttctgttggtgagcgcaagttattcatagatgactcggtcatgggaatatttgtaatattatgtcatgtatcgttaaatttcagttgttttgtttcagctgccagaactgttagcaagagtattctggagctggaagctcgaacgcaactggttgtatctatatccgtgaatgccgaataaaggaggggcaataaactgcagcgaaatatgtgctgtcagacattgttgaaaaaaaaaaaaaaaagggcgacccgctccatggaaccattctcttcaaaatcacgtttgaagaattgagctgtttccatgttcactcccatagcagcaaacacaatagcaaagttgtcatcttcaccaccctcagcatgctttcctttctccaatgtcttcacaagaccagcctgaagacaaatctgaccagcaatttcattgtgagggcggaagagaaaa

SEQ ID NO: 260069 - DNA, 545 bp, Zea mays
cggacgcgtgggcggacgcgtgggcggacgcgtgggcggacgcgtggggaatatttggcatatgaatgtcggaagcatgtacttgtcatcttgtcagatatgagctcttatgcagacgcacttcgtgaggtttctgcagcccgagaagaggtgccaggtaggcgtggttatcctggatatatgtatactgatctggcaacaatatatgagcgtgctgggcgtattgaaggaagaacaggctccattacccagattcctattctaacaatgcctaacgatggtaagtaaccatgtcttttttaatctttatattataattatactttataattatactatgtgccgtattgttattggttttgtacacttatcttctgaacattctggagacattatttgtaaaactctttcctgatgatgcgactactctgtctagtcacaaaaacatagttattagaactgtctatgttgggctcagatttggtgattatgtctttttgtcttcgattggggctagtggtggaattttggttgcgtggcgaaac

SEQ ID NO: 260070 - DNA, 724 bp, Zea mays
cttgcatttaaccaattgggcgtactgaaccccgctgcttatttgcagcagcaaataggactaccatttagccagctagctgcagcaaaccgtgctgccttcttgacacagcaacaggtgctgcctttctaccaacagtttgcggctaacccagcatccctctgacaactacaacaattgttgcccttaggccaacttgctttgacagacccagcggactgctaccaacaacacatcattggtggtgccctgtgttagagtgctaattagatgtaattgacatagtaaagtaggatggatgatgcatgtggacaaccagaaatacgaagttacattcacagaatctaacatgcttgcatggacattgcttcggatcttccctcgcgaacttctccaccgtatcccggcgaagaccttggaccagtactatagcagagatgcctcccactgaatcactgatcgttgatcagtgttccaatagtttggcaagtgttgaataaattgaacagattggcttcatggccttttccctgtatttatgtgtagtcaggtccaattcttttctgttgatgagcgcaagtttttcgtagatgactcgcggtcacggcaatatttgtgacattgtgtcatctgtggactgtggtcaaatttcagttatttgttttctttcaaaaaaaaaaaaaaaaaaaccaaaaaaaaaaaaaaaaaaaaaaagggcggccgc

SEQ ID NO: 260071 - DNA, 841 bp, Zea mays
cccaagcgtccgcccacgcgtccgcccacgcgtccgcggacgcgtgggctgagggacagatatacattgataggcagctccataacagacagatttatccacctattaatgtcctgccatctctttcacgattgatgaagagtgctattggtgagggcatgacacgtcgagaccattcggatgtatctaatcagctttatgccaactatgctattggaaaggatgttcaggccatgaatgctgtcgttggtgaggaggcactctcgtctgaggatctgctttacttagagttccttgacaagtttgagaggaagtttgtgacacaaggagcatacgactcacggaacatcttccagtcactcgatcttgcatggacattgcttcggatcttccctcgcgaacttctccaccgtatcccggcggagaccttggaccagtactatagcagagatgcctcccactgaatcactgatcgttgatcagtgtgccaatagtttggcaagtgttgaatcaattgaacagattggcttcatggccttttccctgtatttatgtgtagtcaggtccaattcttttctgttgatgagcgcaagtttttcgtagatgactcgcggtcacggcaatatttgtgatattgtgtcatctgtggactatggttaaatttcagttatttgttttctttccccttccagaactgttagcaagagcattctggaccaggatgctcgaacacaactggctgtatgtacatttgtgaatggtgaataaagaaggggcaataaactgctgcgaaataaaaaacaaaaaaaaaaaaaaaaaaaaaaaaaaaaaaagaattaaa

SEQ ID NO: 260072 - DNA, 674 bp, Zea mays
gaaaaacgggccgaccgacgcgtccgactttacttaaagttccttgacaagtttttttgttagcaagggacacaaggagcatgggccgctctgttcatcttccagtcactccatcttacatggacattgcttcagatcttccctcccgaacttctccaccgtattccagcatagaccttggaccagtactatagcagagatgcttcccactgaatcactgatcgttgatcagcgttccaatatttaggcaagtgcagctttgaataaattgaacagattggtctcgaggccatttttctgtatttatctgtaatcaggtccaattctttgttgttggcgagcgcaagttattcatagatgacttggtcatggaaatatctgcaatattatgtcatgtatacgaaaatttcaattgttttgattctgctgccagaactgttagcaagagtattctggagctggaagctcgaacgcaactggttgtatctatatccttgaatgccgaataaaggaggggcaataaactgcagcgaaatatgtgctgtcagacattgttgaaaattttctcgattttgctgtttaaaaaaaaaaaaaaaaaaaaaaaaaaaaaaaaaaaaaaaaaaaaaaaaaacgaaaaaaaaataaaaaaaataataaaaaaaaaaaaaatataa

SEQ ID NO: 260073 - DNA, 635 bp, Zea mays
tattgaccctatgcggaggtaatcaaaacttttttcttctgcgaccggggtgctgctctggcctatccgatctgccacctcctcccgtctcgcacggtcctttccccaactccccagcgtagcctctccgcgccgcgatccagatccaggttgttcagcatgggcctggcgaaggaaggcgtccacatggaggagggaacccttgagatcggcatggagtacaggactgtatctggtgtggccgcgcctctggtcatcttggataaagtaaagggcccaaagtaccaagaaattgtaaacatccgacttggagatggcaccactcgccgtggtcaagtcctggaagttgatggcgaaaaagctgttgtgcaggtctttgaaggaacttctggaatagacaacaaatacacaaccgtgcagtttacaggcgaggttttgaaactcctgtctacttgatatgctgggcgcatttaatggttctggaacctatgacatggcccccgatttgccgagcctactggtatcttggagtctattaaccccagggagacctatcaagggatgaccaactggatatcacatgatgcatgatccatgctcggcaagatcactgttctgtgtggctctacatgaat

SEQ ID NO: 260074 - DNA, 281 bp, Zea mays
gataacttcatgttggtgcagcggactacaaggttcttacatcaacagaaaacgacccatttgcttattgaattagacatcactaaggttttgattcgatatcttggtcctttctcattgaagtcatgaagcaacttggttttggccaaatctggagagatatcatttgtggactgctggcttcctcttctactcaagtgatgcttaatgggtttccagatatcacacacccaactcctgaccttactggatacattactgagggaagatatacattgata

SEQ ID NO: 260075 - DNA, 510 bp, Zea mays
aattcaagttggtgtgatacacttggctcttcaaaatgattcaactggttcagtattgagttggcagaatgatgtatttgtggtcgctgaacccggagaacttgcagacagatttctgcaatctgtcagaactagcttgtcaaccttgttgcgtgggcgtaatagaaagggtgcatattccttgtccaagatttcatgtttatctgagctggttgctgaatgtccatcttttgaaatcggtgggatacaccaccgctatataggtcggcaaacacaagtaggaattgccttttctggctccttgtttccaactaggtcattattttgcatacttaattatccttttttcgtaggtaatggaagataaccaagaaattggcgcatatatgtttaggaggacagtgcctgctgttcacatggcacctgaagatgttcgatggatggtaggtcaatttgcgcagcatgaatgcattggtcttcataattatgttaaagccataactgatcaca

SEQ ID NO: 260076 - DNA, 447 bp, Zea mays
tccacgcgttcgggcctcgccattatccagcttcgagagcactggatcctttggttccaactgcattgtggatttttggtgccgttgatcgagccacgcgtgcttgaggcttgagcagttgaacacgcggggacgcaggcggcaggctagcgcacacccgcgccgtcgcgacgtgacccggcgatggggtgcgcaacctccaccgaggcgcgccgcgacatggtgcggaccggcgccggcgcccccccgcgccggagcttctcgctaccctctgtcgaccgccagcggctgcggctgaagaccgtgtcgatgctcggcaacctcggcctcgccggcagcagcgcccgtcactccagctcgtgcaggcacgcgacgctgtcggtggaggatttgatgaagagcgacaacgaccatgccgcggacgcggtgctcctcggcgacgacgcg

SEQ ID NO: 260077 - DNA, 425 bp, Zea mays
tcgcgctgtggtacgatcagcgtgggggcgcctgcatcttgcatgctcgatggcaggtctatcctccacttcgcgcgtctcctgcgccctccttgtggcatcggtgctgtcgcttccgccggcggtgttccaggtcggcgacgagcgcgggtggacggtgccggccaacggcaccgagacgtacaaccactgggccaagaggaaccgcttccaggtcggcgacgtcctggacttcaagtacgccgccgacgactcggtgctgctggtggcccacgacgactacaagcagtgcggcacgggcaccccgctgggccggttcaccggcggcgacaccaagttcgcgctggaccgctacggcctcgtctacttcgtcagcggcgtcgcatgccactgcgaggcgggacagcggatgatcgtgcgggtca

SEQ ID NO: 260078 - DNA, 2387 bp, Zea mays
  unsure (1)..(2387): unsure at all n locations
ggtcccggtcacgcgaattccgcggtgtccgacccatcgcgtcacgtcgcacggcgtttcgcctttccccgcgtccgagctcacacacactcgagaactccatttcgatcccatttgaaatcaacccatcctcgtttcctccgtctagcagcctctcaccctcatggccaagatcaagatcgggatcaatgggtttggcaggatcggaaggctggtggccagggtggccctgcagagcgacgacgtcgagctcgtcgccgtgaacgaccccttcatcagcaccgattacatgacctacatgttcaagtatgacactgtgcacggacagtggaagcaccatgaggtcaaggtgaaggactccaagacccttctctttggtgagaaggaggttgctgtgtttggctgcaggaaccctgaggagatcccatggggttcggttggcgctgaatatgttgttgagtctactggtgttttcactgaccaggagaaggctgcagctcacttgaagggtggtgccaagaaggttgtcatctctgctcctagcaaggatgcccccatgtttgtcgttggtgtcaacgagaaggagtacaagtctgacattaacattgtctccaatgctagctgcacaaccaactgccttgctcctcttgctaaggtcatcaatgacaagttcggtatcgttgagggtctgatgaccactgtccatgccatcactgctacccagaagactgttgatgggccctcatctaaggactggaggggtggaagggctgctagtttcaacatcattcccagcagcactggagctgctaaggctgttggcaaagtgcttcctgtccttaacggaaagttgactggaatgtctttccgtgtcccaaccgtcgatgtttctgttgttgatttgactgttaggcttgagaagtcagcaacctatgatgagatcaaggctgcggtcaaggccgaggcagaaggtagcctcaagggcatcctgggttacgttgaggaggaccttgtttccaccgatttccagggtgacagcaggtctagcatctttgatgctaaggctggcattgccttgaacggcaacttcgtgaagctcgtgtcctggtacgacaacgagtggggatacagcacccgcgtggtcgacctgatccgccacatgaacagcaccaactaagatgaagaactcaaggtctggtgatacgagcgagttgtcttcttcccccccggagaaaagtgcttccgagaataaatttttttccatcggaatgtctgaaactatgttgggtgtatcctagtggttggttgagcattaatggctcatattttgtcaggtctatgtgtcgccgtgaaacttttaatcaaatcagttcactcttttgccactaaaaaaaaaaaaaaaaaaaaaaaaaaaacagaagaaagacccccccacatcatgcagtgcaggtcctgctggtgaggacatgtttcattggcaagcaacaattatgggaccacctgacagtccctatgctggtggtgttttcttagtgaacattcatttcccgccagattaccccttcaaacctccaaaggtttctttcaagacaaaggtcttccatcctaatatcaacagcaatggaagtatatgccttgacattctcaaagagcagtggagccctgctttgacaatttctaaggtcctgctctccatctgctccctgctgaccgaccccaacccggacgaccctcttgtcccggagattgcccacatgtacaagacggaccggccgaagtacgagtcgacggcccgcagctggacgcagaagtacgcgatgggctgacgaacgctttcctgctcgtctgggcgccattgttcccttggatttgttgttggtcgtatgtatccctgatccatctaggatcatcgtattgtattgtagtgtatgtatgtcgtcggcctaccatcgttgccatccaccatagtgaggtggttggacatgcttcgcctatatgcacctgtgcttgccttccttcgggtcggtgctgtttggttaatgttcatcgaagacgttgatttcaatgcaaaaatagtaggccgacgatatacatacactacaatacaatacgatgatcctagatggatcagggatacacacgacgaccaacaacaaatccaagggaacaatggcgcccaggaacgactttcttgagacgccagtcgggtggacgagcaggaaagcgttcgtcagcccatcgcgtacttctgcgtccagctgcgggccgtcgactcgtacttcggccggtccgtcttgtacatgtgggcaatctccgggacaagaaggtcgtccgggttggggtcggtcagcanggagcagatggagagcaggaccttagaaattgtc

SEQ ID NO: 260079 - DNA, 878 bp, Zea mays
tcgcgggtcgacccacgcctccgtgcaccacaagcgagcgagggacccggggcggaagaagagagagaagacgtctctctcctctcggcgtccccgttccccaacctctcgtctgctgcctgcctgcctgcctgcctgcaaaaaggagtttgtcatggcgtctaagcgcatcctcaaggagctgaaggacctgcagaaagacccccccacatcatgcagtgcaggtcctgctggtgaggacatgtttcattggcaagcaacaattatgggaccacctgacagtccctatgctggtggtgttttcttagtgaacattcatttcccgccagattaccccttcaaacctccaaaggtttctttcaagacaaaggtcttccatcctaatatcaacagcaatggaagtatatgccttgacattctcaaagagcagtggagccctgctttgacaatttctaaggtcctgctctccatctgctccctgctgaccgaccccaacccggacgaccctcttgtcccggagattgcccacatgtacaagacggaccggccgaagtacgagtcgacggcccgcagctggacgcagaagtacgcgatgggctgacgaacgctttcctgctcgtccacccgactggcgtctcaagaaagtcgttcctgggcgccattgttcccttggatttgttgttggtcgtcgtgtgtatccctgatccatctaggatcatcgtattgtattgtagtgtatgtatatcgtcggcctaccatcgttgccattcaccatagtgaggtggttggacatgcttcgcctatatgcacctgtgcttgccgtccttcgggtcggtgctctttggttaatgttcatcgaagacgttgatttcgttgcc

SEQ ID NO: 260080 - DNA, 490 bp, Zea mays
gaagaaagaagccgtgtccgcgtgattttctgggtgaatttttcccggcctccgctccggccagatcggcgcgggtgaaccccagcccctaccgatccggatccgtccccatcgcctcgtgtgttttccgtcgagtattttagcgtgtgtgtccccccctcttcgcttcggttggtgcgtgcggctgtctcgggtagatctggtggtttggttcgccttgaaggcgcgcggcggcggtgtcgcggcttgtagcttgcgatttcacggtggagcttgtcggctgttggggtcggatttggagtttgtcatggcgtctaagcgcatcctcaaggagctgaaggacctgcagaaagacccccccacatcatgcagtgcaagtcctgctggtgaggacatgtttcattggcaagcaacaattatgggaccacctgacagtccctatgctggtggtgttttcttagtgaacattcatttgccgccagattacccc

SEQ ID NO: 260081 - DNA, 462 bp, Zea mays
tcccacgcgtccgccacaagcgagcgagggacccggggcggaagaagagagagaagacgtctctctcctctcggcgtccccgttccccaacctctcgtgtgctgctgcctgcctgcctgcaaaaaggagtttgtcatggcgtctaagcgcatcctcaaggagctgaaggacctgcagaaagacccccccacatcatgcagtgcaggtcctgctggtgaggacatgtttcattggcaagcaacaattatgggaccacctgacagtccctatgctggcggtgttttcttagtgaacattcatttcccgccagattaccccttcacacctccaaaggtttctttcaagacaaaggtcttccatcctaatgtcaacagcaatggaagtatatgccttgacattctcaaagagcagtggagccctgctttgacaatctctaagggtcctgctctccatctgctccct

SEQ ID NO: 260082 - DNA, 1100 bp, Zea mays
gggtcgacacacgcctctaaccacacgtctgcccacgcgtccgggaaccctgaggagatcccgtggggttcggttggtgctgaatatgttgttgagtctactggtgttttcactgaccaggagaaggctgcagctcacttgaagggtggtgccaagaaggttgtcatctctgctcctagcaaggatgcccccatgtttgtcgttggtgtcaacgagaaggagtacaagtctgacattaacattgtctccaatgctagctgcacaaccaactgccttgctcctcttgctaaggtcatcaatgacacgttcggtttcgttgagggtctgatgaccactgtccatgccactgctacccagaagactgttgatgggccctcatctaaggactggaggggtggaagggctgctagtttcaacatcattcccagcagcactggagctgctaaggctgttggcaaagtgcttcctgtcctcaatggaaaattgactggaatgtctttccgtgtcccaactgtcgatgtttctgttgttgatctgactgttaggcttgagaagtctgccacctatgatgagatcaaggctgcggtcaaggccgaggcagagggtagcctcaagggcattctgggttatgtcgaggaggaccttgtttccaccgatttccagggtgacagcaggtctagcatctttgatgcgaaggctggcattgccttgaacggcaactttgtgaagcttgtgtcctggtacgacaacgagtggggatacagcacccgagtggtcgacctgatccgccacatgaacagcaccaagtaaatgaacaaactgatgaaagcatgcaaagagtgatgaaagcatgcaaagagagttgtgtttcttccccggaagtgcttccgagaataaatttttcttatctgattgtctaaaacctataacgggtgtatcgtagtggttgttatcgttaaacttttaacggtcattctatttcaaaagttttgcattttgcactcaaaaaaaaaaaaaaaaaaaaaaaaaaaaaaagcataaataaaaataaaaaatacttttattatttttttcttctttttttttttttggcggccccc

SEQ ID NO: 260083 - DNA, 518 bp, Zea mays
ggcaactttgtgaagcttgtgtcctggtacgacaacgagtggggatacagcacccgagtggtcgacctgatccgccacatgaacagcaccaagtaaatgaacaaactgatgaaagcatgcaaagagtgatgaaagcatgcaaagagagttgtgtttcttccccggaagtgcttccgagaataaatttttcttatctgattgtctaaaacctataattggtgtaatggtatcgtagtggttggttgagcattgagtgactcatattttgtcaggtctatgtgttatcgttaaacttttaacggtcattctatttcaaaagttttgcattttgcaaaaaaaaaaaaaaaaacaaaaaaaaaacaatacaaaagaaatattatagacataaaaggaacctaaataggatattttgcaccaataaatcatggatatccacttattaaaccaaaaaaaaggggcggcccttttaaagattccaaatttaattacccgggttttggagttcataactttttttt

SEQ ID NO: 260084 - DNA, 552 bp, Zea mays
ctctcgtctttgccccaccattttaccggtagccaacaaaactaggttccgtggcgtcgggtgggaccagcaagcagccgccgcagccggcccccaggcgcctctatatacggcactccgactccgatacattggcgacatcacagatcacacacactcgagaactccatttcgatctcatttgaaatcaacccatcctcgtttcctccgtctagcagcctctcaccctcatggccaagatcaagatcgggatcaatgggtttggcaggatcggaaggctggtggccagggtggccctgcatagcgacgacgtccagctcgtcgccgtgaacgaccccttcatcagcaccgactacatgacctacatgttcaagtacgacactgtgcacggacagtgtgaagcaccatgaaggtcaaggtgaatgactccaagacccttttctttggtgagaaagatgttgctgtgtttggcttgatgaacccttaggagatcccgtggggttcggttggtgcttgaatatgttgtcgtgtttactggttgtttcactgacc

SEQ ID NO: 260085 - DNA, 446 bp, Zea mays
ttggagtccttcaccttgacctcatggtgcgtccactgtccgtgcacagtgtcatacttgaacatgtaggtcatgtagtcggtgctgatgaagtcaaggtgaaggactccaagacccttctctttggtgagaaggaggttgctgtgtttggctgcaggaaccctgaggagatcccgtggggttccgttggcgctgaatatgttgttgagtctactggtgttttcactgaccaggagaaggctgcagctcacttgaagggtggtgccaagaaggttgtcatctctgctcctagcaaggatgcccccatgttcgtcggtggtgtcaacgagaaggagtacaagtctgacatcaacattgtctccaatgctagctgcacaaccaactgccttgctccgctcgctaaggtcatcaatgacatgctcggtatcgctgagggtctgatgacc

SEQ ID NO: 260086 - DNA, 508 bp, Zea mays
  unsure (1)..(508): unsure at all n locations
aagcgccctgcaaaaaatttataaaggaaccccggaagctcaactccaaagcttaatgcccctgaccggcgtgtacgggttctggaagtccgtgaccaccctgaatagctgcaagaccagcctctttaatgctaagattgacactgcgattaaacggcaacttcgtaaagctcgtgtcctggtccgacaacgagtgcggatacagcacccgcgtggtcgacctgatccgccacatgaacagcaccaactaagatgaagaactcaaggtctggtgatacgagcgagttgtcttcttcccccccggagaaaagtgcttccgagaataaatttttttccatcggaatgtctgaaactatgttgggtgtaccctagtggttggttgagcattaatggctcatgttttgtcaggtctatgtgtcgccgtgaaacttttcctccagtcggttccctctcaaaaaaaataaaatttattntaattaaaaaaaaaaaaaaaaaaaaaaaagggcgg

SEQ ID NO: 260087 - DNA, 467 bp, Zea mays
aaaaataattagcattatatcgacaacaaaatatgaaaattatagaattagaagtgagaaatcatgaatcagaatacataggcaagcaacaaagttaaataatcgatgataataaaagcatgcaaagagtgatgaaagcatgcaaagagagttgtgtttcttccccgaaagtgcttccgagaataagtttttcttatctgattgtctaaaacctataacgggtgtatcgtagtggttgttatcgttaaacttttaacggtcattctatttcaaaagttttgcattttgcactccaaaaaaaaaaaaaaaaaaaaaaaaaaaaaaaaaaaaaaaaaaaaaaaaaaaaaaaaaaaaaaaaaaaaaaaaaaaaaaaaaaaaaaaaaaaaggggcggcacccacaaaattttaaaacccggtccttctagagttaccagtttccctttttgggggcgtttttaaagttggg

SEQ ID NO: 260088 - DNA, 564 bp, Zea mays
tctctcacgcgtccgggataaagaggtcgtttcttcacttgtctatgctgatgatggaacagtagttgcaaaatcaagggatgattctgagcctcctttgctgattacttgcgaaggacttgaatatgcagcgataagcaggcctctaccaattatacgtgggcgagcactatttaaactcaagatatctcagctctcttccaaatgtgacaataagctcttccgtattaaattctctacacttcacatgcaaagatattcttttctggaagcatattccaaaccgattcgctgtatatctcgaagccgcactgtccgccccttgggtcctacaaagcgggcgagttctgcaacagcaaatgaaattgacatgctcagtaatggccaagggtttgttagtactgacaaagtaaatagtcgtggacattcagtgtgtctgcatacgcccatgtttcccaagatagaagatggaatggtggaagtagtagcgccccacaaaatagtatcacagaataagaatgccagaaaagtggtagtaagcaaagaagcacagaatgtcagagg

SEQ ID NO: 260089 - DNA, 1298 bp, Zea mays
ctcgagttgggccacctgttcgcgcaccgcaagcaaggcgcacaagataaaagcagagggggccagatgaggagggacctcgcatcctccttcgctaccgccgcatcctcttcgtcggcagccgacgcgctccggggctggtgggatgacgtcaacgagtcgccccagtggcaggacgcggccttcttctccctcgccgccgcctacgccctcgtctccgccgtcgcactgattcagctcgtcaggatccagcgccgggtgcccgagttcggatggaccacgcagaaggtcttccacctcatgaacttccttgtcaacggggtccgtgctctggtattcggcttccatgtccacgtcttcctcctccgcgcaaaagtatacaagttggtgttgctagatctccctggtctgttgtttttctccacctacaccttgctcgtgctcttctgggcagaaatataccatcaggctaggagtctcccaacggacaagctaaggcctgcatacattgccgttaacgccatcatatacgttgttcagctttgcatatggatataccttggaataaatgataatgccgcggttgagctggccagcaaaatattcgttgtagctgtctcctttgttgcgcttcttgggttttcagtatatggtggaaggttgtttgtcttgctgagacgtttccctattgaatctaaggggcggcaaaagaagctgtatgaggttgggaccgtgacagcaatttgtgttacctgctttctgataagatgtgttgtggtcgcgctatctgcatttgatgctgatgtatctctcgaggttttggaccatccagtcctagatttcttctattatatgtttgcggagatactcccttctgcgctggttctcttcgtccttcggaagcttcctcccaagcgggtttcggcacaataccaccctattaactagagagttttttttaatgatgttacatgctaagaactccggataatctgaaactactggaaacctacagccggctgtagttggatgcttttgcttgtgctgttatgtttatggaagcatcagtgttggcgatgaatataatgacgatcattctatatggggaagtggtgctaatgaatgaatactcctttttataaaaaaaaaaaaaaaaaaaaaaaaaaaaaaaaaaaaaaaaaaaaaaaaaaaaaaaaaaaaaaaaaaaaaaaaaaaaaaaaaaaaaaaaaaaaaaaaaaaaaaaaaaaaaaaaaaaaaaaaaaaaaaaaaaaaaaaaaaaaaagggggggggccttttt

SEQ ID NO: 260090 - DNA, 546 bp, Zea mays
cccacgcgtccggggagagagagagagagacaggaccaagggagagaggagagagcgatcgagagatgaggagggagcttgcctcccccttagctactgccgccgctgccacggccggtgcctccttctcggctgccgcctcgctccggggctggtgggacgatgtcaacgagtcgccccagtggcaggacggggccttcttctccctcgccgccgcctacgccctcgtctccgccgtcgcactgattcagctcgtcaggatccagcgccgggtgcccgagttcggatggaccacgcagaaagtcttccacctcatgaacttccttgtcaatggggtccgtgctctggtgttcggcttccatgtccatgtcttcctccttcgcacaaaagtatacaagttggtgttgctagatctccccggcttgttgtttttctccacctacaccttgctcgtgctcttttgggcagaaatataccatcaggctaggagtctcccaacggacatgctaaggcctgcatacattgccgttaacgccatcatatacg

SEQ ID NO: 260091 - DNA, 354 bp, Zea mays
gatttcttctattatatgtttgcggagatactcccttctgcgctggttctcttcgtccttcggaagcttcctcccaagcgggtatcggcgcaataccaccctattaactagggagttctttgtttttatgatgttacatgctaagaactccggataagctggaactgctgaaaacctacatccggttgtattgctgtaatattttatggaagcatcccagggttggcaagatgcatcatcaccatcatgctctatgagaaaagagttttgagtggtgctaatgagtttgtgctactgctagccagagcatcacatgacatctccagaagagtaccataccattatttgaattgc

SEQ ID NO: 260092 - DNA, 414 bp, Zea mays
  unsure (1)..(414): unsure at all n locations
tagaaaannngggaccccccccgcccggtaccaccaaaaacctttgattttaattcatgtgtagctgatgcccatgcaacattattggggggtttgggatgacaataagtgtagctccataaagtttgctgttgattggggcaactctcacaagcagaaggcacagaggataggaaagcaaggaagcaactttattcaaaaagagctcagcatggaatatgtatatgattacatgtttcacctcttaactgagtatgccaagctcctaaggttcaagccaagaaaaccacctgaagctattgaggtctgtcctgaatctctggcttgccaagctataggccgcgagaagaagttcatggaggactccatggtgagatccgccagcgatgctgggccatgtgacctggcttcttc

SEQ ID NO: 260093 - DNA, 364 bp, Zea mays
aatcgattggagactcatgatctgggtactggtccagtgaaactaaattcaagctttaatgagatgcacagtgctgatagacaatgccttgactcagctgatgttcctgcttcaactcagcctctgtcagtttcacctgttttgatgagtgacgagcagcaggtcgatgacgcccattctgctgtcaaggccattgagcacctgggcaataatctggctaacataaagcacaaatccctgcatatggatgtcctcatgttagaggacgcccaagttgcttccatggctgcagtccctgggcatgagggagaatctgtcgacgctggatcaaattcttttgatattttacttggagctctggctg

SEQ ID NO: 260094 - DNA, 1937 bp, Zea mays
ctggaatcctttaaaacggtccgctccctcactcccgttccatttccccatctcccagatccaattcgcgagttctccctcctctgccgccatggcgctctctgtggagaagacctcgtctggacgggagtacaaggtcaaggatctctcgcaggcggacttcggccgcctcgagattgagctggccgaggtcgaaatgcccggcctcatggcgtgccgcgccgagttcggcccgtccaagcccttcgccggcgctaggatctcggggtctctccacatgaccatccagaccgccgtcctcatcgagaccctcaccgcgctcggcgccgaggtccgctggtgctcctgcaacatcttctccacgcaggaccacgccgccgccgccatcgcgcgcgactcggccgccgtgttcgcctggaagggggagaccctcgaggagtactggtggtgcaccgagcgctgcctcgactggggcgaggcgggcggccccgacctcatcgtcgacgacggcggcgacgccacgctgctcatccacgagggtgtcaaggccgaggaggattacgagaagaccggcaagatccccgacccggagtccaccgacaacgctgagttcaagatcgtgctcaccatcatccgcgacgggctcaaggctgaccccaagaagtaccgcaagatgaaggagaggcttgtcggcgtctctgaggagaccaccacgggtgtcaagaggctctaccagatgcaggagaccggcgccctcctcttccctgccattaacgtcaacgattccgtcaccaagagcaagtttgacaacctgtatggttgccgccactcgctccctgatggtctgatgagggccactgacgttatgatcgccggaaaggttgccgtggtctgcggatacggtgatgtcggcaagggttgtgctgctgccctcaagcaggctggtgcccgtgtcattgtgaccgagatcgaccccatctgtgccctccaggctctgatggagggtcttcaggtccttcccttggaggacgttgtctctgaagctgacatcttcgtgaccaccactggcaacaaggatatcatcatggttgaccacatgaggaagatgaagaacaatgccattgtctgcaacattggccactttgacaatgaaattgatatgctcggccttgagacctaccctggcgtcaagcgcatcaccatcaagccccagactgaccgctgggtgttccccgagaccaacactggcatcattgtccttgctgagggtcgcctgatgaaccttgggtgtgctactggccatcctagctttgtcatgtcctgctcattcactaaccaggtcattgcccaacttgaactgtggaaggagaagagctctggcaagtatgagaagaaggtgtatgtgctccccaagcaccttgatgagaaggttgctgctctccacttgggcaagcttggtgccaagctgaccaagctcaccaagtctcaggccgactacatcagcgtgccgatcgagggtccctacaagcctgcccactaccggtactaggcagccagcacacggcttgcagctcactcgggccgttgtgtgctatgaagttcgctacactggcctgtcagttatcttttgcatgcatatgcattatcatatacgcagtcgcgtagcaggttttcttatggttatcgcttgagctgagggggagggaaggagctgtttgcttttgctgaagaataatggtgtagtcggctggggtgaggcgatgtgcgttgccagatacagttttgtcttgttgactctacttatctgattatcatttgtaagcgatttgctcaagttatttgtcgtttatgaataacttgctttcctcaagagcatacttaaagacggatcctgatttgcgttgattttggttgcttgagtaccgagtttgactgat

SEQ ID NO: 260095 - DNA, 2390 bp, Zea mays
ctgcagcagccgcgccgtaattgccgcgacccacgccgccttcgcaccatcgggcgtccgaaattgagtttagcgtaaaatttaccagtgacctaagcggcgagattattagagaaaaggttaatatagaccaaaataagggcaacgttgagagggtcttcttgaatagttatattcgaactgacaagtctcatggttttcgagctttggttgtaatggaggatcattcactcttgttaattcaacaaggtgaggttgtttggagcagagacgatgggctggcttcaattgttgatgtaacaacatcagaattgcctgttgagaaggatggtgtatcagttgtcggtgtggaacacaatctctttgagtggcttaagggacacatgctgaaactcaaaggaactctaatgcttgctaatgctgatgaagttgctgcaatccaagcattgagactaaagagctctgagaaaaataagatgacaagagaccataatggatttcgcaaactccttgttgtattgacaaaggctggcaaagtgatgactctgcacactggagatggacgcgttatctggtccaaattgctgccatctcttcgtgcctccagatttggtggagtcccttctgcattaaggatataccaatggcaggtcccgcatcacagtgtcatgcgggaaaacccatctgtacttgttgttggtagaactggagcagaatcttcagctcctggcgtattctctattcttgattcatattctggagaagaacttaactctatgaaacttgaccattctgttttccaaattatccccttaacactgaaggattcatcagagcagcgacttcatctgtttcttgattccgattccaatgctcatttatacccgaaatctgcagacaccctcaatgtatttcttcatgaaatgtcaaacctgtatttctactctgtagatattcaagcaaatgttattaaagggtattcattacagaaatcatgtgatctcaattttggtgatgactactgcttcagtacgaaggagttatggtccatcatctttccttctgattctgaaaggattgttatctctgaaacgcgaaatatgaatgaggttgttcatacccaagctaagacaattggtgatcatgatgtgatgtacaagtacttgtcaaagaatttagtttttgttgctactttgtctcctaaagctgctggtgatattggatctgtgctacctgaagaagcttcacttgttgcatatcttattgatgcagtcactggacgcatacttcatcgtgtaactcatcatggtgcacaaggccctgtacatgcagtcttgagcgagaactgggttgtttatcattattttaatctgcgagctcacagatttgaaatggcggtgattgagatatatgatcaatctagggcggacaataaagatgtcatgaagctcatacttgggaagcataatctttcagcaccaattacatcatacgcccgccctgaggtggcagtaaaatcccagtcatactttttcacccattcagtaaaagcaatggcagttacacaaacggctaaggggatcacttccaagcagattctgattggtactattggtgaccaggttttggcactcgataagcgctatcttgatccacgccgttcagtgaacccgacacaacaagaaaaagaagagggcattataccattaacagattctttgcctataatacctcagtcctttgtgacgcactctcaccaagtggaggccctgcgagggatcgtttctattcctgcgaagctggagtccacgactcttgttttcacgtacggcgtcgatctattctacacccagcttgccccgtcaaggacctacgattccctcaccgacgaattcagctacgcgctgcttctaatcacgatcgcagtcctggttgctgccatcatcgtcacatggatttggtccgagaagaaggagttgggggacaagtggaggtgagcgaggtctcaaagttgtgacgcggaagaaaatttcgggccccagtcagctagctccattgttctcttccctccctttttcattttagtggtagagttcacttcacctttgactataggcattttatttatgtaaccattcgaaaagaagaaagcctatctgcctgctgtgaatcgacacactgccgaagccttataggaagccagccacctgtgcagctaaaaatttctggagatggcatatgcatatcttattctgaaggtgatgtagcatattgctatttttatgatccgatcgttcatgtattaataacagcagtagtcaggtcaagtacctcttaaagatttgcagtgttctttgttacaaaggttatccacgttttgaattccggat

SEQ ID NO: 260096 - DNA, 509 bp, Zea mays
cgggcggagcctagacggcgggcacgggcacccctgcagcaccacgagctcctcaggcgacagcttggagccgttgacctcggaagctgacatcttcgtgaccaccactggcaacaaggatatcatcatggttgaccacatgaggaagatgaagaacaatgccattgtctgcaacattggccactttgacaatgaaattgatatgctcggccttgagacctaccctggcgtcaagcgcatcaccatcaacccccagccggaccgctgggtgttccccgagaccaacactggcatcattgtacttgctgaggggcgcctgattaaccttgggtgtgcgactgggcattctatctttgttatgtcctgtttattcactaaactagtcattattctacattgtacttgtttaaagtagaatgaggctctttttacgcttttacttagataagtgttttgttttttatttatggttggttatttgattatatgtctttgtttttttgcttatt

SEQ ID NO: 260097 - DNA, 356 bp, Zea mays
catttccccatctcccagatccaattcgcgagttctccctcctctgcctcgactggggcgaggcgggcggccccgacctcatcgtcgacgacggcggcgacgccacgctgctcatccacgagggtgtcaaggccgaggaggattacgagaagaccggcaagatccccgacccggagtccaccgacaacgctgagttcaagatcgtgctcaccatcatccgcgacgggctcaaggctgaccccaagaagtaccgcaagatgaaggagaggcttgtcggcgtctctgaggagaccaccacgggtgtcaagaggctctaccagatgcaggagaccggcgccctcctcttccctgccatt

SEQ ID NO: 260098 - DNA, 447 bp, Zea mays
ttgccgccattattggtacatggatttggtctgagaaaaaggagttgagagacaagtggaggtgagcgaggtctcagtgttctgacgctgaggaaattttgggccctagtcagctaccttctcctcctctccccttttcattgtagtgctagagttcgtttcactttttgactaggactttatttatgtaaccgtttgacaacaaagcctatctgccgtgaattgtcacactgcggaggccttatagaaagccacttacgcaattaaagattcaggaaatgacatcgaagggttagcagagcgcagatggcgtgaatctgtaccactgcagccaaacacttcacagcagattttgtagctattgttgttggtagagggtttccgcttctcttgtgtaactgaaagctcgtctttatttcaatcactatacctttcttgaccagaacc

SEQ ID NO: 260099 - DNA, 819 bp, Zea mays
cggacgcgtgggtcatggttgaccacatgaggaagatgaagaacaatgccattgtctggaacattggccaatttgacaatgaaattgatattcttgggccttaaaacttaccttgccttaagcggattaacatataaccccaaaactagacctttgtgtgtccccagacccaaactgtgatatatgtgccctctctgaggctcctgaggaaaccttggtgtgctacagtgcatactactatctgtatagtctgctgattattcactaaccaggtcattgcccaacttgaactgtggaaggagaagagctctggcaagtatgagaagaaggtgtatgtgctccccaagcaccttgatgagaaggttgctgctctccacttgggcaagcttggtgccaagctgaccaagctcaccaagtctcaggccgactacatcagcgtgccgatcgagggtccctacaagcctgcccactaccggtactaggcacacggcttgcagctcactcgggccgttgtgtgctatgaagttcgctacactggcctgtcagttatcttttgcatgcatatgcattatcatatacgcagtcgcgtagcaggttttcttatggttatcgcttgagctgaggggggagggaaggagctgtttgcttttgctgaagaataatggtgtagtcggctggggtgaggccatgtgcgttgccagatacagttttgtcttgttgactctacttatctgattatcctttgtaagcgatttgctcaagttatttgaaattaatggatacaacaaaaaaaaaaaaaaaaaaaaaaaagggcggccg

SEQ ID NO: 260100 - DNA, 608 bp, Zea mays
tcgctatttctgcgtttgctggagtccacgactcttgttttcacatacggcgtcgatctgttctacacccagcttgccccgtcaaggacctacgattccctcaccgacgaattcagctacgcgctgcttctaatcacgatcgcagtcctggttgctgccatcatcgtcacatggatttggtccgagaagaaggagttgggggacaagtggaggtgagcgaggtctcaaagttgttacgcggaagaaaatttcgggccccagtcagctagctcctttgttttggtcccccccttttttcattttagtgctagagttcacttcacctttgactataggcattttatttatgtaaccattcgacaagaagaaagcctatctgctgtgaaccgacacactgccgaagcagccacctgtgcagctgaaaatttctggagatggcatcaaaggatattagcagagcgcagatggcgagagaatggtttgcttataatgtgtaagctgtgtaccccgactgcaaccgaactctttagcagattatagcaattgctgttgatatagcgtttctgcttctcttataactttaatggcaggaactgtattttgccttc

SEQ ID NO: 260101 - DNA, 2281 bp, Zea mays
ctcacgcgtccgcccacgcgtccgcccacgcgtgcgcccacgcgtccgcggacgcgtgggcgaaaaccctcgcggcgaggagcgctctccgtcccacacacgcgcgccgcagcctccgcagtccgcacctgcctccacgacttgtcgtgctcgtgcgctactctcctcgagcgcggcgcggagcacggggacatcaaatggcggcagcggcggagatcggtggtttcgcggcggcgagagtggcggtggcgacgctcaggccggctgcgcacccagccccggcggcggcaccggcaccgcagcctaggagggcggtggcggcgcagtcgctgcagacgaccgccaccgaggcgctgacggcggatctcgccggcacgaccaacggcgctgtgcatgctcggatgaatagtaaggctacaagtgaaatcacttcacaggcagttactgcaaattctaggagaaagacaaagatagtctgcaccataggtccctcaaccaacactcgtgagatgatttggaagcttgcagagactggaatgaatgtagcacgccttaatatgtcccatggtgaccaccagtcgcaccagaaggttattgatttggtcaaggagtacaatgcacagaacactgatggcaatgttattgccattatgctggacacaaagggtcctgaagttagaagtggggatgttccagagccaatcatgctcaaggaaggtcaagagttcaacttcacgattaaaagaggggtgagcactgaagacactgtcagcgtgaactatgatgacttcataaatgatgttgaagctggcgacatactattagtggatggaggaatgatgtcgcttgctgtgaagtctaaaacagccgatacagtcaagtgtaaagtagttgatggtggggaattgaaatcacggcgccacctaaatgtccgtggaaagagtgctactttgccatctatcactgagaaggattgggaagacataaaatttggtgtcgaaaacggtgttgatttctatgcagtttcctttgtgaaggatgccaaagttatccatgaattaaaggactaccttaaaaggtgctaatgccgatatacatgtcattccaaaaattgaaagtgcagactcaataccaaatctgcagtccattattgctgcttcagatggggcaatggtggcacgtggagaccttggtgctgaacttccgattgaggatgttcctttgctacaggcagagattgttcaaacatgtcgaaacatggagaaaccagtcattgtcgctacaaatatgttggaaagcatgattgaccatcctactcccactagggcagaagtttctgacatagctattgcagttcgggaaggtgctgatgccatcatgttatctggcgaaactgctcatggaaagtatccactaaaggcagtcaaggtgatgcacactgtggcactcagaacagaatccagcctttataacccaactacttctcctagtcttgttgcatctgcacagggtctacagaatgaggacttctccgcaagccagctaagtaaaatgttcggatctcatgcaacgatgatggccaacacccttcgcacaccaatcattgtatttacacagacaggctccatggctgtcctcctgagccactatcgtccctcgtctacactatttgcatttacaaacgaggaacgagtgaagcaacggctagcactctaccagggcgtcatccctattcacatgcagttctctgacgacgcagaagaaactttctccagagcaattagcagcttgctgaaagcacaatatgtgaagaagggagactacgtcactcttgttcagagcggagtgacttcaatctggagagaggaatccactcaccacatccaagtgaggaaagttcaggtctgatgtgccggtgggaattggtcgtctgagaaattttgatagcgccgcctgatgtgttatcatcattatatgtgtaattttactgttttaccaggagattgctacgtcgagttatatgttgtgtcgaattcacgtgtaggctctgaatcttgactgtgtccgttcattttcgcttgtttcacactgaagtgttataagctcaactttactgcttttgttttcttgtgaaacttgagtttagtttcttgttacaaaaggagctagcactaacagggtggtgagttttgtaaaaacggggcgaggactgttgagttaaaactgttgtaataatgatatcgttcctgcaagacgacacatgcatggccagagggcccat

SEQ ID NO: 260102 - DNA, 950 bp, Zea mays
  unsure (1)..(950): unsure at all n locations
cgctattgcaaattctagaaggaagacaaagatagtatgcaccataggtccctcaaccaacactcgtgagatgatttggaagcctgcagagactgggattgaatgtagcacgccttaatatgtcccatggtgaccaccagtcacaccagaaggttattgatttggtcaaggagtacaatgcacagaacactgatggaaatgttattgccatcatgctggacactaagggtcctgaagttagaagtggggatgttcctgagccactatcgtccgtcgtctacactatttgcgtttacaaacgaggaacgagtgaagcaacggctggcactctaccagggggtcatccctattcacatgcagttctctgacgacgcagaagaaactttctccagagcaattagcagcttgctgaaggcacaatatgtgaagaagggagactacgtcactcttgttcagagcggagtgacttcaatctggcgagaggaatccactcaccacatccaagtgaggagagctcaggtctgatgtgctggtgggaatcagtcgccggagaagttttgatagcgccgctagaagtgttatcatcatcatcaccattatatgcgagtaattttaatgtttttaccaggagattgctacgtcgagttgtatgttgtgtcgaattcacgtgtagactctggacctttaactctgtattcgttcattttcacttgtttcacactggagtgctataagttcacgcttactgcctttgcttgtgctttcttgtgaaacttgattttagtttgttgttacaaaaggagctagcattaacagcgtggtaaattttgtaaaacggggccgtcttgctccgagaactgctgagttaaaactgttgcaataataatgatatcgtccatgcaaggcgacaacatgcctggccagaaggccgaagtctgacaaaaaaanag

SEQ ID NO: 260103 - DNA, 728 bp, Zea mays
  unsure (1)..(728): unsure at all n locations
ctgtatgggaagcgaactactcaaaggggggtgtttgattaaaagaatgcggtgggtaaatactacctgaataacttcgntgatgggactaagcaggatgccatggatcttcttcaaggacattacatgacatctgttagtagagatatggcagtgccaagcaaagcaggacttctgcagagttatgcgtccttccgccttgcttttgcattagttatgggagctctaatgttcatgttgatgtcactgagacaggcccggaatgatgttcgtcatttgttgctgtcacttatgtgggctggtctttgtattggcatcacacattttgttagagccaatggtcgcacgttcactaaccaacctaggtttcacaagtcacgccattgatggttgcaagatgaccaatttgctcgtcaagcggcctcatagattatcatcatccatcaaacttgttgacacagattggttcacatgaagtgttgcgtttttttggcacggtatttacccttttgtaataaggtttcttccattttgtaacaagtttttgtttcctcgtcgcctacttttgcttcatagtgttctggacatcatggtctttgttagaatttacttgtaaaaaccaagtgaatatgccttcagcacatattattgtattatgatttgttcatgctacaaacgaagtgaatacgccttttgtgatttgttcatttgtaataaaaaccttccct

SEQ ID NO: 260104 - DNA, 426 bp, Zea mays
cccacgcgtccggaaaattgaggagcagactggcactgtaagaacaaattgtatagattgtctggatcgtaccaatgtgactcagagcatgattggggggaaaattctggaaagccaacttcaacgtataggagttcttagtgctggtgatacaataagcaaacatccagcctttgatacaaactacaaaattttgtgggccaatcatggagatgcaataagcattcagtactctggaactcctgctctgaagggagattttgttcggtacgggaagcgaactactcagggaattctaaacgatttgaggaatgcacttgctagatactacttgaataacttcgttgatgggactaagcaggatgccatggatcttcttcaaggacatgacatgacatctgttagtcgagacatggcagtgccaag

SEQ ID NO: 260105 - DNA, 697 bp, Zea mays
  unsure (1)..(697): unsure at all n locations
ttcacgcgtccgggcccattcaaaaatctaacaaatgttgtaacgtcacttacgtttgtcaccaatactcgtagttacggaccctttggaaaagggcgaggaacaccgttccacatccaaacgcagaacaacggcaggatcgttggcttctttggccgttctggccagtatctctatgcgattggggtctacacgaaccaagatgctagggtcgcaaggatcgggcgacctttgggtggagatgaaggggttcttcatggcatcacagacctcagtgggcagcagcgcagcagaggtggaggtccatcgggagaatgtggagacagcgacgacgagcccaacggtgatttcgccaaattcggcccgtggggcggcgacggaggacagccgcaggacatcggaacactaccctgccgtctagacaggatcaagatcagcagtgggcttatcatcgactcgatcgagttctcgtacgctggccctgacagccagtaccgcaccgcaggcccttggggtggtcatggaggagacaacagctcttttcagctagctggttcagagttccttacaggtgtgtctgggtcaatcggcacattcaacggccatgcaaacggcataacgtctctgacgttcgtcaccacgctcgtagctacgagccgtatgcaagagngcgacgcacatccttccacatctcagt

SEQ ID NO: 260106 - DNA, 1304 bp, Zea mays
  unsure (1)..(1304): unsure at all n locations
gtcgtcctccattctgtcgccgctgtgttcgtgcctctcctcgctccccgatcgctggccctgggcgccgcgttcgccgccggatctgggcgcgcgacggtgccccagacgaaccgatggcgcgggcggcgcttcgattgggcgtgcgcgcgctcgcgctcctcgtnctcgtgtgagtggctctgcttccactcgtcagttccgacgatgggtacagacactgcgagggtgtcgtcaggggctgggcggatgcctcgtctgggcgcgtgaaggacggggacaaactgaccctcaaggatttgctcttcttcctccacattcctaggactggaggccgcacctactttcactgcttcctcaaaaagctgtatacgaacgcgcaggaatgcccgcgttcttacgacaaactacggttcgacccaagccatcctgattgcaagctggttgttagtcatgatgactatagcttaacttccaagctgccaagggagagaacatctgttgtaacaatactaaggaacccagttgaccgtgtatttagcacatatgagttttcagttgaagttgcagctagattccttgttcacccaaacttaacttctgcaaagttaatgactacccgtgtgttaaaaaagtctcgtgctgtcagtactttggacatctggccttggaagtacttggttccttggatgagggaagatctgtttgccaggagagatgccaggggtgtcgacaaagttcatagtagtaagaaggttaatgcatatgatgtggacgatatggttatgccattacatcggtacatcaatgatccagttgcccatgagatcattcataatggggctacctttcagattactgggttaacgaacaactcatattttgatggagcacatgaggttcgacattgtgtcaggaagcatccagatcttggtcgtattgtgcttgaagttgctaagaataggctggaccagatgctgtatgtaggacttacggaggatcatgaagagtcagcgaggttgtttgctcatatggtaggagcacaggtgcttttacaatctgggacattgagtttggatctcaaggaagatctgcacagtgagactgactcacacccatccatggtggagcccggggatgaagaagcaagcgaacatctgaataacacacatggttggcaaaataatgaagccctgaactctaccagcgacggaccaggaaaagggaatatgactgtgggtaaattgatggaagcttatgaaacttgcatcgtaaactgcgagagtcccaatctagccgtcgta

SEQ ID NO: 260107 - DNA, 301 bp, Zea mays
cgctcgaggaggccagtaagtgccaacaacatgaatagccaaagcagggaaatagggctggcgggggcacatgggtaacttggtcctggagcattggagaaggagcataccacaaggaaaccaacacgagttccttgcttcctgaaggcctcatagctcagattactgggttaacgaacaactcatactttgatggagcacatgaggttcgacattatgtcaggaagcattcgaatcttggtcgtattgtgcttgaagttgctaaggactcgcaaatcccccgccaagcaaactgctagaa

SEQ ID NO: 260108 - DNA, 824 bp, Zea mays
  unsure (1)..(824): unsure at all n locations
cttccagaaaccactcctggaatctggaacactgggtacaaaatgtaacacgcaagtggtaattcctcaccttactgaaaattatgggacttcacgagaccctcctgagaagcaggcacccatgtgcacagtccattcatttccacacaatattgaccattgtctaacatgggcccgctcagagtttgagggtttgctcgagaagactccaaaggaagtcaactcttttctgtctaatcccgctcaatatgctgcctccatgaaaaaggcaggtgatgctcaggccagggagttgcttgagcacgtatgtgaatgccttgagaaggagtgttgtggaacatttgacgattgcataacgtgggcaagactgaaatttgaagattacttctccaatcgtgtgaagcagctaacattcacgtttcctgaagatgctgccactagcatgggagcccatttctggtgtgctccaaagcgtttccctcaccctctggaattttcagctgctgattcatcacacattcagtttataatgtctgcttccatattgagggcattgtcttttggaatctctatacctgattgggcaaaggacactgataatctggctgatgcagtcagtaaagttgcagtacctgaatttaagccaaagagcggggtgaagattgagacagacgtgaaggccgaaaacatctccagtgcctcagttgatgacgctgctgntatcgaagatcttttaagcaggctgaaagcatgtaccaggaactacctncgagatccaaatgaacctattcagttgagaggatgatgatacaatttcacatgac

SEQ ID NO: 260109 - DNA, 777 bp, Zea mays
cggacgcgtgggcggacgcgtggtaattaggttccgtgaagcaacccttgttagggatggtgataagaaaatacgttatgctgttcgcaaagaagtggcactcatgatgcagcgtcggaaggggcaatttgctggaagtgccagtctaggacggagaatctccagctcctggatgtgatcctggttctcagggctcaggcctagattttgcatctcgagaatcaatgtgccagaactgtggtactagtgaaaaaatgaccccagcaatgcgtcctggtccagcgggtccaaggactttgtgcaatgcttgtggattgatgtgggcaaacaagggtaccctgagaagttgccccagggcaaaagttgaatctcctgcggttgcaactgagcagggaacaagtgacaacaaagccctggcaacactgaataataacaatgttgctgcaagcaatggcgaagccacaagtgcagcagagaaaggagtgccaaaggcgccgtgacagtatatagacattattgtcagagacaaagatttcggattctttgcctatagctagacaagacaccccgttagaaatatttggtaatgataatgattgtcatcaagtgtacattcattcttgcttgacagtgttagacgtgtaattaatataagctgtccgattgtgtaaacagtaaacccatatggcatctgttgtgttacaacttacactttctaactttcttcattctcataacatcatgatcaaagattcgatgctacccattgattgtcac

SEQ ID NO: 260110 - DNA, 1071 bp, Zea mays
cggacgcgtggtcggacgcgtgggcgatcacatcgtcactcactgcatcgttcgttcatccatcaactactggaaattagagagccggatctcttggtcggagaacctgcgaggaaggactaaggagtcgaagatgactgcggcggtgctgtccgtgcgcacgacgacgacgtcgctgctagcagcagtcatcctgtgcctctgcatcgtctccctctccccccgcggcgccgctgccgcgcgggtctcccccggcgccagcccgatcgtggccacctgcatgacgggcccgtacccggagctgtgcgtgggggagctgggacagcggctgctggacgtgcagacgtcgatcgcgtccgcggcgcccgaccagcgcgcggccaggatcgcgggcgccccggtgcaggtggacgtcagggcgctggtggccgtggcgctggaggcggcctcggaagccggcgccgtcgcggtgtccatcttcgagggcaagctccccgggttcaacaccggcgtgcccgacttgcgccgctgcctcggcaactgcaccgtcaccatgcgcagcgccatgcagaagctccacggcgccaccgtcgcgctgcactcgggcgacacgcaggtggccaggacgctcgcgatgcgctctgccgccgacgtctcgtcctgcaccgtcagctgcagggagctcaacggcgacgtgcgcctcatcgtcgtgcagagcctcaccgagttcaccaagatgctccagatcgccggcagcttcatcagcaagatgaagccgcttccaccgtcagctccagcgcgaactgccacgccatgatcacctacatatgcgcagcgtggttcttctaactaagagagcgggatcgagaagaaattgaagccgctaataattagccatcgttctctagagttcctttcttcgtttgttttggtgtgtgttccttttccccgtttttttttttgttttagtgtgagttctctcttctgtaaataagatgcaggtttcatggccattgtgcctggctctggttgtgaacctgagaatgagattacatgttttctttctgattc

SEQ ID NO: 260111 - DNA, 685 bp, Zea mays
taccggtacctggactccggacggacgcacgacttgcgtgacgcctaaccaagccccgcaccgccccgcccccgcccccgcctcccttccgccgcaggagacggggtcggcacggggcgatgaggagcagcgaggccatggagctcctgggcttccctccctactccaggccctccccttccgaggtgaaggctgcgtatagaagaatggtgatggagtcccatcctgatcgtgtcccaacgcatctgaaatcgcaggctgagtcaaaattcaaggagatagcagaagcatattcttgtttgaaggacggaagaagatcagggagtaggatggaagttcatgttatgcgttctggtgttccgactagccacggaagatcaaatagaacgttggttaaagccccgtttctcctcataacgtttgcagcagtttcttttggcgccttcagcgcatcaagagcgtatcaacggcaaaaggaactgtgttcctctcagaacccctttctaccatagaggaagacggtgggctctgtccatgttcacataggcgaggagagcttcttgctacgttgtatacagatgtaaaacaatcacaccatcctgaataaacgtgccaacctgtgcctgctaactttgttgtttcagactttccaaacatgtaaaatcacttctgtattggtttcctg

SEQ ID NO: 260112 - DNA, 1193 bp, Zea mays
cccacgcgttttcccacgcgtccgcccgcgcgcccgtgggtccgaattcccaggcaggcaggtcggcgaggagggcaggaagaccgaagaccgagccgtgcgggggctcgggacgggaacgggacaggaccccaaaatctcagatccttcctgcccgcccgcccgtgcccgtcgacgcgtcgttcttgccggccgcgccccacctccgccctctcctcctccagggggatcggatacgccacaggctgcgcgatggtgctgtgggtcttcggctacggctccctcatctggaaccccggcttcgacttcgacgacaaaatcctcggcttcatcaagggctacaagcgcacctttaatctcgcttgcattgaccacagaggcacaccggagcatccggcgaggacctgcacgcttgaaaccgacgacgaggccatatgctggggaattgcatattgtgtcaagggtggtccagaaaaagagctaaaagcaatacagtacttggagagaagagagtgtgagtacgaccagaagatatccattgatttctacaaggaaggagatcccttgaaaccagctgtgacaggcgtcttagtgttcgtttccactccagatccaattggcaacaagtactatcttggccctgctcctttgcaggatatggcaaggcaaattgctacagccaatggccctactggctataatagggattacctgttctcaatggagaaggcattagccagcattagccacgaagatgattcgatcatagagcttgcaaacgaggtgaggaaggtgctcaacagaacaaaggagaccaagatcactggtgccaatgcttccatgaaatcacatgcccctcttgtgcacctgtccgcgcttccagaaggcaccgttgtggactcgagatagcgacctctactcggaatttactttcagctcttgcatgtttgtggttgtggccatcatgtactgattttcccttttcaacagttgtcgtgaggctgtatcgtctggagtaaaaaaaaaaagctaaaagccggcactaataatgatattaacttgaaaaagctatcggcgatccttgaacttggaggaccccccccccccaaaaaaaaaaaaaaactctcaatttgcaattttgggtccatgaacttggtttgggtgtctttcaggtcctaaaaaaaatataaaaa

SEQ ID NO: 260113 - DNA, 501 bp, Zea mays
tggtcgcgtgggtgatacccattttttcattaattattttgctacagtcagcttgcaattttggtgtctggtgcttctcggttcaacaactagatccattgattatataggacaatgcgctcgacaatccatttagttccttgtccacaacatttgaggcagctttatatagttcgaaggatttcaatgtataggctacaactgaattgttcatgtaactacatcctacttgcttagcagtgtttattacaaaataaccatatgctttcacgatgcttctaatttcacatgaagttgccttgagtcgtgcaaaagtattacttcactccttttttctcttcctttatcatctatcatattatgatgtaatttggaacaatgccttaaaaaacttatgttgtaggctatcatgaagctttctggtcaaagtcccaaaagaatgagagacctttcaagtttctggctttcactcccttcccacctcatcctttctgtgtctac

SEQ ID NO: 260114 - DNA, 1103 bp, Zea mays
ccacgcgtccgatcgctagctgctgcccttttgttttttttctctcatccgaattcccaggcaggcaggtcggcgaggagggcaggaagaccgaagaccgactcgtgcggggggtcgggacgggaacgggacaggacctcaaaatctcagatccttcctgcccgcccgcccgttcccgtcgacgcgtcgttcttgccggccgggccccacctccgcgctctgctcctccagggggatcggatacgccacaggctgcgcgatggtgctgtgggtcttcggctacggctccctcatctggaacctcggcttcgacttcgacgacaaaatcctcggcttcatcaagggctacaaccgcacctttaatctcgaggcacagcggagcatccggcgaggacctgcacgcttgaaaccgacgacgaggcgacgacgaggccatatgctggggaattgcatattgtgtcaagggtggtccagaaaaagagctaaaagcaatgcagtacttggagagaagagagtgtgagtacgaccagaagatatccattgatttctacaaggaaggagatcccctgaaaccagctgtgatgggcgtcttagtgttcgtttccactccagatccaattggcaacaagtactatcttggccctgctcctttgcaggatatggctaggcaaattgctacactacagccaatggccctactggctataatagggattacctgttctcaatggagaaggcattagccagcattagtccccaaactcgacgcgcaggtacgagaattagccaccagccgacgggatctcgatggcgagctccgcgtagcagaaggacaagagcagcaccgccaggtccccaaaccattttcgcgcgggtataaaaggctatcatgaagctttctggtcaaagtcccaaaagaatgagagacctatcaaatcagcaagcccgaggactgggaatgtaagccaacgccaaaaaagttcttcgtctggttctacggcaccgatgagatgtttatgcgccatcctgagtattccagctttcctatatggacagtttgaacccaaggtttgctgtgtaatctaatatcaacagttgcactc

SEQ ID NO: 260115 - DNA, 1139 bp, Zea mays
ggagggcaggagagaccggagcctcttttcttgcgggggctcgggacggtaacgggacaggaccccaaagtctcagatccttgctgcccgtccgcccgtgcccgactacgcgtcgttcttgcctgccgcgccccacctacgtcctgtacggaaccagggggatctgatactccacaagcgggaatacagagctgcgggtcttagggtacaggtccctgattagggaacgcggcttggacttcgacgactaaatggtcggcgtcatcaagggctactagcgcacctttaatctcccttgccttgaccaccgaggcaccccggtgcatccggcggaggacctgcacgcttgataccgacgacgaggccatatgctggggaattgcatattgtgtcaagggtggtccagaaaaagagctaaaagcaatgcaggtgcgctattttttttctcccgtgttctgcagttccaaaaaaactagaattacactgaaatttcaccttcattttagtacttggagagaagagagtgtgagtacgacgagaagatatccattgatttctacatagaaggagatcccttgaaaccagctgtgacaggcgtcttagtgttcgtttccactccagatccaattggcaacaaggactatcttggccctgctcctctgcaggatatggcaaggcaaattgctacagccaatggccctactggctataatagggattacctgttctcaatggagaaggcattagccagcattagccacgaagatgattcgatcatagagcttgcaaacgaggtgaggaaggtgctcaacagaacaaaggagaccaagatcactggtgccaatgcttccctgaaatcacatgcccctcttgtgcacctgtccgcgcttccagaaggcaccgttgtggactcgagatagcgagagccttggacgttggacctctactcggaatctacttccagctcttgcatgtttgtggccatcatgtactgattttcccttttcaacagttgtcgtgaggctgtatcttctggagttaaaaaaaatgctaaaagccggcactaataatgatattaacttgaaaaaaaaaaaaaaaaaaaaaaaaaaaaaaaaaaaaaaaaaaaaagaaaaataaaa

SEQ ID NO: 260116 - DNA, 927 bp, Zea mays
aacacctctaagtttcaaactggccctaaaccgctgctctttgggcttgactctgcccgcttttctccatctccacttggtcctctctctctcatggcggcggcggcggcgtcgacgccgcagggagtggcggagcggcggggcatcccggcggcggccttcgttgaggacgtcgaggcctacctccgccaggtcgggctcgacgtcaactccgcgctcgcttttctccaggaaaggttgcagcagtacaaaatagtggagatgaagcttctagcacaacaaagggatcttcaggcaaagattcctgatatagagaagtgcttggatattgttacaacattacaagctaaaaaggatttgggtgaggcactcatagctgatttcgaattgtccgaggggatctactcccgtgcgaaaattgaggatactgactcggtgtgcctgtggttgggtgcaaatgtgatgctggagtactcttgcgatgaggccaatgccctcttgaagaaaaacttggaaaatgctaaggccagcttagaagtccttgttgctgatcttcagttcttgcgagaccagcaaaccatcactcaggttacaattgctcgggtattcaactgggatgtacaccaccggagaagcaaacaggctgtaaaggaaccttaatcagttagatcacgaggtcaaccaatgtgattgggacaaattttttcgtaccttttggtacctctggcagattagtccatcatagcgagctctttgtttgttgatggtttctttgctgtgtaacaatgtatcggtttattctctttaatggtgtgggaacattagtagaagatggaacattttactgcctttttccccactggatgtccactggatcacgtcgcaaaatatttttttttcatgattcatgcataattcctgctttcc

SEQ ID NO: 260117 - DNA, 1747 bp, Zea mays
cattaagctagctagcatgattgaagtggctgcaaagaaaggcgctcgcgatctcaacctgcaaggcaaactcatgaaccagatcgagtggctccctgattcaattggaaagctcactggacttgtcacccttgacatttcggagaatcggatcttggccttgccggaagcaattgggatgctttcttctttggccaagcttgaccttcacgctaacagaattgctcagcttcccgagtcgattggggatctttccaacctgatatatctcgaccttaggggcaatcagcttgcatcattgccggccagtcttggtaggctggtgaagcttgaggagcttgatgtgagtgcaaaccatcttacctcactccccgactcaataggaagccttacacgcctgaagaacgtgatcgccgagacaaacgaccttgatgagctgccatacactatcggcaattgtgtgtcactggtggaactgcgggtaggatacaaccacctcaaggccctcccggaggccgtcggaaagctagagtctctggaggtcctctctgtgcgatacaacactattaggggccttccaacaacaatggcatctctcacaaagctgatgcggctcgaggcaagttttaatgagctcgagtctattcccgagaacttctgcttcgccacttctcttatcagactaaacgtcgggaataatttcgctgacctgcaatccctgcctcgttccattggcaaccttgagatgctggaagagttggatataagcaacaatcagattagggtgcttcctgattcttttggaaacctgcagcgtctccgtgtgctccgcgcagaagagaaccctctccaagtgccaccaagagatgtagctttaaagggagctcaggccgctgttcaatacatggctgaatatgttgccaagaaagccacaaggtcacaaccgatgaagacaaagaagacctgggctcagttctgctttttctcccggcctaacaaaagaaagcacgaccgaatagacaccgcgtcgtgattcactgtgagactgatgaacattaagctgctgtttcctcaactctacacttctgaagagaactatcgggtgcatcgccttcgatcgctaccattgtgttgtatgggtcaacaagatgtgatgcccagaagcttttccttggacaatgctgcagcctgcagcttctaacctgtagaaccaagatggtcaggtttcaccgaacctactcactcttgtttccaccaggccaactcaactctgaatgaccgctggaagagtccaagtcttacttcagcttaagaatctagaagtggtttagtctctcggcctttttcgtatgatcgagagcagctgagaagagaactggaagattgctgaagttcggtttgccctgcagtgcaacttgtcaatattatacgtaatatacatgcatccggtgaaactaagaccttggttattactaggatttgctttcagagatcatttttctttctctatatttgagcgtatgttctttgaaacttctaagttagaactaaaatcctgcaagataccagatgtgctggattgaaaacgactgcagtcgaatcctttttgtgtggcttaatatttatttagtgcattctgagaagtttctgttgtaactagtgtactagaatctttctgaagagattcataaaacacagtattttgcatgttcctctctgataaattgtaccccccgctatggcaagc

SEQ ID NO: 260118 - DNA, 869 bp, Zea mays
cgagccctccgccgcatcacaaacacctgcgatccgtccccgatcatcgcaccacctgtagcccacctcgctctcgagtctcgacccagcgacgagatggccgcggtggatctgaccccaaggacgcccaagaaggcctacggcggcgacggcggcgcctactacgagtggagccccgccgacctgcccatgctctccgtcgcctccatcggcgccgccaagctctcgctcgccgccggcggcctctccctccccagctactccgactccgccaaggtcgcctacgtcctacaaggcgcgggcacctgcggcctcgtcctgcccgaggcgacgaaggagaaggtggtggcggtgaaggagggcgacgcgctggcgctgcccttcggcgcggtgacgtggtggcacaacggccccgccgcgccgaccccgctcacggtgctcttcctcggcgacacctccaagggccacaggccggggcagttcaccaacttccagctgacgggcgcgaccggcatcttcacgggcttctccaccgagttcgtgtcgcgcgcgtgggacctgccggaggcggacgcggcggcgctggtgtcgagccagccggcctcgggcatcgtccgggcgtcctcgtccccgctgccggcgccgtcgccgcgggaccgcgagggggtggcgctcaactgcctggaggcgccgctggacgtggacatcccgggcggggggccgcgtcgtggtgctcaacacggccaacctgccgctggtcaaggaggtcgggctgggcgccgacctggtccgcatcgacgcccactccatgtgctccccgggcttctcgtgcgactcggcgtaccaggtcacatacatcgtccgcggca

SEQ ID NO: 260119 - DNA, 420 bp, Zea mays
cccacgcgtccgcacgggcctgtccaccgagttcgtgtcgcgcgcgtgggatctgccggagcccgacgccgcgaggctggtgtcgagccagccggcctcgggcatcgtcaagctgcccgcctccgccgccgcgctcccggcgccctcgccgcaggaccgcgccggggtggcgctcaactgcctggaggcgccgctggacgtggacatccccggcgggggccgcgtcgtggtgctcaacacggccaacctgccgctggtgcgcgaggtcgggctcggcgccgacctggtccgcatcgacgcccactccatgtgctccccgggcttctcgtgcgactcggcgtaccaggtcacgtacatcgtgcgcggcagcggccgggtgcaggtggtcgggcccgacgggaggcgcgtgctggagacccg

SEQ ID NO: 260120 - DNA, 375 bp, Zea mays
tgcacctccgccacttcacctccgatcccgccaccactacccaccctttcctttgacgtcccgatggcacctgtagatctaacccccaagcagcccaggaaggcctacggcggcgacggcggcgcctactacgagtggagccccgccgacctgcccatgctcggcgtcgcctccatcggcgcagccaagctctcgctcgccgccggcgggctcgcgctccccagctactccgactcagccaaggtcgcctacgtcctccaaggcacgggcacctgcggcatcgtcctcccagaggcgacgaaggagaaggtggtggccgtgaaggagggcgacgcgctggcgctgcccttcggcgtggtgacgtggtggcacaac

SEQ ID NO: 260121 - DNA, 365 bp, Zea mays
ccaacaccctctccaccttccatcccgatcaccgccgccaccgctttcgttccacgtcccgatggcaccggtagatctaacccccaggcagccccggaaggcgtatggcggcgacgccggcgcctactacgagtggagcccagccgacctgcccatgctcggcgtcgcctccatcggcgcagccaagctctccctcgccgccggtgggctctcgctccccagctactccgactcttccaaggtcgcgtacgttccttgaaggcactggcacctgcggcatcgtccttgccggaggcgaaccaaggagaaagtgctggccgtgaaagagggcgacgccctcgcggctccccttcggcgtggtcacg

SEQ ID NO: 260122 - DNA, 1757 bp, Zea mays
gattagcctcgccgacgacgaggagggaagagctggtggctggcgaggggctcgcggggatggggatctcgaggcccctggcgctccttctggcgctgctgatcgccgtcgccggcgcgaccgccgaggagcccgtagtggcggcggactcgggggccggcgcggtggaggccgcggcggcgctcagggcggaggaggctgcggaggccgcggcgctcagggccgagctggagcagctccgggcgaagatctccgccttagagtcagacatagcagtgcgatctctggaactgaagaataaggatgatgccatcatgaacctggagaaagccattgaagagaagtcaaaggctattacctctatgctgggcgagattgcttccctccaggcaaaagggtctgtagctgccgaggagcaggctaacaaggccaatgccaaggttgttgagcttgagaagcaggttgacaagctcaaaaaggatattgaagcacaaagtagccagaaagcagcactagagtatagggccaacgatgcagagaagaaggtggaagtactgaatgaaaagcttaatacaatccaaaaggaaagtgatgagaaaaaacgcaaaatcaagaagacagaacgtgctcttaaagtcgctgaggaggaattaatgaggttgcagttagaagtaactgctaaatcaaaacagctgtcagaggttcatggagcatggttaccaccttggctaatggcacaatatgctcgttatgcggaggttgtctcaggtcactggaatcatcatgggaaacctgctgtgcagaatgttttgcataaggcatcagaaaaatcagcacatgcaaagaaatgggctgaaccacatattgagactgctaagatgaaatggattcctgttaaggagaaattggttgtcctcaagaaaaatgcagaaccttatgtacagaaggtatcgacaagatcagtggagttttatgagtcatcaagggatgctgtgacacctcacgttgtcaaagttaaagagtttgctcatccctactaccaggaagccaagaagttttctaagccttacattgatcaaattgctgagatcactaagccacatgttgagaaagttagaactactctgaagccatacactaagagagcagttcatgcatatgggtcatttctcaagtcggcaaccacataccatcgacaggctcaagcaagcatcatggactaccttcaccagcgtgatataacaaaatcattggcaactaaggagttagtttggttcctggcttctgctttgctggctctgcctgtcttcattatatacaggcttctagtagggaccttctgctccaaaaagaataaaaggcctcgtagtagtaatggtaaccatggccacaagagatacaagcggcgacatgctgacaagtagatcagtttactgaacactttagggttcagtatgctgtgtaccgtggcagatctttgagcaggattgggtcatgggcacccttaccttgaaagcattgtacaccaccaacatactcttctcttttgcattttcgtcccaggtgtaatatggacttcagtgcagcagaccttttatctgcactttgctgggttcatgtggttatgcctcggcctttgtttgattggtcatttgtttattgtaacttgtgaatgcgtttgaatttgtatgcttgttcttgtcggcgacctacattcgaacttaatacttatgtacccagtggttggtttagccccc

SEQ ID NO: 260123 - DNA, 478 bp, Zea mays
tcgtccacgcgtccgcggacgcgtgggcacgagcgcgggcgcgcacaagttcgccaacccccacgccccaccccccaccccccgcgtgctgcgcgtcgttggaaccaaggattggattagcctcgccgaggaggaggtggtggtcggcgaggggctcgcggggatggggatctcgaggccccttgtgatggcgatggcggtggcgctgctgatcgccgtcgccggtgcgaccgccgaggagcaggagcccctgctggcggcggacgcggtggccggcgcggtggaggcggcgctcggggaggtggagaccgcggcgctcagggccgagctggggcaactccgggcgaagatctcggcgctagagtcagacatagaagagcgatctcaagaactgaagaataaggatgatgccatcatgaacctggagaaagccattgaagagaagtcaaaggctattacctctatgctggacgagatt

SEQ ID NO: 260124 - DNA, 1174 bp, Zea mays
catgcagggtagtaagctggttcttttaacgggccgccctttttttttttttaccatatatataatgctatgctctcaacaaagaattagatcatccagtgtatccccaccggttcactgggaatttttttttgatagctaagggctgagcgacctgagagaaagaaagagagagagaaaatacaggagaaagaatagcattacagcatcaacctaggtatttcagcgacacattcccgacgaactacatggccatagcttttgtcagtaaggagaggagggtcgaccaagcagctagaagcaggccaccaaaaatttccaggtcccgtgctcctcttccgtcctagccttgctggtttccggtggtggcagccgcggtgtcttggtcgccgaagatgcgcttgcggaagtcggagaccatgaggggaaggccctcacgcagggggatcttcggctcccacccaaggaactccttggcgcggctgatgtcgggcttgcgcttgtgcgggtcgtcctgggtgttcttgcggaactcgatccgtgcgttggggtcgatggtgtcctggacaaccttggcaagctccagcatggtgaactcgccagggttacccaggttgaatggtcctacatgctcgccttccatcagcttcatcagaccctcgaccagatcagaaacatattggaaactcctggtttgctttccatcaccataaaccgtcaagggctccttcctcagtgcctgagcaacgaagttactgacaacacggccatcgtcaatgcacatgcgagggccatatgtgttgaagatacgtgcgatcctaacctcaaggttggcaccacggtggtaatccatggtcaacgtttcggctgtacgcttgccctcatcgtaacagctcctgacaccgatgggattgacattgccccagtaagtctccacttgcgggtgctggaggggatcaccatagacctcactggtactggtgaggaggaacctagcattgatcctctttgccaatccaagcatgttcagagtcccaaccacattggtcttgattgttttgatggggttgtatttgtagtggacgggggacgccgggcaggcgaggtggtagatctggtcgacctcgagcaggatgggctcgacgacatcgtggcggatcatctcgaagtttgg

SEQ ID NO: 260125 - DNA, 999 bp, Zea mays
cccacgcgtccgcccacgcgtccgcccactcgtccggttctagatcgcgggcgggcgcgcgctggtggagatcgcgtgcgcgcgcacgcccgcgcagctctttgcggtcaagcaggcgtaccatgaccggtttaagcgatcgctcgaggaggacgttgccgcgcatgtcaccggcgacttccgaaagcttttagtgcctcttgttagtgcgtaccgctatgatggcccagaggtgaacacatctttggctcattctgaagccaaaatacttcatgagaagatccataagaaggcttacagtgatgaggagatcattagaattctcaccacacggagcaaagctcagctacttgcaacattcaatagctacaaggatcagttcactcatgcaatcaacaaggatctgaaagctgaccccaaggatgagtttctttcaacactgcgggcgatcatccggtgcttcacctgccctgacagatacttcgagaaagtcattcgactggctcttggaggcatgggcactgatgaggatgacctcaccagggtcgtaactactcgcgccgaggtcgacctgaagctgataaaggaggcttatcagaagagaaacagtgtgccgctggagcgtgctgtggccaaagatacaactagagattatgaggatattatgcttgccctccttggggcggagtgaggaggcgtgcctcaactcgatctcatctgctcctacttgtttgatggggccaaaaaactgcatcgacgtggtatccacatggccgtggttttgaataataataaatttgtaacacgtagcctgcattagcagcgcgttttaaataaaggaacttcctgatataaaaaaaaaaaaaaaaaaaaaaaaaaaaaaagggcggccgaacgcgtgggcgaacgcgtgggcgaacgcgtgggcgaacgcgtgcccggacgcgtgggcggacgcgtgggcggacgcgtgggcgaacgcgtgggcggacgcgtggg

SEQ ID NO: 260126 - DNA, 837 bp, Zea mays
  unsure (1)..(837): unsure at all n locations
tttttctttttttttttgatttataccatatatatgatgctatgctctcaacaaagaattagatcatcctggtttatctccaactgttcaactgaactttttttttgtatagctaaggactgagagaactgagaaagaaaaaatacaggggaaaaaaagaatggcattacagcatcagccgaggtattccagtaacacattcccaacgaactacgtggcccatagcttttgtcagtaaggagagagcaaccaagcagctagaagcagggccaccaaaaatttccatgtcatgtgcgctccttcatcctaaccttgctggtttccggtggtggcagtagcgtcttggtcgccgaagatgcgcttgcggaagtcggagaccatgaggggaaggccctcacgcagggggatcttcggctcccacccgaggaactccttggcgcggccgatgtcgggcttgcgcttgtgtggctcgtcctgggtgttctggcggaactcgatccgtgcgttggggtcgatggtgtcttggacaactttggcaagctccagcatggtgaactcgccggggttgcncaggttaaatggtcctacatgctcgccttccatcagcttcatcagaccctcgacttgctggctaggccactaagccaccggaaaaaaaaaatcaaatctggtactctggcagtgatgttgaatcgagtgtctcttatttttttttcaatatatgttgagtagaggtagacttgccagatcagaaacatattggaaactcctggtttgctttccatcaccataaaccgtcaagggctccttcctcagtgcctgagcaacgaagcggac

SEQ ID NO: 260127 - DNA, 592 bp, Zea mays
ccacaccccacgcactcacggtcacgcagaagccagaacccctcgtctcccggcgcctgttccccgcgcgcaccgcggctacacataccctctccccatcccatttcccagatcccaccaacgcagcgcagggatcgagtagcccaccaccccaccccgcgacgctaaccgacgcaatggcgacgctcaccgttccttcctccgtcccggccgtcgccgaggactgcgagcagctccacaaggctttcgaaggttggggcaccaacgagaagctgatcatctccatcctggcccaccgcaacgccgcgcagcgccgcgcgatccgccgcggctacgccgaggcgtacgggaaggagctgctccgcgctctcggcgacgagatccacggcaagttcgagagggcggtgatcctgtggacgctggaccccgcggagagggacgcggtgctggcgaacgaggaggcgaagaagagccaccccggcggccgcgcgctggtggagatcgcgtgcgcgcgcacgcccgcgcagctctttgcggtcaagcaggcgtaccatgaccggtttaagcgatcgctcgaggaggacgttgccgc

SEQ ID NO: 260128 - DNA, 1006 bp, Zea mays
gttgaacgaaagcagctccttgaatccacttctggcgagaaccagctacacgttgcagatgggtgtttccatggcgcttgtgtggaagatttgcgtttagattttactcttccaggttatcctgattatgtgcttaaagagggtgaaggaggcacacttgttaatatttataatttagaacagtatattacttcggtggtggatgctacagttaagtcagggataaagcgacaggttgaggcatttagatcagggtttaatcaggtgtttgacatgtcatccctgcacatattgtcacctcaagaacttgactatctaatatgtggccgacaagaaatttgggagtcggaaatcctggtggataacataaaatttgatcatggatatactgctaaaagtcctgcgatcgtgaatgtaagctcattcgtcctcacatgctacatctcttacatacatccagttgtggtttttgagaagtgtggttccttgattcttgctcttgtttgtagctactcgagattttgtcagaattcacccctgagcagcagcatgcgttctgccagtttgtaaccggtgctcctcggcttccacatggtggattggctgcccttagccccaagcttactatagttaggaagcatccttcaagtgctgtgaatacttcaaattcaactggggcagtagagtccgctgatgatgatttgcctagtgtgatgacgtgcgccaattatctgaagctgcccccctactccacaaaagaaatcatgcgcaagaagttgctttatgcgatcctggaaggccgaggatcatttgagctttcattagaaattttccatatccgcactaacatacacggggggtcagttttattcgggagatttagtttctgggcccatgtataacactgagtggaggttaccagctcactaagcatacgggttcaagggcgagagccccaacccttactcggatgcaagtgctgctgtcgattcttccttcttttaca

SEQ ID NO: 260129 - DNA, 372 bp, Zea mays
aattgttaatatttataatttagaagagtatattactttggtggtggatgctacagttaagtcagggatacagctacaggttgaggcatttagatcagggtttaatcaggtgtttgacatgtcatccctccacatattttcacctcaagaacttgactatctaatatgtggccgacaagaaatttgggagtcggaatccctggtggatagcataaaatttgatcatggatatactgctagaagtcctgcgatcgtgaatctactcgagattttgtcagaattcacccctgagcagcagcatgcgttctgccagtttgtaaccggtgctcctgggttccacatgggggattggctggccttaagcccaagttt

SEQ ID NO: 260130 - DNA, 398 bp, Zea mays
  unsure (1)..(398): unsure at all n locations
cccacgcgtncgcacgctttcttcacctgaccaacagccaagccgggaggcacgcttgagagccacacactgagacctcacgcgcggatggccgccgccgcgggcgggaccggcggctgcggctgccacattgtagcggtgccgttcccgggccgcggccatgtcaacgccatgatgaacctgagccgcctcctcgcagcccggggcgcggcggtcaccttcgtcgtcaccgaggagtggctcggactcatccgctcctcctccgccgccgccgctgccgagccggccggcattcgcatccgcaccatccccaacgtcatcccttccgagcacgggcgcgccgccaaccactcaggcttcctcgacgccgtcgccacagagatggaggcgcccttcga

SEQ ID NO: 260131 - DNA, 2077 bp, Zea mays
  unsure (1)..(2077): unsure at all n locations
ggggccacggacgcgtccgcacacgcgtccgcggagccgccgcaacccagcgtcccccgaagtctaaccctagatccggaccggccatggcgtcccgccgggtcgtctcctcgctcctccgctccgcgtcccgcctgcgggccgcctcgcccgctgcgccacgcccgcgcgcgccaccgcaccgcccgtccccggccgggtacctcttcaaccgcgctgccgcctacgcctcttccgccgcggcccaggcggcacctgccaccccgccgccggccaccgggaagaccgggggcggcaagatcaccgacgagttcaccggcgctggcgccatcggccaggtgtgccaggtgatcggcgccgtcgttgacgtgcgcttcgatgagggcctcccgcccatcctcacggcgctcgaggtgctcgacaacaacatccgcctcgtgctcgaggtggcgcagcaccttggcgagaacatggtgcgcaccatcgctatggacggcacggaggggctcgtccgcggccagcgcgtcctcaacactggctcccccatcaccgtgcctgttggcagggctacccttggacgcatcataaatgttattggtgaaccgattgatgagaagggtgacataaagacaaaccacttcctccctattcatcgtgaagcccctgcttttgttgagcaggccactgagcagcaaattcttgttactggaatcaaggtcgtggatcttcttgcaccctaccaaaggggtggaaagattggtctcttcggtggtgcaggagtgggtaaaactgtgctcattatggagttgatcaacaatgttgctaaggcccatggtggtttctctgtgtttgctggtgttggagaacgtacccgtgaaggtaatgatctgtacagggaaatgattgaaagtggtgtcattaagctagatgacaagcagagtgaaagcaagtgtgctcttgtctacgggcagatgaatgagcccccgggtgctcgtgctcgtgttgggttgactggtttgactgttgctgaacatttccgtgatgctgaaggacaagatgtgcttctgtttattgacaacattttccgtttcacccaggcaaattctgaggtgtctgctcttcttggacgtatcccatctgctgtgggataccagccaacccttgccactgatcttggaggactgcaagagcgtattacgacaacaaagaagggttctattacgtctgtccaggctatatatgtgcctgctgatgacttgacagatcctgctcctgctactacctttgcccatcttgatgctacaactgtgttgtcacggcagatctctgagcttggtatttatcctgctgtcgatccactggattccacatcaagaatgctttctccccacgtgctgggtgaggatcattacaatactgctcgtggtgttcagaaggttcttcagaactacaaaaatcttcaggatattattgctatcttgggtatggatgagctcagtgaggatgacaagttgacagtcgctcgtgcaagaaagattcagcgtttcctgagccagcctttccatgtcgctgaagttttcacgggtgctccaggaaagtatgtggagctgaaggaaagtgtgaagagtttccagggtgttttggatggcaagtatgatgacctccctgagcagtcattctacatggttggaggaatagaggaggtcatcgccaaggcagagaagattgccaaggaatctgcatcataaggggtctacaggcaacgcaaaattaacttttggaggtcaacgtgatgtgctttttatcctgtgttatcaagaacttacgtgcaggagaccctgccctgcagaaggatgtttctctcctccgtccccccaccccacaccccaaaataaggattcgcagtgacattttaatttggtttactgccctttgaggaagaattaccttttttgatgaggtgaaactataaccttgttaattctcaaacaaatactcttctcccatgttcggagccattatgaggtcgcctgttcaatttnnaaaaaaaaaaanaaaaaaaaaaannnnnnntnna

SEQ ID NO: 260132 - DNA, 895 bp, Zea mays
ggctcttgacaccgctgagccagggatttacagggggggcgttcaacgggattccacattattaacgccaccgccacacgtgctgggtgaggatcactacaatactgctcgtggtgtgcagaaggttcttcagaactacaaaaatcttcaggatattattgctatcttgggtatggatgagctcagtgaggatgacaagctgacggtcgctcgtgcaagaaagattcagcgtttcctgagccagcctttccatgtcgctgaagttttcacaggtgctccaggaaagtatgtggagctgaaggaaagcgtgaagagtttccagggtgttttggatgggaagtatgatgacctccctgagcagtcattctacatggttggtggcattgaggaagtcattgctaaggctgagaaaattgccaaggagtctgcttcataaggaggcttcttgcttgttcaaccctgtacaagttccatttttggattttaagcgtttatttatgcttttcccagttaggcatgacgagctggagagtccatctcctgctgagagatgtttgttttacccttctttgcttcctccaccttacacccaaataagcaactgcagtgacgttggttttggctgcacccaaactacatgactgaagaaacttgtggcctgtgtaacgcgaatccatcagaacgccaaagttatggcttctggttgtggcaaattatggttcctccctgttcggttgagtggttgcattctggaggtatcttgttctggactcaggctaatgattgtgcgtgcgactgtttcagagtcatttcaaaggttatccactttcgttggagttgatttcataactaaaaaaaaaaatttaataatataaatcataaaaaaaaagggcgg

SEQ ID NO: 260133 - DNA, 623 bp, Zea mays
gctttctccccacgtgctgggtgaggatcattacaatactgctcgtggtgttcagaaggttcttcagaactacaaaaatcttcaggatattattgctatcttgggcatggatgagctcagtgaggatgacaagttgacggtcgctcgtgcaagacagattcagcgtttcctgagccagcctttccatgtcgctgaagttttcacaggtgctccagggaagtatgtgcagctgaaggaaagtgtgaagagtttccagggtgttttggatggcaagtatgatgacctccctgagcagtcattttacatggttggaggcattgaggaagtcattgctaaggccgagaaaatcgccaaggagtctgcttcataaggcggcttcttgcttgttgaatcctgtacaatcaagttccatttttggatttaagcgattgtttatgcttttcgcagttaggcagcacgagttggaggtccatctcctgctgagatgcttgtttttctctttgttgttcaaacactttacacccaaataagcaactgcagtgacattaattttggctgccccaaagttaaaaaaaaaaaaaaaaaaaaaaaaaaaaaaaaaaaaaaaaaaaaagggcggccgc

SEQ ID NO: 260134 - DNA, 555 bp, Zea mays
gtttccagggtgttttggatggcaagtatgatgacctccctgagcagtcattctacatggttggaggcattgaggaagtcattgctaaggccgagaaaatcgccaaggagtctgcttcataaggcggcttcttgcttgttgaatcctgtacaatcaagttccatttttggatttaagcgattgtttatgcttttcgcagttaggcagcacgagttggaggtccatctcctgctgagatgcttgtttttctctttgttgttcaaacactttacacccaaataagcaactgcagtgacattaattttggctgcaccaaagttacatgaactgaagaaacttgtggcctgtgtgacgcggatcaatcagaacataaagttacggcttctggttggtaaattatgctactcttcagagtctgttcccgcattgtggaggtatcttgttctggactggctctgccgaaactagtttccgtggttttccatgtagtttttttatggatgtgcaacttcaaaccggccccagcttaatgtttatcgactttgattggggagg

SEQ ID NO: 260135 - DNA, 499 bp, Zea mays
actccacggcggcgcagacgcgggcgacctcctcatcgtcggctacggcgtcggcgctgccgggggaggcaaagatgtcgtcggcgtcgccagcttcctcccacatcgagctcaggttgtcctctccggcctcagcggcatcttgagaagccttggtcggggaggagaaggcttcagggaagggatccgcggcggcggaagaggaggcatcggggatgggatccggggaggaggacaggaagcggggaggggggactcgggttagggttcgagtgggatatggttgtggaggtggtggcggtggccgggtaatggtcgagcggagtaggagcagcgcacgagctcgcgaacgccacatcatcgccgtcgtcctcggcggcggcgagatgtgttccaattgttgcgtgcacgaggtgctcgacaacaacatccgcctcgtgctcgaggtggcgcagcaccttggcgagaacatggtgctagttatagatcgcgagcggcc

SEQ ID NO: 260136 - DNA, 398 bp, Zea mays
  unsure (1)..(398): unsure at all n locations
cccacgcgtccgcccacgcgtccgcggacgcgtgggctttgttgttcaaacactttacacccaaataagcaactgcagtgacattaattttggctgcaccaaagttacatgaactgaagaaacttgtggcctgtgtgacgcggatccatcagaacataaagttacggcttctggttggtaaattatgctactcttcagagtctgttcccgcattgtggaggtatcttgttctggactggctctgccgaaactagtttccgtggttttccatgtagtttttttttatccccgcgcaccttctcgccggcaccactttaatgtttatcggctttgaatgagaaaaaacccgatgctttattctgnnnnnnnnnntnnaaannaaggccgcccgcccggga

SEQ ID NO: 260137 - DNA, 2428 bp, Zea mays
gggtcgatacaagcgtctacactgactctctcacccgactcgtcagacgtcagccagcagttcgaaaccaaggatcgatccaggagcttccggaaggcgaggcgcgcgcgcagcgtcgaggtgctggtgccggtgccgcccatggatcgggctcgcggatccgcgttcctgctcggcgtcctgctcgcaggatccttgttcgcgttttcagttgccaaagaggagaccaagaagctcgggaccgtgatcggtatcgatctcggtaccacctactcctgtgtcggtgtgtacaagaacggtcatgtcgagatcatcgccaatgaccagggtaaccgtatcacaccctcatgggttgccttcaccgatagcgagaggctcatcggtgaggctgccaagaaccaggcagccgtcaaccctgagaggaccatctttgacgtcaagcgtctcatcggaagaaagttcgcggacaaggaagtccagagggacatgaaacttgttccctacaagattattaacaaggatggcaagccctacattcaggtcaagatcaaggatggggagaacaaggtcttcagccctgaggagatcagtgccatgattcttggcaagatgaaggatactgctgaggcataccttggcaagaagatcaatgatgctgtcgtcactgtccctgcgtacttcaatgatgcgcagaggcaggcaaccaaggatgctggtgtcattgctggcctcaatgttgctaggatcatcaatgagccaactgctgctgctattgcctatggtttggacaagaagggtggcgagaagaacatccttgtctttgaccttggtggtggcacttttgatgtcagtatcttgaccattgacaacggtgtgtttgaggtgctggccaccaatggtgacactcatcttggaggtgaggactttgaccagaggatcatggagtacttcatcaagttgatcaagaagaagtacagcaaggacatcagcaaggacaaccgtgctcttggaaagctgaggagggaagccgagcgcgccaagagagccctcagcaaccagcaccaggtccgtgttgagatcgagtccctctttgacgggaccgatttctcggagccgctgacccgtgccaggtttgaggagctgaacaacgacctcttccgcaagaccatgggccctgtcaagaaggccatggaggatgctggccttgagaagagccagatccacgagatcgtcctggttggtggaagcaccaggattcccaaggtccagcagctcctgcgggactacttcgacggcaaggagcccaacaagggtgtcaaccctgatgaggctgttgcctttggtgccgctgtgcagggaagcatcttgagcggcgagggtggtgacgagaccaaagatatcctcctccttgatgtggctcccctcaccctgggtatcgagaccgtcggtggagtcatgaccaagttgatcccgaggaacactgtcatcccgaccaagaagtcgcaggtgttcaccacctaccaggaccagcagaccactgtctccatccaggtctttgagggtgagcgcagtatgaccaaggactgccgtcttctcggcaagttcgacctcaacggcattgcgccagctccaaggggcacaccccagatcgaggtgaccttcgaggtggacgccaacggtatcctgaacgtgaaggcggaggacaagggcacgggcaagtcggagaagatcacgatcacgaacgagaaggggcggctgagccaggaggagatcgaccgcatggtgcgggaggcggaggagttcgcggaggaggacaagaaggtgaaggagcggatcgacgcccgcaaccagctggagacgtacgtgtacaacatgaagaacacggtgggcgacaaggacaagctcgcggacaagctggaggcggaggagaaggagaaggtggaggaggccctcaaggaggcgctggagtggctggacgacaaccagtcggccgagaaggaggactacgaggagaagctcaaggaggtggaggccgtgtgcaaccccatcgtgtcggccgtgtaccagcggtcgggcggcgcccctggcggtgacgctgacggcggtgttgacgacgaccacgacgagctgtagatggttgtagatggtggtggtgacgtggagtgccgggagccgagccaaattttgtaacggtgtttagcggcggacaatacttattactaatcttggtgctgctctgccaatagccgtgctgagcgtagaaactgtttgtttgtaattttttttcttctacttccttggttgttcaggattcggattcgaattttatgtgaaaaaagaagtcgcgcttttaaaatcttgcatttgcccccttgtggtaataatgctaattaaatggtgaaaaaaaaaaaaaaaaaagggcggccgc

SEQ ID NO: 260138 - DNA, 413 bp, Zea mays
cgtcacaagcagttcgaaaccaaggatcggtccagatccatccagaaggcgaggaggaagagggagaagggcgcgcgcgcgcgcagcgttcaagtggtgctggtgtcggccatggatcgggttcgcggatccgcgttcctgctcggcgtcctgctcgcaggatccctgttcgcgttttcagttgctaaggaggagaccaagaagctcggcaccgtgatcggtatcgatctcggaaccacctactcctgtgtgggtgtgtacaagaacggtcatgtcgagatcatcgccaatgaccagggtaaccgtatcacaccctcatgggttgccttcaccgatagcgagaggctcatcggtgaggctgccaagaaccaggcagctgtcaaccctgagaggaccatctttgacgtcaagcg

SEQ ID NO: 260139 - DNA, 404 bp, Zea mays
cccacgcgtccgcccacgcgtccggactagttctagatcgcgagcggccgctcccccacgcgaccgcccaagcgtccgcccacgcgtccgcttgagcggcgagggtggtgacgagacaaaagatatcctcctccttgatgtggctcctctcaccctgggtattgagaccgtcggtggagtcatgaccaagttgatcccgaggaacactgtcatcccgaccaagaagtcgcaggtgttcaccacctaccaggaccagcagaccactggcttcattcaagtaaggacgcgcattctggttctggcttctttggattggcagctgggtgcttggtagtaatatgaccttgttgttttggcttgggatccaaacatacaagtctttgggggtgagcgcaacatgacca

SEQ ID NO: 260140 - DNA, 532 bp, Zea mays
gagggagagaaaaacccaggccccccgatctcctcctcccactccgatcgcccgaccgatcggcgcctcgtgaagcttccctgttccctccccgccccccgcgacgccgcgacgccatggagccgccgcacgccgagcaggccgtcgccgctgtagcagcaggaggagagggcggcaccgcaagcccgggcaccggcctcgaagggccggtgcttaggcgggggctggacggcggtggggaaggggaggacggggagctgggggcggggcaggaggcggaacgcacggctaccagagcggcctggcgaggcggactgtggctactacctccgcacgggcgcctgcggcttccgggagcgttgccgctacaaccatccccgcgatcgtggcggcactgaggtgagctgaggtctgctgcaaccaaatctctagctgccaattgctaatgttttctaatagatacgcagcaaatggcttcacataattctcctgaaacgccaagctgataaatagtttcttgttaaaacgtatt

SEQ ID NO: 260141 - DNA, 484 bp, Zea mays
cccacgcgtccgcggacgcgtgggctaaatagaagcaatactgatggcccaaaacaagatgattgtggtggttctcctgcttgccacctttcttgtggtggcaagatcgttgtgggttccagaagaaccctcaaatgcggatgacataagaggtgcttgcatcgaggagtgcaccaaagaaaataaggctcctggcgacaagaagacatgcgaagtgttgtgcaccaagctcacaaaaaagcctagcgaagaaggcaaacatgattgatgaagtagcactccgataatatataccctagtggatcagtggtcatctttgtagccatgtctgccacacgatggccttgattatattgtcttattgttttgtttttggtttccactagtatcctaattccttgttcatgtaacctaatgtcactcaaagcattttatatgcttcacttaattaaataaatacaaaggcaaaagcatgttctgtttt

SEQ ID NO: 260142 - DNA, 661 bp, Zea mays
ggcaggccaggatggagctgcaatcagtgattttggagtatgtcggcatcgtgcgctcgacggggcggctgaagcaggccgagtggaggatcggtgacctggagtcggagtgggaggagttcctgttccggcgggggtggaagccgaccacggtgggcgtcgaggtctgcgagatgcgcaacctcttctgctgcgccaagctcgtcgtcaggagcgcgctggccaggcgcgagagccgcggcctgcacttcaccgaggacttcccgtacctggaggagagcaggaggaagcctacggtcatcttcccggccgccgtgcaggagctcacgtggagctccaagccgttgcagaggcagctgcaagcagatgacaatgcatgcagttcatccggctgggccttggggattcgttaattcattcattaatttttaagaactctcagtcgacagcatacacaaaatccagacagttaggctgtagtagcctgcgtatctttgcaattcttgccagttccagctgttgcaacttgtaaacggtgttgttggagctgcattatggtttatgaaccttgatccgtagtatatgtatgtggtgattggctgattgcacaccaactgatgaccattgtgatgtcatgcagaaaaaattgcgagaagttttg

SEQ ID NO: 260143 - DNA, 528 bp, Zea mays
cccacgcgtccgcccacgcgtccgtgattgagcaattgtataagtagttcatgttatcgaaatgaaaacaataaaggatcatcatcacggttcttgcaagttgggttgcagggatacgggcaatcaatctgccgagggacctccctatcgtagtaccagtcccccaccgtcttgccagaaccgtgatgatgattgagcaattgtataagtagttcatgttatcgaaatgaaaacaataaaggatcacaacgcgcgcccgtagttgtagatgatgaattataaacacatatgactgagctcaaagttgtttaatcatcatctgttgcgaaatgaggaagacaattggtgtcttgaagctgtgttttcgactgtgtctaaagcgtaaatgtaacgtatattgtgtcttcgcctatgcttaagacattggactagttgattggtcaatttaatttattaaatgttttgattggtgtaatgaatataataagtcgtgcatgccgcatgactaggctttcagtctttcactta

SEQ ID NO: 260144 - DNA, 680 bp, Zea mays
gttcccacagtatgttgtcccgacaatgcgtacaccattgttcatacttaatgcagcctacgattcgtggcaggtcaagaacgtcctagcacctagtccagctgatccgaagaagacttgggcccaatgcaagcttgacatcaagagctgctccgccagccaactcacaaccttgcaaaatttcaggacagattttctggcagcactccctaaaacgcagtctgtaggcatgttcatcgactcatgcaatgctcactgccaatcaggatctcaagacacgtggctagccgatggttctcccacggttaacaagacgcaaattggcaaggcggtgggggactggtactacgatagggaggtccctcggcagattgattgcccgtatccctgcaacccaacttgcaagaaccgtgatgatgattgagcaattgtataagtagttcatgttatcgaaatgaaaacaataaaggatcacaacgcgcgcccgtagttgtagatgatgaattataaacacatatgactgagctcaaagttgtttaatcatcatctgttgcgaaatgaggaagacaattggtgtcttgaagctgtgttttcgactgtgtctaaagcgtaaatgtaacgtatattgtgtcttcgcctatgcttaagacattggactagttcattggtcaatttaattt

SEQ ID NO: 260145 - DNA, 1381 bp, Zea mays
gcttttactccagttccactccacctcacgagtctcacacacctcccccctcctttttagggagagaaagcaacgaaacgccgagagaggcgtgcgagcgggagcaaggagatggagcgggcggcgccggtgaggagctcccacacctccacggccgacctactcgcgtggccgcagccccagggccccgccccagcaacgccgtcgccgccgcgccggcccggtcagccgtcggaggctatcaggaaggtggtgttcgggggtcaggtcaccgaggaggaggccgacagcctcaccaagaggaagccgtgctccgcgcccaagtggaaggagatgactgggagcggcattttcgctgccgggagcaatggagacgctggggaggcagctgctgccgcgaagcccgcccgaacctcctcgcgccaggcgagcagtactgtaagccacatctcgttcgctgaggatggaaccgatcctcccaaaaagcccacatcagtagctgaggtggcaaagcagcgtgagcttagtggcactcttcaaagcgaggcggatagtaagacgaagaagcagatctcaaatgcaaagtccaaggagctcagcggccacgacatctttgctgatactctggattccaggtctaacagggcaaggaacccatcgaacggcagcacagcctcacacgcacctgccaaaaatacaaacgccagcaccttctcgtttggagatgccaacactgacagcacgccaaagacggcaaggaagataaccggcaagaaggtcaacgacctcaccggcaacgacatcttcaagggagacgctccgccagcttctgcagagaagcatctgagcaccgcgaagctgaaggagatcactggaagcaacatttttgcagatgggaaggaaccaatccgcgagcgtgtgggcggaaaccgcaagcctcctggcggtgagagcagcatcgcgctgatttagcataatccgggactcagtgtcgacccctagaggaggatttccaccagcaccaggcagcaggctgttggatcgtcagtttggtgtcttgttcctgatcaaggtgcggcagtgaagagccccgttttagtcttgatgatgtttattaactgttggtgtgtgcatgtttggtttggctgtgagataccaatgccgtcctcatcatggcagtgtgtagtgtgtacggttgatgtgtttttacaaataatagctcgagtctgaaccaagctcaggtcttccccccccgtcaaattattagcaaacgtgtatgtaccaagcgttaccgaccccttgcgtgccctaatttacagccgacggatatatgctatgcgtaacccgataaatgttcatgtcatcaagaatattattcccc

SEQ ID NO: 260146 - DNA, 1828 bp, Zea mays
ccggccggatccggtcgaccacgcgtccgctccgctcggccaccagctttgaccgcctcccctcccctccgctcctgttcctccataccccacccccccgcaggagcggcgcggcggcggcggcggcaaagccaaaggcaagatgttcgggcgcgcgccgaagaagagcgacaacaccaagtactacgagatcctcggggtgcccaagtcggcgtcccaggacgacctcaagaaggcctaccgcaaggcagctatcaagaaccaccccgacaagggcggtgaccccgagaagttcaaggagctcgcacaagcctatgaggttttgagtgatccagagaaacgtgagatttatgatcagtatggtgaagatgcccttaaggaaggaatgggtggtggtgggtcccatgctgatccatttgacattttctcatcattctttggaccctcttttggaggaggtggtggaagcagcaggggaagaaggcaaaggaggggagaagatgtagtccactcacttaaagtttctctggaagatctttacaatggaacctcaaagaagctctctctttcgcgcaatgtcatctgctccaagtgcaagggcaagggctcgaagtctggtgcttcaatgaggtgccctggttgccagggctcaggcatgaaagtcactattcgtcagctgggcccttccatgatacagcagatgcagcagccttgcaatgagtgcaaggggactggagagagcatcaatgagaaggaccgctgcccagggtgcaagggtgagaaggtcgttcaagagaagaaggttcttgaggttcatgttgagaaggggatgcaacacaaccagaagatcaccttccctggtgaagctgatgaagcgcctgatactgtcactggagacattgtattcgtcctccagcagaaggatcactccaaattcaaaagaaagggtgaagatctcttctatgagcacaccttgtctctgaccgaagcactatgtgggttccaatttgttcttacacatctggacaacaggcagcttctcatcaaatcagaccctggtgaagttgttaaacctgaccaattcaaggcgattaacgatgaggggatgccaatttaccagaggcctttcatgaaggggaagctgtacatccatttcacggtggagttccccgactcgctggcaccagagcagtgcaaggctctcgagacagtacttccaccaaggccttcatccaagctgacagacatggagatagatgaatgcgaggagacgactatgcatgatgtgaacaacatcgaggaagagatgcgcaggaagcaagctcacgctgcccaggaggcgtacgaggaggacgacgagatgccgggcggagcccagagagtgcagtgcgcgcaacagtaagcagactatcatcaaggcaattgggaggggtggtgcccttaaagcatgggagtgatctctggttttgctgtcgccgagctgggaaataggaagctgaatcgacctcgcaagcggggaatgtatccttttttgctgcaacataaaaaatgctacccaggcatagctgggtaccttttaacttctgtttgtgggatttgctagagtgatggtttcgatatatagggggacttgaatgtctggaatgctacggtataacgcacatttgggtgcaatgtctgttgcattgctgtctgaatgacatcgttggtacatttattttcatgtaacgcctgtagtttgctaatcaacaagcttggaatggcctgattgatgatgcccaaaaaaaaaaaaaaaaaaaaaaaaaaaaaaaaaaaaaaaaaaaaaaaa

SEQ ID NO: 260147 - DNA, 793 bp, Zea mays
gtttttgatcaaatcaaaccccggcgaagttgttaaacctgaccaattcaaggcgataaacgacgaggggatgcctatttaccagaggcccttcatgaaggggaagctctacattcatttcacggtggagttccccgactcgctggcaccagagcagtgcaaggctctcgagtcggtacttccgccaaagccttcgtccaagctgacagacatggagatagatgaatgcgaggagacaaccatgcatgatgtgaacaacatcgaggaagagatgcgcaggaagcaggctcatgctgctcaggaggcgtacgaggaggacgacgagatgcctggcggagcccaaagagtgcagtgcgctcaacagtaagcagactaccaaaatgggattcaaggcactttggttgctcttcaattatgcgagtgcgcctgtggactgtatggttctatggttttgctgtcgctgagctacaaagtaggaagctgatgcgcccctggctctgcaagcgggggaatgtatccttttttgctgcaactgaaaaatgctacccaggcaatagctggctaccttataacttttgcttgtgagatttgctagagtgacgattttaatttgtaggtggacttaatgtttgtgtaaggctaggcataacatcatgtctcaatggacgttgccgttgcacattggtgcattttattttaatgtaacgcatgtgcttgtgctgttgaacaatcttggaatggtctgatcgatgatcggcgtctgtgtaaacccacgcgtctcgccacgcgtccg

SEQ ID NO: 260148 - DNA, 971 bp, Zea mays
tccacgcgtacgcccacgcgtccgcgctgggccaccagctttgaccgccgcctcccttcccctccgctactgctcctccccaccccactcccccgcaggagcggcggcggcggcggcggcggcgaggtcgtaccccacatcggcgagcggcggcggcaccgccggaggcaaaggcaagatgttcgggcgcgcgccgaagaagagcgacaacaccaagtactacgagatcctcggggtgcccaagtcggcgtcccaggacgatctcaagaaggcctaccgcaaggctgctatcaagaaccaccccgacaagggcggtgaccccgagaagttcaaggagctcgcacaagcctatgaggttttgagtgatccagagaaacgtgagatttatgatcagtatggtgaagatgcccttaaggaaggaatgggcggtggaggatcccatgttgatccatttgacatcttctcatcattttttggaccctcttttggaggaggtggtggaagcagcacgggaagaaggcaaaggaggggagaagatgtagttcacccacttaaagtttctctggaagatctttacaatggcacctcaaagaagctctttctttcgcgcaatgtcatctgctccaagtgcaagggcaagggctcgaagtctggtgcctcaatgaggtgccctggttgccagggctcaggcatgaaagtcactattcgtcagctgggcccttccatgatacagcagatgcaacataaaaaatgctacccaggcatagctgggtaccttttaacttctgtttgtgggatttgctagagtgatggtttcgatatatagggggacttgaatgtctggaatgctacggtataacgcacatttgggtgcaatgtctgttgcattgctgtctgaatgacatcgttggtgcgtttacatatccatgtatttcatatagccccccaatcaacaagcttggaatggcgtg

SEQ ID NO: 260149 - DNA, 1308 bp, Zea mays
acaagctgaacgggattcctataggcatgaaatagaagaattgaagtcatccttacaagatgtaaacacacggcaaacaattacaggaacacctaaacgttcagactggatagacctgcagaaggaacttgaaggtgaggtgaagtttcttagagaatcgaatgcggacttaaccatacaactaaacaggactcaagagtcaaatatagagcttctttctattcttcaggaactggaggaaaccattgaagaacagagagttgaaatatctaagatttcgaaggtcaagcagactgctgatcctgagaatgggcttttagtaaaagaagacaaagaatgggctaagaaactgtcaatgaaagaggatgaaatcacagttctgagggagaaattggatcgggctctcaacattggaaatgcagatggtgctggttccaatgccatttatcttgaattggagaaagaaaatgcaattttaagggctacaatacaagagcttgagaaggactgctctgaactaacagatgaaaatttggagcttatatataagttgaaagaaaatgggctgacaaaaggtcaggttcctcgtatttcaaataacaatgagctgcaatttgaaaagcttacatcccggattcgtcaactggaggaggaacttaggaataaggaaatgttaagagccgacagtttttctgagtcatcaatgtctaatgcagatgagctacagagaaaatgtgctgaccttgagctgaaggtgctaaattttaggtctcaaacctgtgagctagaagaaaagttccgaaaatgccaagaggagctggaacaaagaaatcttgagttatctgcgctgagaagaaagataaatggtttacattctactgaactggaagtttttgaatctggtgcgacatggaagtaccaatctagaacagcagatctagaggatactgaacctgagacagatacgcttaaggctaggtttgaactgcagctacaggaaaatgatgaccttcgtcgttccaaggttgagatgcagaattttatttctgagtttcaggcagagaagagtcagcttgaggaacgcctgtccgcgtcgcttaaagaaagcagcatcacatctaaatgcctggatgaagtgcggaaagatatccttgtgctttccagcagtatagattcccatgtttcagctaataaggttcttgagaggaacataattgagctagagagctgcaaagctgaactagagttgcatgtatcagagctggaacaggaaaacataaagttgtcagaacggatatctggactgga

SEQ ID NO: 260150 - DNA, 597 bp, Zea mays
tagcttcatccaagctgacagacatggagatagatgaaggccttggtggaagtactgtctcgagagccttgcactgctctggtgccaacgagtccttcatccaagctgacagacatggagatagatgaatgcgaggagacgactatgcatgatgtgaacaacatcgaggaagagatgcgcaggaagcaagctcacgctgcccaggaggcgtacgaggaggacgacgagatgccgggcggagcccagagagtgcagggcgcgcaccagtaagcagactcccaaaatgggattcagggcactttggttgctcttcaattatgcgagtgcgcctgtggactgtatggttatatggttttccggtcgctaagctacgaagtaggaagataatgcgcccctggctatgcaagcgggggaatgtaacctttttttgctgcaactggaaaatgctacccaggcaaagctggctaccttaaaacttttgcttgtaaaatttgctagagtgacgattttaatttaaaggtggacttaatgtttgtgtaaaaaaaaaaaaaaaaaaaaaaaaaaaaaaaaaaaaaaaaaaaaaaaaagggcggccgc

SEQ ID NO: 260151 - DNA, 942 bp, Zea mays
ctgttttgggccaccagctcagaccgccgactgcctttcactccgctactgctcctacccaccatactcactggcatgagcgggggcagcagccgataggccaaaccccacattgacaagcggcggcggcaccgccagaggcaactgcaagatgcacgggcgcgcaccgaataagagcgacaacaccgagtactacgagatcctcggggtgcccaagtcggcctcccacgacgatctcacaaaggcctaccgcaagggtgctatcaagaaccaccccgacaagggctgtgaccccccgactcgctggcaccagagcagtgcaaggctctcgagtcggtacttccgccaaggccttcgtccaagctgacagacatggagatcgatgaatgcgaggagacgaccatgcatgatgtgaacaacatcgcggaagagatgcgcaggaagcaggctcatgctgctcaggaggcgtacgaggaggacgatgagatgcctggtggagcccaaagagtgcagtgcgctcaacagtaagcagactaccataatgggattcaaggcactttggttgctcttcaataatgcaagtccccctgtgaacggattggtccaatggtttggctgcccttaacctccaaattaggaacttaatccgcccctggcttctgcaagccggggaatgtatccttttttgctgcaactgaaaaatgctacccaggcaatagctggctcccttataacttttgcttgtgaaatttgctaaagtgccgattttaatttgtagggggccttaatgtttgtgtaaggctaggcataacatcatgtctcaatggacgttgccgttgcccattggtgcattttattttaatgtaacgcatgggcttgtgctgttggtcaaccaaaaaaaaaaaaaaaaaaacaaaaaaaaaaaaaaaaaaaaaaaaaaaa

SEQ ID NO: 260152 - DNA, 455 bp, Zea mays
cccacgcgttcgccctcgcgtccgcccacgcgtccggtggtgggtcccatgctgatccatttgacattttctcatcattctttggaccctcttttggaggaggtggtggaagcagcaggggaagaaggcaaaggaggggagaagatgtagtccactcacttaaagtttctctggaagatctttacaatggaatctcaaagaagctctctctttcgcgcaatgtcatctgctccaagtgcaagggcaagggctcgaagtcggccgcccccgcgtccggccctgggtgccagggctcaggtatgaaagtcaccattcgccagctggggccttccatgatacagcagatgcagcagccttgcaacgagtgcaaggggactggggagagcatcaacgagaaggaccgctgcccagggtgcaagggtgagaaggtcgttcaggagaagaaggttcttgag

SEQ ID NO: 260153 - DNA, 452 bp, Zea mays
ccagaacgcaacgcaaacacagagactagagagagagagagagagagagtcccgaagcgagcacaagaggccaccgcacagcggccaggcggcgagcgagacacctccacacgtctctcccccttcccctccccttccgttccctctgtagctgcgcccgaccgaacccccctaccccgtggaatcgtcctccgatgcggcgccgataggggctggcggaggagcggaatggcggggcacggcgagaagcggcgccgtacgggaggggcccacgagaagccggaggaggaggaggaggaccgcatctcggatctcccggacgtcctgcgcctgcacattctgagcctgctgccgctcaaatcggccatccgcaccggcgcgctctcctcgcggtggcgccgcctctgggcgtaccgatggccggagccctactcggtgaccattcgccttcc

SEQ ID NO: 260154 - DNA, 1275 bp, Zea mays
gctacatgtcgtctcttttcgtttctcacttcctctcttcgttcccaatttgaaggctgcccaacccttgcgccggtaggcggtggcggtgaggatagagggttacctgaggaggcagtgatggcggccacgattcagtacaaccggagcaacccggcggtgaagcggatcctgcaggaggtcaaggagatgcagtccaacccctcacccgacttcatgtccctccccctcgaggaggacatcttcgagtggcaatttgctatccttggtccgagagacagcgagtttgagggtggaatttatcatggcaggatccagctaccttcggattatccattcaagccaccgtccttcatgctacttacgccaagtggacgctttgagattcagaagaagatttgcttgagcatatccaattaccaccctgagcactggcagccttcatggagtgtccgcacagctttggtagccttgattgccttcatgccgacgaacccaggtggggcattgggctcactggattacaaaccagaagacagacgagcacttgctataaaatcacgtgaggtgccgccgaaatttggctccccacaacgtcagaaactaattgatgagatccatgagcaaatgctcagtaaggctcctcctatcccccaaacgctgccaaatgtgccaaacgaggagctcgcacctgactcttgtgatgagcatgcagacaaggtagatgaaggtggcaacacatccaagtccatgtcaggctcgtcgagtggccatcctgtgcctgaagctgaatcgctggctgcagaaaacacgggtgaagcatcagcagttgaggttgccaaccatcaagtgcctgaagcgagccgtagagaaagcattccaagagttccttcgtctctgcagaatgctgctattgcaacccagaagccaaagcatgacaggctattgaccttggccgcatttgggttgactcttgctattatggcactagtgatcaagaagttcttaaaaatcaatggcttgggcggtttcattgagggcaagttctgagtaggattgtgcataagttggatgtacgagatgactcattcctcgtactcagcatatgctataagctatataaccccgtaagatttgtaattgactgtttagttattatagatgaaatcaaaatggaacggtactatcaataccccattgtatatgtacactggattgaaaattgctgagtatttaagcatctgatgtaaaaaaataaaaaaagggcggccgccg

SEQ ID NO: 260155 - DNA, 453 bp, Zea mays
acgatccattcaagccgccgaccttcatgctactcacgccaagtggacgctttgagagtcataggaagatttgttcgggcatatccaattaccaccctgatcactggcagccatcatggagtgtgcgcacagcgttggtggccttcattgcattcatgccaaccaaccctgctggggcattgggcgcattggattacaaaaaggaagatagacgggcactcggtataaaatcacctgaagcaccgcctaaatttgggtccccagaacgacctaaactaattgatgagatccatgagcaaatgctcagtaaggctcctcctgtcccccaaacgctaccaaatgtgccacacgaggagtctaacgaattacccgcatctgacccttctggcgagcatgcagacaacgtagatgaaggcgactcctcagactcctcgattggcacatataggttca

SEQ ID NO: 260156 - DNA, 441 bp, Zea mays
  unsure (1)..(441): unsure at all n locations
gctaaaacgactaatattttaggacggagggagtatttattaattttgtatgcttctttgaaaatgagtttggtgttgtatttgcaaatcatcagatggtgactatatgggaatgtatttggttacccaatgtggaatggtttattttcatgattttgtgttaacagaagttttaacctttaagtactgaactaagcaaatcttgttgcagtccgcacagctttggtagccttgattgccttcatgccgacgaacccaggtggggcattgggctcactggattacaaaccagaagacagacgagcacttgctataaaatcacgtgaggtgccgccgaaatttggctcnccacaacgtcagaaactaattgatgagatccatgagcanatgctcagtaaggctcctcctatccccanacgctgcagatgtgccaacgaggag

SEQ ID NO: 260157 - DNA, 808 bp, Zea mays
gcaagctgacaagtgagtcgaatcagcttactttctggagtgattcaccgactggggatggagcttcaccatattaccattccatagctggtggcatgtctccatatcgcagttatgctgtgatgtcaccatcaagtaaaccaaatgggtcgtctggaacaggagataaggatgataaagcaagtaggagcaatggttctggttcgtttgggaaagaccatgatcgaacctcgttggttggatcagatgatagtagcttcaagcgatcaagttccatgagctcaggaccagatggaacagtgcatgaagattcaatggatcaccacagagatactgattcagacacatgtcacttgggtgtgcttgtgcatacaaaagcagcattggatgcaaacatatatgacactcaacctggagggcgaaagacagttggaaataatttgattgtgaaagatcaagtcaatgatccattgactgaaaagatcgctgaacttagagaacccacatttccattggatgatggaaaagatttgcagcgtaatgctagtcatgagttaccacaacatctcgaagacaatgatgttgccaaaaaggaaatcataccattacaatctctgcgccctttaccagtacccaaatcaccttcagagtcgtggctttctcgcactttgccatccgtgacaaataggtcacctctgccatcttttcttggaattcaagtacactcaaagaaacaggctccctgggtcataacgcaaccaaaggagaatgatcataaaccttccaggccacaacagataagaattgc

SEQ ID NO: 260158 - DNA, 1230 bp, Zea mays
ttgcctacgcgtccgcccacgcgtccgcccacgcggccgcccacgcgtccgcccacgcgtccgccactattgtctctctcgaaatcggccgtctctctcccgtccggcacttcctccgatcgactagcctgcggcggcgccggcgccggcgaccagcggccatgcgggtggcacccagggtgctcttcctcgtccgcgacgccgcgggctacggcgctgccctcgccgacgcgctccgcccgccgcccgggctaacgagggagtcctcgcccttcgagctcccccttggaaagtacggcctcgacggagagaaggcgtgcgccgagctcctgagcttttccgattccagtggctctccacaggtgaccatttttgttctgccagactataagccacctcttgcagcgtgtgttgtaaatggggtcttggaactgatttcttctgaagctacctccactgagcgaactctaattgtcccatacatcacaagatcgtcaagctatcatcatggaacggaacatgcaacaaaggcatcgactgtacttcatggtgctgaaataggggcaacaactgactatactcacctgttggttggtgggaccactaaacctcctacatccttgcaaatacgtagtgaaccaatattatgtttgctggaaatggtgcgcgtgttgaaggtgcctacagttcttcttgtcacttctggtggacagcagcaaggcaagagctctacagtttctgatcttgaggtactgcaaagcttaggagagcacttggccaagcacacggctttggaattttccaaaggaactgttctcaagagagggatcgaaaaatcaccaattgatcaggaaccctggcgcgagctgtatgggtgacggtgccctcatacagtttggtattagcttaattggctatacatgtttgactcggatgaatgatggtgttttatggagctggaatcacgaaggatctggtccgtcgaaacccctatatataatgtggttcctttcgcctgggtaaatcaactcatcagcaagatatcggatgtcttagaacttgtagacgctttgcagttaaacattaaacgaaatacatttacacttctaacctcttggccagtagtattcaagggttaggtttattgcctgactcgctggaatgtttatagccaaagctccagttttgctttcgaagaatatatatatatatatatatacatatcttctc

SEQ ID NO: 260159 - DNA, 580 bp, Zea mays
  unsure (1)..(580): unsure at all n locations
gttaacgcaataattgctgattccgtggtccttaaaaatccagggccatcacacccgtcttccctagtttcgtcttcaacacgncggtggaagattagtcgctccaattgaaggcaataaagcagtactggggattgcttgaggtgcacaaggttcctgaaacctgacggctgttggtcgccttcaaccaccgagaatccgatgtgttctgagagcatcaaggcagccgccacctgaccatcactcctgctataaattataaggctcatccggggtggcagatcggcagcgggaacttacctgatataatttcttgctgccgtttttgcgcagcaatggattgagagttggtagctgtagatacatctagcttccattctgtacgtagggatccaggaactgtaaatacgttctatggaattgtatcggaaagttcctagtacgccagccagatctagaataagccagagcttgtttcttgcagcggtttgctggcccctcaatgctctcttctgaacacggacatgcttatgcttgtcaagactgcactgggttaccatgtccgggatcttgttgtccg

SEQ ID NO: 260160 - DNA, 622 bp, Zea mays
gagaagaaaaatggtgtgatcgagtttgatgagtttattcattccctaagtgtcttccaccccttggcaccaattgaagacaagatcgattgattttgcatttaggttgtatgacttgagacaaactgggtttattgagcgtgaagaggttaagcaaatggtaattgctattttgatggaatctgatttaaaattatcagatgacttactcgaggccatcatagataagacatttgaagatgctgatgcggataaggatggaaaaataaataaagaggagtggaaggaatttgcgttacgccaccctaacctgttaaagaatatgacactgccttatctgagggacatcacaaccgtcttccctagtttcgtcttcaacacggcggtggaagattagtcgctccaattgaaggcaataaagcagtactggggattgcttgaggtgcacaaggttcctgaaacctgacggctgttggtcgccttcaaccactgagaatccgatgtgttctgagcatctaggcagccgccacccgaccatcactcctgctatacattctaatctaacttatgaggctcatccggggtggcagatcggcagcgggaacttacctgatataatttc

SEQ ID NO: 260161 - DNA, 1291 bp, Zea mays
tgtcggtgcatcccccttaataacagcaaactaccacacccatgtccacctccgtctccgcgccgccgccgttgccgctctcgtcccacccctcaccggccgccggtcgccgccggcatctcgcgtaccgcagatttgccgcagaagaatcagatccaaaccccgtatcttctcttcttccccctccttccccattgtccccgccgctgccatggccaccggcggcgccgcccccaccgctttcgatgccgggtccaagaagaagttgctcatctttgactccgaggaggatctctcggtttctctggcgaagtacactgcggagctgtcggagaagttcgcggccgagaggggtgccttcaccgccgtgctctctggcggatccctcatcgaggcactcaggaagctgacggagccgccgtacctggattcagtggactggagcaagtggcacgtcttctgggtggatgagagggtcgtgcccaaggaccatgtggatagcaactacaagctcgcctatgatgggtttctctccaaggtgccgattcctcctggacaagtttatgctataaacgatgcgttgtcagctgaaggagcggcagacgactacgaagcgtgcctgaagcagcttgttaagaacggtgtgatttctatgtcagcggcgactggatttcctaggtttgatctccagcttctgggaatgggacctgatggccacattgcgtctctcttccctggccaccctcttgttaacgagaaagagaggtgggtcacatacattaaggattctccaaagccacctccagagagaattacattcacgtttccagtaatcaactcatccgcatacgttgcgatggtggtgactggagctggaaaggcggcagcggtgcagaaggcgctctcagacaagcaaacctcgtcagacctgctgcctgttgagatggctgtgctacaagatggagaattcacctggttcactgataaggcagcggtgtccttgctgcagaacaagtagagtcccatggtaaccttggctcggctcgaagccattttagctcataaaataaaagatccatgggcctgcgtgcatagctgcattcgtcctccaggatttcgtgtaacggagactcgatccttttatgtagtgtgtgttgttcggagtaatgttcaaaaactctattggcttccggcttttctgaaacattgctcgttaagtgtttggtttagtacatggttcgctgttccgtgctagacgcatggataggaaaaaaaaagaaaagacaacaca

SEQ ID NO: 260162 - DNA, 669 bp, Zea mays
cgcccacgcgtccgcccactcgtcctctcactcgtccggccactcgtccgatcggggactggatctcctaggtctgatctccagcttctgagaatgggacctgatggccacattgcgtctatcttccctggccaccctattgttaacgacaaagagaggcgggtcacatacattaaggattctccaaagccacctccagagagaattacattcacgtttacagtaatcaactcatccgcatacgttgcgatggtcgtgactggagctggaaaggccgcagcggtgcacaaggcgctctcatacaagcaaacctcgtcagacctgctgcctgttgagatggctgtgctgcaagatggagacttcacctggttcactgataacgcagtagtgtccttgctgcagaacaagtagagtcccatggtaaccttggctcgaagcctttttagctcataaaataaaagatccaggggcctgcgtgcatagctgcattcgtcctccaggatttcgtgtaacggagactcgatccctttatgtagtgtgtgttgttcggagtaatgttcaaaaactctattgtcttccggcttttctgaaacattgacaaaaagtgttggtttaaattcttcaaaaaaaaaaaggcggccgcccggaattcggaccggccgtgcggcg

SEQ ID NO: 260163 - DNA, 372 bp, Zea mays
cacgcctccccatccacctgtcactcttaccgccagccccacatcacggagcatcccccccttaataacagcaaactaccacacccatgtccacctccgtctccgtctccgtctccgtctccgtctccgccgccgccgttgccgctctcgtcccacccctcaccggccgccggtcgccgccggcatctcgcgtaccgcagatttgccgcagaagaatcagatccaaaccccgtatcttctcttcttccccctccttccccattgtccccgccgctgccatggccaccggcggcgccgcccccaccgctttcgatgccgggtccaagaagaagttgctcatctttgactccgaggaggatctctcggtttctc

SEQ ID NO: 260164 - DNA, 1380 bp, Zea mays
cgcgcacatcgcacgaaacacacgagcaggtttccgttctatcctgcgcttactcgactcgtagcagcgcgtcgagcagaccagacccgcccggcctggttgtggtcgaggaggagactggactggaggaggacgggatagcagacgagaggagaggacgcgcacgccatgtcaggtccaccgccaaagccttgggagcgatctggaactgaaggaacttcaggtccagcacctttcaagcccccatctggtggaagcaccagtgatgttgttgaagcctctggtaccgctaaacccagcgaaaatgttactgcgatggaggggaatgccgctcccaatgtaaatagcactatttcaaggcctatgccacagcggccttggcagcagacaggttatggaaacacctatggagggtatggtggatccaacatgtatagttcatatggtggatttggcaacacttatggtaccggtggactcggaaatagcatgtactcgagttacggaggaggttatggtggtggcatgtacggtggtggcatgtatggaggcggcatgtatggtgggatgggaggttatggtggttatggcatgggcggaatgggtggtatgggcatgggtccatacggtaatcaggatccaaattcgatgggccctcctgcatccccgccaggcttctgggtgtccttcctccgagtgatgcatggtgttgtcaatttcttcggacgaatctcattccttgttgaacagaatactcaagcatcctatttcttcatgacagcaatgctgcagctcttcgaccggtccggtatgctctacggcgagcttgcacggtttgtgctgcgtttgctaggagtgagaagaaagccaaagaaggggggcagcattcaggggccagaagcgctggcgttcgagggacctagccggcagtctatcgaggcaccgaaaacgaacaactgggacaacgtctggggaaactgagatcatgcctatgggtgcaacgagttgaatcatatagaagaagtgcaagggctatgacctatgggagtttgcttgccttttgattcatcaaaaagaagattgcggccagataccgcctttggtggcaacttaggggaagctgtgaagaagaaactgctgggcctctcttgcttttcgcagctttgctttgatgtacctgcgagggccatggcccatgacagtggtaggtttttctttaatcgcaactgtaaggtttggtgaagaacggtttcacagtgcactgatatatatgtagctgcttgctgctgttgtgatatcagtgtgggtatcgaatgtttgtatatctctatctgggtaaatagtgtccgccttcgaaaataatacagcaaatgtttgtgt

SEQ ID NO: 260165 - DNA, 487 bp, Zea mays
cccacgcgtccgcccacgcgtccgcccacgcgtccgcggacgcgtgggaactgaaggaacttcaggtccagcacctttcaagcccccatctggtggaagcaccagtgatgttgttgaagcctctggtaccgctaaacccagcgaaaatgttactgcgatggaggggaatgccgctcccaatgtaaatagcactatttcaaggcctatgccacagcggccttggcagcagacaggttatggaaacacctatggagggtatggtggatccaacatgtatagttcatatggtggatttggcaacacttatggtaccggtggactcggaaatagcatgtactcgagttacggaggaggttatggtggtggcatgtacggtggtggcatgtattgtggctgtttgtttattaggttttaatgtattaattaatttttttttatttttttatgtttattttgtatttttttatttttttaatttttttatttt

SEQ ID NO: 260166 - DNA, 1596 bp, Zea mays
aatgacagggataaccttgacaaagctgttgaatgttatcaaatggcactgtcaattaagccacttttcgctcagtcgctaaataaccttggagttgtctatactgttcaaggtaagatggattctgctgctagcatgattgagaaggccatacatgcaaatcccacatatgctgaagcatataataatctaggtgttctttacagagatgctggtagtattactttagcaattcatgcttacgagagatgccttcagatcgatcctgattcacgaaatgctggccagaaccgtttgcttgcaatgaactatattgacgagggctcagatgacaagctttatgaagctcacagggagtggggaaaacgctttatgaaattgtatccacaatatacaagttgggataactcaaaagttgctgaccgcccattgatcatcggttacttgtctcctgattactttactcattccgtgtcctacttcattgaagctccccttacacaccatgattccacagtttgcaaggtggttgtctactccggtgttgtgaaggcagatgccaagacacttagattcaaggataaggtgttgaaaaagggtgggttgtggagagatatatatggtattgatgaaaagagggttgctagcttggtaagggaggataaagtggacatacttgtggaacttactggtcacacagcaaataataagttagggacaatggcatgccgacctgctcctattcaggttacctggattggctaccccaacacaacaggtttgccaacaatagactaccgaatctcagactcattgactgatccacctatgacaaaacaaaagcatgttgaggagttggtgcgccttcctgaaagctttctttgttatactccttccccagaagctggtcctgtttgtccaacgccagcaatttcaaatggtttcgtcacttttgggagctttaacaatctagcaaagattacaccgaaagtgttgcaagtttgggccagaatattatgttcagtccctaactccaggcttgtggttaagtgcaagccattctgctgtgagaacataaggcagaaatttttggccacactggaggagttgggtttggagtcattacgggttgatctgttgccactcatccatctgaatcatgatcacatgcaggcgtattctttgatggacatcagcctggatacatttccctatgctggtactacgactacatgtgaatctttatacatgggggttccatgtgttacaatggctggtgctgttcatgctcataacgttggtgtcagcttgctcagcaaagtcgggttggggaggctggttgccaaaactgaggatgagtatgtgagcatagcgttggatttggcatcagatgtgaatgccttgcaagaactgaggatgaccctgagggagctgatgatgaagtcgcccgtctgcgagggagagagattcacccggggcctggaagctgcatacatggacatgtggcgcacgtattgtgacggagacgtaccatctctcaagcgcttagcactgttagaggaacatcctgttgccaatgagccagactcggacaaa

SEQ ID NO: 260167 - DNA, 2459 bp, Zea mays
  unsure (1)..(2459): unsure at all n locations
gaggggctccgctccaagaataaccggacaaggatagaatgtgttgatattgttggatatttcattgaccatcatgggaccgaggttggtgggttgatgaaaaacttgccatctgttgcagcactgacagcagagcgtgatggtgagattaggaaagctgcccttaatacgcttgcaacagcctacaagaaccttggggatgatgtatggcgatatgttggaaaactctcagatgcccaaagaagcatgctcgatgataggtttaaatggaaggcaagagaaatggataaaacgcgagaaggaaggcctggtgatgcacgagcagctctgaggcgttcagttagggagaatgggtctgatatagcagaacaaagcggagaagtagtgtcccgtccagtggctggatcaatgatctcaagggacttcggatatgcagatgctcatatggataggcacatggtacctaggcagattccaagtacaagtggtcctgtggactggcgcgaagctctcgagatagttgcattaggtttgcctgagcagtccgttgaaggtatgaacgttatatgccatgagctaacacaggcagctgaccctgaaagcacattgcttgaagatcttattaaggaagctgacagattagtgtcatgcttggctgttatggttccgaaaaccttcaattttagcttatctggtgcttcttcaaggtcttgcaaatatgtgttaaacacactcatgcagacatttcagatcaaacgtcttgctcatgctgtgaaggagggtacccttgacaaccttattacggagttacttctttggcttttagatgaaagggttcctcttatggatgatggcagccaattactcaaagcactaaatgttttgatgcttaaaatcttggataatgctgagagaacatcctcgtttgttgtgctgattaatttgctgaggcctttggacccttcaagatggccatcgcctacaccaacggagtctcttgctgtaaaaaatcagaagttttcagacttagttgtcaaatgtttaattaagttgacgaaggttcttcagagtacaatatatgaagttgaccttgatcgaattcttcagagcatccatatttatttacaagaacttgggatggaagaaatacggagaagggctggtgctgatgacaagccattgagaatggtcaaaactgtcttgcatgaacttgtgaagcttcggggaacggcaataaagggtcacctttcgatggttcctatagatgctgaacctcagccaataattctagcatacattgatcttaatctccagacccttgctgctgctagaatgttgacgccatcgggacctatgggtcaaactcactggggtgatgctgcttcaaacaatccaaatccatctactcactcagcagacgcgcaattgaagcaagagcttgctgctgtcttcaagaaaatcggcgacaagcaaacatgtactattggcctctacgaactgtatcggataactcagctctacccaaaggttgatatatttgctcagcttcagaatgctagtgaagcatttagaacctatatcagggatgggctagctcaggtggagaagaatgcagcagctggaagaacgccttctagtcttccactgtccacgccacccccaatagcagcaataccttctccaaaattggcaccgtccccagttcacacaaaatcaattggtagcaaaacagattataacgaagataatgccagtggtgagacacaacccttcagaggtcaaggtgacgccactgaccaacaaactgatagataccagacctcaggcacgttggatgctcttagggaaaggatgaaaagcattcaagcggcagctataggtcattttgacggtgctcaggctcggccgttggcaagtatgaacggaagtaatatgctgcatgggggaacacgattggacggtgagccccagcaacaaagtaatattccacccatggatgagcgagctctctctgggctacaagcacgaatggagaggctaaagagcgggtctatggaattactatagattgataacagtactgagaaataccatccgttgtaattcattgtaaatttgaggcatagtgatgctgttctttgtagataggtatttgaatgtcggaagaactatatggcacggggccaacatttcgtaacccatgtgtcaagccattcttgcagagcctttggatgcagttttagataagaggtagccaaatgttttccttgtagctactctctgaagggctaattagggttgacaaatttcgccgtactgtattagttttcctgtggtgtacagcaatagaatttttcattcttagattacctgaaaatgttacttgtgaaatatatggtttttatagaaatgcaaaaaaaaaaaaacgcgagactagtctcctcgtgccgaatcggcna

SEQ ID NO: 260168 - DNA, 2404 bp, Zea mays
ccgcgctccgcattgcgctagggttttagaactcttcctccggtcctccccgttatccctccaaaaggcagcgcccgctagggttttagccgccgcctccttccctctcctcctccacgtctcctcaacagccgctgccacccggagccttcccgcagcgacgccatgtgggctcttcgccgagctggcaaccccctcaggttccgtgcccaaaaagttgcaagtgcccatgtctgtgcgagtcttgaggtgctgctagctgctgatgcaaagaatgtagaagagcaccatgaggcagactgccagaaaatgtgctgctgtcataaaccaaggtcaccagcctttcaattgtcattttcatctggccagtttgcttgcagtaggggtttctcctctcagccaggtgcaaattctggtgacaaagctgatgaggtagaggaccgattttctgatctcgaggttccaccagcagctgttcaaaacgatgacgggttggcatctgaagatagttctgatgaggatgctgctgacgaatttggcttgcctgatgtggatgctgatgcaaaacctgagaaggagcacactagaagattatctgattctattctcctcaagacattatctgattctattctcctcaagactgtgttggaagctccgaggcatcaagtcacttcagcacttgagaaatgggcaaaggatggcaatgcatttgataggggtgaactctattatgttcttcttaatcttcgaaagcggcattggtactccaaagccttggagcttgttgagtgggttcaaaaatcacagctattcgaatttgtagagcgtgattatgctgcacatcttgatttaacagctaaggtctatggtcttcataaagcagaacagactattgagaaaattcctgcatcttgtaggggtgagattgtttatagaacacttttggccaattgtgtttctgcatccaatataaaaaaatcggagcaagtttttaataggatgaaggatcttggatttccggttacacaattttctttcaatcagcttctgttactctacaaaaggctggacaggaagaagattgctgatgttcttgcaatgatggaaaaggaggatgtgaaaccatctctctttacttacaagattcttgtagatgccaagggttcagttggagatatagaagctatggagaaagtgattgaatcaatggagaaagatagcattgagccagatctcacgtttaatgctacaattgccagacactacatattttatggccagcgtgagaaagcagaggcacttctgaaggcaatggagggtgatgatatccagaaaaatcgtgctgcttgcaagactttattacctttacatgcttttctgggcaatagtgatgctgtggaaagaatttggaacgcgtgtgaggataatactcgcgtagctgagtccgtgtctgctatagaggcctttggtaagcttggtgatgttgaaaaggcagagaaggtttttgaggatatgcttgtgcattggaaaacactctcttccaaattctacaacgcgttgctaaaggtgtatgctgatcacaacctcttagacaagggtaaggaactagcaaagcggatggatgagaaccgtgtcatgtttggtgccccaactctggatgcactatgtgaagctatacgttgaggctggagaggtggagaaagctgagtccctagtgcacaagctatctatacagaaccacatcaagcctatatacaacacatacatgacgctgcttgacagctactcaaagaaaggagacgtccgcaactcagagaaagtgttcaacaagttgcggcagtccggctacactgggaggatcaggatgtaccaggtgctgctccatgcttatgtacatgctaaggcccctgcttatggattcagagagaggatgaaggctgacaacattttccccaacagtgttgtgtcaactttgattgccgctaccgatccgtttgtcaagaagaaatcaatatctgacttgctcgattaggttatggagtagtgtgagatccatcatgtttccgtgcaacgcatgtgctgccttttttttttttgcattctgctaaagaatacggcgggataataatgtgtcctagtcttgtaatgaactactagtgtctttgcatttggactggttcgcttgttgagtcatagagattgctgaactcgtgagtcatggaaattggcaactgtgtgctatttgttcttattttgttgtgacccatttcatcacccaagtagaatcaagatgacccttttgcccctccaaaaaaaaaaaaaaaaaaaaaaaaaaaaaaaaaaaaaaaaaaaaaaaaaaaaaaaaagggcggccgcccgggaattcggacggtcgtgcggc

SEQ ID NO: 260169 - DNA, 758 bp, Zea mays
cgcctccccaccgcggcagatccgcaatccgctcctcccccaccgcgctcccaccacaccagagccgctgtcaatcgcctccccactgcggcagatccgcaatccgctcctccaccaccgcgctcctcacccacgccagggacaagactgtctacctccacgcccgcctcaccaactccgcggccaccgccaccgccacgcccctcccccatggtcgtcgagtccgagtggtggaaccagcgacgcatgcgcgtcgagggcgacgtgaaataggtgctccaccgcgggcacaacgggcacagtggaggtggaacgagcaccatcgagttctggttccaccgaatccaccgctcgcacaccggatccatcgctcccacatgcccgcacaccggatccaccgctccctcccccgcgatggcctggttccaccgagacaactgcggggctagggtttggattcgtgggtggagcccaaggctagatccagcagggggagggaggctgaggttccgtgcccaaaaagttgcaagtgcccatgtctgtgcgagtcttgaggtgctgctagctgctgatgcaaagaatgtataagagcaccatgaggcagactgccagaaaatgtgctgctgtcataaaccaaggtcaccagcctttcaattgccattttcattctggccagtctgcttgcagtaggggattttcctctcagtcaagcgcaatattctggtgacaagttttatgagttagtagaccgtttttct

SEQ ID NO: 260170 - DNA, 533 bp, Zea mays
cactgatgaaattggcttgcctagtatggatgctgatgtaaaacctgagacggagcacattaaaaggacttttggttccacccttctcaagactgtgttggaagctccaaggcatcaagtcacttcagcgcttgagaaatgggcaaaggatggcaatgcacttgataggggcgaactctattatgtgctccttaatcttcgaaagcggaagtggtaccacaaagccttggaggtatttaacatataatttactgagaggtagttttatacttaaattgggtgcaaatatttagtatgtgggattggaggtgcttaaccaagaggtggatctatatattttttaagaacacttagtatgctggataatatgtgaaacaaacaatatgcattactctttagcttgtaatagcctgctcaatataaaaataagtatttagccagcagcttagatgcatgtttgctttgtgaccctggaaacctgctaaggcacaggcaggtgctcccaggcacatgatttgctgagcctttggggt

SEQ ID NO: 260171 - DNA, 404 bp, Zea mays
acaggatgtcccagtatctgctccattcttatctacatgctaaggcccctgcgtatggattcaaagagaggatgaaggctgacaacattttccccaacagtgccgtggcaactctgattgccgctactgatccgttcgtcaagaagaaatcagtatcggacttgctcgattagattatggagtagtgtcaggtactgaggtccatcatgttgctatgcgcatgtgctgtttcgataagactatggagtagtgtgagaatatatggtgagataataacgtcttagtcttgtaatgaactaccattgactttgcatttagactcatgcgctttgctgaacttgagtcatagaaacaggataaagtgcacgagagagagagaacttgtgctaattcctgatataata

SEQ ID NO: 260172 - DNA, 648 bp, Zea mays
  unsure (1)..(648): unsure at all n locations
cggacgcgtgggccgggactgggggttcgcgggggactacgtcgagggcaatgtggctcatgctgcagcangaacagccgggggagtacgtcgtcgccactgaggagtcccacaccgtcgaggagttcctgcaggctgccttcggctacgccggcctcagctggaaggatcacgtggtcattgacaagaagtacttccggcctgcagaagtcgacagcctcaagggggacgccaccaaggcgaggaaggtgctcaagtggaagcccaaggttgggttccaggagctcgtggagatgatggtcgatcacgacattgagctcgccaagaaggagaaggtcctggtggatgctgggtaccgtgatcccaagcaacagccatagaaacatcacagttgcttcttgctctgttggggctcggattcagattgttcccctcatacatggtggttctcaagggtagaggttgaccgaagttactatcgatatttatcctggtaagaaataaggattgttgcagtatgatcttacagtgtgttcatttacttttctggctatgttatgtgctttaatcgaatgaatgaataatccacgccaatttggtttttggaagaggaaaaaaaaaaaaaaaaaaaaaaaaaaaaaaacgaaa

SEQ ID NO: 260173 - DNA, 791 bp, Zea mays
cggcccctccgttcgccgcaaaggcctctagaagcaatcaggcgagcggcggctgcggcgcgatgggagagcaggtcgtgacggagcgtatccagcggaagctggaggaggccaacgctaccgtccaacagcacctcgccggcatccaggaccacgtcaacttcaccatgcagcaagcatacttcaagtgcgcatatgattgcttcgatcggcgccgtactcaggaagcgatcaacaattgtgtggagaattgtggtatgcctgtccttgctgtcaacaatgtttttgagagtgagatggccaagtttcaggaacggttgaaccggtcattgatggtctgtcaagataagtttgaagctgccaagctccagaagatgaaaacagatgcaactcgggaactggaatcctgtgtcaacagatctattgatgacagcctcagggtccttccgcatgtggtggatcagatcaagtccaccctcaaaatcaattagaggcactattacttttagcaaatgaaccagatatagttgagaatgtttcatattcacattcgctgcataactccacattttcagagctcttaccgatattgatagaacatgatcaccctatcgtagttttttggattctgctcttaccacctagtcctggcatgtcaacagcgtcgacattttgaactctactgagaacacagcttaggcattgaaaggctggatgaacttgttgtgctacatgtacaagaatactcttacgtcttgtgattaaaaaaaaaataaataaaataaataaat

SEQ ID NO: 260174 - DNA, 403 bp, Zea mays
tgccaagctccagaagatgaaaacagatgcgactcaggaactggaatcctgtgtcaacagatctatcgatgacagcatcagggccctcccatatgtggtgcagcagatgaagtccaccctcaatatcaattagaggcattattacctttagcatatgaaccagatatagtttgataatgtttcatattcacattcaaggcataagtctacattttcagtggaaaaacccttagaactatgcagagctcttaccgatatcgattgtttcgtagttttttgaattcttgctcttaccagcgtcgacattttgaattctgctgagatcacagcttaggcattgcaaggctggatgaacttgttctgctacatgtaccacaatatcttttatgtctcgtgatttttc

SEQ ID NO: 260175 - DNA, 377 bp, Zea mays
cccacgcgtccgcccacgcgtccggaaagaaaaacagacacacgtcactgttcgccttgtccggtcgtttctgctccattcctcctcctgcaagccgcaaaggaatcaggcggagtggcgcgatgggagagcaggtcgtgacggagcagatccagcggaagctggaggaggtcaacgctaccgtccaacagcacctcgcgggtgtccaggaccacatcaacttcaccatgcagcaagcatacttcaagtgcgcatatggttgctttgatcggcgccatactcaggaagcgatcagcaactgtgtggagaattgtagtgtgcctgtccttgctgccaacaatatttttgagagtgagatggccaagtttcagggaatg

SEQ ID NO: 260176 - DNA, 2326 bp, Zea mays
ccctgcgtccgcccacgcgtccgcccacgcgtccgcccacgcgtcggcccttttcctctaacctttagctttcctccctccctcctctctttctctcctctaacaagaacttagtcccggcagttcagatcctaagttgctgaccttgctgctgattgttggagatagatttgctgcttctaagttggaaataccatgagtccaccgagtgtgatggggcagtttggggacacgacctacaccaaggtttttgttgggggactcgcgtgggaaacccagaaggagactatgaggaagtatttcgagcagtttggagagatcctggaggctgttgtcatcactgacaagaacactggcagatccaagggctacggatttgttaccttccgggactcggatgcggcaatgagagcttgcgttgatcccgcaccggtgattgatgggaggagggctaactgtaatcttgcttcccttggggttcaaagatctaggcctcctactccccagcatggaggagctagaaactttagagtaatgaaatccttcaaccagcaggcaggaatccaaggtggactcggcgcagcttttccttctcatgccaccttccctcattatgccatcccacaaggccttcccttccatgtctatgggtactctccatataccccagactatggttatccaacaaacttctacaatatatatggaggagctcagtacccgttttatggaggagcaacagctggcatggtgacaggaacaagtcccttttatccatatttccaatttgggcagtcaggaaacactactaccaactatacaagtggacaaggctacaacttgcaactacccacaaatgttccacttctcaactgtatcatctacagctgcagctgtgaacggctttgctcagcagtatggaggaccattgtcactagcagcaagtcctcaagcccaagcagtgtgtatccccattaaacaggcatgactatggcactcgcagctccaaccctgccaactccaacacaggctgctcatccttaccggttgattccctcgcactttgcagtttctgctgctccagagcaacccttggcctaaccatggtctcccttctcaccgttgttgtactgtctcgtttccgacgtgtttgagtccatgcatccatctctaacaccaaaaggcactattgtagatcacgcttatcagtcaaagtgctcacctccatatcccacatggtcatgtggtgaatggatattagctttagccccaggatgggcataaagcttcatgccccaaggatggggtgttctaacagacaagtacaaaccccaaccattctaacaatagtccaaggaaggactttatctgggagagttaatttcagccgtaccaagacaatgctgtagctaaaagaaactaacagtcaagcatgacccagggatggttcatgctgatactagtcaaattggacaacaatgacagctaaataactgactagcatgccactcccacatgtcattagtagaatcccaactgtacctagcttaggcatggcatctcttgttgaagcatgaaccatttagcaaaacctacccttctatagtcccgatgttacctagaccaaatgcatttgatatatgaccagcgactacttgtgtaaccaactcatcttttctttgcaaatgcttagatgcatcaactaacattttatttgatctttcagttgatagcttgcatctaggtggtcaaggctctaaggagagcctgtgcccctaatcagaaacaggttcagagtagtgccaatgtttgtttttagcacttggcactaccccctgtccctcgaaacacagcattggggactccaaagaaggctttggagtaaccaagcactgctgtgtaactcattaacacaatggacccatagatgaatttttgttgtcttgggccaccccactcatgtagatgtcattacttctcagtgtcactaccatggttaggtccaggcccccctccccaaccgcgtcccccacctctctcactgcacatcgcagagaccttagtgctctttaatctactattaccaggcatggtggttgtaataataaagtagcgctgtgctactcgtaggacatgaagaactatttgttattcaacccttcatatgtacttaatatcttgtctatttcagttcagtagtcggtacttatttccatccattgtagtgcaccatataatgttgtgtaatatatgtccactgtgctgcacatttcttaatcatctgtcgttcagttgcatatattccaggtaaatgtcctaccagtct

SEQ ID NO: 260177 - DNA, 2618 bp, Zea mays
cccacgcgtccgcgggccacctccctacggaggagacgacccccatctcaaggtcgaggtcgagggctcctctctctctaccatctccgttcgatcccatcgccccgccatcgccgccgccatggcgtttctcgcgcgggcgctccgccagtccaactcgcgcctgtcgtcgcgctgccccgccgtcgccgcctcctgccgctggatctccccgaccgccgccgcgggatcgccggaggccggcgcggcggtggcgccggccgacccggagctgcctccgccgcgggagcccgttggcggcgcccgcgtggagcttcctcccaacccggaggacgcgctcgaggtattcgtggatggccatgcggtgcggatccccaaggggttcaccgtgctccaggcctgcgaggtcgccggcgtcgacatcccgcgcttctgctaccatagccgactctccatcgctggaaactgccgcatgtgtctcgtcgaggtcgagaagtcgcccaagcccgtcgcttcctgtgccatgcccgcgctcccagggatgaagattaagacaaacaccccagtggcaaagaaggcaagggagggtgtcatggagttcttgctgatgaaccatccactcgactgcccaatctgtgatcagggcggcgagtgcgacctccaggatcagtctatggcatttggtgctgaccgcggccggttcactgagatgaagcggtcagttgtggacaagaatttgggtcccttggttaagacagtgatgactcgttgcatccaatgtacaaggtgtgtcaggtttgctactgaggttgctggagttcaagaccttggtatgttaggtcgtggcagtggtgaagaaattggaacatatgttgagaaacttatgacaagtgagctatctggaaatgtcattgatatctgccctgttggtgctcttacatccaagccatttgcatttaaagctcggaactgggaacttaagggcacagagactattgatgttactgatgcagtgggatccaacataagaattgacagcagaggacctgaagttatgcgtgttggtccacgtctcaatgaggacattaatgaggaatggatatcgggtaaaacacggttttgttatgatggtttgaagaggcaaagactaaatgaccctatgatccgtggtcctgatggcaggtttaaggctgtgacgtggcgtgatgctcttgcagttattgctgaggttttgcatcaagttaagccggaagaaataactggagttgctggaaaactttctgatgcagaatccatgatggcactgaaagattttgttaacagaatgggttcagataaggtgctgtgtgagggaaatggtcctaatcctccagcagatctgcgatctaactacctaatgaatacgagcattgctgggcttgaaaaggctgatgtcttccttttggttggcactcagccaagggtggaagctgctatggttaacgccaggattcggaagactgttaaagcaacacaagcaaaggttgggtacattggtcctccagctgactttaactatgaccatgagcatcttggcacaggaccacagacccttgttgagattgcagagggtcgtcatcctttctgttcagtactgcaatctgccaagaaccctgtcatcattgctggagctggattatttgaacgggaagaccaagatgccctattctcaatgattgagactgtagccaagaagttcaatgtgactagaccagactggaatggccttaatgtcctgttgctccatgctgcacaggcggcagctcttgatcttgggcttgttgctaatcctgccgagagcatcaagtcagcgaagttcctgtatctgatgggagctgatgatataagcctggacaagcttccagacgatgcatttgttgtttatcagggacaccatggagacaaggctgtctatagggccaacgttatcctgccatcttcagcattcagtgagaaggaaggcacctacgagaatactgaaggatgcacccagtggaccatcccagctgttccgacggttggtgatgctagggatgactggaagatcatccgcgctctttctgaggttgctggggctcagctgccttatgacagcctctcagctgtgagggaccggatcagtacggttgcaccaaatctagtacatgtagacgagagggagacacccacaatctctgcggaggttaagccgcctgtgaagcaacaagtcagctcgacaccattcaaagctgttgtggagaacttctacatgactgatgcaatcacccgagcttcaaagatcatggcccagtgcagtgcaaccttgctgaagaagtgaggttttgcacaccatcaagctaatcttctgcaaacagtttcttagtcccctttttacctttgctgagtttcagtgtttcaccacctgttgcttgttttcttgagaggtttgtgtataatttggactgcctctaggtttccagagcagcaaaacttgatcagtacatttccgcgttgtgtgagaagcagaacatgcccaataagcttgttgctcccattgaatcatacaagtgccacaagcaaatgatttttgccttttgaat

SEQ ID NO: 260178 - DNA, 684 bp, Zea mays
caaacttttataatatatatggaggacctcagtacccattttatggaggaggagctggcatggtgacaggaacaagtcccttttatccatatttccagtttgggcaatcaggaaacactactaccaactatacaagtggacaaggctacaacttgcaatacccacaaatgttccacttctcaactgtatcatctacagctgcagctgtgaacggctttgctcagcagtatggaggaccattgtcactagcagcaagtcctcaagcccaagcaggcatgactatggcactcgcagctccaaccatgccaactccaacacaggctgctcatccttaccggttgattccctcagtgtccactgctccagagcaacccttggcctaaccatggtctcccttctcgccgttgctgtactgtctcgcttccgacgtgtctgagtccatgcatccatctctaacaccaaaaggcactattgtagatcatgtttatcagccaaagtgctcacatccatatcccacatggtcatgtggtaactggatattagctctagccccaggatgggcacaaagcttcatgccccgaggatggggcgttctaacagacatgtacaaaccctaaccattctaaatatagtccaaggaaggactttatctgggagagttaatttcagctgtagcgagacaag

SEQ ID NO: 260179 - DNA, 502 bp, Zea mays
cccacgcgtccggccatccacaatctccgtcgaggtgaagccgcctgtaaagcaaaaggtcagctcgacgccattcaaaactgtggtggagaacttctacatgactgatgcaatcactcgagcttcgaagattatggcccaatgcagtgcgacattgctgaagaagtgagatttgcacccttcgagctaatcttcagcaaacaacttcttagttccctccctttttttttttacttgctacgagtttcgccaccgttgcttgttttcttgggaggttttggtgtataatttggactgcctctagattttcttcagagcagcaaaacctgatcagtacatctccgtgctgtgtatgagaagcagagcatactcaataagcttgttgccccgactgaatcatcatacaagtgacaaacaaaaaaaaaaaaaaaaaaaaaaaaaaaaaaaaaaaaaaaaaaaaaaaaaaaaaaaaaaattaaaaaaaaaaaaaaggggcggccgc

SEQ ID NO: 260180 - DNA, 319 bp, Zea mays
ggtactctccatataccctagactacggttatccaacatacacttttggtggagcagcagctggcatggtgacaggaacaagccccttttatccatatttccagtttgggcagtcaggaaacactactaccaactatacaagtggacaaggctacaacttgcaacaatacccacaaatgttccacttctcaactgtatcttctacagctgcagctgtgaccggctttgctcagcagtatggaggaccattgtcactagcagcaagccctcaagcccaagcagtgtgtatccccattaaacaggcatgactatggcactc

SEQ ID NO: 260181 - DNA, 278 bp, Zea mays
gtcaggtttgctactgacacatcttgtacattggatgcaacgagtcatcactgtcttaaccaagggacccagatgtgtcaggtttgctactgaggttgctggtgttcaagaccttggtatgttaggtcgtggcagtggtgaagaaattggaacatatgttgagaaacttatgacaagtgaactatctggaaatgttattgatatctgccctgttggggctcttacatccaagccatttgcatttaaagctaggaactgggaactgaaaggcaccgaga

SEQ ID NO: 260182 - DNA, 862 bp, Zea mays
  unsure (1)..(862): unsure at all n locations
tttgctttgggcggacgcgtgggcggacgcgtgggcggacgcgtggggtcacgtctcccagatctaactgccccccgactcacgaatcccaaagcctccatggcgacgcaccgccactgcctcccactcctcctcctcgtggccgccgccctcgccgccgtccctgctcgcgcggcgctgggcggcgggcgcggcccgctgctgggcgggtggaacccgatccctgacgtgagcgactcgcacatccaggagctaggcgggtgggcgctggggcaggcgaagcaccagaagctggccgccgacgggctgcggttccgccgcgtggtgcgcggcgagcagcaggtcgtgtccgggatgaactaccgcctctacgtcgacgccgccgaccccgccggccgcaccgtgccctacgtcgccgtcgtgtacgagcaggtctggacccgcacccgccagctcgcctccttcaacccggtgccccgcgccccctgaaaccatacggacacgggtgggccgaagcgaccacgacgatgttctccgtcaattacgtgtcgagctaatcttattattgtttctattattataataatgcttctccctgttcctatggacctatagtagtatactagtatgttgcgagggagcgagtagaccgtgtgtttcgctatcgtgggactagaataagccatgccaatgaacatgagccgaatagaggctacgtactgttattgtatcagtactagtaccctatatatatgggcgcactacagttctgtgatgtaatggattgtgctagtatttgactcttgcttttgtacagaattattattattttatatggtgttctaggaaaaaaaaaaanaaa

SEQ ID NO: 260183 - DNA, 889 bp, Zea mays
gcgattcctgctcacactgttgttgatctacagtaagcaaagcaagtccatcagaggagctaatccggtctatgatcgaatcacttctcaagttgatacacctgccatttatgatgtttttcagttggagaaaacatttaagacaacattttcgttacttgttctccatatgtggcttgttctacgccgcttgaaggaagaagggaaggatggtgttaagtttggacagtacatctacgaaatgtacaaccacgatgtagagctcagagtttctaaagctggggttaacttgctgctgacaaaatggatgaaggagctagagaaaatattctatggaaacattgtgaagtatgatgctgcgataagcccagaggctcgtcaagatgatcttgtaaatgtcatctggagaaatatttatgctgaggaaggttcagaggctatggatgtggctgctgcccctgctgtccaggcattggcaagatacacacgacgggaggcaacttgcctgtcattgactgacagagattctatgttctcggggaacttcaaattcacagccctgctgccggcaactcccagccccagcccaaagaagcctgggcgatgaactgccgtggtgcttcctctggggtccccacgattcaacaccatttgatggatatacttcgttccagataggaagtttgggttgttaatctctagtctcgagtatttgctcgaggagaccacccaccagaacggagccttcttgtcgccggaccaggcatcgattcgcacactgtatgaggcgatgctgaaagaaaaaaaaaggaaggcagcaccgatgttcggtcattaatatgcagtttctttcggctgcatgtgtctcttatgtagagtaaaactaatt

SEQ ID NO: 260184 - DNA, 852 bp, Zea mays
cggacgcgtgggcggacgcgtgggcggacgcgtgggcggacgcgtgggatttatgctgaggaaggttcagaggctatggatgtggctgctgcccctgctgtccaggcaagctcgttttcctgacggagacaactgcccctgctgtatgttctgttatttttcagctttcacagcctaaagctacttgttctgttatttttcaggcattggcaagatacacacgaagggaggcaacttgcctatcattgactggcaaagattctatgttctcggggaacttcaaattcacagctctgctgccggcaactcccagtcccagcccaaaaaagcctgtgcgatgaactgccgtggtacgtccccatttcacgcgaaggtttagaaaacagcaggatcggtggatacctgctgttctctcagcagtacaaataacaggcttcttccagcagttgtttactctggggtccccccgattcaaacccctttgatggatatacttcgttccagataggaagtttgttttgttaatccccagtcccgagtatttgctctaggagacccccccccagaacggagccttcttgtcgccggaccaggcatcgattcgcaccctgtatgaggcgatgctgaaagaaaaaaaaaaggaaggcagcaccgatgttcggtcattaatatgcagtttctttcggctgcatgtgtctcttatgtagagtaaaactaatttattctcgcatatagaatgatactataccggacatccattgatgatgtgaaccgtatgcaagatcatcgccatctactgtagtaaaaaaaaaaaaaaaaaaaaaagggcggccgcccgggtattcatgccgg

SEQ ID NO: 260185 - DNA, 272 bp, Zea mays
ccaagatacgcacgacgagaggcaacttgtctgtcattgactggttaggtttttccgactctaaacacatttgtaattttcacctcgaataggttgcactcactggatacttcttgtctggtatattctaactacagacagagattctatgttctctggaaacttcaaattcacatccctggtgccggcaactcccagccccagcccacagaagcatgggcgatgaactgccgtggtacatcaatatttcatacgaagatttttaaacagca

SEQ ID NO: 260186 - DNA, 507 bp, Zea mays
gtgaaaggttttaagggcaaaagccctcggagcgtcactgggagaagagaaacgcccggcggcgcgaagcgagagggtgagaatatcggagttcggcgatgtcgaagcggcagggaccgccgaaacaccagaaccgctacgcgtggaagccgaaccttggtcagaagatcaacgaaaccgagcccgggggcaggttccgacctctgtcagaaatcaccggcgtctgtcagcgctgccgggatcaaatcgactggaaacgcagatacggaaaatacaagcccattgttgagccagcaaaatgccagaagtgtaataagcgaaacgtccggcaagcataccataacgtatgcagagattgctccaaggacctcggcatatgtgctaagtgctgcacatgtgttaatgagcttgtcggaagggatgcgaatgaggaggaaagtgaacgcaagtcactagaagaggctgtcagaggtgctagggagagggaacgacgtacacttcttcgta

SEQ ID NO: 260187 - DNA, 588 bp, Zea mays
accacgcgtccgcggacgcgtgcgcgcacgcgtgaggcaaccgtgtgccttttggagacgcgatgtcgtccggcaacaagatcagcgtggccttgctgagcgtggccctagtgggcctgctcctctgccacctcgccaccaccgcctccgcccaccagaaagacatccacgtcctcggcagcgtcgacggctccagcgacggcagcagccccgagtccgaaggccgcgtcgtctacgcggacatgaagctggctgatacggaatccgatgcgccggcgccggcgccggcgccggggccgtcgtccggttgaactgagaagcgtgcgtccagccaagcaaggtggtcaaaaccgagaactaattaagggctcgattgtgtgtccggctactactgttcttgccataattatatatagatacgcaaagtgtggccaagcctacccacatgcatgctattgcatgcctccgaatatatattatccgactcgatcctgccaaattgtttcgtcgacttcattatatatatcccatccctttaatttaatggagaagtgtgactgctgttcgtgatggttttgtatgcgcaaa

SEQ ID NO: 260188 - DNA, 698 bp, Zea mays
tccggaaacaatgggtgatattgagaatcataataatccaattcaattcaatgaccgcccctggatagagtcccctaactcgtggagatcactatgtgttgtcacgcaatcagactgtcatgctctgtcacacaatgctgacatttgcaaccttcttgagagcaaaaaggtctcaaagtctcttgagagtgacttcagcaataaaatgaaccagctgttgctaacagctctgcaaaaacaaaggcaacaacggatgatggatggctttggaggatactatgatgaacgcatgtactggagacaaaatgatgaaattcgtgatgctcataaggaggcatctgctccatgttcatcagcccctgtcgcacatcttggtgctcatcagcaagagtgttggcagcattcttcatttggaagtcaacatcaacaccacgataaccaaaatttacttgaaatggaagtcagggtaaggggtgaaatgtcccagattcatcaggaaatatatcaactgcggaagttggtggaaagttgcattgcatcccaagtaaagatgcagcactccattaaagaagaggtgtgcagtgcacttcgtgaggcaggcttggtgcgaactcaacccgacacagcagcagcaaaaaggggtaactgctgcatctgccatcgaatgcaaggtgactctctactttacaggtgtgggc

SEQ ID NO: 260189 - DNA, 429 bp, Zea mays
cttttctttgcggcgacacgtcagggagagcggcgccgcccgtggctaggtctttgtcggggcgcttcgccggcgacgagcatccgccaggtgcccagccatgtcgtccaatgcgggggcctccgtcgctcccatcggcggcggcgctgctcgtgcccgcagtcgcagcttcgggagcagcagcagcaacggccgggccgccgacggcaatggcgctggggtgttcgtgagggcgggggccgacaacgagatgtacgtgcgggcggataagatcgacctcaagaacctggacgtgcagctggagaaggcgccgtcccaggtgtggctggagcaccagcggtcgcagcggacggcgtcgccgcggccggagacgccgctgctcgagtgggagatcgacctcgccaagctcgacatccagaaccagatcgc

SEQ ID NO: 260190 - DNA, 2002 bp, Zea mays
gcctaccgttcggggtggtggcatccgggattcgtccacacccaggcacataaaagccgcctctcgccgccgactgcaaaccctcgtttttctctctcctgcgctgcgccgtccttcacctccgccgccgaatccgagactctgatctcgggttcaccgcagcgcacagagcacccccgactcccggcccgatccgcgctctcctctccgacgcttcagtcatggcaggaatggcacccgagggttctcagtttgatgctaagcactatgattctaagatgcaggagctgctgagcactggtgagactgaggagttcttcacttcatatgatgaagtttttgaaagttttgatgacatgggcctccaagagaatcttctgagaggcatttatgcttatggttttgagaagccatctgcaattcagcagagaggaattgttcccttctgcaaggggcttgatgtcattcagcaagcacaatctggtacaggaaagacagcaaccttctgttctgggatcttgcagcagcttgactatggcctggttgaatgccaggccctggttcttgctcccacccgtgagcttgcacagcaaattgagaaagttatgcgcgcgcttggtgactaccttggtgttaaagtccatgcatgtgttggaggaacatctgttcgtgaggaccaaaggattcttgccagtggtgtgcatgttgttgttggtacacctggtcgtgtgtttgatatgctgcgcagacagtccctccgccctgataacatcaagatgtttgttcttgatgaagctgatgaaatgctttctcgtggtttcaaggatcagatttatgacatcttccagcttctgccatccaagattcaggttggagtcttctctgctaccatgccccctgaggcccttgagattacccgcaagttcatgaacaaaccagtgagaattctcgtgaagagagatgagctgacccttgagggtatcaagcagttctatgtgaatgtggacaaggaagactggaagctggacacactgtgtgacctgtatgagaccctggccattacccagagtgtcatctttgtcaacacccgccgcaaggtggactggctcactgacaagatgaggagcagggaccacaccgtttctgccactcatggtgacatggaccagaacactagagacatcatcatgagggagttccggtctggctcctcccgtgtgctcatcaccactgacctgcttgctcgtggtattgatgttcagcaggtgtccctggtcatcaactatgatcttcccacccagccagagaactacctgcatcgtattggtcgtagtggtcgttttggtaggaagggtgttgccatcaactttgtgacccgcgacgacgaacgtatgctgtttgacattcagaagttctacaacgtgttgattgaggagctgcctgccaatgttgctgaccttctgtgatcaatttgaagaaaaaacaaaacaaaaaagggtggtgaggaacctggtaaggcttggttttgtcgaaataccgtgggagagggggtgataaggacggtggggtttctatgttgaagtcgtggtcatggacaatttgtgattttttctcctttatgccatgttttggaatttttgtagctgcctaggccttgtggtaatgtgctgctgtgggggttcattagtatgaagaggaagacgctgctggcgctgagtctttctctttattagtattttgtttaaaactatgtatgaccgaatggtggtatttatttgtgtcatccttgactcttattctgctgcaaccagatgtatcgtgccatgtctgcaccactggtctttgctatcctgagtaaaacctgtttactctgtcgagcttgtcgctgatacaccgatcctagctgttttgagtaaaacctgtttactctgttgagcttgtcacctggtgatgcaaggtgcttattgactggtaatgtattttgaagtcgttatactatatg

SEQ ID NO: 260191 - DNA, 787 bp, Zea mays
  unsure (1)..(787): unsure at all n locations
cccacgcgtccgcccacgcgtccgcccacgcgtccgcggacgcgtgggggaagactgggggctggacacactgtgtgacctgtatgagaccctggccattacccagagtgtcatctttgtcaacacccgccgcaaggtggactggctcactgacaagatgaggagcagggaccacaccgtttctgccactcatggtgacatggaccaggacactagggacatcatcatgagggagttccggtccggctcctcccgtgtgctcatcaccaccgacctgctcgcccgtggtatcgacgtccagcaggtctcacttgtcatcaactacgacctgccgacccagccagagaactacctccaccgcatcggccgtagtggtcggtttggaaggaagggtgttgccatcaacttcgtcacccgcgacgacgagcgaatgctgtttgacatccagaggttctacaacgtgaccgttgaggagctgccggccaatgtcgccgaccttctctagatagtatggctgctaaggtttctggataaaggagtttgtttttgttaaaatacgccaacttttctctgctttggatgagtggtaaggtccggggtctgttcgtattgtggcgaaggatgggttttaagtttattttgtcgtatgcaacgtttcggaatttttgtagcgagtaggctacgtgccgctcctgggctagctgggtgctgagccactactgaagtatttttcccttacaaaaaaaaaaaaaaaaaaaaaaaaaaaaaaaaaaaaaaaaaaanngaa

SEQ ID NO: 260192 - DNA, 541 bp, Zea mays
tcggccacttctttcggccacgcgttcgtccacgcgttcggtcttcttccacacaaacgccaccgccgcatcgaatccgagacgccgatctcggattcgccgtcaccacacgctgccctcgtcgcgctctcccgccgccgccgctcgtctcgtcagccatggcaggattggcaccagaagggtcgcaatttgatgacaagcagtatgacaagaaaatgcaggagatattaactgaagacttcttcacttcatatgatgatgtttgtgaaagttttgacagcatgggactgcaagagaaccttctgagaggcatctatgcctatggttttgagaagccatcggctattcagcaaaggggaatagttcccttctgcaaggggcttgacgtgattcagcaagctcagtctggaactggaaaaacagctaccttctgttctggaatcttgcagcaacttgattatggattggttgaatgccaggcattggttcttgctccaacccgtgagcttgctcagcaaattgagaaggttatgcgtgctct

SEQ ID NO: 260193 - DNA, 626 bp, Zea mays
cgcattggtcgtagtggtcgtttcggtaggaagggtgttgccatcaactgtgtgacccgcgacgacgagcggatgctgttcgacatccagaaggtctacatcgtgttgattgaggagctgcctgccaacgtcgctgaccttctgtgatcattttgaagaaaaacagaactaaaagaacggtggtgggggtgatctggtaaggcttggttttgccgaaatattgtgggggaggaggagtgataaggtcggtggggtttctatgttaaagtcgtggtctcgggcaatatgcgatttttctttatgccatgttttgggaaattttgtagctgcctaggcctcgtgctgttgtggtggttcattagtatgaagacgaaggctctgctggctatgggagtcctttttctttttgttagtattttgtttaaaactatgtatgaccgaattatttgtcatccttgactcaattctgctgcaaccagttgtatcgtgccatgtgtctgcagcaccggtcgttgctgttctgagtaaaatctgtttactctgctttcacctgttaatgtacgatgtctaggataattttaagagagtaatgtttgtttaagtggccccttttggtgtttaagcgc

SEQ ID NO: 260194 - DNA, 527 bp, Zea mays
  unsure (1)..(527): unsure at all n locations
ccttcgcgtccggcgccgtccttcacctccgccgccgaatccgagactctgatctcgggttcaccgcagcgcacagagcacccctgactcccggcccgatccgcgctctcctctccgacgcttcagtcatggcaggaatggcacccgagggttctcagtttgatgctaagcactatgattctaaaatgcaggagctgctgagcactggtgagactgaggagttcttcacttcatatgatgaagtttttgaaagttttgatgacatgggccttcaagagaatcttctgagaggcatttatgcatatggtgggctgggagtcttctgtttatcttctgttttagcgagtttttctttacatggtattcctcgtactacccattcttcgatgtgtaggttttgagaaaccatctgcaattcagcagagaggaattgttcccttctgcaaggggctngatgtcattcagcaggcacaatctggtacaggaaagacaagcaccttctgttctgggatcttgcagcagctttg

SEQ ID NO: 260195 - DNA, 1620 bp, Zea mays
tcgttgcgagcccagcaggcgtctctcctctcgtccatccgtttcctcctccccctgcttcccggctcgcctccctcccctccctgtgcgcctcttttcatgcgcgaggagggaccgtggggaccaccaccaccagcaccaccacctccatccgtgcgcctctcgctctcgctggtggtgctcctcctcctcctcctgctcccggggcgggcggcctccttttccacctcctgctggtgccagggccgggagggcgtcgcggaggtggcgcgcatggggctcgccggggacgggtcggcggacaccgcccacctcagtaataatgaaaatgggcggttcatttatggagttgcgagttctcctggtaaaagagcatcgatggaggacttctatgaggcaagaatagacgacgttgatggagagaaaattggaatgttcggtgtatatgatggtcatggaggagtccgagcagctgagtatgttaagcagcaccttttcagcaatttaatcaaacacccaaagttcatcactgataccaaggctgctatcgccgaaacttacaaccgcacagattcagaatttctgaaagctgatagctgtcaaactcgagatgctggctcaactgcctcaacagctattattgtaggtgaccgtttgcttgttgcaaatgttggagattctagagctgttatttctaaaggaggacaggcgattgcggtttcaagggatcacaaacctgatcagacagatgagagacaaagaattgaggacgcagggggctttgttatgtgggctgggacatggcgagtgggtggcgttctcgctgtctctcgagcatttggtgataaactcttgaagccgtatgttgttgctgaccctgaaatcaaggaggaggtggtcgacagctccctcgaattcctcatccttgctagcgatggactctgggatgttgtcactaatgaggaagctgttgccatggtcaagcctatccaggacccccaggaagcagcaaacaagcttctcgaagaagcttcccgaaggggaagctccgataacatcacagttatcatcgtccgcttcatagacggaactaccggtgagaaatcaggcgacgacaaagagaccaccaacgaccaacactcctagctgtctcgtgtagggatccatcgtgctgtgtgttcttctggctgttgtacctgatgctcagagtagacgctggctgctgctccgcaaggaaactgactcccccgaccgccgttcatgctcctggctggctggctcgctggccgcctcgacgggaacgctgccgtagaatgacgactggggctggtgttgttgttacagtatggtccttttttctttcttctttcccctttcatccattaagctctgtgatgtagctgcccgtggtgttgattcatgaaatcatgctagagattttttcctggcagtaagtgcgtgcctgtaaaactgtcgaactatttggacgaaagttgtacactgcagtatgatgtaaccatcaaaatctcccccccccaaaaaaaaaaaaaaaatttaataatatttttatataacattaaataattttattttagtttttttaaaatacgttttctacat

SEQ ID NO: 260196 - DNA, 826 bp, Zea mays
  unsure (1)..(826): unsure at all n locations
ccgtccgcgtgacgcatggggcaccangggcggctctagttaatgttggacctgggtacaatgggcgaagtcgtttcgatggtgttcttgctgtctctcgcgcatttggtgataaactcttgaagcagtatgttgtcgctgaccctgaaatcaaggaggaggtggtcgacagctcccttgaattcctcatccttgctagtgatggactctgggatgttgtcactaatgaggaagctgttgccatggtcaagcctattcaggacccccaggaagcagcaaacaagcttctcgaagaagcgtcccgaaggggaagctctgataacatcaccgttgtcatcgtccgcttcctatatggaactaccggtgataaatcaggcgcagacaaagagaccaccaatgaccaaaactcctaattacctcctgtagggatccctcatgcgtgtgttttcttctggctgttgtatctgatgctcaaagtagatgctccgtgtgtcttccgctgctgttccgcaaggaaactgactcccccgaccgtcgtcgtgatgctgcccgctcatgctcctagacgggaatgactgccgcagaatgacgaatagggctggtgtgtgttacagtatggtccttttcccctcctttccattaagctctgtgatgtagctgtccgtgctgttgattcatgagatcatgctagagatttttcctggcagtagtgcgtgtaaaactgtcgaactatttgaacgaaagttgtacactgcagtatgtaacaatctcctaggtccgccttttgtggcgtcctgctgtaaaaaaaaaacaaatttttattttt

SEQ ID NO: 260197 - DNA, 558 bp, Zea mays
cccacgcgtccgcccacgcgtccgctcttctctcgtccatccgttcctcccttcccctgcttcccggctctccctccccccatccctgcacgccccttttcatgcgcgaggaggggccgtggggaccaccaccagcacctccatccgcgcgcatctcgcggtggtgctcctcctcctcctccccctgctcccggggcgggcgctctcctgttcctcctcctcctgctgctggtgccagggccgggagggcggcgcggaggtggcgctcatggggctcgccggggacgggtcggcggacaccgccaacctcagtaatagtgaaaatggtcggttcagttatggagttgcaagttctcccgggaaaagagcatcgatggaggacttctatgaggcaaggatagacgacgttgacggagagaaagttggaatgtttggtgtgtatgatggtcacggaggagtcagagcagctgagtacgttaagcagcatcttttcagcaatttaatcaaacacccaaagttcatcactgataccaaggcccctattgctgaaacttacaa

SEQ ID NO: 260198 - DNA, 329 bp, Zea mays
cacgcaccagcccagcagcagaagcgcccctcggccctcgctcccacaacaagctcaagccagccttctctctctctctgctccaatggcgcgcttccagctcgcagccgtggccatggccatgctcttcgccgcggcggcggcgcaggccccgaccgccaccccgacgccggctcccaaggcgtcccccccgccggcgacgccgccgccgacccccgcgccggtgtctccgcccgtgccgcccccgaccatgcctcctccggcgcccgcgcccgtccccaaggccccggccccggcgcccgaggcccccaccccggcacccacggtcg

SEQ ID NO: 260199 - DNA, 631 bp, Zea mays
ccctctcgtccggcacgcacacaccagcccagcagcagaagcgcccctcggccctcgctcccacaacaagctcaagccagccttctctctctgctccaatggcgcgcttccagctcgcagccgtggccatggccatgctcttcgccgcggcggtggaggacgccccaaccgcggaccggcgcccgtggcaagcccgtccccgacgggcacggaacatgctacaaggttgtcggagaatgttccccaaagggaaggctccgatccctgacaggttttcatcgtccgtttcatagacggaactaccggggagaattcaggcgacgacaaagagaccaccaacgaccaacactcctagctgtctggtgaagggatccatcgtgcgtgtgttcttttggctgttgtacctgatgctcagagtagaccctgcctgctgctccgcagggtaactgactcccccgaccgccgttcatgctcctcgctggccggctctctgttcgtctcctcgggtaagccgtcgtagaaagacgacttgggctggtgttgttgttacagtatggtccttttttctttcttctttcccctttcatccattaagctctgtgatgtagctgcccgtgctgttgattcatga

SEQ ID NO: 260200 - DNA, 546 bp, Zea mays
  unsure (1)..(546): unsure at all n locations
cggacgcgtgggcggacgcgtgggtaacaccgtaagggcttccaagtccgacacgcttgggggcaacaagatgcacgcacttgtggagtacgagacgtcgcagcaagccgagaaagcagtggagaagctgaatgatgaacggaactggaggaaagggctccgtgtccgcacagtgctcaggcgctcgcccaagtcagtgacgaggctgaagcgtgcagacttggaccactttgtggcctacgacgacgactcgccgcactcctcatcagactccccgacggcggactgctcttcacctgccgaggcagcggcggctcacgctcacgtctatcaccagcagcagcaagaggagcagcagaatgggggcaagcacaaaggcagctgggctcgaggacgagctggcacggcgaccaagctgcacatcacggcgccgcagagcccccagtcggctcccgcgggcatggccggcggccacttcgacccgaccagcccccgcccgtcgtcgtcgtcccagaagcagtgcccctncagcccccgcagcaggca

SEQ ID NO: 260201 - DNA, 753 bp, Zea mays
gtgaggcgtgagccccacacccagacgaaggatcccgaagccgaagagaaccctaccgaggaggcagaaaatccgtaggcgcgcctcatacgattccgagatccgtgcctcttatcggcagccatgatgctgcgcgcggcgggcaggcgactcctcggcgtaggaggcggcgatccagcgcccgcggtcgctgctgctgtggcggcgagcaggagcagaggataccacgagcgggtggtggaccactacaacaacccgcgcaacgtggggtccttggacaaggacgacacggacgtcggaacggggatcgtcggcgcgccggcgtgcggggacgtcatgaagctgcagatccgcgtcgacgaggggtccggcaggatcgtcgacgcgcgcttcaagaccttcggctgcggctccgccatcgcgtcctcctccgtcgcttccgaatgggtcaagggcaagcaagtggaggaagtggtagccatcaagaacaccgagattgcgaagcacctgtctcttccaccagtgaagctccactgcagcatgctcgctgaggacgcaatcaaggccgccgtgaaggattacgaggcaaagaaagggaagaagatggccaatgcagaggagcaggacaccccatgcccgtaagagcgacagctagtaaactgaagcgagcagagagtactgtatgtagtatgtaacggctaacgagcgaggtactcgtgtcgtgtgtgccaaaaagaagcatgtatgtaatgt

SEQ ID NO: 260202 - DNA, 428 bp, Zea mays
tctgcatcctagatcgagactcgatctcccacaaattttcgcgtgagcatctctccccaatccatacgtactccccgtgttttttttcctgtgcagttgttgtggtcgaggcggcaagcggcagcggtgacccagagaggaggaggcggcaagcgcggcgatcgatcgaagaggaggcaacgacgtttgaggaggcggtggcgggcgatgtgatgctttcggaagggatgctgctgtttctcgtcaggactgtacattacgggatgtctccttcgacgggaggatcctgccatggcaggtggccggtgatggagctctggattctgatggaggaggagccttccgaggcgtgtgcaaacttcaatgaaacagcccatcacttcctgcactgcattcaggtgcatatggagctgaccattcaagtgaac

SEQ ID NO: 260203 - DNA, 506 bp, Zea mays
agcaccgcacggagagcaagcaagaaagcaaccaccgcactgccactacctaacaatggcccgcgcctacgtgtttctcgtcgtgctcctcctggccgctgtcatcgtggcaccgttcgcgggagcgacgcgtgtcgacgtcgttgagggcaggtccatggcgtccgccgacgcgccggaggccgccgcaccatcacccgggcctgactccgcctcgtcaccggactcctcgtcggatgcgccctccagcagcagctcctcggactagatagctagccgctcgacgcacgatctcgctctccatctacacggcgatcgagttctagctttgtcggcatgcaatgcaaaattccgattcttcgggaataatcaagcaccaaaggaatgtgcttgcatcactcactactagtaccttgtttttatatatgtttcctctcctgacgctctccgattttaatcttcatgtatgcaacatatgtgatgaatggaaaaatcgatttgtattt

SEQ ID NO: 260204 - DNA, 1908 bp, Zea mays
ccggcctcgacccaagcgtcaggagaaggaagagaaagaaaaaaagcttaaggacgatcagctggaataccttgaggagcgtcgcctcaaggatctggtcaagaagcactctgagttcatcagctaccccatctccctgtggactgaaaagacaacagagaaggaaatttctgacgacgaagacgaggaagagaagaaagatgctgaggaaggaaaggttgaggatgttgatgagaaggaagagaaagaaaagaagaaaaagaagatcaaggaggtttctcatgagtggtcattggtcaacaagcagaagcccatatggatgaggaagccagaagaaatcacaaaagaagaatatgctgccttctataagagcttgacaaatgactgggaggagcatctggctgtgaagcacttctctgtggagggtcaactggagttcaaggctgttctctttgttcctaagagggccccctttgatctcttcgacacaagaagaagcaaaacaacatcaagctctatgtgcgcagggtgtttatcatggacaactgtgaggaactgatccctgagtggctgagttttgttaagggtattgttgactctgaggaccttcccctcaatatctcccgtgagactcttcagcagaacaagatcctgaaggtgatccggaagaaccttgtgaagaagtgtgttgagctcttctttgagattgctgaaaacaaggaggactacaacaagttttatgaggctttctccaagaacctcaagcttggcatccatgaggactcgcagaacaggggcaagattgctgagcttctgagataccactccacgaagagcggtgatgagctgaccagcctcaaggattatgtgacgaggatgaaggagggacagaacgacatctactatatcactggtgagagcaagaaggcagtggagaactcccctttcctggagaagctgaagaagaggggctacgaggtcctgtacatggttgatgccattgatgagtatgctgttggtcagctcaaggagtttgagggcaagaagcttgtctcggccaccaaggagggtctgaagcttgatgagaccgaggatgagaagaagaggaaggaggagctgaaggagaagtttgagggtctgtgcaagatcatcaaggaggttctgggcgacaaggttgagaaggttgtggtgtctgaccgtgttgtggactcaccgtgctgccttgtcactggtgagtatggctggacagccaacatggagaggatcatgaaggcgcaggccctgagggactctagcatgtcggggtacatgtcgagcaaaaagactatggaaatcaacccggagaacccaatcatggatgagctccgtaagcgcgccgaggctgacaagaatgacaagtcagtcaaggatcttgtgatgttgctgttcgagacagctctcctgacctccggcttcagcctggatgaccccaacacctttggcacccggatccatcgcatgctaaagctcggtctgagcatcgatgaggacgagtctgctgaggccgaagctgagatgcctccgctggaggatgacgccggcgaaagcaagatggaggaggtcgactaagcttcggatcactgtcgtttatccctaattacatatgataagctaaatcttgactactgtttgaggttttccgcacgttaacggttctcctgccggccaggcaatgagtttgttgtatagctatatggtactctgttttacagtttgttcttgttatctgtaatcctactagtatagtacatgttctacatgtcgttttgcctgaaaaaaaaaaaaaaaaaaaaaaggaagcccgccatttggtaaccccttgtcccgggaatttattccgggccggttacttgagggggtccaattttc

SEQ ID NO: 260205 - DNA, 1731 bp, Zea mays
  unsure (1)..(1731): unsure at all n locations
cggaactcggccgggtcccacccagcgcgtgactttcccacgcgtccgcccacgcgtccgcccacgcgtccgggtcaacaagcagaagcccatatggatgaggaagccagaagaaatcacaaaagaagaatatgctgccttctataagagcttgacaaatgactgggaggagcatctggctgtgaagcacttctctgtggagggtcaactggagttcaaggctgttctctttgttcctaagagggccccctttgatctctttgacaccaagaagaagcaaaacaacatcaagctctatgtgcgcagggtgttcatcatggacaactgcgaagagctgatccctgagtggctgagcttcgttaagggtattgttgactctgaggaccttcccctcaatatctctcgtgagactcttcagcagaacaagatcctgaaggtgatcaggaagaaccttgtgaagaagtgtgttgagctcttctttgagattgctgagaacaaggaggactacaacaagttttacgaggctttctccaagaacctcaagcttggcatccacgaggactcgcagaacaggaccaagatcgccgagcttctgagataccactccaccaagagtggtgatgagctgaccagcctcaaggactacgtgaccaggatgaaggagggacagaatgacatatactatatcactggtgagagcaagaaggcagtggagaactcccccttccttgagaagctgaagaagaggggctatgaggttctgtacatggttgatgccattgacgagtatgctgttggtcagctcaaggagtttgagggcaagaagcttgtctctgccaccaaggagggtctgaagcttgatgagactgaggacgagaagaagaggaaggaggagctgaaggagaagtttgaggggctgtgcaaggtcatcaaggaggttctgggtgacaaagttgagaaggtggtggtgtctgatcgcgttgtggactcaccgtgctgccttgtgactggcgagtatggctggaccgccaacatggagaggatcatgaaggcacaggccctgagggactcgagcatggcgggctacatgtcgagcaaaaagacaatggagatcaacccagagaaccctatcatggatgagctccgcaagcgtgccgaggctgacaagaatgacaagtcagtcaaggatctcgtgatgctgctgttcgagactgctctcctgacctccggcttcagcctggatgaccccaacaccttcggcaaccggatccaccgcatgctcaaactcggtctgagcatcgatgaggacgagcctgttgaggcagaggctgagatgcctcagcttgaggacgacgctggtgaaagcaagatggaggaggtcgactaagtgtcgcatcgcatgcttgccgtttatcttatccctagctaagctacctgtgatagcttaattttcactattgttcgaggtttttggcacgttatcggttgtcctgctggccaggctataagtctggtttatctgttatgtttaccctttttaacagtttgtcgttattattcgtaatggtaaaaatgtagtacatgttttgcccaaaaaaaaaaaaaaaaaaaaaaaaaaaaaaaaaaaaaaaaaaaaaaataaaaaaaataaaaataatataaaaaaatatatttntaattattaaaatattaaatatattttaaaattaaaaataaaaaaaagggggggct

SEQ ID NO: 260206 - DNA, 1009 bp, Zea mays
cgcacgcgtccgcgcacgcgtccgcgcacgcgtccgcgcacgcgtccgcgcacgcgtccgcggacgcgtgggcgagccccccttcggaaaacctccaaggctccaaccctagccgcgatccgacaacgcctcaaaccctagccgcctcctgcaagtttcagagctcaggaatctgcgccatggcgagtgagacggagaccttcgcatttcaggctgagatcaaccagctgctctcactcatcatcaacaccttctactccaacaaggagatcttcctccgcgagcttatctccaactcttccgatgcgctggacaagatcaggttcgagagtctcactgacaagagcaagctcgatgcgcagcctgagcttttcatccaccttgtcccagacaaggccacgaacacgctctccatcatcgacagcggcatcggcatgaccaagtccgaccttgtcaacaacctcggtaccatcgccaggtccgggacgaaggagttcatggaagcccttgctgccggcgctgatgtgtccatgattggccagttcggcgtcggtttctactctgcctacctcgtcgccgatagagttgtcgtgaccaccaagcacaacgatgacgagcagtacgtgtgggagtcccaagcgggcgggtcgttcactgttactcgtgacacgtcaggggagcagcttggcaggggcactaagatcacactgttccttaaggacgatcagctggagtaccttgaggagcgtcgcctcaaggatctggtcaagaagcactctgagttcatcagctaccccatctccctgtggactgaaaagacaacagagaaggaaatttctgacgacgaagacgaggaagagaagaaagatgctgaggaaggaaaggttgaggatgttgatgagaaggaagagaaagaaaagaagaaaaagaagatcaaggaggttgctcatgagtggtcattggtcaacacgcagaagcccatatggatgaggaagccagaagaaatcac

SEQ ID NO: 260207 - DNA, 2759 bp, Zea mays
cggacgcgtgggggcggagcgctggtaccggcgtaactccgggcccatcggtcgggaggtcagtcaaccgcgctccccggcccccagtggctcgtagaacattcgagaacccctcgcctcctcccccaacgataaaatcctcaccgcgccgcaacgcatcttcgccccacaagacgcctcgtctcgtgccactttctcagtcccctctagccgccgcctaccgctcgcgctctcctcgcgttcgggaaggtcgtttcgccatggcctcggagacggagacgttcgccttccaggcggagatcaaccagctgctctcgctcatcatcaacaccttctactccaacaaggagatcttcctcagggagctcatctccaactcctccgatgccttggacaagatcaggtttgagagtttgacggacaagaccaagctggatgcacagccagagctgttcatccacattgtccccgacaaggccaacaacacgctgacaatcatcgacagcggcattggtatgaccaagtcagaccttgtgaacaaccttggtaccattgcgcggtcaggcacgaaggaattcatggaggcacttgctgctggtgctgatgtgtccatgattggccagtttggtgtcggtttctactctgcctaccttgttgcagagagggttgtcgtgaccactaagcacaatgatgatgagcagtacgtgtgggagtctcaggctggtggctccttcactgtcgcacgtgatacctctggggagcaacttggcaggggtacaaagatgaccctctacctcaaggatgatcagttggagtaccttgaggagcgccgcctcaaggatctgatcaagaagcactccgagttcatcagctacccaatctctctctggattgagaagaccactgagaaggagatctctgatgatgaagatgaggaggataagaaggatgaggagggtaaggttgaggatgttgatgatgaaaaggaagaaaaggaaaagaagaagaagaagatcaaggaggtttctcatgagtggcaattggtaaacaagcagaagccaatctggatgaggaagcctgaggagattaccaaagaagagtatgctgctttctacaagagcttgaccaacgactgggaggagcatcttgccgtgaagcacttctctgttgagggccagcttgagttcaaggctgtactctttgtgccaaagcgggcccccttcgacctctttgacaccaggaagaagcagaacaacatcaagctctatgtgcgacgtgtcttcatcatggacaactgtgaggagctgatcccagagtggctgagctttgtcaagggtattgttgactctgaggatcttcccctcaacatctctcgtgagactctccagcagaacaagatcctcaaggtcatccgcaagaatcttgtcaagaagtgcgttgagctgttttttgagattgcggagaacaaggaggactacaacaagttctatgaggccttctccaagaacctcaagcttggcatccacgaggactccacgaacaggaccaagattgctgagctcctgaggtaccactcgaccaagagcggggatgagctgaccagcctcaaggattatgtgaccaggatgaaggagggccagaacgacatcttctacatcactggtgagagcaagaaggctgtggagaactccccgttccttgagaagctgaagaagaggggctatgaggtgctgttcatggtggatgccattgacgagtattctattggacagctgaaggagtttgagggcaagaagctcgtctctgccaccaaggagggcctgaagctggacgagagtgaggatgagaagaagcgcaaggaggagctcaaggagaagtttgagggcctctgcaaggtcatcaaggaggtgctgggcgacaaggtggagaaggtggtggtctccgaccgcgtggtggactccccctgctgcctggtgaccggcgagtacggttggaccgccaacatggagcggatcatgaaagcccaggcgctgagggactccagcatgtctgggtacatgtcctccaagaagacgatggagatcaaccccgagaacgccatcatggaggagctccgcaagcgtgccgaggctgacaagaacgacaagtccgttaaggaccttgtcatgctgctgttcgagacggcgctgctcacttctggctttagcctcgacgatcccaacacctttggcagccgcatccaccgcatgctcaagctgggcctgagcatcgacgaggacgaggaggctccggaggctgacaccgacatgccccctctggaggatgacgctggcgagagcaagatggaggaggtcgactaagctgggtttattcttatggaggaaagagagagaacatcgggtctgttctgtgggtcttaccacttatgctattatgcaatctgttgttggtatgctagtgctactattgtctctgctgtcttctagttaattttgttgttgttttgcgtggtcagtttctcatcgcatcagtggtagaaaacattcacctgtgggactaaaaaaatgtttgactgggaattggaacgcatcgccaagttcttctgttcttggttctattatatgtaaaggtgatttgctttgagaacttaatacgttagtacggttgcctgaaacgatggagggcatgagagctcgccgtattcctatgtaataacaaaatgtacatatattttgtcatccatgatggtttagttcgcc

SEQ ID NO: 260208 - DNA, 2383 bp, Zea mays
ccctcgcgtccgccgcctcccaccacaaaccctcctccagtgctcttttcttctagccgccgccgcaaccgcttgctagcgctctgcgctctcatcctcgcgtccgtggaaggtcgtctcgacatggcctccgagacggagacgttcgccttccaggcggagatcaaccagctgctatcgctcatcatcaacaccttctactccaacaaggagatcttccttagggagctcatttcaaactcctccgatgccttggataagatcaggttcgagagtttgacggacaagagcaagctggatgcccagccggagctgttcatccacatcgtccctgacaaggccaacaatactctgacaatcattgacagtggcattggtatgaccaagtcggaccttgtgaacaaccttggtaccattgcacgatctggcacaaaagagttcatggaggcactggctgctggtgccgatgtgtccatgattggtcagtttggtgtcggtttctactcggcataccttgttgctgagagggttgtcgtgaccaccaagcacaacgatgatgagcagtatgtatgggagtctcaggccggtggctccttcactgtcacacgtgatacctctggggagcaacttggcaggggtacaaagatgaccctttacctcaaggatgatcagttagagtatcttgaggagcgccgcctgaaggatctgatcaagaagcactcagagttcattagctacccaatctctctctggattgagaagaccactgagaaggaaatttctgatgatgaggacgaggaagataagaaggacgaggagggcaaggttgaggatgttgatgagaaggaagaaaaggaaaagaagaagaagaagatcaaggaggtttctcatgagtggcaattggttaacaagcagaagcctatctggatgagaaagcctgaggagattaccaaagaagagtatgctgctttctacaagagcttgaccaacgactgggaggagcatctcgccgttaagcacttctctgttgagggtcagcttgagttcaaggctgtcctgtttgtgccgaagagggccccctttgacctcttcgacaccaggaagaaactgaacaacatcaagctctatgtgcgccgtgtcttcatcatggacaactgtgaggagctgatcccagagtggctgagctttgtcaagggcattgttgactctgaggaccttcccctcaacatctcccgtgagaccctccagcagaacaagatcctcaaggtcatccggaagaacctggtgaagaagtgcattgagctgttctttgagattgctgagaacaaggaggactacaacaagttctatgagtccttctcgaagaacctgaagcttggcatccatgaggactccacgaacaggaacaagattgcggagctgctgaggtaccactccaccaagagcggagatgagctgacaagcctcaaggactatgtgacgaggatgaaggagggccagaatgacatctactacatcactggcgagagcaagaaggccgtggagaactcccccttccttgagaagctgaagaagaagggctatgaagtcctgtacatggtggacgccatcgatgagtatgctattggccagctcaaggagttcgagggcaagaagctcgtctcggccaccaaggagggcctgaagctcgacgagagtgaggatgagaagaagcggaaggaggagctcaaggagaagttcgagggcctgtgcaaggtgatcaaggaggtgctgggcgacaaggtggagaaggttgtggtctctgaccgcgtggtggactccccctgctgcctggtgacgggcgagtacggctggacggccaacatggagaggatcatgaaggcacaggcgctcagggactcgagcatgtctgggtacatgtcctccaagaagaccatggagatcaacccggagaacgccatcatggaggagctgcgcaagcgcgcggaggccgacaagaacgacaagtctgtcaaggaccttgtcatgcttctgttcgagacggcgctgctcacctcgggcttcagccttgacgaccccaacaccttcggcagccgcatccaccgcatgctcaagctgggcctcagcatcgacgaggacgaggctccggaggccgacaccgacatgcctcctctggaggatgacgctggcgagagcaagatggaggaggtggactagtctggctatcgtgtcttaatttgtgtgtgtgcgtgtgtttttttttacttctgctagcctgcaaacttcttacgtttattattgtgggtataatagtgctcctgctgcccatctctgcttgctcggtcagttttatatatgccagctgctcatcgcagcattcgcc

SEQ ID NO: 260209 - DNA, 1279 bp, Zea mays
aaaaaaaaactcaagacattttataatttaaaaccagacaaagctttatgatttaaaacgggaacagtaataaatgtgcacaatgattacggtcatcatcatcatcctaaaacagcagcaacaaatgccactaataccataccaggttacaagcagagtctccaccgacaaacgcaccacccactcatttcattccgagcaaaccaaccaccggacttagccccacatacacaaacaatccacggaggaaaatcaaaacagagcctagcagcagatataacaagagtctgacaaaccgccccaatcatggggccaacagttccatcgccgccacattcatcagtcgctgatagcaggcgacgccgaccttgaccgtgacccaggaggtgacatggacgctggacggggtgacctatgatgaccgcgccgaggctcctcatcctcctcgcctgctggggacctcttcctctcatcacgaccattgtctgcacctcggcgatcatttatatcatcaggagtataggatctcctcctatccctgttattttctttaggctgttttgatgacctcgggtgctcttcctttgcccggggtggggaagcagagtagtcatcacgccttttcggggcaggggagtatgactgtgatctaccacgaccacgagggcgtggtgagcgggaacgcgagtatgaacgagaacgggaccgtcctgcaccatgacgattcggacgacgcccttcatgaccagaataacctcttggtccagttcgtctacgcatgtcctcaggccttttccgtgtatccgcagcaagtacaacagttatttcacgcccagcaaacatctggcgattcatgtggtactgtgcctcagaagcgtcataagcatcaacgaactccacgaacccaaatcctcttggctccccagtgtgataatctcttggcaggtaaacatcccgaacagggccgaaccgttcgaaagggacacgtagttcctcaggcctgcatctcaatggaatgttgcggaccaggaggctgacagagccatggtcaccacggccaccgccatatcctctcctgggaggtgggctccttcccctgccgccatgtcctctcctcggggggctgtacgcgggactgtacctccccattcttcctggtatcgctggtgagccggtgccgctgccggcgccgccgctgctgcctcagccggggatgcggaattagggcaagcgaggaaaagaagatggggagactcgcgtggagaatataccaaggccg

SEQ ID NO: 260210 - DNA, 1784 bp, Zea mays
cccacgcgttcgaatggacaaccctgaggagggtggcaacacggattatttagagaacatcactattccttcggcgttaataaccaagagctttggggacaggctcaagacagcaatcgacagcggtgacatggttaatgtgaatttggattggagggaggccctgccccatcctgacgagcgcgtcgagtatgaattctggcccaactgccatgatgaatgtggcccaaagtgcgatagccagattgacttcgtcaagagcttcaaaggagcagcacaggtacttgagaagaagggctatacggagttcactcctcattacattacctggtactgcccagaggccttcattctgagcaagcagtgcaagtcccagtgcatcaatcatgggaggtactgtgcacctgacccagaacaggattttagcaaaggatatgacggcaaggatgtggtggtccagaacttgcgccaagtttgtgtctttaaggttgctaaggagcacaagaagccttggttatggtgggactacgttactgattttgcgattcggtgcccgatgaaggaaaagaagtacacaaaggagtgtgccgatggagttatcaagtcacttggccttgatcataaagcaatagataagtgtattggtgatccagatgcagatgaggaaaaccatgttctgaaagctgaacaggatgcacagattggcaagggttctcgtggtgatgttaccatcttaccaactctggtaatcaacaatagacaatacagagggaagcttgacaaaggagcagttcttaaagcactttgtgctggctttagggaaaccaccgagccagccgtttgcttgagtgatgatatacaaacaaacgagtgcctagagaacaatggtggctgttggcaagataaggctgccaacatcactgcatgcaaggatacattccgtggaagagtttgcgagtgtccagttgtgaaaggcgtcaaatttgttggcgatggctatactcactgtgaagcttccggatctggtcggtgtgaaattaacaacggagggtgctggaaagataccaagaatggtcggacatactctgcctgtactgatgatggctgcagatgccctgacggactcaagggtgatggcaagcacaaatgtgaagatgttgatgaatgtaaggaaaggactgcgtgccagtgcgaagaatgcagatgcaaaaacacgtggggaagctacgagtgcggctgcagcgggggcctgctttacatgaaggagcatgacacatgcataagcaaaagcggagcatcagaagccggctggggcttcttgtgggtcatcttctttggccttgttgcagcaggaattgcaggatatgcagtgtacaagtacaggatccggaggtacatggactcagagatccgtgccatcatggctcagtacatgcccctggacaaccaaggagacgtccagagccattctcatcacattgagatgtgaggacaggaggatgcagacttgacgaggggggaccgggacttgatgtagcctatatatacacttgaattagatgtctataactgtaacgatcttatgtttagcatgcttagtccttgaacaatctgtatccgtgcggtttctgtgttaaggctgacaccgtcttgtttagtaataattgccatcttttctttcggtgccaataaaggagatggcaagacggggatgagtggtgttatgtttgtggtcaagaaatttgagcgcccagcgtaacaggaaattgtgcctggtgtcaatt

SEQ ID NO: 260211 - DNA, 589 bp, Zea mays
tgtgaatgtaaatgtgaaacatgttgtgacatatattgatgaatgtaaggaaaggattgtgtcaatccaaagaatccaaatgcaaaaacacatggggaagctatgagtatggctgcagtgaaggcttgctttacatgaaggagcatgatacatgcataagcaaaagtggagcatcataatctggctggggcttcttgtgggtcatcttcttcagtcttgtcgcaacaggaattacaggatatgcatcgtacaagtacagggctcggaggtacatggattcagagatatgtgccatcatggctcactacatgccctgtacaaccaaggagagatccaaattcattctcatcacattgagatgtgaggtagtaggacacagactttgatgaagggagactaggacttgatctatatctatttctgaagtaatagatcacttgcatcagttctattgtattctatttttatgtatgttttttatacacactgtatgcttttcgtacgatgcaagtgcatcggtccctatttcacacacacacacactctctctctcaccgcttctttttatactttgctacacgaattttgc

SEQ ID NO: 260212 - DNA, 807 bp, Zea mays
ccacgcgtccgcccacgcgtccgcccacgcgtccgcccacgcgtccgatcgccaggtccgggacgaaggagttcatggaagcccttgctgccggcgctgatgtgtccatgattggccagttcggcgtcggtttctactctgcctacctcgtcgccgatagagttgtcgtgaccaccaagcgcaacgatgacgagcagtacgtgtgggagtcccaagcgggcgggtcgttcactgttactcctgacctccggcttcagcctggatgaccccaacaccttcggcaaccggatccaccgcatgctcaaactcggtctgagcatcgatgaggacgagcctgttgaggcagaggctgagatgcctcagcttgaggacgacgctggtgaaagcaagatggaggaggtcgactaagtgtcgcatcgcatgcttgccgtttatcttatccctagctaagctacctgtgatagcttaattttcactattgttcgaggtttttggcacgttatcggttgtcctgctggccaggctataagtctggtttatctgttatgtttaccctttttaacagtttgtcgttattattcgtaatggtaaaaatgtagtacatgttttgcccattgggttgtgtgagattgggacagacagatcagggtactacccctttttctctttgggtagcccatagtttgagtagtggtgaaaaaagaatggttaggattttaggcatgttgtagcaaatcggctatgccaggaaatgaatctggtttcgtttccccattatgaaaaaaaaaaaaaaaggagggcggccgc

SEQ ID NO: 260213 - DNA, 338 bp, Zea mays
tctgacgcgtgggctccgctggaggatgacgccggccaatgcaagatggaggaggtcgactaagcttcggatcactgtcgtttatccctaattacatatgataagctaaatcttgactactgtttgaggttttccgcacgttaacggttctcctgccggccaggcaatgagtttgttgtatagctatatggtactctgttttacagtttgttcttgttatctgtaatcctactagtatagtacatgttctacatgtcgttttgcctgagttccggtgtttggtttaaaaaacaaaaaattacaaaaactatattgaaaaaaaaatacaatcatataag

SEQ ID NO: 260214 - DNA, 741 bp, Zea mays
tttcgcttgggggagtgtgctgatggtgacatcaagcctgtcgggctcgatcataaagcaaaagataaatgtattggtgatccagatgctgatgacaaaaccctgttctgaaagctgaacaggatgcacagattggcaagggctctcgtggtgatgttaccatcttaccaactctggtaattaacaatagacaatacagaggtaagcttgacaaaggagcagttcttaaagcactttgtgctggttttaaggaaactactgagccagccgtttgcttgagtgaagatatacaaacaaatgagtgcctagagaacaatggtggctgttggcaagataaggctgcgaacatcactgcatgcaaggatactttccgtggaagagtttgcgagtgtccaattgtgaaaggagtaaaatttgttggtgatggctatagtcattgtgaagcttccggatctgggcgatgtgaaattaacaatggaggatgctggaaagataccaagaatggtcggacatactctgcctgtaatgatgatggctgcaaatgcccagatggattcaagggtgacggtaggcacaaatgtgaagatattgatgagtgtaaggaaaggactgcgtgtcaatgcaaagaatgcaaatgcaaaaacacatgcggaagctatgagtgtggctgcagtggaggcttgctttacatgaaggagcatgatacatgcataagcaaaagtggagcatcagaagcaggtt

SEQ ID NO: 260215 - DNA, 625 bp, Zea mays
  unsure (1)..(625): unsure at all n locations
cgcctgctgcaagtctcagaggggtgganctgagccatggcccccctgttttttcccnncgcatctnaggctgagatcaaccagctgctctcactcatcatcaacaccttctactccaacaaggagatcttcctccgcgagcttatctccaactcttccgatgcgctggacaagatcaggggcgagagtctcactgacaagagcaagctcgatgcgcagcctgagcttttcatccaccttgtcccagacaaggccacgaacacgctctccatcatcgacagcggcatcggcatgaccaagtccgaccttgtcaacaacctcggtaccatcgccaggtccgggacgaaggagttcatggaagcccttgctgcccgcgctgatgtgtccatgattggccagttcggcgtcggtttctactctgcctacctcgtcgccgatagagttgtcgtgactggcgagtatggctggaccgccaacatggagaggatcatgaaggcacaggccctgagggactcgagcatggcgggctacatgtcgagcaaaaagacaatggagatcaacccagagaaccctatcatggatgagctccgcaggcgtgccgaggctgacatgaatgacaagtcag

SEQ ID NO: 260216 - DNA, 557 bp, Zea mays
  unsure (1)..(557): unsure at all n locations
agatccaaaatttcttgtatacatcttcgtaaagcgatntgcttcaatttcttcgagtttgaaaactcatgaaaagttcttgagaccaacttgtcttcattatatattcccatggaagacacggtcaaaccctcttctcttcaggaaattaacaaattgaatcttgtcttgataaaagaacttcattctcacaatactctatctcaccaagcaaatgaacgactaggattgttcagggcttgtatttacttcaaccaaaaatacagtcccagtgtgataatctcttggcaggtaaacatcccgaacagggccgaaccgttcgaaagggacacgtagttcctcaggcctgcatctcaatggaatgttgcggaccaggaggctgacagagccatggtcaccacggccaccgccatatcctctcctgggaggtgggctccttcccctgccgccatgtcctctcctcggggggctgtacgcgggactgtacctcccccctcttcccggtatcgctggtgagccggtgccggtgcaggtgccggcgccgccgctgctgcctc

SEQ ID NO: 260217 - DNA, 754 bp, Zea mays
actttgtgctggttttaaggaaactactgagccagccgtttgcttgagtgaagatatacaaacaaatgagtgcctagagaacaatggtggctgttggcaagataaggctgccaagaagcggcgggaggagcgcaagaagcggttcgaggagctgtgcaaggtgatcaaggacatcctgggcgaccgcgtcgagaaggtggtggtgtcggaccgcatcgtcgactcgccgtgctgcctggtgacgggcgagtacgggtggaccgccaacatggagcggatcatgaaggcgcaggcgctacgtgacagcagcatgagcgcgtacatgtcctccaagaagaccatggagatcaacccggacaacggcatcatggaggagctccggaagcgcgccgaggccgaccggaacgacaagtccgtcaaggacctcgtgctgctgctcttcgagacggcgctgctcacctcggggttcagcctcgacgaccccaacacgttcgcggccaggatccacaggatgctcaagctcggcctcaacatcgacgaggacgctgctggcgacgaggacgccgacatgcccgcgcttgacgagggcgccgcggaggagagcaagatggaggaggtcgactgaggtgtccttccttcctataatatgcaagttttcagcgatgagggacgacggtcaatggcgatgcctgtttgtgtgtgtctgcgtgtgggtccaaaggggtcactggtggtacaggtcacggtagtgtct

SEQ ID NO: 260218 - DNA, 693 bp, Zea mays
tttccgtgtatccgcagcaagtacaacagttatttcacgcccagcaaacatctggcgattcatgtggtactgtgcctcagaagcgtcataagcatcaacgaactccacgaacccaaatcctcttggctccctgaatgatcacaaaagccttcgtaagtaatatggcactggtaaacaaataagatggcacataacaatcataaatagtatgtgcctcacgagttactaccaggctttcatattattatggtgaatcatttatagttctccatagagcatagctaataacttacaaacatgttcatcaaatagtagcaagcctcaaaaagtggttagagcccttagatccaaaatttcttgtatacatcttcgtaaagcgatttgcttcaatttcttaggacgcgtgggcggacgcgtgggcgaggatgagggagggacagaacgacatgtactatatcactggtgagagcaagaaggcagtggagaactcccctttcctggagaagaggaaggaggagctgaaggagaagtttgagggtctgtgcaagatcatcaaggaggttctgggcgacaaggttgagaaggttgtggtgtctgaccgtgttgtggactcaccgcgctgccttgtcactggtgagtatggctggacagccatcatggagaggatcatgaaggctcatgctccttgaggac

SEQ ID NO: 260219 - DNA, 964 bp, Zea mays
gtaacatcctgccgtgggagtcacgatcatcggctccgcctcctccgagggaagtacagatcccttcaccgctgctcgaatagatcgtctgcagtcgcgtgactcgactttaccccgccccacagctcgaagccgacgaggtggcctcagcacacgcgcgcgcagccatggcagctgctcaaggtggcactgttgtgtgttcatctgagaaagttgagtttctgaagcttcaaaatggcagtgatattcgtggtgttgctgttgctggggttgaaggtgagcctgtcaacctcacggaagatgtcactaaagctatagctgcagcttttgctgcatggctgttaaacaagaaaccagatggctggagacttttaagaatctcttttggacatgattcacgaatttctgcacataaattgcagaacgcagtcactcatggaatcactgctgctggacacgatatcctacagtttggattggcttcaacacctgcaatgttcaacagtacacttacagaagatgagagaagtcatttacctgttgatggagccataatgataacagcaagccatctcccctacaatcggaatggtctcaagttttttacaagtgatggtgggctaaataaagctgatatcaaagatatcctggagcgtgcttccaaaatatatgaggaatctgcacataataacctgaaagaacagggggaagcttcgaagggagttgtcactaatgtggactacatgtcaatttatgcttctgatcttgtacaagcagttcgtaaatctgctggagacaaagaaaaaccattggaggaactgcatatagtcgttgatgcagggaatggtgctggtggtttttttgtggataaggtactcaaaccattaggagctgttaccactggaagtcaattccttgagcctgatggtttgtttcccaatcacattcccaaccctgaggacaa

SEQ ID NO: 260220 - DNA, 2352 bp, Zea mays
ggatgtatcacttatgccggacgtatccgtcgagcttgtgtcgaccttgatggaagagggaaaaaaaccttctgttgcagccattcaaggtcttgcagtgggtggtggcctagagttgactatgggttgtcatgctcggatatctactcctgaagctcaacttggattgccagagctaacccttggcatcatccctggatttggaggtacccagcgtttgccgaggcttgtaggtctacccaaagcaattgaaatgatgctgcaaagtaagttcattgcggcaaaggaagggaaggaacgtggtttgattgatgccctttgctctcctgatgaattgataaagacatcacgtctttgggctctggaaattgctaattgccgtaaaccttggatgagatctcttggcagaacagataggcttggatcactatctgaagctcgtgctgtattaaatgcagcaagacagcaagcaatgaaggttgcaccaaacatgccacagaaccaggcctgccttgatgtaatggaagaaggcatattatatggaggtcaagctggtgttttgaaggaagccagggttttcaaggaactggtggtagcaccaacatcaaaggctcttgtccatgttttctttgcacaacgttccacgacaaaggtgccaggtgtaactgatgttcaactgaaaccaaggccaattagaaaagttgctgttattggtggtggtctgatgggctctggaattgctacatcacttcttgttagcaatatttctgttgtgctcaaggaagtgaaccctcagtttctgcaaaggggagagaaaatgatagcaggtaatcttgagggcctgataaaaaaaggttcactaacaaaggataggatgcacaaggccatgtcgcttttcaagggcgctttggattattcagatttcaaggatgttgatatggttattgaggctgttattgagaagattcctttgaagcaatcgatattttctgacattgaaaaaatctgtccgaaacattgcatacttgcgacaaacacatccaccattgatttgaatgttgttggcgagaagacaaattctcaagatagaattataggggctcactttttcagccctgctcatattatgcccttgcttgaaattgtccggacggagaagacatcaccacaagctatccttgatctcatcactgttgggaagataataaagaaggtccctgttgtggtcggcaactgcacaggatttgcagtcaaccgtacattttttccttacacacagggttctcatcttctagttagtcttggtattgatgttttcagaattgatcgagtaataagcacctttggcatgccaatgggaccttttcaactccaagatgtggctgggtatggagttgccttggcagtaaaggatatctacgctgatgcctttggagaaagaaatttggactctgaccttgtggatttgatggtaaaggatggacgacaaggaaaggtgaatggcaaaggttactacatttatgagaagggtgcgaagccaaagccagaccctagtgttaagcatgtgatcgaggagtaccgaaagcaggcaaacacaatgcctggtggaaagcctgttactttaatggatcaagatattttggagatgattttcttcccagttgtgaatgaggcatgcagggttatggatgaaaatgttgtaattcgagcttctgatcttgatattgcttctgttcttggaatgggctttcctaaatacaggggtggtcttgtcttctgggctgacactgttggagcaccttacatacattcgaagctaagcaagtgggccgaaatgtatggtcccttcttcaaaccttcatcgtatttggaacaacgagctaaaagtggtgtaccattgagcgcaccaggaacatcacagcaaggttcggcgaggtcgcgcatgtgaggtgctgtccagcattgggaagaagaattcagaatacttgcggccgggatgagccatagacggctgcttcgcagatcaaaaacacctccttgaatacaaataggaggcacagaaatgatgaaaaataaatggttttgcatagctgtaacagttttggtgccttgaactgtaactatggcagagtttctgtgaacagagtggcatgcattaattatacttgaccactctatatgtcgctgtttgtataattttcaatacgtacaagaactaaaatatattattggatagtattttttataataaactcatctgttgctatactttaaaaaaaaaaaaaaaaaagggcggccgcccaaaaggatcaaacctaacttacccttgaaatgcaacttcaaaccccttca

SEQ ID NO: 260221 - DNA, 411 bp, Zea mays
gccttagatcaggccgaaaagcgtagtcgatggacaacaggtcaatattcctgtactaccccttgttggtacggagggacggaggaggctaggttagccgaaagatggttataggtttaaggacacaaggtgaccctgctttttcagggtaagaaggggtagagaaaatgcctcgagccgaggtccgagtaccaagcgctgcagcgctgaagtatgagccccgtggactagccattgcttctccacgaggctcataccaggcgctacggcgctgaagtatgtaacccatgccatactcccaggaaaagctcgaacgaccttcaacaaaagggtacctgtacccgaaaccgacacaggtgggtaggtagagaataccggacgcgtgggcggacgcgtgggcggacgcgtggg

SEQ ID NO: 260222 - DNA, 524 bp, Zea mays
cttgttggtacggagggacggaggaggctaggttagccgaaagatggttataggtttaaggacacaaggtgaccctgctttttcagggtaagaaggggtagagaaaatgcctcgagccgaggtccgagtaccaagcgctgcagcgctgaagtatgagccccgtgcggacgcgtgggcaccaggagcttcgcagcaaggttcggcgaggtcacgcatgtgaggtgctgtccagcattgagcagaataatgcagaatacttgcgggatgagccattgacggctgcttcgctgatcaaaacacctccgtgaacacaaacatgaggcacagaagaaatgatgaaaaataaagggattgtaacagttttggtgcctttgactgtaactggcagagtttctggggacagagtggcatggattaattgcacctgatcactctgtatgtcgctgtcatgtgtgcaatgttcaatacgtacgtaataaagaatggaaatatatgccgcataggtacgagagaagcgcgcccgc

SEQ ID NO: 260223 - DNA, 760 bp, Zea mays
ctcgcgggtcgacacaagcctctacagatgacgtcctgactaacgcgtccgcccacgcgtccgcccacgcgtccgggatttttttaaccaagtctgaaaattcgctcccgataggaatggaacccaggatttggaggtgctactcggaagtccttaaccgctaggctagaggccctttcgctggacaaagaataatgcgacatctttagtttgctgtgctgtgccttagctaactcgttaaaatgagcaatgcagacctgaggcaccgttgattcttaaatggctattgttgattgactgttctaaattttacttccatgattcttgtgagttcttaaatttggcattttttccttgcttccctgtagactccaagatgtggctgggtatggagttgccttggcagtaaaggatatctacgctgatgcctttggagaaagaaatttggactctgaccttgtggatttgatggtaaaggatggacgacaaggaaaggtgaacggcaaaggttactacatttatgagaagggtgggaagccaaagccagatcctagtgttaagcatgttatcgaggagtaccgaaagcacgcaaacacaatgcctggtggaaagcctgttactttaacggatcaagatattttggagatgattttcttcccagttgtgaatgaggcatgcagggttatggatgaaaatgttgtaattcgagcttctgatcttgatattgcttctgttcttggaatgggctttcctaaataca

SEQ ID NO: 260224 - DNA, 534 bp, Zea mays
tgctctataaaaggaggaccaacaacagaggagaggatgaactccgccaagctgctcatgaagggcgctcaggatcatgcatatatcaaggatgatgatctggctatagcggctgctatggagaagactacgtagcagcaaccgctatctgacagcaaagaaaaaatctgcccacaacattgactagttgcgacaaacacactcaccattgattcgacagttgttggcaagaccacaaattctcaagatagaactataggggctcactttttcagccctgctcatattacgcccttgcttgacatggttcggacggagaagacatcaccacaagctatccttgatctcatcaccattgggaagataataaagaaagtcccccatttggggtgggcgaaagccccggggttggtgttgaaagggagaattttttccttaaaaagggggttcatccttcaggtaggccgggaatgatggttcagaattgatcgagtaatagccctttggcatgcaatgggacttttcaatcaagat

SEQ ID NO: 260225 - DNA, 1512 bp, Zea mays
tcttatttccattaccccgagcgtacattctctcctctctctcttggcggcgactcggcgaccggcgctgctgccccacgtttggtgcccaggtcttcgtgggccccttagccggcgacgagcatcaccagctgaaagatggcgaggataccgtctctgaagagcctcaatgcgtttccacatgcggaggaacacttgttgaagaagacttactctggtgctgttgtgacaattcttgggctacttataatgattacactgtttgtacatgagctgcagttttatctcaccacatacacagtgcatcagatgtctgtagatctaaaacgaggagagactctgccaatccatgtcaacatgtcatttccttctttgccatgtgaagtattgagtgtggatgcaattgacatgtctgggaaacatgaagttgatttgcatacaaatatttggaagcttcgcttggataagtatggccatatcatcggtacagagtacttgtctgacctagttgaaaaggggcatggggcacatcatgatcatgaccatgatcatgaccatcacgatgaacaaaagaagcatgaacaaaccttcaacgaagaagcacaaaaaatgatcaagagtgtcaaacaagcactcggaaatggtgaaggctgccgagtctatgggacgttggatgtgcagagggtggctgggaacttccatatctcagtgcatggtttgaacatctttgttgctgaaaagatttttgaagggtcaagccatgtaaacgtcagtcatgttatccacgagctctcatttggcccaaagtatccaggaattgacaacccactggatgatacttcaaggatacttcatgacacaagtggaaccttcaaatactatatcaaggttgttccgactgagtacaaatatctgtcaaagaaaatattgccaacaaatcagtattctgtcacggagtattttcttcccattcgcccaactgagagggcctggccagcggtttacttcctgtatgatctctcaccaattacagtcaccatcaaagaggaaagaaggaacttccttcattttataactcgtctttgtgcagttcttggtggcacatttgccatgacaggaatgcttgaccgatggatgtaccggcttgtcgagtcagtcaccaactcgaagaccagaagtgtactgcggtaactgcacaattcatgataggcggaaaacagctggtaccgtggctaatgaagccaatagacggacctttgcccccaagctaacggatgaagcaatgctgatttgcatgttttattttctccgtacatgactaactttatcatcagttatgttaaattgacactaagtccacggactacagttttgtaaaacttgatgaggaatatgtatgcaaagaaagcgtgggtccagaatagttttctgtgaaaaatcaatacaaatgtagcttcagtgtgctctgtaatagcccccccatgctttatttatagcccccctttggtcgcc

SEQ ID NO: 260226 - DNA, 570 bp, Zea mays
ggatgtacctgttagtcgagtcagtcaccaactcgaagaccagaagtgtactgcggtaactgcacaattcatgataggcggaaaacagctggacgactttcgtcgcatgtgacatgtgttgcgagctgcattcgctcctgtcctcaggtagatgcatgccctgcgatgcttcaaggctgtccgggggagtagcagtatttgaggaaaggtcgatgaaatgaagtagtagcgaggaaagatgtcatgcttcaactgccaaggatcagaagagttcgtgagtcgttactgttgtgaagcacgtcgctgttgtagtgctgtatgatttatttctccgtcacgagtcatgattaacacaaacgaggtacagagactttttttaattcctctgaacattgatcattgtgatatagagcttctccatatatatagagagctattatatatatagtgctgtcaaggacgaacatttgtataaacgggactgggattagaatccctcatttcctctttttttattataaaaaatagagtttgtatttttttattttatgatatttcttggaggattac

SEQ ID NO: 260227 - DNA, 615 bp, Zea mays
gtgtctcttatggacaggatttgatattagcatgctagcactcttatcctttttatactagatagatatgccgccattagatgtaggaaaagtgcagctgcaacttaaatatatttttctgttggaaaatatggccagttagcattgtggtgttattgggtaccccggtgattcaggcttcaacgctgtgcctacctccatagaagctgaaagtccctagctgtttccttttccagaagagaaaaaactgcacctttttggtaatctttaattgacggagaagcatatgttctgtcttgattatcatggtaaaacctgtataaaatataacaaactgaattgatggaccaaagatgtttcagttggaatatctcatatgatggttggacatgaacagaccatgaacaggaccatcatgatgaacaaaagaagcatgaacaaaccttcaacgaagaagcacagaaaatgatcaagagtgtcaaacaagcactgggaaatggtgaagggtgtcgagtctatgggacgttgggtgtgcagagggtggctggtaacttccatatctcagtgcatgggttgaacatctttgttgcgaaaaagatttttggagggtcaagc

SEQ ID NO: 260228 - DNA, 481 bp, Zea mays
cacaattgccccaaaagtaaatgtcataataggagaaaacaactgtcttgcatcaccacgagcgtgggctctctcctttctcgacgacgactgggccaccgtcgctgccgcctgccgcctgccgccctgcgccaggtgccaagcagccaggtgttcttggggcccttcgccggcgacgagcaccaccagctgaaagatggcgaggataccgtctctgaagagcctcaatgcgtttccacatgcggaagagcacttgttgaagaagacttactctggcgctgttgtgacaatttttgggctacttataatgattacactgtttgtgcatgagctgcagttttatcttaccacctacacggtgcatcagatgtctgtagatctgaaacgaggagaaactctgccaatccatatcaatatgtcatttccttctttgccatgtgaagtattgagtgtggatgcaattgacatgtctgggaaacat

SEQ ID NO: 260229 - DNA, 262 bp, Zea mays
agcacatttgccatgacaggaatgcttgaccgatggatgtaccggcttgtcgagtcagtcaccaactcgaagaccagaagtgtactgcggtaactgcacaattcatgataggcggaaaacagctggtaccgtggctaagagcatctccaagagactttttatttttggctctctatttaactctctatgtattttttcataaagattacattatatatatagcatctcactccaacagactatctatctagttttgctagtc

SEQ ID NO: 260230 - DNA, 366 bp, Zea mays
ggcacatttgccatgacaggtatgcttgaccggtggatgtaccagcttatcaagacagtcaccaactcaaagaccagaagtgtactgcggtaattgcacaagtcatcatggatggaaaaccgttggtagtgtggtacccgtggctaatggagcccatagatctttgcccgaagctaactgatcaagccatgttgatttttgcatgttttattttcttcttacatggttaacttataatacgtcgttgttttttttttcatcaactatgttagattaacccagtccacggactacattgttacctatggtggtagtggaactcccatgccaagccgatcttgatcaaccctatagtcccatcgtgcc

SEQ ID NO: 260231 - DNA, 234 bp, Zea mays
cacagaaaactattctggacccacgcttcctttgcccccaagctaacggatgaagccatgctgatttgcatgttttattttcttcgtacatgactaactttatcatcagttatgttaaattgacacaaagtccacggactacagttttgtaaaacttgatgaggaatatgtatgcaaagaaagcgtgggtccagaatagttgtctgtgcatacatattcctcatcaagttttac

SEQ ID NO: 260232 - DNA, 617 bp, Zea mays
caacatctcgatttcgaatttcacccagctccgcacgcgcctcaacccttcctctcgggcggcggcgccggcaaggcggcagccaaccggagcgggagctgcgatgaagaagatcttcggcgccaagaaggacaaggggccgcccccctccatccaggacgccaccgagcgaataaacaagcggggtgagacggtggacgagaagatcaagaagctggacgaggagctagccaggtacaaggagcagatccgagccaggtacgaggagcaacgcaacatgttgtacaaccaaacctacaatctcgaccaagttggctttgctgccgatggcctcaaggatgctcagcagactatgaatgcaatgaaggcagcaaacaaggagctcaagggaatgatgaaaactgtcaaaattgatgaaattgataatatgcaagatgaaatgacagatctgatggacgtgagcaatgagatacaagaaactcttggtagaagctacaacatccctgatgacgttgacgaggaagaactgatgggcgagctagatgctttggagtctgatatggaatttgactcagctgcagtcccctcatatcttcaaccagattctgactttgatg

SEQ ID NO: 260233 - DNA, 597 bp, Zea mays
aaagagcttaatcttgaaaaattgaagttcatgaaccctgaaaagtatgccgaagcagaatctgagtttcgagagttgaaagcagacagtgaggaggctactaagaagtttgaacacatagttagactaatgaatgaagagcttgctcgtttccaggagcaaaagacagctgatattggactcgcattccatgaatttgccaagggtcaggctaagctagctaaagacattgcggatgcatggcgcagcgtcctcccaaagctcgaagcttgttccacatcataaatgtgatttgtgtttcctcatgatgtttgggaatgggatagggggttggcagctggtgagtttaggctgttttttcccagcctgttttgacactgattactgtatacttgaactgcggtttggaaatgctccagctgttaggttcagttgacgtcatttcttgctgtttgagcttttaaccgtcttcttttcttagatcaactgaaatagctactggaatctcgtgatattgataatcaatgatgtaccatgatgctaccaaaaaaccaaaaaaaaaaaaaaaaaaaaaaaaaaaaaaaaaagggcggccgc

SEQ ID NO: 260234 - DNA, 807 bp, Zea mays
cacgagtacaaattctttgtggacggggaatggcggcatgatgagcgtcaacctaccatatctggggagttcggcatagttaacacactttacttgacaagggaatttaaccaaataaacgccttattaaatccaagcacacctggaagcaggatgaacatggatgtggataatgaaaattttcaacgtacggttacgttgtcagatggtaccgtttcagaaggtactctgagagtttcagaggctgcaatacaaatatctaggtgtcgtgtttctgagtatctcaatttgcatacatgctatgatttactcccggattcgggcaaggttattgctctggacattaatttacctgtgaagcaatcttttcatattctgcatgaacaggggattcctgtagctcctctctgggactcattcagaggtcaatttgtcggccttctgagcccattggatttcatacttatattgcgggagctagaaactcatggctcgaacttgacagaagatcagcttgaaacacacactatatctgcatggaaagaggctaagcggcaaacttgtggaagaaatgatggtcagtggcgagcacatcagcatctagtgcatgccaccccttatgagtccttgagggacattgcagtaaagcttttgctaaatgacatttctacagtgccagttatttattcatcatcatcagatggatcattccctcagttattgcaccttgcatccctttctggaattttgaaatgtatttttaggtattttaaaaactcaactggtatttgcctattctgaaccaac

SEQ ID NO: 260235 - DNA, 346 bp, Zea mays
ccatcccctcggctttgtggccaagccggcgatgctgccggatggttctgtcaacctcatgctctggaactgcgtcgtccccggcaaggaaggcactgattgggaaggtggatatttcccagtcactctccatttcactgaaaattacccaagtatcccaccaacctgcaagttcccacgaaggtttttccatgtcaacgtctatgattctggggatgtatgcctgtcaatacttggtgatgcatgggcgccctctatcacagtgcggcaaattcttataggcatccaggagctgctggagaacccaaatccagcctctcccgcacaggattttgcttacgatgtt

SEQ ID NO: 260236 - DNA, 1350 bp, Zea mays
gcggtcaggggtccacgcacgcgtccgaggctggttcgtggatggcggcgccacgacctctcctgctgtcgctgctggtcgccgtgctagcggtggccgccgatgtcgccaacgccggccacgccaagcccctgacgcctggcgggcgcgtggtacacgacaaccacggcaagttcacggccgggccgtggaaacccgcccacgcgaccttctacggcgggcgggacgggtccggcaccacggcgggcgcgtgcgggtacaaggacacgcgcgcgcaggggtacggcgtgcagacggtggccgtgagcacggtgctgttcggtgacggcgcggcctgcggcgggtgctacgaggtgcggtgcgtggacagccctagcgggtgcaagcccgacgcggcggcgctggtggtgacggcgaccgacctgtgcccgcccaacgaccagcagtccgcggacagcggcgggtggtgcaacccgccgcgggagcacttcgacctcagcatgcccgcgttcctccagatcgcgcaggagaaggccggcatcgtgcccatctcctaccgcagggtggcgtgcacgaagcagggcggcatccggtacaccatcaccgggaacaagtacttcaacatggtgacgatcaccaacgtgggcggcgccggcgacatcgcggcggtgtcggtgaaggggagcaagcgcgtcaagtggacggagatgaagcgcaactgggggcaagtgtggcagaccggggaggacctcacctgcgagtcgctgacgttccgggtgatgaccagcgaccaccgcaaggccacctcatggcacgttctccccgctgactggaagttcggtgtcacgtaccaggcatccaagaacttctaagtagccacttttcctcctcttcttcaacctgcatatgcccacaagcaaccatgcagatgataacatgcatcatgcatgcatattcattctttcgctcatgcattccgatatggtgccggagttaaaaaaatgtaaatcaatgtgcaaactcaaatgacatcttaaccagttgtgatcaatctcaaccgctaatgcattgcacacaaaaaaaaaaaaaaaaaaaaaaaaaaaaaaaaaaaaaaaaaaaaaaaaaaaaaaaaaaaaaaaaaaaaaaaaaaaaaaaaaacaaaataaaaaaaaaaaaaaaaaaaaggggcggccgttttaaagatcccaagtttccatacccgtgcatgcaacgtaaaactttttttttggggcccccaaatttaaattacttggccatcttttaaaaactacttaattggaaaacccttgaggttcccaaacttaatcccttggcagaaaatcccctttt

SEQ ID NO: 260237 - DNA, 884 bp, Zea mays
cacgccgctgcttcgtggatggcggcgccacgacctctcctgttgtcgctgctggtcgccatgctagcggtggccgccgatgtcgccaacgccggccacgccaagcccctgacgcctggcgggcgcgtggtacacgacaaccacggcaagttcacggccgggccgtggaaacccgcccacgcgaccttctacggcgggcgggacgggtccggcaccacggcgggcgcgtgcgggtacaaggacacgcgcacgcaggggtacggcgtgcagacggtggccgtgagcacggtgctgttcggtgacggcgcggcctgcggcgggtgctacgaggtgcggtgcgtggacagccctagcgggtgcaagcccgacgcggcggcgctggtggtgacggtgaccgacctgtgcccgcccaaggaccagtggtgcaagccaccgcgggagcacttcgacctcagcatgcccgcgttcctccagatcgcgcaggagaaggccggcatcgtgcccatctcctaccgcagggtggcgtgcgcgaagcagggcggcatccggtacaccatcaccgggaacaagtacttcaacatggtgacgatcaccaacgtgggcggcgccggcgacatcgcggcggtgtcggtgaaggggagcaagcgcgtcaagtggacggagatgaagcgcaactgggggcaagtgtggcagaccggggaggacctcacctgcgagtcgctgacgttccgggtgatgactagcgaccaaccgcaaggccacctcatggcacgttctccccgctgactggaagttcggcgtcacgtaccaggcatccaagaacttctaagtcctccaagcaaatacaccttcggcagtatgatatgcgaactgacacagcatga

SEQ ID NO: 260238 - DNA, 396 bp, Zea mays
gggtccgagcccgcgtccgacattagtgtgccgacgccgggtccgcccgcgcgtcgcgggcgttccgggtggtggccagcgaccaccgcaaggccacctcatggcacgttctccccgctgactggaagttcggcgtcacgtaccaggcatccaagaacttctaagtagccactttccctcctcttcttcatcctgcatatgcccacaagcaaccatgcaaatgataacatgcatcatgcatgcatattcattctttcgctcatgcactccaatatggtgccggagttaaaaaaatgtaaatcaatgtgcaaactcaaatgacatcttaaccagttgtgatcaatctcaaccgctaatgcattgcacacaccgaatgaagctaccatccactgctgg

SEQ ID NO: 260239 - DNA, 239 bp, Zea mays
agcggacgcgtgggaattggccgtccgtttactcctcacaatgtgtaatgataataacggatgctactacgtaccgtacggataatgggtacgtagctacatgaagctgtctacggataatgccgtccgtttactcccctcacatgttttaaattttagtttcgtttctttcgatttcgaacgctgttgcatattcccagacccaataataaagaacccgacagacaatgcaacaacct

SEQ ID NO: 260240 - DNA, 951 bp, Zea mays
ggaccagggacagggagcaacaaagctgagtcctcctcctccatggcggtacggtggcgggcgacgtttacaaaggcgagctgacgccgctgcagcggcacgtcgccttcttcgaccgcaacatggacggcgccatctaccccgccgagacataccaagggttccgcgcgatcggggccggcgtcgccctgtctgcctgctgctgccgtcttcgtcaacggccgccttggacccaagaccgtaccggagaacgagaagcctccgcctttcaagctccccatctacgtgaagaacatccacaggggcaagcacggcagcgattcgggcgtctacgatgccaacggaaggttcgttcctgaaaagtttgaggagatcttcaagaagtatgcccacacgaggcctgatgcccttacaggcaaagagctacaggagatgatgaaagcaaacagagaacccaaggacttgaaaggatggctgggtggcttcacagagtggaaggtgctgtactccctgtgcaaagacaaggacgggtttctccacaaagacactgtcagggcggtctacgatggcagcctgtttgaaaggttggagcaagagaggaactcaaagaaagagtcgagtaagaagaaatgatgagaaatccagacgcccttatgtggacgagtttgcaagtcacgctgtgcgtgtggttgggtactatcataatttgatttattctatatgtttgtcgattcatataacgatattgcaagtatttgtcgaacgtgtttgaattagcaagacatatagctgtgagctttgatagcctcccatatttttttcagttcatattttacattaacgtttttgtgcggtgcttgaaaatatttcgagcgtgttgttgttttttttcagttgtcttagtcatggactcatggtagaatgctaccgcttttaaggctattgtttgtc

SEQ ID NO: 260241 - DNA, 1036 bp, Zea mays
accggacgccgccgcgggggcggacgcgcgcggccgcgggttaaccttcccttctcgctgccgtgctcctgctcgtgcgcgcgttcgcaatcgtagcgctggggttgagccgcgagtggataaaccctagccggtggtgtagctgggttggtggctttgatgccggcgacggcccgcttgtccccggaatggagtgaggtgacgaaggctgccatgggctctaactatgccacgattggattataggatagtagctggcagctaccagtttcctagaaccaatttgtggatagcgagaggagtgactgttgttcagtactttcacctcgatcatgggtggtgtctgctcaaggaagagaagccaattggtggatgaagttctgatgtttccgggaagggacagggaaatgaacctgggcggtgcccgtccctcatggagctttgtgtggctagagtttgccaggatatcgacaggtattctacttttgcaatgctgccaagggatctcagccagcagattttcaatgaattagtaaattcaaaccgtcttacagaggcatcacttcaagtttttagggattgtgctctgcaggacattggcttaggggagtaccctggagtaaaggatgcttggatggaagtagtggcatctcaaaagcagtcattgttgtcggttgatatttcttgctctgaagtagctgatagtgggatagatcttcttagagattgctcaagcatgcaaagcttggcatgtaattactgtgatcaaatatccgaaagtggtctgggagtactgtcaggattgtcaaacctatcttctttaagcttcaagcgaagtaatgctgttactgctgaaggaatgagagcctttgcaaatttagttaacttactaaatctcgaccttgaaggttgcctaaagattcatggtggccttattcatttaaaagatctgacaaagctcgagtcattgaatatgagatattgcaattatattgcggattcagatatcaaatatttaacagatctgacaaatttg

SEQ ID NO: 260242 - DNA, 520 bp, Zea mays
ccacgcgatcggagttgtgcgtgccttacaacgagattcagagcccgagcccgagccccagccccagaccaacgacgagaaaggacaatctgcggcggacctacccgaagtcggaggcagggcaaaaggcccgatcccccctccccgccggttgccgcgctcgtgccacggtgcgctagccccgtcgacgccggcggacagcgtgcactatgggttgctcctcctccgtgccagctagaaatactggagggctgaacactatcagcaacgatagctctccagacgccagttcaaaggacttgcgtgctaagttggtattgctgggagactcaggtgttgggaaaagttgcattgttcttcgttttgttcgtggtcagtttgatcctacttccaaggtaactgttggcgcatcttttttatcacaaacattggcattggaggattcaacaatagtgaagtttgaaatttgggatactgctgggcaagagaggtatgctgccttggcgccactttactacaa

SEQ ID NO: 260243 - DNA, 611 bp, Zea mays
cgaagagacctgctcgcttctccctctccccgagtcgatcggtccagtccgagggaagaaggcaagaagctcccggcgcgcgcgcgcaagcgagaggaaatggcgaccagcaacggctcaggggtcgcgcagggggaggaggggaagacgccaccgcctgcggggtcgatcggcgggtacgagtccctgcacaggctcctggaggccaacctttcccccgatctattccaggaagcaagtcgattgctgctgggactgaattgtgcacgacctcttgaggctatctcactgcctgacgccacaaccactcttgcggaaacacacagttttgatttgcaggcattccgttttagtgcagacaaagagtttctgaggcaatcaagagttgttcgagtaggtctaattcagaactcaattgctgttcccactacttgtcactttgctgaccaaaagaaggcaatcatggacaaaataaaacctctaattgatgcagccggcgcttctggtgtcaatattatgtgcttacaagaagcctggacaatgccttttgccttctgcacacgcgagaaaagatggtgtgaatttgctgaaccagctgatggagaatctac

SEQ ID NO: 260244 - DNA, 1059 bp, Zea mays
acggcctcggcaatcctgaccggatcaacaaagacgtagctacccccctcccgcgtccgtcgaattcgcctccgccgcctgctcgatccggtgggaactcgccgctgccgggttgttttcgctgggtgattaaggctcgggattcgagatctacgcgagtcgcgggcaagcagccatgagcgaggtgttcgagggctacgagcggcagtactgcgaggcctccgcctcgctctcccgcaagtgcaccgctgcctccgccctcgatggggagaagaagaagcagaagctgtccgagatccaatccggcgttgaggaagctgaatcgctgattcgtaagatggacctggaggcaaggagcctacagcctagcattaaggctggtttgcttgcaaagctgagggagtataaatctgacctcaacaacgtcaagagtgagctcaagaggatatctgcgcccaatgccaggcaggctacccgggaggagctcctggagtctggaatggctgatactctcgcggtgtctactgatcagaggggaagattgatgatgacaactgaaagactgaatcagtccactgacagaattaaagagagccgaagaactatgttggagacagaagaacttggtgtctcgattcttcaggaccttcaccaacagaggcagtcactactacatgctcatactactttgcacggagttgatgataacattggcaagagcaagaagatcctggctgcaatgtcaaagaggatggataggaacaagtggatcattgggggaatcatcacggctctcgctctggccatccttttcatactctacttcaagctcgctcattaagcttgcctgcaggtaggttccttccacatatctgtgctcagtaattgtgtgataagagttgtctgaatgctgtgtattgagcgacacacggctcttgaagcatcatttattccctcccaaacctgtaaacttaacgtggttcatgttgtgtacagtcagatacgtccaactatgtaaaatgtctatagagtaaaaaaataacgcttggtgttgagact

SEQ ID NO: 260245 - DNA, 896 bp, Zea mays
ttgttttaggagctcttggagatgctctaatctcttctgcacttgggctcggcaaccgtgacccgaccctccagatttcccgtcgccgagccacgcgggtcgagtacccgtcgaactcgccgctgtcggatcgttctcgcttggggcgatcaagctaacgggatttgaggagatctaggccagccgcgggcagcagccatcagccatgagcgaggtgttcgagggctacgagcggcagtactgcgaggcctccgcctcgctctcccgcaagtgcaccgctgcatccgccctcgatggagagaggaagaagcagaagctctccgagatccagtccggcgttgaggaagctgaatcgctgattcggaagatggacctggaggcaaggagcctacagcctagcattaaggctggtttgcttgcaaagctgagggagtataaatctgacctcaacaacgtcaagagtgagctcaagaggatatctgcgcccaatgccaggcaggctacccgggaggagctcctggagtctggaatggctgatactctcgcggtgtctactgatcagaagggaagattgatgatgacaactgagagactgaatcattccactgacagaattaaagagagccgaagaactatgctggagacagaagaacttggtgtctcgattcttcaggaccttcaccaacagatgccgtcactactacatgctcatactactgtacgtacctgtatgactgcctgaacagctctacctattatatagatttattttctggccattttctgattttacaggttgaaagatgcaataattcttgccaacaatacctgtataaaagcactagtttagttcaggactctacaattttgttttgtgcagaacttttttatgaaaa

SEQ ID NO: 260246 - DNA, 404 bp, Zea mays
atggataggaacaagtggatcattgggggaatcatcacggctctcgctctggccatccttttcatactctacttcaagctcgctcattaagcttgcctgcaggtaggttccttccacatatctgtgctcagtaattgtgtgataagagttgtctgaatgctgtgtattgagcgacacccggctcttgaagcatcatttattccctcccaaacctgtaaacttaacgtggttcatgttgtgtacagtcagatacgtccaactatgtaaacctaacgcacgttgttctgtcgtgctaactaaactagagaggttagtaaagcagtacttcgtatgtaactgttgtgtgtgcatcggtctattcgaactgctgtggctgtgggccttggaatttattgtgattaggc

SEQ ID NO: 260247 - DNA, 387 bp, Zea mays
cgacagcaactcacctcccgggcctaccaagcagtctctagaaacaaacaaacagcggcaatgtgctaatctcttctgcatttgggcacggcaatcctgacccgaccctccagatttcccgtcgccgagccacgcggatcgagtacccgtcgaactcgccgctgtcggatcgagtacccgtcgaactcgccgctgtcggatcgttctcgcttggggcgatcaagctaacgggatttgaggagatctaggccagccgcgggcagcagccatcagccatgagcgaggtgttcgagggctacgagcggcagtactgcgaggcctccgcctcgctctcccgcaagtgcacggctgcatccgccctcgatggagagaggaagaagcagaagc

SEQ ID NO: 260248 - DNA, 1447 bp, Zea mays
ggcgtgtcggcggcggtgttcagcaaggagaaattgctggagcacgtgatgagcgcggtgcccgagggcatcagtcgcgaggactggctacaggcgctgccgcgcgcgctcgtcgcaggattcgtcaagacagacattgacttccagcgcaagggtgagacgtcaggaacgacggcgacacttgttgtggttgatgggttcacggtcactgtggcgtcggtgggagattctaggtgcattctggatacacagggaggcgaggtctcattgctgactgtggatcaccggctagaggagaatgcacaggagcgtgagcgcgtcacagcgagtggaggagaggtcagccggcttaatctctgtggtggacaggaggtgggtcctctccgatgctggccaggtggattgtgcctttcaaggtcaattggggatactgatgtcggcgagttcattgtaccgattccacatgtcaagcaagtgaagctcccaaatactggtggaagactaataattgcatcagatggaatatgggacgctctgtcctcagagagtgctgctcaggcgtgccggggattacgtgcagaactggctgcaaaacttgttgttaagcaagctctgaagacaagtgggctgaaagatgacaccacatgtgtggttgtcgacatcatcccatctgatcattgttcaacaccaccagcattgtctccaaagaaaaatcagaacaagttgaagcatcttatttttggtaaaaggtctcatagttctgttggaaagctcagcaaatctgcttcattgggttcagtggaagaaatattcgaggagggatctgcaatgttggaagaaaggttgggaagtaattttccaccaaaagcaaatctgcctccatttcgctgtgcaatctgccaagtggaccaagagccattcgaaggtttaatgacggacaatgtaggtggctgctgctcaaccccatcaacaccatggggtggtccttatctttgctcaggctgtaggaaaaagaaggacgcgatggaaggtaaacgatcgaatcgttcaacgacgtgcaggtgaaggttctgataggaatcactgggactgggtcctgtgatcctgtcatgcaagcttgcaaagtagtctccgatttcggttttctgctccttgtaaaaagagaagaataaaccgtctgtcgtttgattgaagtattgttcggtgaaaactaactgcactccagcctgatctgagaaaaaccggggtactaataacaagcctgatttctattgacatcccctatcaaactttcgtttgctctgagaggatagctgacagaactttgaggctgtagttttgtgaacccttagcatgtagagggaaatgagtagcttaacaatgttttatagaacgatggtgtggcttctcattgttgctttagaatgtattttgtgtttgtggagct

SEQ ID NO: 260249 - DNA, 794 bp, Zea mays
gcactatccgacactaggccaccaccagcgggcgggctccagtcgcaactcgcaacacagacgccgccgccgcccaaagaaagacgtcaactccaggagacaagatagtgagaactgaagagaaggatgggcttcgagaagcagatcctgagatccggcaccggccccaagccgataaagggccagaaggtcaccgttcactgcaccggctacgggaaggatcgtgatctgtccaagaaattttggagcaccaaggaccctgggcagcagccattcagtttcagcattggtcagggttcagtgatcaaaggatgggacgagggagttatgaccatgcaagtgggtgaagttgctcgtatccagtgcacgcctgattatgcttatggagccggcgggttcccagcctggggaattcaaccaaactcagtgcttgtgttcgagattgaagtcctcagtgcccagtaattcgcatctgtcagctatggaaacgttggccatgcttctcaagtaatgaaataattccgttgtcacctcatgctacatacagcagattggtgttacgagttaaatcctgtgaaactttagcattctgtaaccgtggatgtcgagtttatggagttccttgtgtggcgcctcaagtcaagttctcgtcaaagattgtaatctgatggcttccattgtgacttgtaggcggctgcaataaacttacttgatgcaattattgcagtcgaatcctgtgaacctgtgatgttcccgtggaaacggtaaatggacaaaccgtaccagggtaaaaa

SEQ ID NO: 260250 - DNA, 352 bp, Zea mays
gtggagcccgacgcacctgtggttctccacctgggcgttcctcctggggtcgctggccgcctacgtggcgctctgcctggccctggacgtggcgctggccctggccgcgcagcgcctgcgccggcgcctggcggttccgctgggccccgtgcccgcggcgcacgcgctgctgatggccggcgcgtcgtccgccatcttcgcggggacgctgctgtcggcggtggccgagatacgggacacgcggtggtcgtggcgacgccgaagccgcagcaccccgttgcggagactcctgtgcttcccggccgggacacgctcctcaggccgcagtctttttctgggcctacgcctacta

SEQ ID NO: 260251 - DNA, 700 bp, Zea mays
tgctttcgcgtgggcggacgcgtggggactggcaagaccatcaccttggaggtggagagctctgacaccattgataatgtgaaggccaagatccaggacaaggagggcattcccccagaccagcagcgtctgatctttgcgggcaagcagctggaggatggccgcactctcgcggactacaacatccagaaggagagcacccttcaccttgttctccgcctcaggggtggtatgcagatctttgtaaagaccctgactggaaaaaccataaccctggaggttgagagctcggacaccatcgacaatgtgaaggcgaagatccaggacaaggagggcatccccccggaccagcagcgtctgatcttcgccggcaaacagctggaggatggccgcaccctagcagactacaacatccaaaaggagagcaccctccaccttgtgctccgtctccgtggtggtcagtaagtcatgggtcgtttaagctgccgatgtgcctgcgtcgtctggtgccctctctccatatggaggttgtcaaagtatctgctgttcgtgtcatgagtcgtgtcagtgttggtttaataatggaccggttgtgttgtgtgtgcgtactacccagaactatgacaaatcatgaataagtttgatgtttgaaattaaagcctgtgctcattatgttctaaaaaaaaaaaaaagaaaaggc

SEQ ID NO: 260252 - DNA, 807 bp, Zea mays
ccgaactagttttagagcaccctccacctggtgctcttcctcaggggtggtatgcagatttttggggagacattgactggcaagaccatcaccttggaggtggagtcgtctgacacaatcgataatgtcaaagccaagatccaggacaaggagggcattccaccggaccagcagcgcctgatctttgctggcaagcagctggagccgcccccgccccccgccgactacaacatccagaaggagagcaccctccacctggtgctccgcttgcgaggtggtatgcagatctttgtgaagaccttgactggcaagaccataaccctggaggttgagagctccgacaccatcgacaacgtgaaggcgaagatccaggacaaagagggcatccccccagaccagcagcgtctgatcttcgccggcaagcagctggaggatggccgcaccctagcagactacaacatccagaaggagagcactctccacctggtgctccgcctccgcggtggtcagtaagccatggttcatttaagctgctgctgtacctgggtatctgcgtcgtctggtgccctctggtgtacctctatatggatgtcgtcgtctaataaacatctgtggtttgtgtgtcatgaatcgtggttgtggcttcgttggtttaatggacctgttgtgtcctctgtgttgtacccaaaactcttctgcagcagtatggcttgaatccttatgaagtttgatatttgaacttaaaaaaaaaaaaaaaatattttaaactggttaaaaaaaaaaaaaaaaaaaaaaaaaaaaaaaaaa

SEQ ID NO: 260253 - DNA, 803 bp, Zea mays
cgcacccttgcggattacaacattcagaaggagagcaccctccacctggtgctgcgcctcaggggaggaatgcagatcttcgtgaagacattgactggcaagaccatcaccttggaggttgagagctccgacaccattgataatgtgaaggccaagatccaggacaaggagggtatccccccggaccagcagcggctgttcttcgccggcaagcagctggaggacggccgcaccttggctgactacaacatccagaaggagagcaccctccatctggtgctccgcctgaggggcggtatgcagatctttgtgaagaccttgactggcaagaccataaccctggaggttgagagctctgacaccatcgacaacgtgaaggctaagatccaggacaaggaggggattcccccagaccagcagcgtctgatcttcgccggcaagcagctggaggatggtcgcacccttgcagactacaatatccagaaggagagcaccctccacctggtgctccgtcttcgcggtggttattaagccatcagtcgttgaagctgctgctgtatctgggttatctagtgtctctgccattgcccatggatggtgctgtctttcaaagtatttgtatggtttgtgtcgtgagtcgtgactgagctggtttcatggaccagttgtgttctcgttacccaaaactatcgtgcgaccgcatatggcttaatcatgaataaatgttgtttgaatttaaactattcaatgaaaaaaaaagttttttgtcatgtcagttaatgttactaaattggttgccttct

SEQ ID NO: 260254 - DNA, 450 bp, Zea mays
ttgactggcaagaccataaccctggaggttgagagctccgacaccatcgacaacgtgaaggcaaagatccaggacaaagagggcatccccccagaccagcagcgtttgatcttcgctggcaagcagctggaggatggtcgcaccctagcagactacaacatccagaaggagagccctctccacctggtgctccgcctccgtggtggtcagtaagccatggttcatttaagctgctgctgtacctgggtatctgcgtcgtcgtcgtctaataaacatctgtggtttgtgtgtcatgaatcgtggttgtggcttcgttggtttaatggacctgttgtgtcctctgtgttgtacccaaaactcttctgcagcagtatggcttgaatccttgtgaagtttgatgtttgaacttaaaaaaaaaaaaaaaaaaaattttttcaaaagcccggccgc

SEQ ID NO: 260255 - DNA, 565 bp, Zea mays
  unsure (1)..(565): unsure at all n locations
cccacgcgtcctgccacgcgtnccggaaccttcaactttttcttcggcttaaaaggggtatggcaaatgtttgaaaagactctgactggaaaaaactataacccttgaggttggagaagctcggacacccatcgacaaatgtgaaaggcgaaagatccagggacaagggaggggcatcccccctcggtccaaagcagcgtcttgatctttccgccggcaaaacaagcttggaaggattggccgcacccctagctagactaccaacatccaaaagggagaaggcaccctccaccttgtgcctccgtcttccgtggtggtcaagtaagtcattgggtcgtttaaagcttgccgatgttgcctgcgtcgtctgggtgccctctctccatatggaggttgtcaaagtatctgctgttcgtgtcatgagtcgtgtcagtgttggtttaataatggaccggttgtgttgtgtgtgcgtactacccagaactatgactaatcatggataagtttgagggccccaattatttcaaaagcccccaaaaaaaaaaaaaaaaaaaaaaaaaattaa

SEQ ID NO: 260256 - DNA, 437 bp, Zea mays
gtcgtgtcagtgttggtttaataatggaccggttgtgagctcggacaccatcgacaatgtgaaggcgaagatccaggacaaggagggcatccccccggaccagcagcgtctgatcttcgccggcaaacagctggaggatggccgcaccctagcagactacaacatccaaaaggagagcaccctccaccttgtgctccgtctccgtggtggtcagtaagtcatgggtcgtttaagctgccgatgtgcctgcgtcgtctggtgccctctccatatggaggttgtcgaagtatctgctgttcgtgtcagtgttggtttaataatggaccggttgtgtggtgtgtgcgtactacccagaactatgacaaatcatgaataagtttgttgtttgaaatccaggaaaaaaaaaaaaaaagggtggccgttcgcgatctcgaact

SEQ ID NO: 260257 - DNA, 529 bp, Zea mays
agaacgctatgcacgagttgtattacattcatacaccacatgtattcatgattaagccatatgtgccgcacgatagtttcgggtgacgagaacacaactggtccatgaaaccagctcagtcacgactcacgacacaatccatactgatactgtgaaagactagtacgatccatgggcaatggcagagacactggataccccagatactgcagccccgtcctacatgctgctccgtcatcgcggtggtcagtaagccatggttcatttaagctgctgctgtacctgggtatctgcgtcgtctggtgccctctggtgtacctctatatggatgtcgtcgtctaataaacatctgtggtttgtgtgtcatgaatcgtggttgtggcttcgttggtttaatggacctgttgtgtcctctgtgttgtacccaaaactcttctgcagcagtatggcttgaatccttatgaagtttgatatctgaacttatcggaggcagcggtcttgagacaggtcggccgctcgcgatctagag

SEQ ID NO: 260258 - DNA, 464 bp, Zea mays
cggacgcgtgggcgcttgcgaggtggtatgcagatctttgtgaagaccttgactggcaagaccataaccctggaggttgagagctccgacaccatcgacaacgtgaaggcaaagatccaggacaaagagggcatcctccagctgcttgccagcgaagatcagacgctgctggtctggggggatgccctctttgtcctggatctttgctggcaagcagctggaggatggccgcaccctagcagactacaacatccagaaggagagcactctccacctggtgctccgcctccgcggtggtcagtaagccatgggtcatttaagctgctgctgtacctgggtatctgcgtcgtctggtgccctctggtgtacctctatatggatgtcgtcgtctaataaacatctgtggtttgtgtgtcatgaaaaaaaaaaaaaaaaaagggcggccgctcgcgatctagaactag

SEQ ID NO: 260259 - DNA, 391 bp, Zea mays
gtccgggaggatggtcgcacccttgcagactacaatatccagaaggagagcaccctccacctggtgctccgtcttcgcggtggttattaagccatcagtcgttgaagctgctgctgtatctgggttatctagtgtctctgccattgcccatggatggtgctgtctttcaaagtatttgtatggtttgtgtcgtgagtcgtgactgagctggtttcatggaccagttgtgttctcgtgacccaaaactatcgtgcgaccgcatatggcttaatcatgaataaatgttgtttgaatttaaactaaaaaaaaaaaaaaataaaaggggggccgaaaaaaaaaaaaaaaaaaaaaaaaaaaaacaaaaaaaaaaaaaaagggcggccgctctaaa

SEQ ID NO: 260260 - DNA, 212 bp, Zea mays
aaacttcataaggattcaagccatactgctgcagaagagtgttgtgtcctctgtgttgtacccaaaactcttctgcagcagtatggcttgaatccttatgaagttcaaacatcaaacttcataaggattcaagccatactgctgcagaagagttttgggtacaacacagaggacacatcaaacttcataaggattcaagccatactgctgca

SEQ ID NO: 260261 - DNA, 670 bp, Zea mays
ggcctactgttgtggtccagtgatccagtctgcgtctctttccccgtcgtggtgggttccgatccaatcgacgtcgacgactccgcagccaccgctcctctcctctcgtcgcttcttctatctctcggcgtcgaatctcatccggccagtggccacactctactagccgcccggtggaaggagttcttccgggattcgagccgttgctgccctcacctccgctggcccggcgtcgagcggagatccaatcgaaaatcgaactgacttcatcttctgttggtcaacaagagagcccgttgaaatccgggacctctcaattgtccttttctctctccccgcccaccttcccctgttctgccgcctccccagtccggcgtgcatcagcagcgacatcagagtcggcgatgggaggcgtcatcgacgttctcgtccccttatgttgatgaagtggcgtgccgtggagattccttgaccgatttcttgccggtaagacggagcctgccatctgcgtggctggtcatcgcggtgagcaaggaacgacgaagtgcgcccctccgcccttcggcccgtcgttgtgccttgcgtcgtcgggtggagttccttcccctgcttcaagctaattcgacaaaaagagtagagcagcaaaatggagaaccatggaaaattggat

SEQ ID NO: 260262 - DNA, 740 bp, Zea mays
cccacgcgtccggtctctttccccggcgtggtgggttccgatccaatcgacgtcgacgactccgcagccaccgctcctctcctctcgtcgcttcttccgtctctcggcgtcgaatctcatccggccagtgaccacactctactagccgcccggaaggagttcttccgggattcgagccgttgctgccctcacctctgcaggcccagcgtcgagcggagatccaatcggaaattgaactgacttcatcttttgtcgcatccccgtcaggagaagcaatgtcaggagtgatcacaaagttcgcggttacatccatggtgatgtggatggcccctgttgcgatcatgtatgggttttactaccaggtgtttccaggtgtgagtcagatgtcatcctcggcgcagacacttgccagtgggttcctggctgtcatatcagttaatctagtgatcggcttttacatattcatggcgatgaaggagactccacaccaagagccacagccagatcccaccttcctggagaaagccaaagcgagtatcaaccagccaacatcctctcgagggagtgatgattccaaggggaagggaaaggtcgagtaagccgtagcatgtcggcttaggtctcgtgtatgttaagtgcatgttatttaggaggaatatatatgccacaccatcacaaggaccgcaacctttcacaatttatgattttgctgtaaatcttgacagttatggctatggagc

SEQ ID NO: 260263 - DNA, 642 bp, Zea mays
gccacttcagactcctctgcgctccatccctctgcactccggtccgcgcgagtccggcagcttctcccagacgctagacacgccaccgcatcgtctgcgccgcgagatcgagaatgtccatctctatgcggctcgcgatccctgctcctgccgtcaccgccgccgcgccgacgcggctgagggtgcgagcggcagcggcggggaaccgcggctctctctccgtcgcgcgcgccgccgtacgggcggagacgggcgcgctcaggggatgcgcctggctgccaccgaagccgctgggagcgggccagccgtaccggagcaggggggccgccgccgtgtgtcactcgtcggcgcacctcagcgcgcgcaccatccagtggatctccgccggagccagcgcagtgctattagttgctaaaggcactgccatacacaaatctttccttgtgccattatttgctcttcaggcaccttgcagcataatctcatggatcaagggtgactatggtcagtggactgcttttcttgctttgttggtgcgtctattcttcttcattccaggtgaactggagcttccgctgtcaacaatgctgcttgtgagtgttgctccttaccaattcatggatcttaagggaactcaaagtg

SEQ ID NO: 260264 - DNA, 784 bp, Zea mays
accggaccggaattcccgggtgcgacccacgcgtccgaaacaatccttgcacccctcccctccgtcaccccaccacatccggccagcccaacgaaaatgtcgcgcgccacagctgcggtcctcttctacatcctcgccgtcgctgccctcagcgcggccgaggcaccggcagagtcaccgaaggcaggcagtcctgccaaggcaccggccgagtcaccgaaggcaggcagtcctgcagctcctgccaaggcacccgagtctgctgccacgagaactgcccccgctaaggcacctcaagccgcctccacccccgccgctgccgctgccccatcgtcgtcgtcgtctaggaagtctggtccagctgccgcgccgaccaccgccgcctctacaccgtcttcttccacggacgaggagttgagcccttcgccgtcggcatccaccgccgaggtggcgtcccctgccgctgatgggcctgctgagggaccggcggctgctgatgcctccggtgctgctacccttggaagcggagctgccatcgctggtgtcgccgctgctgtcgctaccatgatcttctactgagttcaccagctgggaccgtgtcgtcgagggtgggcacgtagttggctgtgcggtaattgctcgtctggtcgggagggaccaataacgcaagtgttgctttgctttgctcacttcgtttgctcttgtaactttatggggtcaaccgttatataactgaaacgatttgattaattgatactaatgctctctatctgtcatgtataag

SEQ ID NO: 260265 - DNA, 1422 bp, Zea mays
cccacgtgaccgcccacgggtccgatcccgaccccgtgttgccaccggctacacgctctcggagccgcggacgccccccgggtgggggccatccggaagcaggcctcaaagctccgggagcaggtagctcggcagcagcaggcggtgatgaagcagttcgggggcgggtacggcgcagacggcgtgttcgctgacgaggctgaggcgcaacagcactccaagctcgagaaactctacatctctacgcgcgcggccaagcacttccaaagggatatagttcggggcgtcgagggctacatagtcacggggtcgaagcaagtcgagatcgggaacaagttatgtgaggatgggaagaagtatggcactgagaacacttgtaccagtggtagcacactgtcgaaggcggcattaagttttgctaaggcacggtccatgatggaaaaggaaaggggtaacctgctgaaagcccttggcacacaggttgcagaacctctgagggctatggttatgggagctcctttggaggatgctcgccaccttgctcaaaggtacgacagaatgcgtcaagaagctgaagcgcaggctattgaagtttcgaagcgccaaatgaaactaagagaggcgtctggaaatagtgatatggtttcaaggctagaagcggctgagtcaaagctgcaggagttgaaatcaaatatggggggtttgggcaaagaagctttggccgcaatgactgccgttgaaggccaacagcaaagactgacactgcagcgtcttattgcattggttgaatcagagagaaactaccaccaaaaggtcctacaaattcttgatcaacttgagagagagatggtatctgagcgccaaagaattgaaggggcacctcctccggtggttgagagttccatgcctccaccgcctgcatatgaagaagtcaatggtatattcatgaggaatacggtcgcagagttggtcgagaccgtggagtatttcctggctgaggcaatccaatcatatcgagcagagagcgacactgagctcaacctttcagctggtgactacatagtggtccgaaaggtgtcgaacaatggatgggccgaaggtgaatgcagggggagagctggctggttcccctacgattacatcgagaaacgagagcgtgtgcttgcaagtaaagtcgcgcaagttttctaaaactaaaacttttgccgagacatccatatattcccggggatgtgcaatgtgtattatgcttgatcgtcagaagagaagatctgtaattttgctggaagctgcctgttggatggcttgttcctgcctggccgtctgcattgttcaaattcatgtggcaggaacgtgggcattattaaaacttaatctaaaatcccccgttaaaaaaaaaaaaaaaaaaaaattattcaaaaa

SEQ ID NO: 260266 - DNA, 714 bp, Zea mays
cttaactgaaggttgaatcagagagaagctaccaccaaaaggtcctacacattcttgatcaacttgagagagaggtctgatggtttcacatccgcatcctttccatgcttctccattgtgctaaagaaagtctacaactttgagaaaaatctggtcgattatgttatcttgattgagctttcttttttttttcttctagatggtatctgagcgccaaagaatcgaaggagcacctccggtggttgagagttccatgcctccgccgcctgtatatgaagaagtcaatggtatattcatgagaaatacaggtgcagaattggtcgagactgtggagtatttcttggctgaggcaatccagtcataccaagccgaaagcgataccgagctcaacctttcaactggtgactacatagtggtccgaaaggtgtcgaacaatggatgggccgaaggtgaatgcagggggaaagctggttggttcccctacgactacatcgagaaacgggagcgtgtgcttgcaagtaaagtcgcccaagttttctaagtcttccgctgagccatgtagtatccccggggttgtacaatgtgtgttgtttatgcttgtcatcttcagagaatcagaggagatctgtaattttgctgaaagctgcctgttgggtggtttgtttctgcctggccgcctcaattgttcaaattcatgtggcaggaactgaatat

SEQ ID NO: 260267 - DNA, 299 bp, Zea mays
ttcccatcccgaccccgtcttgccaccggctacacgctctcggagtctcggtcgctgcttgccaccgaccacaccctctctatcgacgccgcccaaatggaggccatccggaagcaggcctcaaagctccgggagcaggtagctcggcagcagcaggcggtgatgaagcagttcgggggcgggtacggcgcagacggcgtgttcgctgacgaggctgaggcgcaccagcactccaagctcgagaaactctacatctctacgcgcgcggccaagcacttccaaagggatatagttcgggg

SEQ ID NO: 260268 - DNA, 1400 bp, Zea mays
  unsure (1)..(1400): unsure at all n locations
gctgtaaagagtgttgaaggacgctcggttccttcaggtgcggcggcgaccttgtctaggattttacccgtggaacgtggcgaccacttccgacgggccactcgccgccgctcgcccgccctgctcttcaccccttctcccgggaccgggacaagcgatctcccgtccccgtagtccgcaggagagagatttttttctcggttgcaatgaagagttatccgtgggcgggggcccgccctcttgccgtcgtgcagctcctcctcttcctcgcccacctcgtcgaccgcggcggtgctgccggtggaggcagcaagggcagctcggtgtacccggcggctgtcgtctacccgcatcactcccgccagatctcctgcaaacccagggtgttcctgtatcagcacttcctcagcgacgacgaggctaaccacctgatctccctcgcgagagcggagctcaagaggtcagcggtcgccgataatatgtccggcaagagcacgctcagtgaggtccgcaccagctccggcaccttcctcaggaagggccaggatcctattgttgagggtatagaggacaaaattgctgcatggacattccttccaaaagagaatggtgaagatatccaagtcctaagatataagcatggggagaagtatgaaccacactatgattacttcactgacaatgttaacactgtccgtggtggtcatcgctacgctactgttcttttgtacttaactgatgtaccagaaggaggggaaacggttttccccttggctgaggagcccgatgatgctaaagatgcaaccttgtcagaatgtgctcagaaaggcattgcagtgagaccacggaaaggtgacgccctccttttcttcaaccttaacccagacggcaccaccgactcggtgagcctccatggtggttgcccggtcataaaaggcgagaaatggtcggctacgaagtggatccgtgtggcctcgttcgataaggtccatcacccacagggcaactgcaccgacgagaacgagagctgcgcgaaatgggcggccctaggggagtgcataaagaacccagagtacatggtgggaaccacagcgttgcctggttactgccggaggagctgcaatgtgtgctagggtcaggacgtgagagtactagtatttgttagtgcataccacttgtatccatagtctgttgttggtctcctacatctcgcataaaagaaatactcctatgcccgatggaggtgcatttagaataagcctagtatttgatctattgatttattagattgcttggttctgctagctcataatttgtaccgggaccttagaagatctttgattcgttgtcgtctgtaacattttctcgatatatatggtgtgcatttctggtcatcccnc

SEQ ID NO: 260269 - DNA, 1238 bp, Zea mays
attgtcacgtaattcgtttccctgtcctccccctctcgctgagctgagcccacctactccctcccaccacttgcattcacacactcgattccgctgctctctccctcttcctctcccccgcggcggagccataaaccctaggcctcgccgtcgtcggaggcgccgccgcgatgtcgcactttggaaggacgggtccgccggacatccgcgacaccttctcgctgctcgtcctcaacatcagcttccgaaccacggccgacgaccttttcccgctcttcgagcgctgcggcaaggtcgtcgacgtcttcatcccgagggaccgcaggaccggggactcgaggggtttcgcgttcgtgcggtacaagtacgccgacgaggcgcagaaggctatagatcggctcgatggccgtgatgtggatgggagaaacatcatggtgcagtttgcaaagtacggccccaatgctgagccaatccgcaaaggaagggttaaagagggggttgagaaatcacaagacagatcaagaagccgcagtccaaggccaaggcacagagatagagatcatagaagccaaagtcgcagcaggagcagagaaaggcatgtccgtgatagagacaggggctatcgtcgtcggagcagaagtagaagccgaagtcttagttcaagccctgacaacagaagtcatcatagagcaagagatgatgataagcgcaagagcatgagtaagagcaggagcaggagcaggagcacaagtagaagccgctcatactatagtgcttcacctgcccggcacagtgctagccctcgcaagagcccaccgccacagaggagccccactcctgcaaagcatgccaatggaaaagtagcacctctgtcacgctgtgtttctccattaccgaagcgtgcaacctcccgcagcccaggcagtgatggcaaggagtaaagcttgctgatttggtgatgcctagaaaacagccttctcacggagtcacgggattgcagaaccttgagaaggttgattgagcacaatggaagtagcagtctgcaatcaaccgcgatccaaggttgctagttcttttaatggcttatagaattgtgttttccagttgtcaaaaatatgctgctggtttgtatttttggcatatactgtgtttttatacccttgcactgcatcatcatctactttatatatgcatcagtttctcgaaaccatcatattaatttgttaaaacatttgtgc

SEQ ID NO: 260270 - DNA, 585 bp, Zea mays
  unsure (1)..(585): unsure at all n locations
tcgcccacgcgtccggatgatgttaagcgcaagagcagaagcaagagtagaagcaagagcaggagcaggagtagaagccgctcataccacagttcttcacctgcccggcgcagtgctagccctcccaagagcccaccgccacagaggagccccactcctgaaaagcatgccaatggaaaagattcacctctgtcacgcagtgtatctccatcaccgaagcgtgcaagctcccgcagcccaggcagcgatagcaaggaataaagcttgttgatctggtgatgcttaaagagcagtcttcccatgggattgcagaacgttgagaaggctgtttgaatatgatggcagtaccaatctgcaatcaaccgctatccaaggttgctagttcttttaatgacttctagaattgtgttttccagttgtcaaaatatgctgttggtttgtatttcgacctctattgtctttttatacccttgtactgcatcatctactttatgtgcatccgtttcttgactccatattaatttgttcacccatttgtgcaaaatccacaaatctgttcgtgagaaaaaaaaaaantagttanaa

SEQ ID NO: 260271 - DNA, 413 bp, Zea mays
gtcgacacaagcctctaggctgatgctcatcaccaaccccgcgcgcgggggagcgataaaccctagtcttcgccgtcgtcgcaggaggacccgcgatgtcgcacttcgggaggtcaggcccgccggacatccgcgacaccttctcgctcctcgtcctcaacatcagcttccgtgagggagatctaaccctagccccaccctccctcacttctctccctaatcgcttccttctcgtgtccgtctccccccgcttcacaggcaccacggccgacgacctcttcccgctcttcgagcgctacggcaaggtcgtcgacgtcttcatcccgagggacaggaggaccggggactcgaggggtttcgcgttcgtgcggtacaagtacgccgacgaggcgcagaaggctatagatcggctc

SEQ ID NO: 260272 - DNA, 1167 bp, Zea mays
tttcctgcgtccattcaaagctatcaagcggcgcagtcgcgagtaaagaacgagcagcaggccaccgctgctataaaaccctccgcctccaccggcggctcgccaaactccgtttcgaattctagggttttgctgctctccgaccccgagctccgaaggccgcagcatcaggcgcggcccccctcgcgtgtgaccgagatggcgctgccgaatcaggggaccgttgattaccccagcttcaagctcgtcatcgtcggcgatggtggaactggtaaaactacatttgtgaagaggcatctcactggagagtttgagaagaaatatgaaccaaccattggtgtggaagttcatccgttggatttcaccactaactgtggtaagatcaggttctactgctgggataccgcagggcaagagaagtttggtggcctcagggatggatactatatccatggccagtgtgcgatcatcatgtttgatgtaacctcaaggcttacttacaagaatgttcctacgtggcatagggacctgtgcagggtctgtgaaaacatccccattgtcctctgcggtaataaggttgatgtgaagaacaggcaggtcaaagccaagcaggttactttccacaggaagaagaatctgcagtactatgaaatttctgccaagagcaactacaactttgagaaacctttcctgtaccttgcaaggaagctggctggtgatccgaaccttcactttgttgaagctgttgctcttaagcctccggaagttaccatcgacatggctatgcagcagcagcatgaagctgagcttgctgcagcagctgcacaacctcttcctgatgacgatgatgatctgattgagtagaaaggatcatgagtcttgaacttgagcaggagttgtgccttgcgtgttttaagttgttctagggtgaactcttgagttctcattgtctggatcatctttttctccttggatgtgttgcatcttttgagtgtggaaatggatggtactcctcgccatgaatttgctggctactttatacattgctttgtaactctgtttgatgataaactttgttgtggcaatcctcttagtgctgaaaaaaaaaaaaaaaaaaaaaaaaaagggcggccgcacccgggaatcacggacacggtacgtgcaggc

SEQ ID NO: 260273 - DNA, 611 bp, Zea mays
  unsure (1)..(611): unsure at all n locations
tccggaattccnnnnnnggggnggggtgcgcccacgcgtccgcccacgcgtccggcagtactatgaaatttctgccaagagcaactacaactttgagaaacctttcctgtacctcgcaaggaagctggctggtgatccgaaccttcactttgttgaagctgttgctcttaagcctccggaagttaccatcgacatggctatgcagcagcagcatgaagctgagcttgctgcagcagctgcacaacctcttcctgatgacgatgatgatctgattgagtagaaaggatcatgagtcttggacttgagcaggagttgtgccttgcacgatttaagttgttctagggtggactctctcttgagttatcattgtctggatcatctttttctccttggacttgttgcaacttttgagtgtggaaatggattggaatagtcgccatgaatttgctggctactttatacatgtctttgttcataaaccttgttttaagatgaagttgtggcaatcctcttagtgctaatataatgttctattgtcagctgtacaaaaaaaaaaaaaaaaaaacttttttttttcgggcacgttcccaggtgatttttaaggttaaggc

SEQ ID NO: 260274 - DNA, 1384 bp, Zea mays
gtcctcaacagaaagcaaaagagaaacgtcacttctcctcgtataaaagcatccgcctcaacccacctcagcggactgctccaccagttgcagagtccagagtccagacgccagacgccctctacttctctctagttagtgtacatttcaaactcttggccgccgcctcgctctctgttcgccgcgccccgccgcagaaatggcgctgccgaatcagcaggttgtggattaccccagcttcaagctcgtcatcgttggcgacggtggaactggcaaaaccacatttgtgaagaggcatcttactggcgagtttgagaagaaatatgagcccaccattggtgttgaagttcaccctctggattttagcactaactgtggcaaaattcgcttctattgctgggacactgctgggcaagaaaagttcggtggcctcagggatggctactacattcatggtcagtgtgccatcattatgtttgatgtcacttcgaggctgacatacaagaatgttccaacatggcacagggacctgtgcagggtgtgtgagaacatccccatcgttctctgcggtaacaaggttgatgtcaagaacaggcaggtcaaggcccagcatagttacattccaccggaagaagaacttgcagtactatgagatttctgccaagagcaattacaactttgagaagcccttcctttacctcgctaggaagctggcagggtaattagatgttttgttcttttctgctgtgctaacctggtactggtgtttatacactgcagcaaactattgctgtgctaacttgctactggtgtttatgtttagggatcagaaccttcactttgttgaagctgttgctctgaagccaccagaagtgcagattgatatggccctgcagcagcagtaagcgtttccagctcttcctttgatttctggcaacagcaaaaattagccgtgcaaatgttgtcctgaaagtacttgacttaaattccattgggattagcaccacgtaccattgctaactgcaccttttcccatgatcttaagcatgaagctgagcttgcagctgccgctgcgcagcccctccccgatgacgatgatgacctgatcgaatagatatgttatacatggcccttgttgatgactcttgttaaaaatctgtggtggttcaatccttgttagtgttaggcagtacctgaatgttctcttgatgtattcgaagagttgagaaggaagttaatgacatcattatcctgttggctgttgttgacttggggtttttggtgaacctgtccttgatcatacagaggtattgtcaggcagtacgcttcagtgcaagattgttcctttctgtctaaaaaaaaaaaaaaaaaaaaagggcggccg

SEQ ID NO: 260275 - DNA, 740 bp, Zea mays
  unsure (1)..(740): unsure at all n locations
accacacgtccgcccacgcgtccgcccacgcgtccgcccacgcgtccgcccacgcgtccgcatcatgtttgatgtaacttcaaggcttacttacaagaatgttcctacgtggcatagggacctgtgcagggtctgtgaaaacatccccattgtcctctgcggtaataaggttgatgtgaagaacaggcaggtcaaagccaagcaggttactttccacaggaagaagaatctgcagtactatgaaatttctgccaagagcaactacaactttgagaaacctttcctgtaccttgcaaggaagctggctggtgatccgaaccttcactttgttgaagctgttgctcttaagcctccgcaagttaccatcgacatggctatgcagcagcagcatgaagctgagcttgctgcagcagctgcacaacctcttcctgatgacgatgatgatctgattgagtagaaaggatcatgagtcttgaacttgagcaggagttgtcccttgcgtgttttaagttgttctagggtgaactcttgagttctcattgtctggatcatctttttctccttgcatgtgttgcatcttttgagtgtggaaatggatggtactcctcgccatgaatttgctggctactttacacattgctttgtaactctgtttgatgataaactttgttgtggcaatcctcttagtgctgatataatcttctttttctcaaaaaaaaaaaaaaaaaaaaaaaaanaaa

SEQ ID NO: 260276 - DNA, 871 bp, Zea mays
cccacgcgtccgctctactaatccagcccatttcgaactctctctagacgcttcctcggtctctctgttcaccgccgccccgtaccatactcctcttcgcgccgtagaaatggcgctgccgaatcagcagggcgtggattaccccagcttcaagctcgtcatcgttggcgacggtggaactggtaaaaccacatttgtgaaaaggcatcttactggcgagtttgagaagaaatatgagcccaccattggtgttgaagttcaccctctggattttagcactaactgtggcaaaattcgcttttattgctgggacactgctgggcaagaaaagttcggtggccttagggatggctactacattcatggtcagtgtgccatcattatgtttgatgtcacttctaggctgacatacaagaatgttccgacatggcacagggatctgtgcagggtctgtgagaacatccccattggtctttgtggtaacaaggttgatgtcaagaacaggcaagtcaaggccaagcaagttacattccaccggaagaagaacttgcagtactatgagatttctgccaagagcaattacaactttgagaagcccttcctttacctcgctaggaagctggcaggggatcagaaccttcactttgttgaagctgttgctcggaagccaccacaagtgcagattgatatggccctgcagcagcagcatgaagctgagcttgcagctgccgctgcgcatctgtttggacatatcatttgatacatgttcgattagaactgtctctgcggacaaaaatttgaagatatggggtatggattttggggactgacacatgtctatatttgctcactcacacagtgtgatggatgt

SEQ ID NO: 260277 - DNA, 571 bp, Zea mays
cttaagcctccggatgttaccatcgacatggcttaagagcaacagcttcaacaaagtgaaggttcggatcaccagtcagctttcttgcgaggtacaggaaaggtttctcaaagttgtagtcgctcttaagcctccggaggttaccatcgacatggctatgcagcagcagcatgaagctgagcttgctgcagcagctgcacaacctcttgctgatgacgatgatgatctgattgagtagaaaggatcatgagtcttgaacttgagcaggagttgtgccttgcgcgtcttaagtcgttctagggtggaccctctcttgagttctcattgtctggatcatcttttatccccttggccgtgctgcatcttttgagtgcggaaatggatgggactcctcgccatgtttctgccggctactttatacatgtctttgttcataaaccttgttttaagatgaagttgtggcaatcctcttagtgctaatataatgttctaccccccgctgttaatataaaaaaaaaaaaaaagggcgagcgcgccggcaattgcgattcggtacctgcaggcgcaccag

SEQ ID NO: 260278 - DNA, 399 bp, Zea mays
ctcaattggaaatattgcgggaactgatgcacttttcatttgctcaggcatgaagctgagcgtgctgcagcagctgcacaacctcttcctgatgacgatgatgatctgattgagtagaaaggatcatgagtcttgaacttgagcaggagttgtgccttgcgtggtttaagttgttctagggtgaactctcccttgagttctcattgtctggatcatcttttttctccttggacgtgttgcatcttttgagtgtggaaatggatgggaatagtcgccatgaatttgctggctactttattcatgtcttgggtcgtagtccttgttttaagatgcacgttgtggcaaaaaaaaaaaagaaaaaaaaaaaaaaaaaaagggcggctgcttgcgatctagaac

SEQ ID NO: 260279 - DNA, 520 bp, Zea mays
  unsure (1)..(520): unsure at all n locations
gctggatagactaatgtcagatgctgtttggtataaaaaggtaaccatctgaatgaggatatggcgcgaactatttgttcagcacgtacctactatatgacaagtcacaaggtattattaaaataccccaactaaaaactcaaaatcaaaagaaaaaagagaaactggtaaaactacatttgtgaagaggcatctcactggagagtttgagaagaaatatgaaccaaccattggtgtggaaattcatccgttggatttcaccactaactgtggtatgatctggttctactgctgggataccgcagggcaagagaagtttggtggcctcaaacaccgatactatatccanggccagtgtgcgatcatcatgtttgatgtaacctcaaggcttacttacaagaattttctnaccttgcataaggaccttttcaggttcttttaaaacatcttcattttctctttctttttttattgtttaatttttttttattttatatttttttaattttttttctttttt

SEQ ID NO: 260280 - DNA, 695 bp, Zea mays
ctagggttttgctgctctccgaccccgagctccgaaggccgcagcatcaggcgcggactctctcgcgtgtgaccgagatggcgctgccgaatcaggggaccgttgattaccccagcttcaagctcgtcatcgtcggcgatggtggaactgggacctgtgcagggtctgtgaaaacatccccattgtcctctgcggtaataaggttgatgtgaagaacaggcaggtcaaagccaagcaagttacattccacaggaagaagaacttgcagtactatgagatttctgccaagagcaattacaactttgagaagcccttcctttacctcgctaggaagctggcaggggatcagaaccttcactttgttgaagctgttgctctgaagccaccagaagtgcagattgatatggccctgcagcagcagcatgaagctgagcttgcagctgccgctgcgcagcccctccccgatgacgatgatgacctgatcgaatagatatgttatacatggcccttgttgatgactcttgttaaaaatctgtggtggttcaatccttgttagtgttaggcgcgtccctgaatgttctcttgacgtacccgaagagttgagaaggaagttaatgacatcagtatcctgttggcttgttgacttggttttttggtgaacctgtccttgagggaatacagaggtattgtcaggc

SEQ ID NO: 260281 - DNA, 156 bp, Zea mays
cagagttacaaagcaatgtataaagtagccagcaaattcatggcgaggagtaccatcttttgagtgtggaaatggatggtactcgctcgccatgcattggctggcgccgttatacattgcgaggagtaccatccatttccacactcaaaagatgca

SEQ ID NO: 260282 - DNA, 845 bp, Zea mays
tcgactccacgcgttcgatctcgcgaccgtataaacgagccggacggggtccaccttccgcgccgccgccactcagcgccgcgcttgcgtttccttctctccgcttccaagatgtcgaagcgagggcgtggaggttcggctggtaacaagttccggatgtcactgggtctaccagtggcagctactgtgaactgtgccgataacactggagccaagaacctgtacatcatttctgtgaagggaatcaaggggcgccttaacaggcttccttctgcctgtgttggtgacatggttatggcaactgtgaagaagggaaagcctgaccttaggaagaaggtgatgccagctgtcattgtgaggcagcgcaagccatggcgccgaaaggatggtgtctacatgtactttgaagacaatgctggagtgattgtgaacccaaagggagagatgaaaggctctgccatcactggacccatcggaaaggagtgtgctgatctgtggcctaggattgccagcgcggcaaatgcgattgtctagtggaatcagttgatcgaaatttacttcaaataacatttgtttgtgttgcgaattgggaagagagtttttagttagacgagcttttgatggccctaaagatgttttcccggatgatgtttgtgctgctggaccgtttcctgttagcttcgatggcatcctccccatatcgataaactgttgcttagcctgacaatcggaagagtttaaatgttaaagatttgaaaaaaaataaaaaaaaaaagttctataaaaaaaaaggacgcaagcagctcgaaaggaataaaacaaaaactcgtcctccatggtagatc

SEQ ID NO: 260283 - DNA, 1575 bp, Zea mays
  unsure (1)..(1575): unsure at all n locations
gagcacaacgcacacgtccggccatcttcttcttgcacaagtcgagggccaccgctccgcatccgcatcttcttccagagcaagtcgagcgcggcggccacaaaacccagtcccatacgcacccgtccgttccgcgcgatcagccgagcgatgtcgtcgtcggcgcccgcaccggccgccatggccgtggacgacgcggaggacgaccagctcgcctccatgtccacggaggagatcatcagggcctcccgtctcctcgacaacgagatccgcgtccacaaggacgagctgcagcggtcgaacctggagctggagtctatcaaggagaagaccaaggagaaccaggagaagattaagctcaacaagcagctgccgtacctcgtcggcaacatcgtcgagattttggaaatgaaccctgaggatgaggctgaagaagatggtgctaacatcgatctggactcacaaaggaaaggaaaatgtgttgttctgaagacatccaccagacaaaccatattccttcctgtaattgggttagttgaccccgataagctaaagcctggcgatttagttggagttaacaaagacagctacttgatactagatacattgccttcagagtatgactcacgggttaaggcaatggaagtagatgagaaacctactgaagattataatgacattgggggtcttgaaaagcagattcaagagcttgtagaggcaattgtactgcccatgacacataaggaccggttccagaagttgggtattcgtcctccaaaaggggttcttttgtacggaccaccaggaactggcaagacactcatggctcgtgcatgtgctgcacagacgaatgcaacgtttcttaaattagctggtccacaacttgtgcagatgtttattggtgatggagcaaagcttgtccgggatgcattccagcttgccaaagagaaagctccttgtattatatttattgatgagatagatgccattggcaccaaacgttttgatagtgaagttagcggtgatagagaagttcagcggacaatgttggaattattgaatcaactggatggattcagcagcgatgagagaataaaggtcatagctgcaactaaccgtgctgacatccttgaccctgctctgatgcgatctggacggttggaccgaaagattgagttccctcacccatccgaagaagcaagagctagaatcttgcaaatccattcaaggaaaatgaatgtaaatcctgatgtcaactttgaagaattggctcgctcaactgatgacttcaacggagcacagctaaaggcagtttgtgtagaagctggtatgcttgccctacggcgggatgctacagaggtaactcacgaggatttcaatgaagggatcgtacaggtccaggcgaagaaaaagtcaagcttgaactactatgcttaagctgtttgtcaaaacatatggaccataaggtgtttgtacccctcctgtatgaataatcgaagctatgtttttaatgcaagatttttacagcaaaaaaaacaccccaaaaaaaaaaaaaaaaaaaaaacngaagtaaaa

SEQ ID NO: 260284 - DNA, 1315 bp, Zea mays
tgattttggattcaagctgaaagaagaggctatgctgaataaagtactaaaggagacaggctggtcaaaagtagttgccagtgataaattgcaatctggtctggcatcttcacttcgcatccaagatgttatgagaaatgagatccaaagagtccaggatgaactttcttgcataacccacacagctcagcggttggagcttcaggtatccaagatggatgagtcaatcgatgagatccaataggatttctaggaatctacgaaggagctggctgctcttcgtggaacactgaaaacggtgattgaagacagggacctgtcgtggcaggaggtgaagtagctgagaagaaacatcagcatcatgctagaacgaggttgtgtcgctgaagaagatcgaagccttggacaaagacatacttgtcaaggagggagagatcacgatattgcaggacaacatcgacaagccgttcaatatcatctgcagcccaagttcgatgcaggagttcggcatggggtgaagatggctgctattttgtaagtgagttggtggatgaaaattcaagttattgtagaagacaacacatttctttgcatattacatcctgctatgatgttctgaactatgatgggttcaacgggtgccatttttctcttagagctattgttgacatggaagaaatggtggcagcaccagcttagtatggacaacaactgaaatctcctacagaagttgtttctaatgtgctattgagctccattgtgttttggcctacgcaatcttgttctccagtctgcctccaagaaaagctctatagtcccatagtttctgctaaggttcaacaacttcaggatcaattataggctgagaagcaagaaaaaatggacttcgtgatgaagcggaaaccattgatagtatgaagaggttgatggaagaaaataacaaccttcttcgtcaactataaagcttcaattgaagaaaagtgcctccatcttaagtttggttgactactataggacatgcagccttgtggtagctatagtagtagtagatatttatagttgctctagatttgaagttataggattatttttaattatgtttaatgtttaataatttgagttgaagttataagatttgctttgaattttaagttaaaggatttgagatatatggtttggagttatatgattatttgatggatggaatatttgtgtacaacaaattcatgtgatattttggctatgatgtgtaatactctatgacgatatcaattcctacgacgtgttccttttagaaaaaaaaaaaaaaatataa

SEQ ID NO: 260285 - DNA, 422 bp, Zea mays
cccacgcgcccgcgcagacaaaccgaactcgcacctcgcacctcgcatcgtcttgtcgacacacctccagctccgaaaccctactccgccggcgatgtcgtcatccggcgccccggccccggcggcggcaatggccgttgacgacgcggaggacgaccagctcgcctccatgtccacggaggatatcatccgggcctcccgccttcttgacaacgagatccgtgtcctcaaggacgagttgcagcggacgaacctggagttggagtcgttcaaggagaagattaaggaaaaccaagagaaaattaagctcaacaagcagctgccctacctcgttggcaacatcgttgagatcttggaaatgaaccctgaggatgaagctgaggagggatggtgctaacattgatttagactcacaaaggaaa

SEQ ID NO: 260286 - DNA, 704 bp, Zea mays
  unsure (1)..(704): unsure at all n locations
tttatgcgtccggccgcgcttgcgtttccttctcttcgcttccaagatgtcgaagcgagggcgtggaggttcggctggtaacaagttccggatgtcactgggtctaccagtggcagctactgtgaactgtgccgataacactggagccaagaacctgtacatcatttctgtgaagggaatcaagggtcgccttaacaggcttccttctgcctgtgttggtgacatggttatggcgaccgtgaagaagggaaagcctgaccttagaaagaaggtgatgccagctgttattgtgaggcagcgcaagccatggcgccgaaaggatggtgtctacatgtactttgaagacaatgctggagtgattgtgaacccaaagggagagatgaaaggttctgccatcactgggcccatcggaaaggagtgcgctgatctctggcccaggattgctagcgcggcaaatgcgatcgtctaaaggaagcagtttgtcgaagtttcatttaaaatggggacttgagaagggagttcttagttagacgagcttttgattgccctgaatatgtttccccggctaatgcttgtgctgctggaccgtttcctgatagctttgctttgatgacatcctccccgttatcgataaagttgcgtagcctgacattttgcagagtttaagtaggctggttttggtgggagaaattngagtgatccat

SEQ ID NO: 260287 - DNA, 1543 bp, Zea mays
ggacgctggtccccctctccctctcggccagcaccacctcacatcaccgtgatcctatgacagccatggcggccgaagcaccaccgtcggcttcaacgtcctcctcctcgacctcgcggctacctctgcctccagcggtggggcggtcagatccgcagagttgtacatcgggagccgcattagcttgactttgaagagcgagatcgggtacgagggcgtcctttacaccatcaacaccgaggagtccaacatcgggctttgcaataatcttggaaatgaacactgaggattaagctgaggaggatggtgctaacattgatttaaactcacaaggaaaggaaaatgtgttgttctaaaagcctccacaagacaagtgagcaatcaattctctgctcatcaggctattagctaggaacttgtgagatgatattattgataaggattacaacacacatggatatgtgaacttaaggttgacttggaagaaattgtggcagcaccagttcaggatggacaacaaccgaaatctcctacaaaagttgttctaatgtgctatcgagctccagtgttgtcctaccaaaggaaatggtgaagaacggtgagtttatctacaagtttgatcctacaaagaaaggtcgttttggtattctcccccgctatgcaaaggatgacaaactcatcagatggtttcaactccctaattgtttcatattccataatgctaatgcttgggaagagggtgatgaagttgttctcattacctgccgccttgagaatccagatttggacaaggtgaatggatatcaaagtgacaagctcgaaaacttcgggaatgagctgtacgagatgagattcaacatgaaaacgggtgctgcttcacaaaagcaattgtctgtttctgctgtggattttcctcgtgttaatgagagctatactggcagaaagcagcggtatgtctactgcactatacttgacagcattgcgaaggtgactggcatcataaagtttgatctgcatgctgaaccggaaagtggtgtgaaagaacttgaagtgggaggaaatgtacaaggcatatatgacctgggacctggtagatttggttcagaggcgatttttgttcccaagcatccaggtgtgtctggagaagaagatgacggctatttgatattctttgtacacgacgagaatacagggaaatctgaagtaaatgttatcgatgcaaagacaatgtctgctgatccagttgcggtggttgagcttcctaatagggttccttatggattccatgccttctttgtaactgaggaccaactggctcgacaggcggaggggcagtgaagatacggcacctgcagattctgcacacgcgggtacaggttggaaattattgcagaggacatgtatatgtataggacaagtttattacacatgtattcgaaccacacattacacaagtttattgcaggacgtgtattcgaaccccccattacacatgtatatgtataggacaagtttattacagtcctgattgattgcaatttgc

SEQ ID NO: 260288 - DNA, 854 bp, Zea mays
gcggtgtaccaaagcacaatttaacatggtagaaatggtagcagcaccatttcagggtgggcaacaaccaaaatctcctacagaagttgtttctaatgtgctaccaggctccagtgtgttcctacgcaatgttggtcttcagtctgcctccaagaaaagctccacaacgactgtttctgcaaaggttcaacaacttcaggatgaactggagaccgagaagcaagaaaaagatggccttcgggaagaagtggaaaccttgaaggctcaagcacaagcatctcaggagaccattgatagtatgaagaggtcgatggaagaaaataacaacctccttcgtcaactattaagcttcaatcgaggccaagtgcctccatcttaagtctggttgaccactataggacctgcagccttatggctgctatagtggctagttatagtagctctagatttgaagttataggatcatttttcaattctgcttaatgtttaatactttgagttgaagttattggatttgttttggattttaagttaaaggatttgcagatatatgttttaaagttatattattctctgctagatgaaatatttgtgttgaacaaattcatatgatattttggttgtgatgtgtaatattctatgccgatatgaatgcatatgatgtgttccctgccatgaaaaaaaaaaaaaaaaaaaaaaaaaaaaaaaaaaaaaaaaaaaaaaaaaaaaaaaaaaaataaaataaacaaacaaactaaaaaagggctgtcgttttaaagcttcctagtttaattcactgtcattcgatatacaacttcttgaatgggtaaacctatgtcaaatccgcatgtcaa

SEQ ID NO: 260289 - DNA, 1837 bp, Zea mays
tggttttttcctgccccagcctgggttccgccctactcagcgcattgaggagacagggcgccggctcagcaagtatgcccagcagtttggtgtgccattcaagtaccaggcgattgcagcatccaagatggagtccatccgcgcggaggatctgaatctcgatccagaggaggtgctcatcgtgaactgcctataccagtttaagaacttgatggatgagagcgttgtgattgaaagcccaagggacattgtgctcaataacatcagaaagatgcggcctcatacattcatacatgcaattgtgaatggctccgtcggtgcgcccttcttcgtgacaaggttccgggaggctctgttcttctactcggccttgtttgatgcgctggacgcgaccaccccaagagacagcaaccagaggatgctgatcgaggagaacctcttcgggagggctgccctgaatgtcattgcgtgtgagggcacagaccgagtggagcgccctgagacgtacaagcaatggcaggtgcggaaccaacgagcaggcttgaagcagcagccattgaaccctgatgtcgtgcaggtagtgcggaacaaggtcaaggattgctaccacaaggactttgtgatcgacgtcgatcaccgctggctcttgcagggatggaaaggccgcatcctctatgccatctcaacatgggtggcaaatgatgccccctcttacttttagctgtttttttgtgactcacttgtctacaactttaggggccagtttggtacggcgcgtgcggcgccacggcgcgcctaagctgcggcgcccgaatcggccgccacacctgcggcgggaaaactatggcgcgccgtggcggcttagtccacgcaccaaacagcccctaggtttaggtatgtcatctagatatatctagtgacaagcgtgttcttggcctagttaatagccatggttacttggactctgcagtatgcctagtgccctagtgagaattcaacatgtacctgttctttccaagggtacattcagcttctgtggaacatgagtgacacacgggggatccagaagtcagaaggcataccgaaatctgtcctttgatttaatgtggattatatagatgctcatcactcagtcatgctgttgcatggtgctaaatatgatctagatctaggtcctggtctggataatgctctccacagcatctgctgtgcgtgtgacctgtgatcagttcagtcagttgatcaggttgtaaattgacacttgttcctctgtttccggcgcttactgcgctgtttcatgacttaaccccacgcgtccggtggaagatgcatgtctagacatgctaaagagtggacaacgccaaatgaggtatagactgaaacagaagtacttcaatgggatacctgctaatcaggtgaggactacatcacctatttcaagcatgtctgacaatgactggagaaagttggtggagaagtggtctgccccaaatcacaaggaaagttgtgtgaagaacaaacttaatcgtgaaaaagtacagtatcaacaatgcacaggctctcagtcctacattgcacaggcttttatattgaagcaagaaaaatataaggatgcggaacctagtgcaattgatcttttcaaggagatgcatcgcagcacagaagaaaggttttagtgaaaatgttcaaaaagctattgtaattgcttgttttgatttcatgtttgtattcacaacttgcaacttgtggtatactatactgatgaataacctttaaattttaaattagggtgacatggaagaaatggtagcagtactagttcaggatggacaacaac

SEQ ID NO: 260290 - DNA, 589 bp, Zea mays
ccctctcgtccgcacactgggaatcaagaaatcatgccaaggtcaaatagaatgggcaggcaacttgaatcgttaagcagaggactgggaatcaagattccaacccaaatcactgaagggaacaaaagccagagccacctattcaagctactaagttcgcattagagggatggtcgccaaggccagggatttactgtcgaggcgtacaagtccatggcagtggctgtttgtgcagattagaagctgatgagggagtctcgtagcagaacttcaatgttgagatatggaaaagctacatatgtatcaagatatgtgaagactgtccgcctcaaacaagaggagtattttggtggagcgaagtttatgaagggcatggaggtactgctggtaacaagttctggatgtcattaggtctaccattgatagctactgtgaactgtgctggtaacactggagccaagaacctctacatcatttctgtgaagggaatcaagggcgccttaacaggcgtccttctgcctgtgttggtgaccatggagaatggaaagcctaaccttaggaagaaggtgatgccagctgtcattgtgag

SEQ ID NO: 260291 - DNA, 661 bp, Zea mays
gcttgttgtttttctatttatgttttcgactctagcatctctatttatgtaatcgactctaacatctctctagcatttaaatatatgtatagcttgctaaagcatttagatatgcagtaatcgactctaacatctctgtttctgtttctgtataccaaagcacaatttaacatggaagaaatggtagcagcaccatttcaggatggacaacaaccaaaatctcctacagaagttgtttctaatgtgctactgggctccagtgtgttcctacacaatgttggtcttcagtctgcctccatgaaaagctccacaacggactgtttcggcaatggctcaacaacttctaggatcaactggaggatcgagatgcaagaaaaagatggccttctggaagaactggaaaccttgaaggctcaagcacaggcatctcaggagaccactgatagtatgaagaggtcgatggaagaaaataacaacctctttcgtcaactattaagcttcagtagaggccaggtgcatccatcttaagtgtggttgaccactatatgacatatagccttatgtcgtagctctggatttaaagttataggattattttcaattacacttaatgttaaatactttgagttgaagttataggatttgctttggatttcaagtt

SEQ ID NO: 260292 - DNA, 1123 bp, Zea mays
gggtgccactgcccttccatcggcggtccatatctacaagtcatctcgccgcaaccggaacccgcagccatggggacggaggcggagcagccggacatggacagccaccgaaacgacggcgtcgtggtggtgccagcgccgcgcccgcgtaaggggctcgcctcctgggcgcttgacctgctcgagtccctcgccgtgcgcctcggccacgacaagaccaagccgctccactggctctccggcaacttcgcccccgtcgtcgaggagaccccgccggccccaaaccttacctgtccgcggacacctcccggagtgcttgaatggagagtttgtcagggttgggcctaatccgaagtttgctcctgttgcggggtatcactggtttgatggagacgggatgattcatgccatgcgtattaaggatggaaaagctacctatgtatcaagatatgtgaagactgcccgcctcaaacaagaggagtattttggtggagcaaagtttatgaagattggagaccttaagggattttttggattgtttatggtccaaatgcagcaacttcggaaaaaattcaaagtcttggattttacctatggatttgggacagctaatactgcacttatatatcatcatggtaaactcatggccttgtcagaagcagataagccatatgttgttaaggtccttgaagatggagacttgcagactcttggcttgttggattatgacaaaaggttgaaacattcttttactgcccatccaaaggttgacccttttacagatgaaatgttcacattcggatattcacatgaacctccatactgtacataccgtgtgattaacaaagaaggagctatgcttgatcctgtgccaataacaataccggaatctgtaatgatgcatgattttgccatcacagagaattactctatttttatggacctccctttattgttccgaccaaaggaaatggtgaagaacggtgagtttatctacaagtttgatcctacaaagaaaggtccgtttggtattctcccccgctatgcaaaggatgacaaactcatcagatggcttcaactccctaattgtttcatattccataatgctaatgcttgcgaagag

SEQ ID NO: 260293 - DNA, 427 bp, Zea mays
ctcgcgacagagggaaaaaaactcagaaacccaactcgctcgttcccgcaactcgcatcttctcgtcgacagctccaactccggaacccttgtcgccggcgccggcgatgtcgtcatctaccgcccccgccccggcggcggcgatggccgtggacgatgcggaggacgaccagctcgcctccatgtccacggaggacgacatccgggcctcccgcctcctcgacaacgagatccgcgtcctcaaggacgagttgcagcggacgaacctggagttggagtcgttcaaggagaagatcaaggaaaaccaggagaaaattaagctcaacaaacagctaccctaacctcgtggcaatttcgttgagatcttggaaatgaatcctgaggatgaagctaaggaggatggtgctaacattgatttagattcaca

SEQ ID NO: 260294 - DNA, 1191 bp, Zea mays
cgggtcgacgacgcgtgcgcaacatcttccccaacctcgtacgatccggctgcgagatccaacgacctccgcacgggagtgccattagagatgcctctagggaagagatccacacgactatcctccgagcccgcagcggcctcctcgctcggcaaattctccgccgacgacagggagaaggtgctcactgccgttggagtacacacgacgatatctattgcacaacctacttcccagatacaggaggagggtgataaccacactgggaatcaaggcaaaaatcataccaaggagaaaaagtatgggcaggcaacttgaatcgttaagcagaggactgggaatcaagattccaatccaaatcactgaagggaacaaaaggccagagccacctattcaagctgctaagtttgcatcagagggtggaatcacattgaggcagcacattccaatatttaaccattggaaggaatacaagaagagagagaatgaacctataataagaaactacattggcaaagttactgctaatttcacggtggacagtgagagcaagacagtggaagatgcatgtctagacatgctaaagagtggacaacgccaaatgaggtatagactgaaacagaagtacttcaatgggatacctgctaatcaagtgaggactacatcacctattccaagcatgtctgacaacgactggagaaagttggtggagaagtggtctaccccaaatcacaaggaaagttgtgtgaagaacaaacttaatcgtgaaaaagtacagtatcaacaatgcacaggctctcagtcctacattgcaaaggcttttatattgaagcaagaaaaatataaggatgcggaacctagtgcaatagatcttttcaaggagatgcattgtagcaaaaagaaaggttttagtgaaaatgttcagaaagctattgttgacatggaagaaatggtagcagcaccagttcaggatggacaacaaccagaatctcctacagaagttgtttctaatgtgctaccaggctccagtgtgttcctacgcaatgttggtcttaagtctgcatcccagaaaagctccacaacgactgtttctgcaaaggttcaacaacttcaggatgaactcgagaccgagaagcaagaaaaagatggccttcgggaagaagtggaaaccttgaaggctcaagcacaagc

SEQ ID NO: 260295 - DNA, 470 bp, Zea mays
tttttgatagaatgtttcatcatgttctttttgtattattgtcagcgacatttgttcttgcctttggagagggatcatgtctaggctcacaacggggctcatgttgctcggcctcgtcgagctggagatcctcaaatgtagcagcaaaagcatctcaggagaccattaatagtatgaagagatcgatcgaagaaaataacctccttcatcaactattaagcttcaatcgaggccaagtgcctccatcttaagtctaactaaccactatagggcctacaaccttatagctgttatagtagcttgttacagtagctctagatttgaagttatatgattatttcaattatgcttaatgtataatactttgagttgaagttataggatttgatttggattttaagttaaagaatttgcagatatatgttttgaagttatataattctctcatggatgaaatatttgtgttcacc

SEQ ID NO: 260296 - DNA, 439 bp, Zea mays
tcgtctgctaagtttgcatcagaggggggaagcacattgaggtagcacattccaatatttcaccactggaaggagtacaagaagaaagagaatgaacctacaataagaaactatattggaaaagatattgtaaggctcaattcaccttggacaatgatagcaaggcagtggaagatgcatgtctagatatgctaaagggtggacaatgccaaatgaggtatagactaaaacaaaagtatttcaatgggatacctgctaatcaagtgaggactacatcacctatttcaagcatgtctgatgaggactggagaaagttggtggagaagtggtctacccaaaacacaaggattgttgtttgaagaataaacttaattgtgaaaaagtccagtttcaacaatgcatagggatccaattatatattgcaaagcttatttactga

SEQ ID NO: 260297 - DNA, 631 bp, Zea mays
atgattttggattcaagctgaagaagaggctatggttaatagagtactaaaggagatagtcttgtcaaaggtagttgccattgaacaattgcaatctgatatggcatcttcacttcacatccaagatgttatgagaaatgagatccgaagagtccaggatgaagatgaactttcttgcataacccacaaagctaagcagttggagcttcaggtatcatgtgtaccttgcatatttcatatctattttccctaataaactagcagttcatagtttttatctaatcaaagtaggattttggtaacagtttctctttcataatgaattaaccttagtttgtctagtgttagccaattgtagtggtcaagttgcagtatgtctcaaaatacttataagtaggtaaacctttttgctgaatgagctggttacctaacgggtatttcgaggccaactgatcccactcatctctttgatctataaaagtattagaaatgtattttaatgattgaatcaagttatttgctgcttgtttgtctttagcaaatcattaatttgtagttttaatttttgcatattggcaatatcctaggataattttcccaagtggagattaggtctactatgtgagtgttc

SEQ ID NO: 260298 - DNA, 1476 bp, Zea mays
  unsure (1)..(1476): unsure at all n locations
gctggttccagctcaagtagttctctgcaaatatcagaaccagaaccccaacaaatccaagaagaagaggaggactatatggaggatgattgtgatgatgattttgatggctacgacgaagatgattatgacttcgatgaagctgactttaaccagcaccttgctgataaatttgatgatttggatcttcctccaggcgtggaggccaccgtaccttggttgcagaaaactacacccaaggaagatgtcaaagagccacctaaatcaaatactgcagatgagaatgcaaataaatatacgcagttcaagcagtttgatactgttcagaatttctctgaccattactacgctaagaattctcatggagagccaaacagagcctggtcaaagagagttcaacatgactggaaacttctggagaaggatctaccagcgtatatttttgttcgggttgctgaagatagaatggaccttcttagggctgcaattattgggcccaagggaacaccttaccatgatgggcttttcttctttgatattcacattccctctgcttatccttgtgctcccccgctggtatattaccactctggaggacttcggattaatccaaacttgtataacaatgggaaagtgtgtcttagcctgttgggtacctgggatggtagaggttgtgagaagtggaatccagctcaatcgacaatgctgcaagttcttgtctccattcaagctctgattttgaatgacaagccatattacaacgagccaggatatgagtcctatgccaacactccgaatggagagcggttggctttggactataatgacaacacctttctgcactcatgcaagactatgttatactcacttcggaggcctccagagcactttgcagatcttgtcgctggccactttcgggtgcatgggcacacgattctcgcggcatgcaagcactacatggcgggtaatgatattgggtcagtggtgccagaggaggaggaggaggaggaggaggaagagtcatcagaacacaagagcggtgatgctggagcatcgggtagtgcaccagagctaggagtgatcaaggcaatccctacgaagagacgcagctcattcaatccaagcttgaaggtgctgtacgaagatctgctgatggaattcaatgtgaagggtgccgacacaaggaaattcatcgatgagaagttgaagaagaacaaacctgcagccgcctgaggaacatgcttgcaggcaaagcttttgtaggtataactggtcttggtggtgatatctaggacctggaacttgcttgttcgcatgtagtagagagtatggtttaggggtggagttctgagagagttctctcacggcactatatatcgcccatctaaatctaatgataggtttaccaaaaaataaatatatatgtancggctaaaaaaaaaaaaaaaagggcggccgcacgggaatncggacggt

SEQ ID NO: 260299 - DNA, 627 bp, Zea mays
  unsure (1)..(627): unsure at all n locations
tgtccaaactacaaacttgtttatgattgcccatcaaaggagtgcaagaccagcagacatagtacttgcagaggggtgtatgtttggcatctgaagatgtatgttatgtggnagatgtatagacattgccaatgtgttccaagagtcgttttgtttggggaaactttgccgtgactgtgtcaaatatgaagacttgctccccacagaaaagtagatgttcgaatctgttatcttcattggatggatacagttttaacttttaacataacatttcttctgttgattgatgctcccatccatcagtatcttgactgagtatttctaacaaggaaaagcaaaaaaagaggtataccaacttgctatcggtgtagttgcaatgactgaaattgtttttgcttacaagaaaaagaaaaaaaacggtataaccagaagacgatcatggtttccctatcaaggtgtcagccgacaactaacaattgcggtatgtttccttttggaataatcaagtgctctgctccggagtttggacaacagtacatacattctcccagcaggctgcttgatgctgcatcttcctggaacatcagaagttattgatttcatttgccctcaaaatatcagatgtat

SEQ ID NO: 260300 - DNA, 1030 bp, Zea mays
ttatttttttgcatcatgtgtggtcctgtcaccttatttttttatgattcatggtgtgaaatcattattaacacgagatcacagcgttcctgcactggcaatgtaacagaataaactggcactggcaatgtacagaataaactggcaacgtagaccctgtcaacgaaatttttagccactagggtagcagcctatgccctctgaaccaaaaggtaaattgatttgcaattgccaaactagcagctgcccaatggccccgataaatttgtttattaaaacgagaccacaatttcggcactggcaacatttaacagcaaaacaaggccaaaataaccctacttcaaaaacgttgcagttcacgacttctgctccaaatcgaaatccgtaaaagagcactgctcatcttgtaccagtgaaaaaaaaagaaacttcagattgatacactagttatttgacggatgcttttacagctttctctgccgcatcatcaagatcttctgcagtgatcaaagtcattccactttccttaagaatcctctttccttggtctacattggtgccttccaaccgaacaacaacaggaactttcaggtcaacctgtttggcagcattaacaattccacttgctatcacatcacatttcataatgccaccaaaaatgttcactagaattgccttcactctatcatctgaagtcagtatcttaaaagcttccacaacctgcccctctgatgcacttccaccgacatcaagaaaattggcgggcgtaccaccatgcaactttataatatccatggtcgccatggccaatcctgctccattcaccatgcaaccaatctctccatcaagaccaatatagttcaaatctgctttggcagcagcgacctccctggggtcttcctgagttgtatcacgtcagtgcaaatatttctttctgtctaaatagcggccttatcgtcccacgttcaattgtgagatcagtatgctcgcacgtgtgttgtgcgtgtgtccgggatccaggaaaaaccat

SEQ ID NO: 260301 - DNA, 1049 bp, Zea mays
atcctgctccattcaccatgcaaccaatctctccatcaagaccaatatagttcaaatctgctttggcagcagcgacctccctggggtcttcctgagttgtatcacgcagtgcaaatatttctttctgtctaaatgcagcattatcatcaaagttcaattttgcatcagcagcaacaagcttgttgtcagctgtctccgccagaggatttatctccagcaatgtgcaatcagacttgcagaaaagttcatacagtttcttaatctgttctatagaagactgcctatccgctgcctttagagctagaccatcaacaactttagctgcatcctcatctgtgattcctttaaatacatcaataggaaccttaataatcatatcaggatacttctccgcaagatcttcaatactggttcctcccttgctgcaagcaataatgagcggaccagcagttttcctatcaagggtgatggcaaaatacatctcattagtaagagacagtttctcacacaagtagaccttgctcacaatctttccctccggaccagtttgtttcgttaccagaatctggcctaacattttacgtgcaatgctttcagcttcctcagccttaacaatatggacacctccttgcagcccacttttgaaagttcccagccctcggccaccagcaaggatttgacttttaacaactatctctttctcactggggaacatgttcttcaaggcgtcattgacctcctgtacggaccccgccgccgcacccctgggtacgttgataccgtacttccccatcaactccgcaccctggtactcgtggatgttgaggcggcgaagctgctggtgctgccatctcccggcgacggagagggcgcgcgacgcaagcttgcctagcgatccgcgaaccatggctgtggtgacctaggcggggatgctcctccgatccggtaaccctacaagcttggaagacgcctctttgcgatttgttatgttgtttcccttccttttcactcgattttctctctcgtttcctatcctgcggcggacgcgt

SEQ ID NO: 260302 - DNA, 2120 bp, Zea mays
ttttctttttttttttttttttttgccataacaatcggcggattggggtgaattattattccgctcccgatttcgcttattcccacagctacagccgaacattactccgagtctgctccagaaccattacaaccactgcggctctcctctctctgctgcgctccactccacgtagattcacttattcgggaagagccttgacaccttattaaccctgggcattcgcattcccgcgcgtcgactcgtacgcctgcctgaccgcgtcccagaacgcaggcaccgcctccgagtcgggaacctctttgaacgacggcaggtagttcaggtccactatgacatggtctccggtgccttcttggacgacgacatcgaatccaaatactgtaagcccaagcagccccttcaggaattttgcggcctcttctaccagatcggcatctaacagcttgccatcttccgagccggtttgcggtcgctgctcattcgtagccaccggaagagtcttcaaactattaaatgtaagagcttcacctcctgtcgacggcttcaggaagcgcgcgttgggcattgagtctctaacggcgtagaaaaccttgtctccgatcacatagaacttgaaaatcttggatccgtgatccacgtattcctgtagcacagcaggaaggggcacactgaggttgctaaattcttcaatctgaaaaaccagtgccatattgtgggcatcagcgactccacaagcgacttgtggcttcacaatgagtgggaaggataaattagcttctactagatgcttatccaattcaccattatgaaaactgtcaaccttgcaagaatacggtgctcgaagttttggctttccttcagtgccaagttcttgcaaccggacaaggattttttggatttgaagacggtcaagcaatgggtaaatgtttttaaatgggtccatgatacaaaaatcagggtgctcttccacaaatcttataatttcagacattcctgcagaaaatgaaatcccttttggaaaatcaatggagcagtttggatcgatcttgacaatctcatcagttattttgtggaggaccatatcaacttcttgcagttgcaaacttaatggaatttcgaaagagaggggaacaaagataagactgcccttactaggatatatgggaaatgctcctctctttgcgaagtcttcctcacgggattttttcattatatatccaatcaccagaacagatgagccacaaagttcctttttcattagagtagccaaggtgagaagcaactcctgaagcctttgaacatttaaaacaccaggaacctctatgctacattcattagctacagaaagaactctccaattctgattctggagctcagaacttaaacctttgtcaactcttgaagtcgcataaaaacataaacttgttcggctccattctaacattaattcagttagagaaagattcccacttttcgcaagaagtgctatagagccaaacaagtgtgagcttgcgaccttttcaagaaagcctgactaataaaaggaaataggggtaacttgtaagcatatttatttatttattttgtgagtgcctattatgatcttttttactaaaatatacaactgttaaatattagaacaacattattttcacagcaatttcataagggcgcatagggttggtatggaagtttcgatagttaagaaatcttttgtgctgaagcaagaagcttcgacagttaagaaatctggtgtactcaagcaaatagccaacaagtgtcttaaatgttcaaaactcaaaggcagtgacaaaaaaaccattatttctgatatgaaggataacaattacataagataaattcaaaactcaatggtcccatatttcatgatgaacttgacatgggttatcatgcacttgattatatcaggacataagattgaaacatttgaccatgcataaagattattgaaacatatgctagtaagcagaagtttaacaggaaattgccaccagatcagcagtaagaaaccacccttccattagaaaaggctgaattctcaatcaattttggtaacatgaagccggaagggtgggcggacgccttggtccgacccg

SEQ ID NO: 260303 - DNA, 686 bp, Zea mays
  unsure (1)..(686): unsure at all n locations
ctctcaatttctgattctggagctcagaacttaaacctttgtcaactcttgaagtcgcataaaaacataaacttgttcggctccattctacanttaattcagttagagaaagattcccacttttcgcaagaagtgctatagagccaaacaagtgtgagcttgtgaccttttcaagaaagcctgactttccattagaaatgactgatttctcattcatttttgttaacatgatgccattctcattagttggcatgccctctgcatagcagattgccacagtcaggttggagtagcgcaaccgccgcagcaactcctctaccccgggccgcagcgccaccgccgccgcctccctggtggaggaggggtcgaggaggagggaggcatccagcacgagtcgtacgggccgcccggtggccatggcttaggggagggagatgccaatcgccaacgcctaagttctgttcctgcctttctgctcggcgattgaacacacggaacccgtcaccaacaagatgatgtagccctggccatcctttgaacattgaggtcaactatagtgttttcctcccatgctgcaagcaataatgagcggaccagcagttttcctatcaagggtgatggcaaagtacatctcattagtaagagatagtttctcccacaagtagtccttgctccggacgagtggg

SEQ ID NO: 260304 - DNA, 557 bp, Zea mays
tttgtcaactcttgaagtcgcataaaaacaaaaacttgttcggctccattctatcattaattcaattggagaaagattcccactttttgcaagaagtactatagatccaaacaagtgtgagcttgcgaccttttcaagaaagtctgactcattagttggcatgccctctgcatagcagattgccacgctcaggttggagtagcgcaaccgccgcagcaactcctctaccccgggccgcagcgccaccgccgccgcctccctggtggaggaggggtcgaggaggagggaggcatccagcacgagtcgtacgggccgcccggtagccatggcttaggggagggagatgccaatcgccaacgcctgagctctgttcctggctttctgctcggcgatgggacttgggggctgccgggccggacgcctgctgaacctggtcacctggagccgggcataggaaaggggaagctcctgatctgtgggtccaggtgtcagtagcaggcgtggcccccgcgggcgcatgggcggcacctggcgggaggaaggcgaacagatgtgca

SEQ ID NO: 260305 - DNA, 459 bp, Zea mays
  unsure (1)..(459): unsure at all n locations
cccacgcgtgcgcggacgcgtgggcgtcgttcgttcctcaagtgatcttaatcgtcgagaagttaccagctagcggagatcatcggcaatgtcgaacatggggcaatccttccaggccggcaaggcgcaggcccagggcgagtgccaggcggagcgcgcagcgcagtgcgttagggacggcgccggcgccaccgcctgcgccgtgaccgacaccgccggagccgcggccgacagcgcgcagctgcaggagcaccgcgccgccggcaccgttcagcaggctgctgagcaggtggcgcagacggcggcgggcgcggcggcagccgtcaaggacacggtggcgggcgcggcggcggccgtcaaggacacggtggcgggcgcggcggcaggcgccaatgacgcggtgaccggcggccactgaccgactcacgcgcgtgaaccggacngcgtaccaacaatgct

SEQ ID NO: 260306 - DNA, 943 bp, Zea mays
cccacgcgtccggttaagttttgtgaattcggaggcacagcgccacctacttccaccatttcggcaaccccgcaggaaaaaaaaaagggcgaaacgaggccaccagctcaccgccgagcggaagcggcgccgagcaaccaacccctctcctcgtccgccgccgtctccccggaccatgtccatggccgcctcctcccggctgctctgggcgtcccgcgccgccgcctacctcaggatctccaccttccccagggccttctccaccgtgctgaaggatctgaagtatgctgacactcatgaatgggtgaaagttgagggtgattcagcaaccgtggggattactgaccatgcccaggatcatttgggtgatgttgtttttgtggagctaccagaagttggcatcagtgtatcccagggaaagaactttggtgctgttgagagtgtgaaggcaaccagcgatatcaattcaccagtgtctggagaggtggttgaagtgaacgggaagctaagcgaggagcctggattggtgaacgcaagcccgtacgagaaggggtggattatcaaggtcaagctcagcgattcaggcgagctcagttcgctcatggatggtgacaagtactcgaaattctgcgaggaagaagacggtcattgaagaaatcagagggtcttctgaacaccaaggacctgtgtctcaagctctatcactgcttactggtctggagacctgctgtgacaaatttaaattggcaaggttcattgcatggaataaattagttaggatttgccctattctaccagggcttgggaaatccgagcttgtgttgtgagtggcgtggtcaagtttgattatctctttttagttgtaatctcgtgatttccttcttttttcttaaaaaaggattatctttttgaatccgtgctagtatgcaaatttttggtcctt

SEQ ID NO: 260307 - DNA, 437 bp, Zea mays
ggcgaaacaaggccacaccaccagctgaccgccgaacggaacgagcccggcgggcggaagggagagagcgcgccagagcggcgccgaacaaccctcgtccaccgcactctcctggaccgtggccatggccatggccgccgcgtcccgatcccgggcgctgtgggcgtcccgcgccgccgcctacctcaggatctccaccttccccagggccttctccaccgtgctgaaggatctgaaatatgctgacactcatgaatgggtgaaggttgagggcgattcagcaaccgtggggattactgaccatgcccaggatcatctgggtgatgttgtctacgtggagctgccagaagttggcgtcagtgtatcccaggggaagaacttcggtgctgtcgagagcgtgaaggcgaccagtgatatcaattcaccagtgtccggag

SEQ ID NO: 260308 - DNA, 391 bp, Zea mays
cccactcgtccgcttctacaccgtgctgtttgcccttgggaaggtggagatcctgaggtgcgcggggtcgccttactcccagagcagccgggaggaggccttcatggacatggtccggtgagactgctgcggacgatgagaggggttggttgctcggcgccgttttcgctcggcggtgagctggtggcctcgtttcgcccttacccagagccttctccaccgtgctgaacgatctgaagtatgctgacactcatgaatgggtgaaagttgagggtgattcagcaaccgtggggattactgaccatgcccaggatcatttgtgtgacgttgcttttgtggagctaccacaagttggcatcagtgtatcctatggtaagaactttggtgctgt

SEQ ID NO: 260309 - DNA, 410 bp, Zea mays
  unsure (1)..(410): unsure at all n locations
cgnacgctccgcccacgcgtccgcgcacgcgtccgccacgcgtccggaattcggaggcgcacgccaacaacttctaccagctcaccgccgagcggaacgaaactcggcgagtgagagcggaagcggcgccgagcaaccaacccctctcctcgtccgtcgccgtctccccggaccatggccatggccgcctcctcctcccggctgctctgggcgtcccgcgccgccgcctacctcaggatctccacattccccagggccttctccaccgtgatgaaggatctgaagtatgctgactctcatgaatgggtgaaagttgagggtgattcaacaaccgtggggattagtgaccatgcccagcgtgctttgggtgagcttgttgttgtggagctaccagaagttggcatcagtgt

SEQ ID NO: 260310 - DNA, 407 bp, Zea mays
atcacgcgttcggggtgattcagcaaccgaggggattggggactattgcaatgagctggggagcgagcacgcctttgtggacctaccacaaagcaccataagtgtatcccatggaaagaccttcggagctgttgagagtgtgaagtcagccagcgatatctattcaccagtgtctggagaggtggttgaagtgaacgagaaactctgtgacttgcctggattggtgaatacaactccagttgggaagggatggcttatgaaggatcaagctcagcactatcaggtgagctcaattcgctcatggatgatgatacgtactcgaaagtgtgcgaagactcgaaagtgggcgaagacgacaaccattgaagaaatcaaagtgtcttctgaagaccagaacgtgtttttca

SEQ ID NO: 260311 - DNA, 242 bp, Zea mays
tgtacaccaaggacctctgtctcaagctctatcactgctttctggtctggacacctgctgtgacaaatttgaattggcaaggttcattgcatggaataaattagttaggatttgccctattctaccagggcttgggaaatccgagcttgtgttgtgagtggcgtggtcaagtttgattatgtctttttagttgtaaaaaaaaagaaacaaaatcacaacaaagaaaataggaggcgagcgct

SEQ ID NO: 260312 - DNA, 1176 bp, Zea mays
ctcatggccgtcttcgaggatgccgacaagttttacctcgtcatggagctctgcagcggggggaggttgctcgatgagatcgccagggaggggaagttttccgagcagcgtgctgccattgtgatcaaggatctcatggcagtgctcaagtactgccacgagatgggtgttgtgcacagggacgttaagccggagaatattttgcttaccaaggctgggaaagtgaagcttgctgatttcggactcgctgcacgggtcactaatggtcagaaaatgtttggtgttgctgggagccctgcatatgtggcacctgaagttctttctggaagctattcggagaaggttgatatatggggtgccggtgtgctactacatgtactactacttggttcacttccatttcaagggggctctctggacgccgttttcgagtccataaagacacttgaacttgatttcagcagcaccccatgggaatcaatatcagttcttggacgggatcttattgggcgaatgctaaatcgagatgtctcttgcagaatgactgctgatgaagttcttagtcacccatgggtcgtattttacacagaatgccccctgaaggtggtagctgctaatttgtgtctccctaacaaggttatagcacccaaaattccatggggcagacacaaatcagaatgtgactcagtgtcagacgcaagccaaaggtcagaggatcaggatgagtgtggcatagttgacgcattggcggcagcaataacacgtgttagaatatcagagccaaagagaagtcggctctgtagccccgcaattaccattcagcaggaatgctcgtcaaacttgaagaataatctttgcacggctttctgacctgacctagtttatagcacctgatcggaatggcgtccattcttctcgctgagaaggtcgttctgatttaggtgttgtagaggcgaggataataactcagcttttccagccagcaacaaacgtctggtatttagtgtttctttcagtgttcctgatgaaccccgcagttgtagctgctgtaaaattctgtaaatagcatggtcctttctcaagctgcgcctgggttgctaatttgtgccaccaaaaccgtttcacgcaatgttcataattcatgatcgagttgtgcaaaaaaaaaaaggacggccg

SEQ ID NO: 260313 - DNA, 2646 bp, Zea mays
tcaagcaagccattgttgacaagaatcctgttgttgccagtgcagcccttgttagtggcatctacttgcttcaaacaagtccggaagttgtgaaaagatggagcaatgaagttcatgaggctgtgcagtcaagagctgctcttgtgcagtttcatgcccttgctctccttcaccaaattagacaaaatgatcggctggctgtcagtaaacttgtcactagcttgaccaggggttcagttcgctctcctttggcccagtgcctacttattcgctacactagccaggtgattagagagtctggtgtgaaccaaggtggagatcgtcctttctttgatttccttgagtcctgtctccggaacaaagctgaaatggtcatacttgaggctgcaagagcaattactgaactgaatggtgtcacaagccgagagcttacacctgcaattactgtgctgcagttgtttttaagttcatccaaacctgttctcagatttgctgctgttcgcacgcttaacaaggttgcatcaactcatcctttggctgtcacaaattgtaacatagacatggagagcttaatctctgatcagaacaggagcattgcaacccttgcgattacaacactgttgaagacaggcaacgaatcaagtgttgatcgtttaatgaaacagatgaccaactttatgtcagacatagctgatgagtttaagattgttgttgttgaagcaataagatctctgtgcttgaagttccctctgaaatatcgctcattgatgaacttcttgagtaatattctacgggaagagggtggattcgagtataagaaagccatagttgattcaattattatactcattagagatattcctgatgcaaaggaaagcggtttatttcacttatgcgaattcatagaagactgtgaattcacctatttgtccactcagatacttcactttttgggaaatgaaggccccaaaacatcagatcccagtaaatacatacgctatatatacaatagggtgatacttgaaaatgctacagttcgagctagtgcagtcagcacattggcaaaatttggtgccttggttgactcactcaagcctcgcatatttgtgctcctgagacgctgcctgtttgatggagatgacgaggtgcgcgatagagcgaccctttacctcaaattgttaggtggggaagctacagtgggtgagacagagaaggatgtgaatgaatttctcttcggctcacttgatgttccattagtaaacttggagacgagtctgcggaattatgaaccttcggatgtaccttttgatatttcatctgtttcgaaggaaacaaaatcccaaccccttgcggagaaaaagtctacaggcaagaaatcagcaggtccagcatctgctgtcagtggctctgtttctacagttgatgcttcgtatgagaagcttctttcgtccattccggaattcgctgattttggaaagctttttaagtcatctgcacctgtagaattgactgaagctgagactgaatactcagttaatgttgtgaagcatatttttgatggacatgttgtgctccaatacaactgtaccaatacaattcctgaacaattgcttgaacaggttattgtttttgttgatgcttctgaggctgatgaatttttagaagttgcttcgaagcctttagaatcattaccatatgattctcctgggcagacctttgtcgcttttgagaagccagaaggtgtcattgctactggcaagttctcaaatatcctgaaattcattgttaaggaggttgatccatccacgggtgaaactgaagatgatggtgttgaggatgagtaccagcttgaagatcttgaaatcgtttctgctgattatatgttgaaggtgggagtatctaacttccgaaatgcctgggaaaacatggatccagagactgagcgagttgacgagtatgggcttggagtaagggagagcttggctgaggctgtaagtgctgttataagcatccttggcatgcagccttgtgagggaactgacgtggtcccaagcaattcaaggtcgcacacttgtctgctctctggtgtgtttattggcaacgtgaaagtcttggtgagactttcatttggaatcagtgcaccgaaggaggtggccatgaagctggcagttagatctgatgatccagagatcagtgacaagatccacgaaattgtcgctaatggctaaaaacaatagtagaatcgtttttttttactctttttttgttttgacttgcatgctacgggaagcttgaggggattcaattaattctagtatatgtaagtctggtttccagttgaatccatcatttgtcgcaccatcattcttcctttgacagtgcaccagtttttggttgttttggatctgtacaattttccttatatactgaggacttaaaatagtatacgcaataatattcaggtacagttttgatggtaaaaaaaaaaataaaaataagctataaaaacacccaaaaaaaatgaagggtcttaggctattacgtggccaaaaatgttaccaagtaagttaatggacgaggactatgacatggagctctacaattggacaaaggggggcctctttataggaggccaattttgatccc

SEQ ID NO: 260314 - DNA, 687 bp, Zea mays
caacggcaaactttagccttcctggcatagagactaaacctccccctgttacacctcaagttgtggatcttcttgatggtttgtcctcaagcacatctcttcctgatgagaatgcagcttacccgacaatcacagcattccagagtgcaaccttgaggatcacattcagtttcaaaaagcaacctggaaaacctcaggagactacaattaatgcttctttcacaaatttagcaactactgcattaacagatttcgtcttccaggcagccgtgccaaagttcatccagttgcgtttggacccagctagcagcagcactcttcctgccagtggaaatgtgtcagtcacacaaagcctcagtgtcactaacaaccagcatgggcagaaaccacttgcaatgcgtatccggatgtcttacaaagtgaatggtgaagacaggctggagcaagggcaaatcagcaactttccttctgggttgtagtgccacctgtgtctatggggttggggttgctctttcagcgtgctacaggcaaggcgtttgtattcttgttcttgaacattttcacttctgcttgcctgctaatgagttgtgtacactggtagttggttttggtcgcccattctctttttatatagtgtccagtagatggcagcgattaatgatatatcctaccaaaattttcaatctt

SEQ ID NO: 260315 - DNA, 765 bp, Zea mays
cgtacccgtggacggacgcgtgggcggacgcgtgggcgtacgcgtggggcttctttcacaaatttagcaactactgcattaacagatttcgtcttccaggcagccgtgccaaagtgattgttataggatggaaacccttatatggtgaaattgtcgcagataagatatgtttataactggcattaaaaggtctagtttcgtaacatttgatgttttgctacacctctgctgccctgtgcttcagctcatccagtgtgcgtttggacccagctagcaccagcactcttcctgccagtggaaatgtgtcaggcacacaaagcctcagtgtcactaacaaccagcatgggcagaaaccacttgcaatgcgtatccggatgtcttacaaagtgaatggtgaggacaggctggaacaagggcaaatcagcaactttcctgctgggttgtagggccacctgtgtctatagggtttgggttgctctttcagacttatgcttgcctgctagtgagttgtgtacactggtagttggtttttggccgtccattatctctttatatatatagtgtacagtagatgacagcgattaatgatatatcctcagttttgccgaaatgtatttttatcttggtgcatatcggacttcagggtaaccaaaattttcacccttttccccgcgtaccaagcaccaaaggaatgtgttgtaccatgatattccccaatgtaaacacctatttttctaaacattgccccagcttattgtgcagacc

SEQ ID NO: 260316 - DNA, 579 bp, Zea mays
actgttcctctgggaaccggaaataacctccccttttcatttggatggggaaagacgagtccttctactgaccaacaggctgtaaaatcattcctcgggctagtaaagcatgcaaaagaaattaagattgatagttggcacatcattttgagaatgcgagttccagaggaaggtccatgtgatcctattgctccattagatttgcctcattcattgcatgcgttccatcgtgtctcaagtagtgattctctcaatatggaaggttaccacacattccgtgcaggattttggaattactttagtatggggatggatgcagaagtgtcttatgcatttcattctgaaaggaagaagaatccagagaagttcaagaatcagctgacaaatcagggtacatacgctaagcttggacttaaacaaggatggttttgtgcttctcttagtcagccatcatcaaggaaccttgctcaaattgcaaaagtaaagatcatgaaaagagctggtagcctctgggaggaacttagaatcatcacagcattcggtccatcgtgtgtctgaatttgcctagtttttctggaa

SEQ ID NO: 260317 - DNA, 608 bp, Zea mays
gccacaggcacctgctgcaccacctcagcagtaccaatcccaaacccagttccctcaatatgcacagccacctcagcctgcaaatgttaacccttcaactccccatgtgccccatgcaccccagcaaccagaggaaactatgccttatgcaccagctcagagctatccacctaatgcaatccctccaccttatatgcaaccacctagtggacctgctcctccttactatgggcagcaaaaccctagcatgtatgaacctcctgcaggccgggctaaccctgggccaccatcatcctacggttctggtgggtacgggccacagggtggaggtagtttctctgaatcttatggttacactggatctccttcccaccgtggcaatgctggaatgaagcagtcttcaccttttgctcaatcctctggaggaagcggcggctatggcagtggcaggctccccacggctcagatactaccacaagcagtgccggtaagctcctccagcaccagcggtgcttcaggcaatagagtgccacttcacgatgtagttgagaaggttgccacgatgggattctcgagagagcaggtgagagcaaccgtgcggaggctga

SEQ ID NO: 260318 - DNA, 1484 bp, Zea mays
cccacgcgtccggttcttcagacttacaacgggacaatgatgccaaatgttgagttgccattccggttgaattgggctagtgctggtgaaaaacgtgatgacacccccgactatacaatatttgttggtgatttggctgctgatgttacagactatgtattacaagagacatttagggcacattacccttctgtgaagggtgcaaaagttgtaacagacaagctgacaatgcgcacaaagggttatggttttgtgaagtttggtgatcctaatgagcaagctcgtgcaatgactgagatgaatggcatgctatgttcttctaggcctatgcgtattgggcctgctgcaaacaagaaagctactgttgttcaggagaaagtaccaagtgctcagggagttcagtctgacaatgatcctaacaatacaaccatttttgttggtggtcttgaccccaatgtcactgaagatatgttgaaacaagttttcaccccttatggggacgtagtccatgttaagattcctgttggcaaaagatgtggttttgttcaatatgctaacagatcttcggcagaggaggcattggtaattctgcaaggcaccttggttggagggcagaatgtgaggctttcatggggtcgcagcccttcaaacaaacaagttcagcctcaacaggactccaaccagtgggccggggctaatgctggatattatggctacggtcaaggctatgaggcctatgggtacccccagtctcaggaccctaatatgtataattatggagctggagcttatgctggctatccaaattaccaacaacaaccagtagcacagcaaccgccgcagcaacagtgagaggtccagtgacgctactgtcatttgggtgattgacgtggaaatatttatgagttgtaagatgagcttcggatgcaagctggattaggtatacagacatgattttcgtagtactcagattctgagttgccctcgtatcagagcttgtggtcccaatagcctgcagctgcagctaaaacgatctattttggtagcggaatgttttatctgcttattttgtaccgtgtcttccgctactgcggcggagccttgataacttgctatgctggatttttcccgagtgttatcgcatgaatgttgtcatttgccttggtgccatgttggtgttggcaaacgagcgagcagaacctgcagatcgagcagtacctgagcaccattttaacatggtttaacctttttagctggctcttgttaggattggtacattttcactgagtagggcacctagccgaaccgctcggttttcggtgttggcattttgagaagttcggtcatccgtgtcggctttctgttttgttaggctgtccacatcacatcgtgtaaaataagaggtttgtatcgtagatagtactatacgtagaggtgtttgaaatagtgatgagataagaaatgagataaaagagttgttggat

SEQ ID NO: 260319 - DNA, 415 bp, Zea mays
  unsure (1)..(415): unsure at all n locations
atcaatgttcattcattgtcttacattatgctttatttatttgtgttttatttacagtaccaagtgctcagggagttcagtctgacaatgatcctaacaatacaaccgtgcgttctttttgctacttcctagtgttcaagcaattgttcttatctagctattgataacctgtatttgtctttgagcacagatttttgttggtggtcttgaccccaatgtcactgaaggtatgttgaaacaagttttcaccccttatggggacgtagtccatgttaagattcctgttggcaaaagatgtggttttgttcaatatgctaacaggtcggccggaggatcccttattgcctgggtggattttaaatatccattcaacacgtttactcatgtatcacttctngtatatgcatttagatct

SEQ ID NO: 260320 - DNA, 1192 bp, Zea mays
ggcgatgcgcgggaagcggctcatgttcgtgggggactcgctgaaccgcaaccagtgggagtcgctggtgtgcctcgtgcagcccatcctgtccaagggcaggaagaagatcgtcaagcggggctccctcaacaccttctacgccaaggagtaccgggccacgctcgagttctactgggcgcccttcctcgtcgagtccaactctgacaaccccaacttccacagcatcaaggaacggatcatcagtcccgagaggatcgaggcgcacgccaagcactggaaggacgctgactacctcatcttcaacacctacatctggtggatgaacaccgccgacatcaaagtcaggagacccaattcgaggtattggtctgagaacgacgaggttcccaggattgaggcgtatggccgggtgttcaagacatggtctgattggctcaatgacaacatcgatcctgcccgaacgtccgtcttcttcatgacgatttctcctcctcacctcagcccacagaattggggaaacccggacggtatcaaatgtgtaagagagacgcttccatatcagaactacagccaacacctggatctttaccatgacatgcggctgtatgacttagtggtcaatgtggccagctccatggagaaggtcccagtgacagtgatcgatatcacaaggatgtcagattaccggaaggacgcccacacctccctgtacaccatccggcaagggaagctgctgacgcctaagcagaaggcagaccccgagaagttcgcggactgcatccactggtgccttcctggcgtgccggacgtgtggaaccaaatactctacacgaggattctttcgaaatcatcatggcattctaattttagcccccctccatcccagtctctgcctcttcctccccaatgagaatcagatgtgggggcttggtttttgtcggagaatgtatgatttttcattctttttccttcctttttgggtagattgagtaaaatgctagcccgaaaaggaaaatgaatgttctgattactgatggtatagcatgtaagaagattcagctgaagtgtaaattagttgtgagttagccaattgagaaaacaacaacgacctagtataaagtgcatatacatatactggtggttcgcaggcaaaattacctatatataagcctttttttcctgatgggtg

SEQ ID NO: 260321 - DNA, 1082 bp, Zea mays
  unsure (1)..(1082): unsure at all n locations
atgatactcgccgacggcctcttcaacttcctgtccatcgtggcgtgcacgctgcacaccatgcgcaagaggcgcagcaggcagcagccgataataatccaaggcggcggctgcggtggcggtagtgaagccgacgacggtgacacgccgcccccgccgccccactgcctcaacgctgctgccgagcaaccgaagaagagcttcgatgatcgccgccgggcgcaggtgtttctgcgtgaccacatatccaactcggtcaacatcgtgtgctacgtcctcctgtcgatggtctccgtcgccgccataccgtacctctacccgcagatgcggcgcgcgcacgtcgccctcatctacctcgccgcgccggtcgtcgcgttctgcgacgcgtacgccttcggcgtgacggacatgaacctgtcgagcacctacggcaagctcgccatggtgctcgtgggctccagcgtggggcgcaacgacggcggcgtcgtcgccggcctcgtggcctgtgggatcgtgatggggaccatgtccaacgccaacaacctgatgcaggacctcaagacggggtacctgacgctgacctcgccgcacaccgtgttcatcagccaggccatcggcacggcgctcgggtgcgtcgtcaacccggtcatgttctgggccttctacagggtggtgcagaacggcgacaccgacgtcttcgacgcgccctacgcccgagtgtaccgcagcatcgccatgctgagcgccgggcaggacgggataccaatgcacagcctctggctctgcaagctcttcttcgcgctggcgctcgcgctcagcgtgttccgggaggtggccatgtggaagcgctggcgtgtggcacactacattccgagcatcatctgtgtggccatcgcctttgtggtgccggcgcgcatacccatcgacatgttcgtcgggagcttggtgctgtacctgtggaggcgtgccgaccctagcaaggcgccgacgttctcgatggcggtggcgtcagggatgatctgtggggacgggctanggatgctcttgtcatccacgatggcactcatgcatgcgcgggcgcc

SEQ ID NO: 260322 - DNA, 1646 bp, Zea mays
gtttctgcttccctcattcataaactttatggaaataaattgagaccatttcttgagcatgctgagcatcttacggaggatgtggtttctgtatttccggcagctgatgctttggagcaatacataatgtctgtgatggcctccgttacgggagatgatggtttggatagcctatgcagacataaactagttccatatcagattgaaagtaaatctggtacattagttttacgctgggtaaatgggcaacttgagagaattgaaacttgggttaaaagggctgctgattaagaggtttgggaccctatatcccctcaacaacgccatgggaattctattgtagaagtctatagaatcatagaagagactgcagatcaattttttgcatttaaggttcctatgcgagatggagaattaaatagtctatgccgtggtcttgacaaggcattccaaggcgctctcacagctggttactgcacccctagttgataaagaagatttagctccgcctattcctgttcttactcgatataaaaaggagcttggaatcaaggcttttgtaaaaaaagaggtccaagaagttagaacagttgatgagaggaaagctagcgaaattactcagcttacaatgccaaagctttgtgttcgtcttaacagtctatattacggtatcagccagttgagtaagttggaggacagcattaatgagaggtgggctcggaagaaaagtgaaaacactaacatcagacgaaaaagtgaaaagtcaaagagtgccgtccctaatcagaagaatcaatttgatggcagcagaaaagaaatcaatactgctattgatcgtctctgtgaatttactgggacaaaggttatattctgggacctgcagcagccatttgttgagaatttatacagaaatggtgttgctcaagctcgattggacaccataactgaagtgcttgatttggtccttaatcaactttgtgatgtcattgtggaacaactgagggatcgtgtggttacagggcttctgcaagcatgcctggatggcttccttcgtgtgatactggatggaggttctactcgtgtcttctctccaaatgatgcagctttattggaggaagatcttgaaaccctgaaggaattttttgtttctggtggagatggactgcctcgtggaactgttgaaaacttggtctcgcgtgtacgtcctgtaataaatctgatcaagcaagagacccgcgtgctcattgatgacctacgagaagttactcaaggtggcaagagcaaatttggagcggactccaaaaccctccttagggtcctgtgtcacagaaatgattcagaggcatcacattacgtgaagaagcaattcaagatacccagctcagctccgagcgcctgattgattgcgaacgaaaaaacagatatcgaacaggacagtgcagccttgctcgtaacccaagaaacggtgctccaccgcccattttcatgtttgtgtaacagttattgttcatcggtaacactaggactttgggtggacgcggcagtaagcatgtatttacacaaatactaacacactggtcctgtattgattggtactagttttggaccattggagtttccccatttagtgctagtttgggaacctc

SEQ ID NO: 260323 - DNA, 1173 bp, Zea mays
tgttcgtttacgcgtccgctcggttcacaccctgtgcgcggggctctcttcgtcgtgcggcaactgcgcgaccgccgacgcccgacggcaggtgccccaggtcttcgtcgaccccttcgcaaggcctcggttccatccttcgccggaggcgaccgcccgtcaacaggacttgatctactactcactagcggtgtagaggcgaagagaagaacttgaccatgagcagcataggcacaggttacgatttgtctgtcacgactttctccccagatggtcgtgtcttccaggtcgagtatgccaccaaggccgtcgacaacagcgggactgttgttgggatcaagtgcaaagatggcattgtcctgggtgtcgagaagctggtaacctcaaagatgatgctggaaggatcaaaccgaaggatccattcggtgcaccgtcactctggcttggttgttgctggtttagcagcagatggcaggcaaattgtttcaaggaccaaatcagaagctgccagttatgaaaaggtttatggagaacccatttctgtgaaggaattggctgatcgtgtggcaagttatgttcatctttgcacgctgtactggtggctcaggccttttggttgcggtgttattcttggaggttatgatagggatgggccacagctctacatgatagaaccctcaggagtttcctataaatacttcggtgctgcattggggaagggaagacaggctgcaaagactgagatagaaaagttgaaactttcggagcttacctgccgggaaggcattgttgaagttgcaaagataatttatggagtgcatgacgaagcgaaggacaaagcttttgagttggagttgagctggatctgtgatgaatcgaaccgtcagcatcagaaggttccaaatgaactgttggagcaggccaaagctgctgctcaggcagctcttgaggagatggatgctgactaagaaacatgacgaatatgcccatacttcatgtttttgtgctgttgatatctttgatccctttggggtgacaccgtgacagactggacattgccaatttgttggattttatttggatgtcatgtaaaactccattcatggaagtttgaatctggattgactgatataagagctgtcgtgttttttaaaaaaaaagaaaagggaggaa

SEQ ID NO: 260324 - DNA, 661 bp, Zea mays
cggaaacaaaaaatcgtcagtgtgatcctgtgagggttcatcttcttctccaagcagatttctgttggttagctactcacgtcaactcaaaatctcgcgttcacctcctctccagtctctccgcctcccgcttacttctctgactctagtctatccccctctcgtttcttcctgtgagcgacactggtggagctgcgccgctctcaccttcaccggcgacgggcattcacaagtagtgatctcttgactaacggcgtagtggtgactaaagagccttgacaatgagcagcataggcacaggttatgatctgtctgtcaccaccttctctcccgatggccgcgtcttccaggtcgagtatgccacaaaagctgtcgacaacagcgggactgttgttgggatcaagtgcaaagatggcattgttctgggtgtcgagaagctggtaacctcaaagatgatgctggagggatcaaaccgtaggatccattcagtgcacaggcactcgggcttggccgttgctggtttggcagcagatggcaggcaaattgtttcaaggaccaaatcagaagctgccagttatgaaaaggtctatggagaacccatttctgtgaaggaattggcagatcgtgtggcaagttatgttcatctttgcacgctgtactg

SEQ ID NO: 260325 - DNA, 865 bp, Zea mays
attttatatgttctcagttttcatgtatatccctcccttcatttccaatgaaatattggcttctaatataatccgatggagttcactatcggctttagcttttgtgttccgtaatcttgttaacaagaatgcttctgcaattactgtcaaatcaccactggatgttcttaattctgtgtgaacttctttaatcttatagatggacctcaaaatgattctgaacccaactatttgaatgtggtcatgcagtgagatagaaaagttgaaactttcggagcttacctgccgggaaggcattgttgaagttgcaaagataatttatggagtgcatgacgaagcgaaggacaaagcttttgagttggagttgagctggatctgtgatgaatcgaaccgtcagcatcagaaggttccaaatgaactgttggagcaggccaaagctgctgctcaggcagctcttgaggagatggatgctgactaagaaacaggacgatttgcccagacttggtgtttttggtgctgttgaaatctccgatccctttggggtgacccactggacatggccaatttgtcacaatttattattttgacccatgtcatgtgaaactcctttcgttgaagtctggtatctagattgacttgtatcagagctgtggtttacgcagactggattctggagtactggactgtgtgtgtttttcggaattgtgcatctgacttttagctgttcgttgactttgtttttcttttttcagataaagagctttttcttgatttgatgcagaaaaaaaaactacaacaactcaagctaacactaaaaaataaaatacaaaaaacaaaaacaatatcataaaatgcatttgatagc

SEQ ID NO: 260326 - DNA, 876 bp, Zea mays
ggcctctggtatggcttctgctttctgaaaacagtttattttatttgataaagcttatcatgagtggagatattgactctacattcaaaagacttcgggagtggtatccgcaagtgataaaggatgagcaatcggttatttgcttcctactccgttctcaaagattcatagaatacatcagggctgaacaactggaggttgctgtgaaatatggtcgtgctaacctggcaagcttcttcacccacaaagcttttgaggggctgctgaaggatagtgtggccctactggcgtacgagaagcctgcagaatcatgcttgggatacctgatgggctctccccagcgtgaattcgtggcagacgcagtgaacgcggctgtcctgtcgacgaaccccaccatgaaggaccctgagagctgcctctactcgtgtctcgagaggctactaaggcagctcacagtttgtagccttgagcgacgtgcattcaacaacgaccaaggagatgcattcttactccacaaagaaatgcaaaactatgaaaggtctaggcgctcatagcctcataggcatcaggattgttgcgcttctgaagtaaactcggttcgggtgttagacctcctcatctgccgtttgaagggacgaagattcaatgacaagcacgtatccttccctttgcaggtctgcagcgcccctcagctttcgcaagggtgagcaccgaattgcatggacacagctcaggcgcttcgggaggtgttctaacctctctgtaatcagaaaactcacagtgagataaagccaacgtttcagatttcccctattttgttggttggctaatatgctgtttgacactatgaatgctaaaaagtaaagacgcttcgac

SEQ ID NO: 260327 - DNA, 572 bp, Zea mays
tcgtgggtcgccgcaagcctctataaagacgtcgtggtaccccactgtgaaggaccctgagagctgcctttactcgtgtctcgagaggctactaaagcagctcacagtatgtagctttgagcgacgtgcattcaacaactaccaaggagatgcattcttactccacaaagaagtgcagaattatgaaaggtctaggcgctcataggcatcgggtttgatgcgcatctcagaagtaaactcagatgctagactcccaagtctcaactgctctttgaagggacgaaggttcagaaccaagtggtcgaccatgctaagcacaaatccttccccttgatgcagcacccctactttcggaagtgtggatacaagatttcacagacagaggtcaggctttcggaaggtgtcttatcctccctgtaatcagaaaactcagtcagatacgccaacgtttcagtctccctagttttttttgttggttggctaatatgatgtttgacattgacattgtggatgctaaaaggtaaagatgcttcaatgtatgtccaccttttagaacatctgcatcatagttg

SEQ ID NO: 260328 - DNA, 533 bp, Zea mays
cgaaaaatggagctcccgttggagccattcctaatgaaattaaaggcccactatatcctacaggggcgaggtcatagtcagggtgaagagttgactgtaaactttggaaaggaaccattctgttttgacattgagggttatattcttgaagagaaaatgaagcagcaatcggtgtctgataaattgaacttggagacggacatcagtcattggattgtccgctcatatctcctacattatggataccaagatacattaaatgcttttgatatggcaaatgcaactgacccccccaccaatcgccaaaatggtcatgcagaacctcccgaaacgtatggtcttagccacagaaaacttttgcgtcagcttatcatgagtggagatattgactctacattcaaaagacttggggagtggtatccacaagtgataaaggatgagaaatcggttatttgcttactactccattctcaaagattcatagaatatatcagggctgaacaactggaagatgctgtgcactatggtcgtgc

SEQ ID NO: 260329 - DNA, 537 bp, Zea mays
gtaatcatcagttgaaccaaatggtttgtacatgcatgccaactgtttgtaacaagcttcttgtacttgcacgcagaataaaggaactcagcgacatgacggcaataaaagccgatgacatcttgagcacgctgcagagcctggacctaatccagtatcgcaaagggcagcacgtcatctgcgcggacccgaaggtcctcgaccgccacctgaaggcggcgggtcggggaggcctggacgtggacgttagcaagctgatctggactccctacaaggagcaaggctaaaagcgcagctgctcccagccccagattagagtccctgtacataacgtttggtactaggatctcccctcagctctcacttcactcgtgtaccgtgaaaactgtacactgtaacaaccacattgctgtgtttgtgctgtctgccgcgatagtctccgaaatcgaaagaaacatcacccaactctttactcttggctcgcaactccccctttcacatcctacctttgatagccaaatcagggctcggctcgag

SEQ ID NO: 260330 - DNA, 725 bp, Zea mays
gacagaatctttggtatctggccaagctatttcttgatcacaagacattgtactatgatgttgatttattcttgtgatatgttctctgcgaatgtgatgaccggggatgtcatatggcgggatatttctctaaggaaaaacactctgaagaatcttataatttggcttgcattctcactctccccccataccaaagaaaaggatatgggaagttcctgattgctttctcatatgaactttccaagaaggaaggtaaagttgggacaccggagcgccctctttctgatcttggcctgctcagctatagaggttattggactagagtgcttctggaaattctaaagaaacataagggtaacatatctataaaggaactcagcgacatgacggcaataaaagccgatgacatcttgagcacgctgcagagcctggacctaatccagtaccgcaaagggcagcacgtcatctgcgctgacccgaaggtcctcgaccgccacctcaaggcggcggggcggggcggcctggacgtcgacgttagcaagctcatatggactccctacaaggagcaaggctaaaaggcgaactgctccgtgtctcagatttagactcgctgaccgatgcgatgcagtccctgtacatagcatctccccacagctcacttgacttgacttgactcgtgtaccgtgaaactctacttgtaactttgaacatccacatcgttgtct

SEQ ID NO: 260331 - DNA, 450 bp, Zea mays
ctatgcattcagaatatgcgttcatgattttgtttttgaggaattggatgatgtgctgtttactatcctcggggctacatggtgtggactgtgaaggccggggccgatgtacatagagaggccacggaaggtgtcccagagtttgagagagcatttagggagaggttctctgcctgcacattaactgctaagaggcatattgactccactaccatcttcgacatccaaggggctcacatggatcatccccgagcgcaagcaaactttgagatcgcgccgaaagcatgccatccctggaatccttcagttgggagtaacatttagttccactgtgtggtttttgccctctaaatatattgctcggcatacatatgtttgcgatctcatagatttggattttgagccgtaccagtttcttatttttgttaatgccagccttgaatcgtatcc

SEQ ID NO: 260332 - DNA, 2583 bp, Zea mays
cggtcgcttggggtcgagagacggccgtctgctcagccgtcgttggcgacggctcgtttcagggtcccccacctactgatcacgaccctggcctctctcggttctggtgccttgccattgccatcatccaccctcatgcatgtcggtgcaacgcccatgggcatccactggtgcttataagaggaataatccggcttccgttcctctgaggacatcctcggccttccagggcagcaaccacgaaagccttctgcgcggggtgctttcctcgcagcaaatattcctgccttttgcattccggctttgcaagttccttgctttgggcatatatattgtgaggtctctatatatataggtggttcgaggtgatcggcagaaccacacaggcaaagatggcgagcgtgcacaaggccaccacccttgttctcatgttctgcctgctagcgctggggagagcggagtacctcaagtacaaggacccgaagcagcccgtcgctgttcgcatcaaggacctgctgggtcggatgactctcgctgaaaagatcggccagatgacgcagatcgagagggaaaacgccacggccgacgcgctggccaaatacttcataggtagcgtgctgagcggcggaggcagcgtgcctgctcctcaggcgtctgctcaggcttgggccgccatggtgaccgagatgcagaagggcgctctttctacgcgtctgggtataccgatcatctacggtatcgatgcagtgcatgggcacaacaacgtctacaaagctactattttccctcacaacgtcgggcttggagctaccagggaccctgacctcgctaagagaattggagaagcaactgctcttgaagttagagctactggaattccttacgcctttgctccctgtatagcggtctgtagagatccaagatggggacgctgctatgagagctacagtgaggatccaaaggttgtccagtcactgacttcactcatctctggcctgcaaggtgacgctcctgcggattccgcgggaaggccgtatgttgggggaagtaagaaggtcgctgcgtgcgcgaacgactatgtcggtgatggtggaacgcataacggaatcaacgagaacaacacgatcatcgacacacacgggctgctgagcatccatatgcctccttactacaactctatcatccgaggtgtctccacggtcatggtctcctactccagctggaacggagtgaagatgcacgcgaaccatttcctggtcacggattttctcaagaacaagctcaagtttaggggttttgtgatttccgactgggagggcattgatcggatcactactcctcctcacgccaactactcttactcaattgaggctggtgttggtgctggaattgacatgatcatggttccattcagatacacagaattcatcgacgatctgacgacacaagttcagaacaaggtcatccccatgagcagaatcgacgacgccgtctacaggatccttcgtgtcaagttcaccatgggtctgttcgagaacccttaccccgactctagcctcgccggcgagctcgggaagcaagaacaccgggaactggcgcgcgaagccgtcaggaaatccctggttctcctgaagaacggcaagtcctcctacgctccgttgctgcccctcccgaagaaggccggcaagatcctggtcgccggcagccacgccaacgacctgggcaaccagtgcggggggtggacgatcacgtggcaaggaagcagcggcaacaccactgccggcacgacgatcctctccgggatcgaggccaccgtggaccccagcacgcaggtggtgtactcggagagcccggacagcggcgtgctggccgacaagtacgactacgcgatcgtggtggtcggtgagccgccatacgcggagacgttcggcgacaacctgaacctgacgatcccggcgcccgggccgagcgtgatccagtcggtgtgcggggccgccaagtgcgtggtggtcctcatctccggcaggccgctggtggtggagccgtacctgggcgacatggacgcgctggtggcggcgtggctgccggggtcggaggggcagggcgtggcggacgtgctgttcggcgactacgggttcacggggaagctgccgcggacgtggttcaagtcggtggaccagctgcccatgaacgtgggcgacgcgcactacgacccgctcttcccgttcggcttcggactcaccaccaagggcacgaagtgagtgagtgtgaggcgctctgatgggatgtggcctgtgagtgagctgtgtattcgtgggcgggcgtgaggctctttggctttcgaattggttgggggtgacgggcggcgagtcgtgtacgccgcacacattgcgcagcgtacgttgggttgggatgtttgcgtctgggtaataacagtgatgcattcttgagatggttgctgttagtgtgggttgtttggaatgaacaataagatcaggcgcgttacattggcccgctactatctctcctgctgagaccaaaaaaaaaaaaaaaaagggcggctgctcgcgatctagaactagt

SEQ ID NO: 260333 - DNA, 541 bp, Zea mays
ggaccgtgggtttgtgagctgccactgccagcttccccgtgcgcgagctgtgctgctgctcggcggcgcgcccactccccggccgctccctcgtcaccccgcctgccggtaatcggtctctatatatataggtggttcgaggtgatcggcagaaccacacaggcaaagatggcgagcgtgcacaaggccaccacccttgttctcatgttctgcctgctagcgctggggagagcggagtacctcaagtacaaggacccgaagcagcccgtcgctgttcgcatcaaggacctgctgggtcggatgactctcgccgaaaagatcggccagatgacgcagatcgagagggaaaacgccacggccgacgcgctggccaaatacttcataggtagcgtgctcagcggcggaggcagcgcgcctgctcctcaggcgtctgcccaggcttgggccgccatggtgaccgagatgcaaaagggcgctctttctacgcgtctgggtataccgatcatctaccgtatcgatgcagtgcatgggcacaacaacg

SEQ ID NO: 260334 - DNA, 358 bp, Zea mays
cgctcgtcgcggcctggctgcccggcacggaggcgcagggcatcaccgacgtgctgggcggggactatgggttcacggggaagctgccgcgcacgtggttcaagtccgtggaccagctgcccatgaactacggcgacaagcggtacgacccgctgttcccgttcggcttcgggctcaccaccaaggctgccgcgagtcacgattagcaattagagttagactctgcttttgctttttcggcgtggatgaaatagttagcgggaacggcaaataagcacttttttttgtagaagatacacaaagctttttttttgtgggtgtagttaaaaaagaatgataaaataattgatttaggcct

SEQ ID NO: 260335 - DNA, 548 bp, Zea mays
  unsure (1)..(548): unsure at all n locations
caccgacacgctcaagaacaagttgaacttcaggggcttcgtgatcccggactggcaggccgtggaccgcatcacgaacccgccgcaccagcactactaccactccatcaaggagacgatccacgccggcatcgacatggtgatgatcccctacgactacccggagttcgtcgccgacctggccaagcaggtgaagcaggggcagatcaagctggagcgcatcgacgacgccgtcagccggatcctccgggtcaagttcgccatgggcctcttcgaggacccgctcccggacccgcgcctcaccaaggagctcggcgcgcatgagcaccgggcgctggcgcgggaggccgtccgcaagtcgctcgtgctgctcaagaacagcaagaaggggcaggcgaagccgatgctgccgctgcccaagacggccaagaagatcctcgtcgccggcagccacgctcacgacctgtgcagccagtgcggcggctggaccatcaagtggcaggnggagaggggcaacaacctnaccggcgtggcaccacgatcctgga

SEQ ID NO: 260336 - DNA, 2067 bp, Zea mays
atgcccacgcgtccgcccacgcgtccgcccacgcgtccgtggatgggaagctgaagctcacagagtctctcctcgaaagcaaagtaatggaggacctctttccttttcactctggtccatttacctgtcttgcttattctgcttgcggaggagcagagcagattctgataatatgcaagattgcagaaccttgaagcaaagaaaatcaacgactaaaaaaaagcagcgcttgccgcacagtttgcagctgaggcaacactacgaagggttcatgcggcacacaaggatgatgacatgcctcctattgaggccatccttgcaccactggaagctgagctgaaactggcccgtcaagagattgcaaaattacaagatgacaacagggcattggatcgtcttacatagtctaaggaagcagctctgcttgaagcggaaaggacggttcagatggcactggcaaaagcttccttggtggatgatctgcaaaacaaaaaccaagagttgatgaaacagattgagatatgccaggaagagaacaaaatcttggatagaatgcaccgccagaaagttgctgaggttgaaaagctcacgcagactgtcagagagctagaagaatctgttcttgctggtggtgcagccgcaaatgctgtcagagactaccagcggaaagttcaggagatgaatgaggaaatgaaaactcttgatcgtgagctagctcgtgcaaaggtttcagcaaatagggttgcagtagtggtggcaaatgagtggaaagatggcgatgataaagtaatgcctgttaaacgatggctcgaggagcgaaggattctgcaaggagaaatgcagcaactccgggacaaacttgctattgcagaaagggctgcaagatcagaagctcaactggaagagaagttccagctacgacttaaggtactcgaggaaggattgagaatgtctacatcgagaaccaatgtcagtggcacacgccgccagtctattggtggtgctgatggtttgtctaaggccaacggcttcctgtcaaaacgcccatcattccagatgagatcaccagtgtctaccacaacgactctagtgaaccatgcaaaaggagcgtccaagtcgtttgacggaggctgtagatcacttgaacgctataagggccatgtaaacgggaatggtatgaacgtatctaccgattccagtgaagataaagattcaaacaactcagatgagaagtgtaacgagtttgcatctgctgagtcggaggactcggtgtcaggtgttctatatgatatgttgcaaaaggaggtcatttctctaaggaaggcgtgccacgaaaaggatcagagcctgaaagacaaggacgacgcagttgagatgttggcaaagaaagtagatactttgacaaaagctatggagtcagatgccaagaaatcgaggcgcgagctagctgctatggagaaggagctggcagctgtgcgcttggagaaagagcaggataacagggcaagacgttttggtagttcaagcggttctgccagcagttcgcagctcccacctggcaggactttacctaggagcggctcggcgcgcaacatgtgaaggcatgtaggaattgaccgaatatggctttgatgatccttacttggattaggactggtgactgggaaggaacctctcattgtcctggagaagatggcatcagcggaagagcctcttctgcctacatctcgtggtcgcagggatgaactactttgtgtctaacatctccggctagtgttttcttttcttttgttttgacgacgtgtcattcggtggtgattgctgttgtttcttttcttttggcaatttgatgatctttgttggtgctgtataggtttggtgaggcgttgctcctttttcttctttggtttgtttgttcgacatatccgtcggtctggatgtttacgatgtaaaatgtacgcactgaagagttgcttatggtttgcctgatattcccccctgtttctgtcagtgttgggcaagttgatgataaccagcatgatgaatgactcagctggctgttgtaac

SEQ ID NO: 260337 - DNA, 749 bp, Zea mays
cccacgcgtccgattcgttccgttcctgatacaggcgagcagggacgactgcaggcctccccctctttctcggcttccactcacccgccaccactggaccacccccaacggcgagggagtgagagagatcggcagcagctcgggggcctggcagggcagctgcattgcgctgcggcgggcggcggccatggccgattcgtacggcgacggcaagggcccatcactcaagagccagagccagaaccagcagccgcgccctggcccccgcctcaagcccgccatcgagatggaggatctcatcaacctcctccacggatccgatccagtccgggtcgagctcacccgcctcgagaacgaactgcagttcaaggagaaggagctgggcgatgcgcaggcggagatcaaggctcttcgcttgtcggaccgcgcgcgcgagaaggccgtacaggatcttaccgaagaattggcaaaggtggatgggaagctgaagctcacagagtctctccttgaaagcaaaaaccttgaagcaaagaaaatcaacgacgaaaaaaaagcagcgcttgccgcacagtttgcagctgaggcaacactacgaagggttcatgcggcacagaaggatgatgacatgcctcctattgaggccatccttgcaccactggaagctgagctgaaactggcccgtcaagagattgcaaaattacaagatgacaaccagggcattggatcgtcttacaaagtctaaggaagca

SEQ ID NO: 260338 - DNA, 942 bp, Zea mays
  unsure (1)..(942): unsure at all n locations
gggccgaccacgcgtccggagaaaaggaagacagagaaggaaacggcagtgaagtcgccggcgccgccgcgacaggaggaaggagcagcagcggcaggggaggcccggcgatctcgtctgctgcgtgcggcgagggagtaaacggagccgcgacaggatgcactcctttgggcaccgcgccaacgcggtggcaacgttcgcggtcaccatactggccgcgatttgcttcgccgcctccttctccgacaacttcaacaccccgacacccactgcctccgttaagatcttgaatctaaactggttccagaaggaggccaacggcaacgacgaggttagcatgacgctgaacatttcggccgacctttcgtctcttttcacgtggaacacaaaacaggtgtttgtttttgtggcagcagagtatgagactccacagaatgctttgaatcaagtttccctttgggatggcattatacctgcaaaggagcatgccaagtttttgatccataccacaaacaagtacagatttattgaccagggaagcaatctaaagggcaaggaattcaacttgacaatgcactggcacattatgccaaagactggcaaaatgtttgcagataagatagtaatgacaggctatcgtctccctgagctatacagatagtcagatagatcatggacaggactaagtggcctgcaagaaatgttagtggcagtggcataattgatcctgagcgttttgttctaatctaagtggagcatgtaaccttataagcttgtacttaagctgaaccaggcaaaacaaagttgtaatttgagaggatatgtatggttcaactttgctttgcctatcaaatgttgattctgaacttgaaaggtatgccatgcaattcgtggccccctccaaaaaaaaannnnnnaaaaaaaaaaaaaaaaaaaaanaaa

SEQ ID NO: 260339 - DNA, 607 bp, Zea mays
ttgcggacgcgtgggcttgaatataaactggttccagaaggaggccaacggcaatgacgaggtcagcatgacgctgaacatttcggctgacctttcatctcttttcacgtggaacacaaaacaggtatttgtttttgtggcagcagagtatgagactcgacaaaatgctttaaatcaagtttccctttgggatggcattatacctgcaaaggagcatgccaagtttttgatccatacaacaaataagtacagatttattgaccagggaagcaatctaaagggcaaggaattcaacttgtcaatgcactggcacattatgccaaagactggcaaaatgtttgcagataagataggcatgccaggctatcagcttcctgagcagtacagatagtcatatagatcatgaacggtagcagaggcctgcaagaagtgatagttgcttagctgatgctgaccttttttggtctaatctagttggaaccatgtaatcttataagcttgtacttaagctgaaccaggcaaaactaagttgcaaatttgagatatttattgcgcaacttttaagaataggtctcggttaatggtgagaagacttttccctgagccc

SEQ ID NO: 260340 - DNA, 556 bp, Zea mays
aaccggaccaagcttctaatggaggtaatcctaacttgcatgggaaggacctgtgaaaatcgatggccaggtccaaggaccaggaccatgccctttttgtggactgagaactggacagcacagtccagagtattcggtgacccaccatcccagcgttctgctgaggacattgcatttgccgtggcgcgcttcttctccgtgggcggtaccttggcaaactactacatgtaccatggtggaacaaacttcggaaggacatctgctgcctttgtgatgccaaaatactacgacgaggcacctctcgatgaattcggcctgtacaaggagcccaagtggggccatctgagggacctgcacctggcgctgaagctgtgcaagaaggccctgctgtgggggacgccgtcgacggacaagctgggcaagcagttggaggcgagggtgttcgagatgccggagcagaaggtgtgcgtggcgttcctcttcaaccacatcaccaaggacgacgcgacgatgacgttccggtgccggtcctacttcgtgccgcgccacttcatca

SEQ ID NO: 260341 - DNA, 452 bp, Zea mays
tcgagggacgcgtccggcaaggtcgaagcgtcgtctctctcggcacggagcctagtgcccggcctcgtgagatccgaaattcagaagcgaggatggcgacgaccgcgactaggcggtggtggaggcggcacgacggcggcgacgatgacccagacgacctcgtccccatggacacccaagagcaagaagagctggtccggtctctggaggctaagcaggcgcagcaaggccgccgttggaggcgcgtcttcgcggggttcctcctaggttacgcggccttccttgtctactccagtttccatcatgcttggtctccctgggagctgcggtaccatgcttacttcatggaagatttgcctgcaccaatggtcataattgcaggattactacagaattcacgcccatcaaagaagtggatgtggaattcttgctatgtgggcatttggtagcca

SEQ ID NO: 260342 - DNA, 479 bp, Zea mays
attcagaagcgaggatggcgacgaccgcgactaggcggtggtggaggcggcacgacggcggcgacgatgacccagacgacctcgtccccatggacacccaaggtacgatgcaatttcacgagcccacctccccgttcccctgcccatcgggttttagacgctgctgacgccacgaaatcgattaattgttgctgcggcaattcgttttgcagagcaagaagagctggtccggtctctggaggctaagcaggcgcagcaaggccgccgttggaggcgcgtcttcgcggggttcctcctaggttacgtggccttccttgtctactccagtttccatcatgcttggtctccctgggagctgcggtaccatgcttacttcatggaagatttgcctgcaccaatggtcataattgcagattggatagctgctctagcatgcctatttgctgtgaaaggattactacagaattcaggcccatcaa

SEQ ID NO: 260343 - DNA, 600 bp, Zea mays
ggaggtgagaatccagggtcaacacgctatcttcatcatcacttctgggcaaccgagattatgttgctgggcagatctttgatttagctgataaactagagcaagctgaaggccagctggcacacagtcgatttggtggtatgattatgccatcgcaacgaaagaaagagcaagaagagtctccactggctaaggtaacacgagatagctccaaaatcacagctgagcaggttcacggcctcatgtcacaggtcataaaagacatccttttcaactctgttcacccgtcaagcaaggcaagcacaagtgctccaccagattcatccggtcctgagcctatggttgaagcctgagttccagcggaaggggacaatggatatttgtgttatgttatctgattcagaaggtgcaaaacaagttatcttttgagtacagaatcatcatgtaattatgagttgccatcttgggctgccactgagagggtgtgatttgggtccggttagcaatctcatgtattggatttcggatcagtattcgaagctttcataacgaggagccatcatcttattttagtaaaaaaaaaaaaaaaagggcggccgc

SEQ ID NO: 260344 - DNA, 493 bp, Zea mays
cctgaggaccggccgaattccctttcgttcacacgcccgccttccataggtgtgaacaacagaagaagaaaaagtttcagctgaaaagatctgtcgcgaaacgcatgggcttgaaggagctgaaaatgggatacaacattgacatccatgattacagcgtgaggcttaaagctgcaaaaaagtttcttaaagctggcgacaaggttaagataattgtgaacctgaaaggacgggaaaacttgtataaaaaagaagctatcgaactccttagaagattccaaaatgatgttggcgagctggcgacagaagaaagtaagaatttcgcggagaggaatatatatctggttcttgttcccaataagatagctatacagaaagaacaggatgaattgaacaaaaagggtgctgtgagagaagagaaagaccaatcagacagtgatgaaccagaagagaacgaccaaccagacagcgatgtacccctgacagaactgct

SEQ ID NO: 260345 - DNA, 495 bp, Zea mays
gaggaagatgaggaagggctcgggggcggcggaggctgggggaggagggaccgcgggcccgaccccgactacgacccggcccttgacatggaacgcatcgagtcctcgaccgtaacgctattggacgaacagaaaagaatggttggtgtagtatctgtcagcgaggcagttcagattgcagacgataatgatcttatactggcaatattatcaatggatggggaccccccagtacttcgactctttgaggagagagattacaaaaaacataggtatgaacaacagaagaagaaaaagattcagcagaaaagatctgtcgcgaaacgcatgggctttggaggagctgaataaggggataccaacattgacatccatgattacagcgtgaggcttaaagctgcaaaaaagtttcttaaagctggcgacaaggttaagataattgtgaacctgaaaggacgggaaaacttgtataaaaaagaagctatcgaactcctt

SEQ ID NO: 260346 - DNA, 1764 bp, Zea mays
cccacgcgtccgagaggaagggctcgtcgtcgctgagggacctcgcgaggcgcggggcgggcagggagaagaaggctaagaaaatgcggatggaggacgacgggagggggagggacactgggatggtgagggataggcggggatcaggaggaagggactcaggcggtagggatgaccaggatgatggggagagggagatccaggagctctgggataccattgctggtggtgagtcagaggatgaccaagaaggtgttagaaccgtagatgatgataatttcattgatgacactggagttgatccagctgatcgttatggcagcgataatgagcgacattcacctggacgttatgcacaggctgaggagggtgaggaggacgatgaaatcgaacgactcttcaagggtggtaagaagaagaagaagaagaatgatcgccctcgtgcagatattggccttatagtggaacaattcattgctgagtttgaagtagcagccgaagaagatgcaaacttgaataggcaatcaaaaccagccattaacaaacttatgaagcttcctctgctcatagatgttctctccaagaagaatcttcagcaggaatttcttgaccacggagttctcactcttctaaaaaattggcttgagccattacctgatggaagcatgccaaacatgaatattcgatctgctgtactgaaattattaactgattttccaattgacttggaacagtatgaccgaagagagcagcttaagaaaagtggtctgggaaaggtcattatgtttttgtccaaatctgacgaggagactactgcaaataggaaattggctaaggagctggttgataaatggagtcgaccaatattcaacaagagcacgagatttgaggacatgaagagatatgatgatgaaagagcaccttacaggcggccacaaatgaagaaaccttcatcgagtagctctggaatggaatccagagatgatgatcttgatgctgacttttcacaacgcaagtctgggcaaagtagttcaaggcagcacgcttctaggccggaagcctcgcctttggactttgtcattcgtccacagtccaaaattgaccctgagcagatacgggctcgtgctaagcaggctgtccaagaccagcgtcggctgaagatgaacaagaaattgcagcagctgaaagcgcccaagaagaaaaaccttcaggcgtcaaagctcagcgtggaaggccgtggcatgatcaagtacctgtagatcacccactgtggcatccgcagtcagcagtgtcctgcacatgatacagcgcctgcagggattgctgaattggtatgaagcatcctaccaccattccatggcaaacagctcggcatcagtaattgcttggatcttttatccaagtatttttcttgcctgcaacatccgtgcttcagaaaccagttgagttggctacactatcattgcagaggcatatactacgagcttgcataaacatggcgctttcctaccagagtggtgcctttatattgtataaatatttgtcatgtttatgagttacaattagctagggttgaagttcgattgtttgtacttgaaagaaagtcatcacttgtgaaaaatcgaaacatagtgcgacaaatgattggttgtgcttaccaaactgtaactcaattgtgataaattacaattcttcagcagtcctcatcttgctgctttattgtaagatagtgtgctcaggctcaggctatctgcagtgactctt

SEQ ID NO: 260347 - DNA, 872 bp, Zea mays
ttttgtttatgcctacgggcccaaacggaaaaagaggacctgagccgactccgccgaggtcggtggcggcggcggcggtgagcatggccgcgcagagggagaagtccgcggccgtcgcggtcggcccagcacacggcgctgcggtatcggggtctccttctccttcgtcctcatccggaggcccggcggcggcgtcctcgtcgggagagcggtggagcgccgcgatcgggaacctgggggagctcggcgccaacgtggacgcgctgcagaagatgctcgggcggaaggctgtcttcgtcgacgatgacatcttctccaaggcctccctcgccgccgaccaggcccgcaccattaaggttcttgaccagagggtgcagtctctggaacgcgaactcgatgccgccatttctgcagcagctcgagctcgtacagataaacgacaggccgaagctgcgcaacgagctgcagagttacgcacacaggaggtcaccaaggaactggagaacactgcgagagtgtttcagctgcacatggaggagttgcggctgaagcaagaggagattgcgaagaaagatagcgatatcaaggtgttggaagcgataatacgaaccctcggtagcaaagatgatgatggatccagcgaataattgtcatgaacagggagcgaggcttttatgttcaaatatctcacggcgtgtttatgattatgtatttccttttggggtttaatccctttgttactcagatggatgtaacttgtttcgacaagattgagcgtgtccgcactcatactactataaatttgtattctaaaacaaatattttatcatcgttagcaagattatctactatacacaaaaaaaaaaaaaaga

SEQ ID NO: 260348 - DNA, 780 bp, Zea mays
ccacgcgtccgaccactcgtccgcccactcgttcgttgggcccaagcggtaaaggtaagcctactgcgtcggcggcggcggcgatcatggccgctcacagggagaagtccgcggccgtggcggtcgccccagcacacggcgctgcggtttcggggtctccttctccttcttcctcatccggaggcccggcagtgtcggcgtcctcgtcgggagaccggtggtgcgccgcgatcggtaaccttggggagctcggcgccaacgtggacgcgctgcagaagctgctcgggcggaaagccgtcttcgtagacgatgacatcttctccaaggcctccctcgccgccgaccaggcccgcaccattaacgttcttgaccagagggtgcagtctctggaacgtgaactcgatgctgccatttcagcacctgctcgagctcgtgtagagaaacgtcaggcggaagctgcgcaacgagctgcagagttacgcacacgggaggtcacagaagaactggagaacactgctagggtgtttgagctgcacatggaggagttgcggctgaagcaagaggatattgcgaagaaagatagcgatatcaaggtgttagaagcgatcatacgaacccttagtagtaaagatgatgatggatccagcgaataattgccatgcacagggagcgaataaattgtttcgattgaaattcagatagtttcagaggaacataagcactcttgtcttgtgttacttgtgtttacctgtttatatcaaggctactaaggctggtggc

SEQ ID NO: 260349 - DNA, 923 bp, Zea mays
cggactcgtggtcggacgcgtgggaaataaaaataagaaaaaaaaataaaaaacaaaaagggtagataaaaaaaaccagtatatcacaaaaaacacaaaatttaaagacctaaaagagatatgatgatgaaagaacaccttacaagcggccacaaatgaaaaaaccttcatcgaataactctggaatggaatccaaacatgatgatcttgatgctgacttttcacaacccacgtctgggcaaagtagttcaaggcagcacgcttctaagccggaagcctcacctttggactttgtcattcgtccacagtccaaaattgaccctgagcagatacgggctcgtgctaagcaagctgtccaagaccagcgtccgctgaagatgaacaagaaattgcagcagctgaaagcgcccaagaagaaaaaccttcaggcgtcgaagctcagcgtggaaggccgtggcatgatcaagtacctgtagatcacccgctatggcatccgcagtcagcagtgcccagcacattatacaggacctgcatgggcccagggattgctggattactaagaagcatcctatcaccattccatggcaaacagcccggcatcaataattccttggatcttttttccaaatatttttcttgcctggtagggtgcagcatctgcgcttcagaaaccggttgatttgagcactatctatgagcatgtataaatatggtgcttttcaagcagagtggtgcctttatattgtataaaatatttgtcatgcttatgagttacagttaactctgtctatgttgtctcgatgtactaggtctcaagccctcttaatggagggttgtgatagggtaagcaagtcaacgttaaatctccataaaatgataggttaagcgagtcaacattaaatgtctccaatttaatggagatg

SEQ ID NO: 260350 - DNA, 546 bp, Zea mays
tgtcctcgcgtccgcccacgcgtcctcgtcggcgtgcgtccgtcccctggccgtctggagaggtgggtggggagtctaccggacgcgggtagccggggcggtcgccccaccttgccgatacgaggtgtccgctcctatttcattcggtccattccgcctctcggaagagttgagagaggagtaaggaaggcgaggacctcgcgccccgcgatgggcggcgacctgtacgccctcgacttcgacggcgtcttgtgcgacagctgcggggagagctccctctcagccatcaaggctgcgaaggtgaggtggccgtcgctgtttgagcaggttgacgccgccatggaggagtggatagtggagcagatgtacacccttcgtccagtggtgggaaccgggtatgaaaacttattgcttgtaaggttgcttggtgagatccagatacactctgttcgaaaatcatcagttgcagatgggcttagcatccaagaaatattggagaactggtcaaaactgaagcccactctcatggatgagtggcaagaagat

SEQ ID NO: 260351 - DNA, 859 bp, Zea mays
atcggctcggaccgggccgggccggggcgtgtggctgcgctgcgtcgcctcgcctcgcgtcggcgattcttccggcgaaccaacggcgccagccacacctgagcgagcggcgcagagaggtggcgcgtggacgccacgctcgcctcagccttagggatcgagggccctttccgtccgcgtggctgctgctcctctcgtctctcctcccacccgtccaaggcatggagcactgctatgtgggacagccgatctcgagggccgaggcaatgcccgagaggaggtccaggttctggcagatggatgcgcctcctccgccccgggcggaggtcatctgcccccagcctcgccgcgccacccggattcccctcgccgctgtggaaaccctgaacaaagccagccccaagatgaacggtgcatttccgccgtacagatcggactccacttgcgatatacttgatcttatcctcagtaagaatgactcggatggagattcgagcagccaggtgggcttcttatgcggctcacctccgatacgcgctgacaaccctgttatccatgatccacagtttggtaaaagactgccatccttttctcctctaggagggagctcctatggcaaaatgccagcagtacgagttgaagtaggctcgccatcttgcggcgttagcagcagcccaaaagtaaggatcgaaggtttcgcctgtggcaactccgagacccactatgcagttacctttgtctgagcatttcgttgatatgttcctgattttgccctccgaccgaccgaccgctccttgtgaatcaccgtggtggtgtgcaggatattaagtagtgcatttaagctagcctgattagagtt

SEQ ID NO: 260352 - DNA, 271 bp, Zea mays
gtgaggagggtttctttccgtgcgccgaggtcttggcccgacggtcgtttacttgcaggtgattacctacgggcttcttcgggggattttgtgggttgtccgcgccagttgatctgcgattcgcttgcattcggggtcggttcttgcgaaacctaagcttgaccgcaggcatggagcactgctatgtgggacagccgatctccagggccgaggcaatgcccgagaggaggtccaggttctggcagatggatgcgcctcctccgccccgggg

SEQ ID NO: 260353 - DNA, 759 bp, Zea mays
gcgacgatgatgccacagctgcggaacctcttcgcgctggtcctagcgggcacggccatggacgactattcgggtgttgggtaggaccatgaaccccagaggctatcgtagcaacagaacttctctcttcgatggcattgaggagggtggaatccgagcaacatcctattcttctcatgagatagatgagcaagaaaatgatggagctattgatggactgcaggatcgtgtcagcattctcaagcggttgtcaggcgatatccatgaagaggtggagactcataacagaatgctggaccgaatggggaacgatatggatacttcaaggggttttctgtctgggaccgtggacaaattcaagatggtatttgagaccaaatcaagccggaggatgggaaccctcgtcgcatcattcgtcgccctttttctgctggtttactacttgaccaggtagaagacatgacatgctggaaatggtcatctcatcatctgcgtaccgtgccgtatagatagataccctccgtcctgagtgccaaagtatatgttgatgtgggtgtttcgtcatctctgcactgcccaacacaagtacagcgtgcgtgctgggtcgatcctatgctctcttgttgcaggattcaagtttgttgttgtccgttccttccctttggcatgtcatgtgtatggtatttagtagcatatgtggctgtagtcctttttaaaaaaaaaaaacaaaaaaactgcataaagaagctttgattgagc

SEQ ID NO: 260354 - DNA, 435 bp, Zea mays
ctttcacttcacaactattctgtatgcacccttcgtctattgactcttatgtccaactcctatattggctattttatgcactttgcgcactaccgtagcaccagaacttctctctttgatggcattgaggagggtggaatcagggcaacatcctattcttcccatgagattgatgagcaagaaaatgatggagcgattgatggattgcaggatcgtgtcagcattctcaagcggttgtcaggcgatatccacgaagaggtggagactcataacagaatgctggaccgaatggtacacttgcccccatcctttgcttgttgtaagatctgaatctactatcctactcacgtggacaaattcaggggaacgatatggatacttcaaggggttttctgtctgggaccgtggacaaattcaagatggtatttgagacca

SEQ ID NO: 260355 - DNA, 278 bp, Zea mays
gcgcgtacattccttttcctcctcctcccctttgcggcttctcgcagcgctgcgaatcccaatccgcaccgatccgacgcgaatcgatcgagtggcagggggcagcactaatcgaatcgagactagcgccatgaacccgagaggctatcgtagcaacagaacttctctcttcgatggcattgaggaggggtggaatccgagcaacatcctattcttctcatgagatagatgcgcaagaaaatgatggagctattgatggactgcaggatcgtgtcagc

SEQ ID NO: 260356 - DNA, 1181 bp, Zea mays
tgctcacgcgtccgggagaagggggtgttctgagacgagctggacacacagaggcatcggttgaccttgccatgctggctggattacctcctgttgctgtcctttgtgagattgtggatgatgcagatggttccatggctcgcctgccaaagttgcgtgtctttgctgaaagggagaacttgaagattatatctattgctgacttgattaggtataggaggaaaagagacaggctagttgaacgcgcttctgttgcacgcttgccttcgaaatggggcaatggccatggatattgctacagatctgctattgatggcatcgagcatcttgccatggtgaaaggtgatattggtgacggccaagacattttggtgagggtgcactctgagtgcctcacaggcgacatttttagatccgcaagatgcgattgcggtgaccagcttgcgatggcaatggagatgattgagaaggctggaaggggtgtattagtttatctccgtggacatgaaggaaggggtattggtctgggccacaagcttcgtgcttataacttacaggatgatgggcgtgatactgtggaagctaatgaggaacttggtcttcctgtggactcacgggaatatgggattggcgcacagatattgcgggatctaggagtccgttcaatgaagctgatgactaataaccctgcgaaatatagtggtctcaagggctatggattgagcattgcgggcagggtgcccttgattacgccaattaccagtgagaaccgtaggtacctggagactaaaagaacaaagatgggacatgtatatgggttggccaatgcgcaggccaaccaagcaaatatggcagccagagcacagaagagaatcattaggcccccaagcatgtttccattattattccagcaatccagcttcgtggcacaaaagagtgatatgattcttcgtttggggagttcctgaaatcttctccccctatatttccgtagattctttcgcaaaaaagccgatatttcggtagatcgatttcttcaattgtaacggtaggttttaaggtggctaatctctactacttattaagttagcaatagtagcctgcctttttgtgttctgccgtgtagtctctgacaggtagggcccgcttgctcctgcgtgtatgctcccggtttattccgt

SEQ ID NO: 260357 - DNA, 1411 bp, Zea mays
  unsure (1)..(1411): unsure at all n locations
cccacgcgttctcccacgcgtccggcggccctgcctccccatgttcgcatggtcacgcccacggccgcaccaaccaccagccccgatttcctcctaatcaatcacacccccaaaccaaaacccaaacagcacttctcctgcaatcgccgacgtcgccggaggttcgccggccggagcagcgccgacggttgttttgcccctccctcgtccggcccagcagcccaggcgagcatgccttcgattgcgccaccgtcttcctccgtcgctgccctcacccgccaaccggtgcaattcttcaaagggtgcagtgtatccaaggagacaaagggaccggtccgcagtttcttcactgcaaattcaaagagcaccaaggtgaaatcagcgggcttgaaagtagcatcatccttcaaaaatgatggtggttatccagctggcggtgtctcttggaaggacgacactctattgccaaaaagcacaaccattcgtggccaggaccatccggttgctgaccctgtactcccaatggattccatgattacgccaganatcctctctgctaatgtggaacgtgttatagacatgtttgcagatgatgacactgatactgaacttgatttggatagcccgacagagggcttcgcatcaattgcagaacccattgaggacatacctcaaggaaaacttgtgattgttgttgatgatgaatcaagggaaaatgaaggagatctgataatggctgcctccttggttaccccagaggctatggcttttatagtaaggcatgggacaggaattgtttgtgtcagcatgaaagaagatgatctggaaagactgagccttcctttgatggttaccacaaaagaaaatgaggagaagctatgcactgctttcactgttacagtggatgcaaaagagggcacaactactggggtatctgccaaggacagggccaaaacggtcatgactcttgcatctcctgactctaagcctgaggacctcaaccgccctggtcatattttccctttgaaatacagagaagggggtgttctgaaacgagctggacacaccgaggcatctgttgaccttgccatgttggctggattacctcctgttgctgtcctttgtgaaattgtggatgatgcagatggttctatggctcgcctaccaaagttgcgtgtctttgctgaaaaggagaacttaaagattatatctattgctgacttgattaggtataggaggaaaagagacaggctaattgaacgcgcttctgttgcacgcttgcctttgaaatggggcaatgtccatgcatattgctacaaatctgttattgatggcattgagcatattgccatggtgaaaggtgatattggtgacggccaagacattttggtgagggtgcactctgagtgcc

SEQ ID NO: 260358 - DNA, 1174 bp, Zea mays
gccatgttggctggattacctcctgttgctgtcctttgtgaaattgtggatgatgcagatggttctatggctcgcctaccaaagttgcatgtctttgctgaaaaggagaacttaaagattatatctattgctgacttgattagatgagttgaattaccaaaacttcagcttctggtacctgacatgttgctactaagacagtagtcagcatctagctagcatttcaattaccattgaacagttttctcttcgattatttcataattatgctgaaacagtgtttgctggtaaaaagaaagaaaaaagaagctgaaagtgttttcaggcagatgcctacattttttttctctctatcctagttgtaacatatgattgaaagtgatgtacttaatattgttgcaagaatcatattaatacctatggctggttatgtacacgcctcttcagtgttcttatgtgctgttgctggtgatccttgagatattgactgctatgctaacaaattttatctgttgcaggtataggaggaaaagagacaggctaattgaacgcgcttctgttgcacgcttgcctttgaaatggggcaatgtccatgcctattgctacaaatctgttattgatggcattgagcatattggcatgatgaaaggtgatattggtgacagccaagacattttggtgagggtgcactctgagtgcctcacaggcgacatttttggatccgcaagatgtgattgtggcgaccaacttgcgatggcaatggagatgattgagaaggctggaaggggcgtattagtctatctccgtggacatgaaggaaggggtattggtctgggccacaagcttcgcgcttataacttacaggatgatgggcgtgatactgtggaagctaacgagccgcgggcgcgtcctgtggactcacgggaatatgggattggcgcacaggtaagactgagttatctctcaagttacggtggaacctttctccacaacacttcctttctgctgaagtctgcttgtatagggaagttgtatcatatatctttctagagccttcaacatgaatttacttggaggcactgaagaatttcatgcctgttgcagctctgaaactgtgatgtacatagaatgaagtaaccctatcgtgccgtgaataaggccctggaatttcggt

SEQ ID NO: 260359 - DNA, 380 bp, Zea mays
aagagtgatatgattcttcgtttggggagttcctgaaatcttctcccccgatatttccgtagatgcttgcgcaaaaaagccgatatttcggtagatcgatttgttcttcaattgtaactgtaggtttcaaggtggctaatgaacggtaggtttcaagatggccagtaatgatatacacggagttagtcgtcatattgtactgtgttgagttttacgacttcatcgccttggtgtggttgtcctgatggagttgtgatcgaacggtgtggcttttcgctgccctttccttcacccactaaaaagcatagaatgtggagaattttaccttgagccattatagaagtttataatactttatgtgccacgaaaaaaaaaagaaa

SEQ ID NO: 260360 - DNA, 322 bp, Zea mays
aattctttcgcaaaaagcggatatttcggtagatcgatttgttcttcaattgtaactgtaggtttcaaggtggctaatgagtaatgagcctaataatgaacggtaggtttcaagatggccagtaatgatatacacggagttagtcgtcatattctactgtgttgagtttacgactttatcgccttggtgtggttgtcctgatggagttgtgatcgaatggtgtggcttttcgctgccctttcctccacccactaaaaagcatagaatgtggagaattttaccttgagccattatacaagtttataaaactttatgtgccccg

SEQ ID NO: 260361 - DNA, 604 bp, Zea mays
cccactcgtccgcccacgcgtccgagaaagcaaaggaggttcaggctgagaagaagaaggagagggctaagcagaagaaggagcagattgagtcagtcaagaagtggaggaagcagaggcaacaagggggattcaccaagggaaatgatgatgcaccagaccttagttttgaaggagaagaaggatttaaacaatctaagaaaaggagacctggtgtttctcctggtgacaggtctggtggtcttgctaagcgaggtaaagaaggaaagaacaggagggcaaaggattccatgtttgggcacggtggtcgtaaagggctgaagaagcaaaacaccgctgagaccactaatgatttcagaagctttaaccaggggggtcggtctcaaaacaagaagagaaagaggttttgaacttttgatggatatagtaagaatttgggtgagtctcaaaaccagatgaggaagaagttttgaacctttgctgttattactattcccccctgcggcattattttgttatggtgtgtgccagaatgaaaaattagcttgtattagtctagagaagcatttcaaacacaagggcttatgtcttgctttatctgata

SEQ ID NO: 260362 - DNA, 1061 bp, Zea mays
cacgccgctcggaatcggagcttgcatccgaccgcgagcaagcggaccaaatcctcctccatattctatcgcgtgcacgcatctggccgcctcgaccctcggcggcggcggcggcgacggcgacgacgacgatggggctggagatggaggcgatggcggggtcgatcggcgtgtcggtgcccgtgctccggttcctgctctgtttcgcggccaccatcccgacgggcctcctgtggcgcgcggtgcccggcgccatggggcgccacctctacgcggggctcactggtgccacgctctcctacctctccttcggggccacctccaacctcctcttcgtcgtgcccatgacgctcggttaccttgccatgctcctgttccgccgccacgccgggctcatcaccttcctcggcgccttcggcttcctcatcgcatgtcatgtgtactacatgagcggggatgcgtggaaggagggaggcattgatgcaactggagctttaatggctttaacgctgaaagtcatttcgtgctcaataaactacagtgatggtatcttgaaggaagagggtttacgcgatgctcagaaaaaaaaccgattgactaagcttccttctctaattgaatatcttgggtactgtctctggtgtgggagccactttgctggaccggcatatgagatgaaattttatgaaaaggaggactaagaaaaggattatgggcattccccaactccttccgccattgttacctactttgcgtgctctagttcaggctggtatatgcatggggttatatttatacctgtcacctaaatttccactctcacggtttagtgagcccctatattatgaatggggtttttggcaccgactcttctatcagtacatgtcaggctttaccgctcgttggaaatattactttatatggtcaatttcagaagcctcaattatcatatctggtctaggctttactggttggtcggaatcttctcccccaaaagccaaatgggatcgtgcaaaaaatgttgatgtattaggtgttgaattagctggaagttcagttca

SEQ ID NO: 260363 - DNA, 394 bp, Zea mays
gagggtttacgcgatgctcagaaaaaaaaccgattgactaagcttccttctctaattgaatattttgggtattgtctctgttgtgggagccactttgctggaccggtatatgagatgaaagattatcttgaatggactgaaaggaaaggaatatgggctagcccaactccttcgccattgttacctactttgcgtgctctagttcaggctggtatatgcatggggttatatttatacctgtcacctaaatttccactctcacggtttagtgagcccctatattatgaatggggtttttggcaccgactcttctatcagtacatgtcaggctttaccgctcgttggaaatattactttatatggtcaatttcagaagcctcaattatcatatctg

SEQ ID NO: 260364 - DNA, 737 bp, Zea mays
taccatgacgtccgctaacgcgtccgcctctctcccttcgtcaccatcacatccagccagccaacaaaaatgtcgcgcgtcacagctgcggtgctcttctacatcctcgccgttgctgccctcagcgcggccgaggccccggcagagtcaccgaaggaaggcagtgctgccaaggcacctgagtctgccaagagaactgctgcccccgctgaagcacccgaagccgcatccacccccgtcgccgccgctgccccatcgccgtcgtctaggaagtctggtccagctaccgcgccagccaccgcctctacacccccttcttccacggacgaggagttgagcccttccccgccagcatccaccgccgcggcgtcccctgcggctgagggaccggctgctgatgactccgccggtgctgctgcccttggaagtggagctgccatcgccggcgttgccgctgctgttgctaccatgatcttcttctactaaactcaccgacgatggtcgtgtcgcggtgagacattagggtggacacgtaattggctgtgctgtaatcgctctcgtctggtggggagggagggaccaagtgtttctttgctttgctcacttcgtttgctcttgtaacattatggggtcaaccgttatgtaactaatggatttgattaatccggtctctaaaaatattataaaaaaaagtaatattaaaatatttattaaaaatttatatataaaaaaataaa

SEQ ID NO: 260365 - DNA, 339 bp, Zea mays
cccggccctctcctttcgtcaccatcacatccagccagccaacaaaaatgtcgcgcgtcacagctgcggtgctcttttacatcctcgccgttgctgccctcagcgcggccgaggccccggcagagtcaccgaaggaaggcagtgctgccaaggcacctgaggctgccaagagaactgctgcccccgctgaagcacccggggccgcgtccacccccgtcgccgccggctggcccatcatcgtcgtctaggaagtctggtccagctaccgcgcccaggcccaaccccgggggcccccccgtttcccccctttaaaaaacccccacaaaaaccccccccccc

SEQ ID NO: 260366 - DNA, 938 bp, Zea mays
cggacgtgtgggcggacgcgtgggcggacgcgtgggcggacgcgtgggcggccaggactgccagcccgatctcgcgtcgaacgatgtgaaagaactcctttcttctacgcggacggattcctctcgtctcgatcagctcgcttcgtgacttctctctcctctcgatcgattgcttcctccaccgaggcgggggaaagcgccgcccagatcgccgtaggcaagcggcgatcactccagctttgagcataagtttctgcagggaggctcgtgaagtcagtagtcgtatctggcagtggcagcacagcgcaccatggaatggctgagctggagaacggtgtgttgtttatcagtgctgtgcaccgtgctgttcttgcgcccggtcgagggcattcgctttgtgatcgatagagaagagtgcttctcgcataacgtggagtatgagggggatactgtccatgtatccttcgtcgtcatcaaggctgacaccccgtggcattacagcgaagaaggcgttgatcttgtggttaaggatcctaatggcgctcaagtccgtgattctcgagataagactagtgataagtttgagttcatttttcatataaaggggtacatggcttttgttcactaataatcccgttcccagaaactttttacttttctttctttttgtcattttttattctttagaatttttcctatttattattttgacactttttagctattttatttttttaggtatttcattttcgtttgtagattttttttggttatcttcctatgtttttttatttttttgtttttatttctcttgtttttttttagtattttttttttttttctatttattctgtatcctagttttttttttttgttgcttttttcattttcttttttttttttttaattttattttttttttttttcctttttttatt

SEQ ID NO: 260367 - DNA, 1065 bp, Zea mays
cccacgcgtccggttcgcttcgtgagtcatctttatctcctctcgatcgatcgcttcctccatcgaggcggtaaagcgccgcccagatcgccggaagcaagcggcgacctcaccagctccgagcagcagcagggaggctcgtggaaccattagtcgttttctggcagcggcatggaggggctgagctggagaacggtgtgttgtttatcggtgctctgtgccgtgctgttcttgcgcccggccgagggcatccgcttcgtgatcgatagggaagagtgcttctcgcataacgtggaatacgagggggatactgtccatgtatccttcgtcgtcatcaaggctgacaccccgtggcattacagcgaggagggcgtcgatcttgtggttaaggatcctaatggcgctcaagtccgtgattcccgagataagactagtgacaagtttgagttcatagttcagaagagaggcgtccatcgcttctgcttcacgaacaaatccccatatcacgaaacgatagacttcgatgttcatgttggccatttttcatatttcgagcagcatgccaaagatgagcattttgcaccacttttcgagcaaatagccaagttagatgaggcactttacaatatccagtttgaacagcactggctagaggcccaaactgaccgtcaagcaatattgaacgagaacatgagcaggagggcagtccacaaggcactcttcgagtcggcggcactgatcgcggccagcgtcatccaggtctatctcctgcgccggctcttcgagcgcaagctggggacgtctagggtttaaggctccactggtatccaactctcccttgtagtagccaccatgatcgtatcgacataaccgttaatggtcgctagatcagctaatactgcttccttgtgggctttagttacatgtaatcttttgtggtgccacagatgagaactcttcggatttaaaccgtcaatctttcagccttcattttgtctctcaaaaaaaaaaaaaaaaaagagaacaacaaggctctctgtacagaataggagattttcttaaaaa

SEQ ID NO: 260368 - DNA, 458 bp, Zea mays
ctcgggtttaaggcaacagtagccaacttgcccttcgcagccaccatgatcacaccgacataaccgttacgaattcgaatggttgctagatcagctaaataccacatgtttgtggacttcagttacatgtaatattttttttgtgattccacagatgagaactcttcaaagtttaaaccgtcgatttagccttaaaaaaaaaaaaaaaaaaaaaaaaaaaaaaaaaaaaaaaaaaaaaaacaaaaataaagagctagaaatggattaacaacttaaatgagttccaaaaaccttgaaaaccgtattgaaaaaagaaaagaagggtcttctgagcaagttctggggttgaaagggggccttttcttaagattaagttcattgtcccattatttgatatgctttgttctttaacggtgtaaaaaaaaaaatttctgtgtctgccttttagattggtgaaa

SEQ ID NO: 260369 - DNA, 479 bp, Zea mays
cccttgcgtccgcggacgcgtgggctcgtggcgggacggatgacatccccaaaaccctaaccacgcgacgctcgccgactcgccgtcacagccgcacctcaaccggagtcgaagcgccattgatgaactccgagcctgccgtcgccgcagctagcgatgcacaagctcctcccacgcgccgcctccttcctcgacgcagccgccgccgccgccgcggcccccctgctgctctccttcccacgcatgcccacgctgcgcctgtctggtagcccgttcgtagccatgcgtcctggcggaaaccctagccgcatccgtgcgccgccgtggctgcactgtgacgctgggtggaggcggggactctgttccgccgaggctgcgaggcgcgggggcgatacagaggagatggagaaggatggcggggggtcgctcggcgccggagaggaagcagaaatgtcggaatgatgcgctggtgggaaggg

SEQ ID NO: 260370 - DNA, 1404 bp, Zea mays
ggcatcgccaagcagagctaccagctgcgcatctggctcagcgccgtgatcgcgaacatggagacgtgcgtcgacgggttccccgatgacgagttcaaggccaaggtgaaggagtcgttcaacgatgggaaggagctcaccagcaacgccctggcgctcatcgagaaggggtcatcgctcctctccgtgctaaagggcggctcgaaacgacggttgctcgaggaggagggagaaccggcgcaagccgggcctgcactcgacaaggacggcatcccggagtgggtgcccgacagtgagcggagggtgctcaagggcggcggcttcaagagcacactcacgccaaatgtggtggtggcgaaggacggcagcggcaagttcaagaccatcaacgaggcgctcgccgccatgccaaagacctacgacggaagatacgtgatccaagtgaaggagggagtgtacgaggagtacgtgaccatcaccaagactatgaagaacgtgaccctcttaggtgacggctccaagaagtccatcgtcaccggcaagaagagcttcgccgacgggatcacgactttcaagacagcaaccttcactgcgcaaggcgacgggttcatggcgatcgggatggggttccaaaacacggccggcgcggagaagcaccaggcggttgcgctgctggtgcagtcggacaagtccatcttcctcaactgcaagatggacgggttccaggacacgctgtacgcgcactccaaggcgcagttctaccgcaactgcatcatctccggcacggtggacttcatcttcggcgacgcggcggcggtgttccagaactgcatcctggtgctgcgccggccgatggacaaccagcagaacatcgcgaccgcgcagggccgcgcggacgcgcgcgaggccacggggttcgtgctccagaagtgcgagttccaggccgaggccgcgctccgggactccgggcgcccgcccatccgcaactacctgggccggccgtggcgcgagtgctcgcgcaccatcgtcatggagtcggagctcccggacttcatcgacaaggcggggtacttgccctggaacggcgactttgggctcaagacgctgtggtacgccgagttcggcaacacagggcccggcgccaacacggcggggcgcgtcagctgggccgggcttcaagaaggtgatcagcaaggcggacgccaccaagttcacggtcgagaacttcctgcacgcccagccatggatcgatcccacaggcacgccggtgaagtacgacctgttcacatgaggacccggggatcggatcggagggttcggttcacggtggccggtgggggatcggaggccagcgcggcagcatgcatgcccttggttcgttgaatcgttcggtttcggtcctcc

SEQ ID NO: 260371 - DNA, 1432 bp, Zea mays
cggcccagagtttccggggggcgacccacgccactctcctcgtcgcatcccccctcctcatcttcgcagcgcgggcggcggcaatggcgatggcctccacctacgcgccgggcggaggcgcgcgggcgctcgcgcagggtagatgcagggtccgcggtcccgcggggctgggcttcctcggcccctccaaggccgccggcctcccccgccccctcgccctcgccaggcggatgagcagccccgtcgcggtgggcgccaggctgcgatgcgcggcgtcgtcgtcccccgcggcggcgcggcccgccacggcgccgcgcttcatccagcacaagaaggaggccttctggttctaccgcttcctctccatcgtgtacgaccacgtcatcaatccgggccactggaccgaggacatgcgcgacgacgcgctggaacctgccgacctcttcagccgccacctcacggtcgtcgacgtcggcggcggcacggggttcaccacgctcggcatcgtcaagcacgtcaacccggagaacgtcacgctgctcgaccagtccccgcaccagctcgacaaggcccggcagaaggaggccctcaagggggtcaccatcatggagggcgacgccgaggacctcccgttccccaccgactccttcgaccgatacatctccgccggcagcatcgagtactggccagacccacagcgggggatcaaggaagcctacagggtcctgagatttggtgggctagcttgtgtgatcggcccggtctacccgaccttctggctgtcccgcttcttcgccgacatgtggatgctcttccccaaggaggaagagtacatcgagtggttcaagaaggctgggtttagggatgtcaagctgaagaggattggaccgaagtggtaccgcggtgtccgaaggcatggcctcatcatgggctgctccgtcacaggcgtcaagagagagcgcggtgactctcccttggagcttggtcccaaggcggaggatgtcagcaagccagtgaatccgatcaccttcctcttccgcttcctcgtaggaacgatatgtgctgcctactatgttctggtgcctatttacatgtggataaaggaccagatcgtgccaaaaggcatgccaatctgagtgaagggaatgagctgcatggaagagaggatagccaacgtctgaattttactcttctctatattagacgcttcctgcctgttttgtattaatacctcttgttttccttctgctatttacttcttgcactgctgttcctgtttgtggtaattaataatactaagacatcgatgttctcctgtttcttgagcatgactggttgcagtggaacctcgaaattaaattatatgatgtgtaatttagttggttaaattatataaatttgtatagtttatatggttcctaaaaaggagaaa

SEQ ID NO: 260372 - DNA, 2277 bp, Zea mays
  unsure (1)..(2277): unsure at all n locations
ggaactgtagagtttgtggggggtacataagatatggtgcggcctttcttccgncaggctatttgtttattattgatgtgcctgcatccgcagtacagagtggatagcttgaggttgttgcaaagaccatcaaatcatgccttgatgaacttccaggctttccacgaacacagattggattcttaacctttgacagcaccttgcattttcataccttccaggctcctttgtcccagcctcaaatgatggtggttactgatttggatgatgtttttctgccattgcctgatgacctcttggttaatttggtcgactcaagacatgttgtggaatcatttcttgatagcttgccaaatatgtttcatgacaatgtaaatgtggagtctgctcttggtccagcacttaaagcagctttcatggttatgagtcaaattggggggaagttgcttgtcttccagagtactttgccatctcttggtattggtcgtttgaggctacgaggagacgatgtccgtgcatatggaacggataaggagcatactctgagggtaccagaagattccttctacaaacagatggctgctgaattcacaaaatatcagattgcagtggacatattttctttcagcgataagtactcagatatagcatctttaggatctttggcgaagtatactggtggtcaggtgtaccactatgcatctttccaggcacctacacatggtgacaaacttaaacttgagcttagtagggaccttacacgagagactgcatgggaatctgttatgcgtatcagatgtggaaaaggagtacggttcacaacctatcatggtcatttcatgctacggtccacagacctgttagcccttccagctgttgactctgataaagcttttgcaatgcaactgtcgctagaggagacattaatgaccacccagactgtatacttccaagtggcgttgctatatacatcatcctctggtgaaaggcgtatcagggtccacacagcagctgcacctgtggtcacagatcttagtgaaatgtatcgtcaagcagatactggtgccattgtgtcattgttgggtagaattgcgattgaaaattcactgtctgataagctggacagtgtccggcagcagttacagttgaagctcgttaaaagtttgaaggaataccgcaatttatatgttgtacaacaccggataggcgggagactgatttttcccgaatccctaaggtttttgccattgtacatcctggctatctgcaaatctcttgctcttcgtggaggttatgcagatgtttctcttgacgaacgatgcgctgctggtttatgcatgatgatattgcctgtaaaaaggctgctcaattttatctatccttctctgtacagagttgatgaagtactcacaatggaaccaaacaaggttgatgatgtttcattgaagcgattgccattaacgtttcagtgtttagatactggaggtttgtacctccttgatgatggcttcactttcctagtgtggttaggtaggatgctcccgcctgaacttgtgaacaacattcttggagtgagcttggcaaacttccctgacctatcaaagattgtattgagagagtgtgacaatgaattgtcaagaaatttcatgaaaatactaagatccctgcgggagaaggatccttcctatcaccagctatgccgtgtggtgcgacagggtgaacagccaagagaaggctatctgcttctatctaaccttgttgaggaccagatggctggaacaagtagttacgttgattggatacagcaaattcaccgtcaaacgcaaagctaatgacgaagaaccaacaggaagcgatgcttggaatttttgccttagtgtaaactgctgcaggatgtagattcagctgctgccggttccaaatcaatctcgcaaccccgtggcagatcttgttcagaagccagcgacccaacatgccggcttgtaagcagcattggctggcaaaaaaaaatgctgttaatatctgtccttgtgattattctatttttgcacagtgagaatacagctgttgtatcggaataagtaggcagcaataccgtgggtattatacaactgggttcgtgtagtggcctgtgcgtttattaatcgcgttctttcctcatctggattcagttacttgccatttgggttataaatagttcatcgtgtaaactaactttttggctactttagtctgtttgtaatgggagatctcatttaatttaactggcattccatt

SEQ ID NO: 260373 - DNA, 2471 bp, Zea mays
ggcacagacagctttagtaatataattggttctgtgtattaccctgatggagagactgcaaaggacttggcccttgagcttgtcgaaaatgggctggcaaagtatgttgagtggagtgccaatatgcttgatgttgaagtaaaaataaagctgaagaatgcagaacttcaggctaaaaaggatcaattgagaatctggacagggtttaagccaccagcgacaaactcgaagcccattcatgaccagaaatttaatggaaaagtggtagaggttgtaagtggggattgcattattgtggctgatgattctgctccatatggaagtccttcagctgaacgtcgggttaatctgtcaagcattagggctcctaagttgggcaatgctcgtacagatgtgaagcctgaccattttgctcgtgaagctaaggagttcttacgcacgaggttgattggcaaacaagtggctgttgaaatggaatactctcgaaggatcagcactgtagatggacagagtgttgctccaacagcaaacatggctgatacaagagttttagattatgggtcagtttttctgggttcaccatcacagactgatggagatgacacatcttctgctccgagctctgctagccagcctggagttaatgttgctgagcttttgctctcacgaggctttgctaaaacatctaaacacagggattatgaggaaaggtcacactattatgatgctctattagcagctgaatcacgcgctgagaaagcaaagaaaggcgtgcattctcagaaagaatctcctgtgatgcatataacagatttaacaactgtatctgcaaagaaggccaaagattttcttcccttcttgcagcggaacagaaggcattctgccatcgttgaatatgtttttagtggccatcggttcaaactaacaattcccaaggagacttgtagtatcgccttctcattatctggtgtccgttgtcctggtaaaggcgagccatactcagacgaagctattgctttgatgaggagaaggatacttcaacgagatgtggagatagaggttgaagcagttgataggacaggaacgttcataggttctttgtgggagtccaagaccaacatgggctctgtgcttctggaagctggacttgccaagctgagttcatttggcttggataggatgtcagatgctcatgtcctaacaagagctgaacagtttgcgaagcaacaaaagattaagatatgggagaactatgtcgagggtgaaaatgcttcaaatggatccacacctgaatctaaacaaaagcaaattctcaaggttgttgtcacggaagttcttggtggtgggaagttttatgttcagacaatgggtgaccagagggtggcttcaattcaacagcagcttgcatctttgaaacttaaagatgcaccagtcattggtgcctttaatcctgtgaagggagagatagtcctctcacaatttagccttgacaactcctggaacagagctatgattgttaatggacctcgctctgtagaatctccggacgacaagtttgaagtattctatattgactatggcaaccaagaggtggttacctacagtcgtttacgacctgtagacccatctgtttcctcgtctcctgctcttgctcagctatgcagccttgctttcataaaagtgcccagtcttgaggatgactttggtcaggaagcagcagagtatctaagtgaatgtttgctcagtagctcaaagcaataccgggcaatgatcgaagaacatgatacttctggggggaaatcaaaaggacaaggaaccggaaatgttctcattgttactcttgttgatgcggagacagaaagtagcataaacgctaccatgcttgaggaagggcttgcccggctcgaaagaagcaagagatgggacactagggagaggaagacggctctccagaacctggaacagttccaggacaaggcaaagaaggaaaggctgcggatttggcagtacggagatgttgaatcggacgaggacgagcaggccccgcctgcaaggaagcctggaggtcgtcggtagagactgggcagtgtaaggctgcagtctggcatgctatgaaagttttggacaaccacaaatgttggactctgccgggagttatagatgaggacttactgaggggtaccgtatttatattcggttagaagaagggaacttagcgaggcgaaatcacttttgatattccgtttttacaggcgaaactttctctgttttagcacttttgatattccgtttttacatcgcaagttataaggttaaagatgcattgtttctttttctctcaacttaataaggttgtgtctatgcgctgcggttctttgtagtcagaatataatattgagaagtgcagtgaattaagttaaggattgcatttaaacaaaaaaaaaaaaaaaaaaaaaaaaagaaaaccaaaa

SEQ ID NO: 260374 - DNA, 726 bp, Zea mays
gacccacgcgtccgcccacgcgtccgctttggtcaggaagcagctgagtatctaagtgaatgtttgctcagtaggtcagagcaatatcgggcaatgattgaagaacgtgatgcttctgggggaaaatcaaagggacaaggaaccggaaatgttctcattgttactcttgttgatgcggagacagaaagtagcataaatgctaccatgcttgaggaaggccttgctcggcttgaaagaagcaagagatgggacactagggagaggaagacggctctccagaacctggaacagttccaggagaaggcaaagaaggaaaggctccggatctggcagtatggcgatgttgaatcggatgaggacgagcaggccccagctgcaaggaagcctggaggtcgtcggtagagctccccaaatgtgagactctgctgggagttatagatgcaacttagagggtaccttatttattcggttagaaaacagaacttagcgaggcgaaactttctcggtttgagcacttttgatattccgttttttacttcgtaagcttataaggttaaaggtacattgttttttctctgaacacaataaaggtcgtctatgcgctgcagttctttgtgtagtcagaatataatatttgttgatactaagaaatgcagtgaattaaagttaatattgcatttaattattctcgtgcaataaaaaaaaaaaaaaaaaaaaaaaaaagaa

SEQ ID NO: 260375 - DNA, 270 bp, Zea mays
aatctgtcaagcattagggcccctaagttgggcaatgctcgtacagatgtgaagccttagggcccctaagttgggcaatgctcgtacagatgtgaagcctgaccattttgctcgtgaagctaaggagttcttgcgcatgaggttgattggcaagcaagtggctgttgagatggaatattctcgtaggatcagcaccgtggatggacagagtgttgctccaacagcaaacattgctgatacaagagtattagattatggttcagtttttct

SEQ ID NO: 260376 - DNA, 727 bp, Zea mays
cgtctcctgctcttgctcaactatgcatccttgctttcataaaagtgcccaagcctgggggataactttgttcaggaagcaccaaattttttaagtaaatgtttgttcagtacctcaaatcattcccggccatgatccaagaaccttattctctcttgggggagaattcaaaggacacaggagacccgaaatgttctctatatggactctctggtgaatccagacacagagtgtcatatacactatcatgctctaggaaaagctcttgcccctctcaagagacgcgagatatgacactctagagagagggacacctctctgaacctggaacagttccaggacaaggcaaagaaggaaaggctgcggatttggcagtacggagatgttgaatcggacgaggacgagcaggccccgcctgcaaggaagcctggaggtcgtcggtagagctccccaaatgtgagactctcctgggagttatagatgcatcttagagggtaccttatttattcggttaaaaaacagagcttagcgaggcgagactttctaggtttgagcacttttgatattccgttttttactttgtaagcttataaggttaaaggttccttgttttttctctgagcccaataaaggtcgtttatgggttgcagttctttgtgtagtcagaaccccatttatgttaaaaaaaaacaaaacaataaattaaaaaaaaaaaaaaaaaaatata

SEQ ID NO: 260377 - DNA, 242 bp, Zea mays
cacgatatttactttacacgacgcgttggcgctgctgaggagacggatactacagcgtgatgtggagatagaggttgaagcagttgacagcaccggaacattcataggttcgttgtgggagtccacgaccatccatagggctcaattgctccgagtgccagtattccacagtacctcccaccagttacttcaatgggcttcgaacatccagccgtgcaagcctaaaggcgacaactagcgct

SEQ ID NO: 260378 - DNA, 149 bp, Zea mays
aattaaatgcaatattaactttaattcactgcatttctttgtgtagtcagaatataatatttgttgatactaagaaatgcagtgaattaaagttaatattgcagttctttgtgtagtcagaatataatatttgttgatactaagaaatg

SEQ ID NO: 260379 - DNA, 456 bp, Zea mays
cggacgcgtgggtgcccatggccctctcgagctcgctccgtggcctggtggccctgattccaccggccctccctcccgctcgcccgagcggggcagcggcggcggccccggcaccccgcgcgcggggtcggacggggagaggggcgggggtcgtggcgctggcggcggcgctgccgtcggacgcgcagtggctggagcggctgccggagaagaagaagcctctgtacacgcacagcctgccgtgcatcgaggcgtggctgcgcagcctcgggttcacgcagtcccgcgaggaccccgccgtctgggtcgccgagaagccgctctggcacgcgcgtctcaggcctcgatgtcaccgacctccacatcaggtacttgaaaaagcggcccgggaaatcttgacaaggatatggagaagaagggttagctacgccctaagcagagaagacatcgagaacg

SEQ ID NO: 260380 - DNA, 632 bp, Zea mays
gaaagcctatcagccagtgaagcccactacggtccgaccgatgtctcgctgacgtcacctcgtgttcaccagttaccaccggagtccggagtgaagcgcaggtcgggttcgcttttttcctcggcttcttctctctcgtccatcaacccagggggaaggagcgggagggagcgagccatggtagtcagcacgttcaatggacccgggattgggatcgggttcggtgtcggctgcgggttcggcgtcgggtgggggttcggaggaatgcctcttaacatgttcggcttgggtatcggtgggggttgtggatttggtcttggactaggatggggctttggaaatgcttttggttgtcagtatcgatcttcaagagttcagttccaaggcattgaatttcagaagaaggcggaaggagatgatgcaccaaaagttgtttcaccggagcttgctcaaaagtctcgtccttatggctagtatgcctgctaccataaaatcccagagactgttctgtgtgctgagtcccagtttaattacatacctacgtgttccttgttagtaatgttatgctacacttattttcgtttctgttgtaaccaggatgaagttaatcgatgggattttcaattaggaag

SEQ ID NO: 260381 - DNA, 834 bp, Zea mays
cccacgcgtccgcccacgcgtccgcccacgcgttcgcggacgcgtggggcgaaggcataagccatcagtttccaccgcacgtccgcaccccctctccggcgtgccgacggtatccatggcggcggtggtgcgcggcgtcttgaggggcatcaaggagaagggactcaccaacttcatccgcgacgtccgcgacgaaggatacttcaaatgccttctggacgggaaccttttgcaaacgaaaatccacaatattggcgcaacacttgtaggagttgacaagtttggtaacaaatattatgagaaactacatgacactcagtatggaaggcataggtgggtagaatatgcagagaaaggtcgttacaatgcatcccaagtgcctcctgaatggcatggatggctgcaccacatcacagatagcactggggataagctgctgaaccagaagactgctaggtaccttgtagagcacaagcagaactactccggtgagggtgaagagctgatctaccactccaaggggcatgctttgaatccgggacaaagggactggacgaggtatcagccctgggagccaaagaaagagcaagcctagctattgagtacattgtggggaagctactgaaatgtttgcatggcgttgggtcaggtatcaccgagctgaatggactctgagttatgtttgaactgggcccaaataatgttgtcctgaatatcaatatcatctttggacatgaagtgttgttgttactgctgtaaaaacagctttggggaaaatctcatgcatttgttactaccttcggttatatttgaaagtatacgagaccattatat

SEQ ID NO: 260382 - DNA, 446 bp, Zea mays
ttgatttgaccgaatagccaacaagccaaggcaggcagcagcgaccagtttgcaccgcaccccttttcgcccttcgttccggtcaggcgagttagtcgtcgtgccgccggtgccctgtatccatggcggcggcgttgcgtgccgtcttgagaggcatcaaggagaaggggctcaccaacttcatccgcgacgtccgcgacgaaggatacttcaaatgccttctggacgggaaccttttgcaaacgaaaattcacaatattggagcaacacttgtaggagttgacaagtttggaaacaaatactatgagaaactacatgacactcagtacggaaggcataggtgggtagaatatgcagagaaaggtcgctacaatgcatcccaagtgcctcctgaatggcatggatggctgcaccacatcacagatagcactggggataagctgctg

SEQ ID NO: 260383 - DNA, 1553 bp, Zea mays
ggacctggcgaccgcgacgccttccgcagccccgacccaaaccctagccccctccaccgtactgccaccgtcatggccgaatcatctgccgctgccgaggtcgggtcgccagcttcgttgccaccactggtcgccgaggaggccgatgccgccgcgatggaggaggccgcggcggtcgcgaagaggtggcccgggtggcccggggacagcgtgttccggctggtggtgccagtgctcaaggtcggaagcataatcgggcggaagggcgagctcatcaagcgcctcgtcgaggagaccaaggccagggtccgcatcctcgagggacctgtcggcgccaccgagcgtatcgttttggtttctggaaaagaagatccaggcttggagctacctccagccatggatgctctcatgagagtttttaagcgtgtcactgggataacagatggagctgctgagggcactcaggccgctgctactcctggtgtatgtgctgcccgattgttggttcctggagctcaggcaattaacctaattgggaagcaaggtgccactatcaaagcaatccaggagagcacgggtgctacaatacgggtaatatcagtagatgaacatgagagaccattttatgtaactgacgatgaaaggatagttgagatacaaggcgatacagagaaagttctaaaagcactgcaagcagtttcaaatcatcttcggaagtttttggttgaccatagtgtacttccattatttgaaaagactaatactacagtgagccaagatcgcaatggtgatggttggagcgatatgtcacgtccttcaattggttctgcacaagtgaatcaactaccttcagtggtagatgactatattcttccagtgaagagggatactttgtatcttgaacgagaacctttggtagatcataacattcatcgctcaggcgtatcactttatgggcgggatccagccttgtcaacactacgaccacctggaatacatggtgctggcccgctacttacacagataacccaaaccatgcaaatcccacttacctatgctgaagacattataggagttaaaggagcaaatattgcgtacatacgagctaatagtggggctgttgttacaattcaggagagtttgggtagtcctgatgatattactgttgaaataaaggggacatcttcacaggtgcaagctgcacagcagctcatccaggactcgttggctgcacaccgagaacctgtcaggagcagttatgtgggggcaggattagattcagtatataggtccagctactcacaatatggcagctcaatctatccctcgtcatcactgccgtcttattctagcatcgatgatgttagtagatacccgtcttcaggccttggtggctatggttcgagttaccggtactaatagcagtttgtcctcgggcttgaatgcttgatggcaccagtgatcattgtatcccagtacccagacttcagggtctgctttgttttgacaaacaattaattggttttatagattttcgccactcatggattcag

SEQ ID NO: 260384 - DNA, 478 bp, Zea mays
cggacgcgtgggcggacgcgtgggcgcgacgccttccgcagccccgacccaaaccctagcccctccaccgtagtattgccaccgtcatggccgaatcatctgtcgctgccgtcaccgcagccgaggtcggggcgccatcttcgttgccaccgctggtcgccgaggaggccgatgccgcgatggaggaggctgcggcggtcgcgaagaggtggcccgggtggcccggggacagcgtgttccggctggtggtgccagtgctcaaggtcggaagcataatcgggcggaagggcgagctcattaagcgcctcgtcgaggagaccaaggccagggtccgcatcctcgagggccctgtcggcgccaccgagcgtatcgttttggttttctggaaagaagatccaggcttggagctacctccagccatggatgctctcatgagagtttttaagcgtgtcactgggatagcagatggagctgctga

SEQ ID NO: 260385 - DNA, 970 bp, Zea mays
gcaccaagttctgagacttctgcacaatgccccaccctactgaatggtcttgatcaatatttatgtgatgacaacaatagtgacgacacggaatgcactgagattgttggtgatgtatcccaagaggatatctcaggcagctctgattcctctggtaatgcaaccacagaagataaatttgagaatagtggactgccaccaccaaaaccaccaaaattccaaaaaggtgttttgaggacaaactgtatagattgcttggatcgtacaaatgttgctcagtatgcacatggtttagctgctcttggacatcaattgcatgcgcttggttttatagaatctccagaactaggtttagaagctcccttggcccatcatttgatgcacttttatgagatgatgggtgacacacttgctgtacagtatagcggttctgctgctcataacaaggtattctctgcaaagagaggtcacttgaagctttttattcagtcacaagagttctttaggacacttcagcggcactacagcaacacctgtatagatgctaacaaacaggctgctataaacttgtttttgggatacttccagccacagcaggaaaaacctgcactgtgggagttagaatcatctgctgggaagcataacaataatctttttgatggccacccaagtacattgaaaagagtaaaatcagatggcaccattcttcatgaaagtaatgcttctatatctggctctggtcgttgccataatgaacagttaagtgcatcgcagcctgatgtccagaatgggtttcaattcccaacttcagaatccgattcacttcatgaaaatgacatttcatcagcttggggaagtggagtagcacacctaaggtatactcctacagcctctgacgtgcttcatgtcccaagagctaaagttgaatattgccatgattctggtgattcaaaccttttggatcttgaat

SEQ ID NO: 260386 - DNA, 957 bp, Zea mays
gggccgccggggtgacgttcttgtgggtgctgggcgcctccgcgctcggtgcctccacagcagtcgtcacgtcgtacctgggggtgcaggagggcgccggccactacgcgctcctcgtcaccacgtccctcctctcggtgctcctcttcaccttcgatctcctctgcggtgcgctcggcggcaccagcttcaaccccaccgacttcgccggctcctatgccgccggactcgacagccgctccctcttctcggttgcgctccgcttcccggcgcaggccgccggcgctgtgggcggcgccctggccatctcggagctgatgccggcgcagtataagcacacgctcgcgggcccctcactcaaggtggatccccacaccggtgccctagccgaaggggtgctcaccttcgtcatcaccctgaccgtgctctgggtcatcgtcaagggcccccgcaacgtcatcctcaagaccttgctgctctcaacctccatcgtctccgtcatcctcgcaggcgcagagtacacggggccgtctatgaacccagctaatgcatttggctgggcatatgttaacaattggcacaacacatgggagcagctgtatgtgtactggatatgcccctttattggggccatgcttgctggatggatatttagggcggtgttcctaccaccggcacctaagcccaagaccaagaaagcatgattactcgtttatggatgctggtttagaagaaataagaaaacagaggaaggtcacataagctcatgtgctgtacttgatttcctcaacttcccacaaactgggtgttgtgctctgttacttatttctcatcaataatttatgtgtacttgtaattttgggctaaaaaaaaaaaaaaaaataataaaaataaaaattttaattattattctaattttaaaaaaaaaattacaatttcttacaaaaaaaagggcgg

SEQ ID NO: 260387 - DNA, 2335 bp, Zea mays
atttaaggctgaatctacctcgcctgcgtggccctcccgcgcgcgcgatcgcgtctgtccgctacccctccccgaccagatcgctacgagacgccgcgcgatccgacccaggccgacgccgacgacccctctcgccgccggcggccatggcgtacggcgaccgcgtcaccaccttcgaggactccgagaaggagagcgagtacggctatgtccgcaaggtctctggacctgtggttgtggctgatggaatgggtggtgctgccatgtatgaacttgttcgtgtcggacatgataacctcattggggaaattatccgtcttgagggcgattcagctacaatccaagtttatgaggaaacagctggactgatggttaatgaccctgtattgagaacaagaaagcctctttcagttgaattgggacctggaattcttggaaacatttttgacggtatccagcgacctctaaaaaccatcgctattaagtcaggagatgtgtatattcctcgtggtgtttcagttcctgcccttgacaaagatgtattgtgggaatttcagccaacgaagctaggtgttggagatgtcatcacaggtggagatctatacgctactgtttttgagaacacattgatgcagcaccatgttgctcttccaccgggttctatggggaaaataagttacattgcaccagctggccagtacaacctgcaggacacagtgctagaattggaatttcagggcataaaaaagaaatttaccatgcttcagacatggcctgtgcgttcaccaaggcctgttgcatcgaagcttgctgcggatacacctcttctgacagggcagcgtgtactggatgcactattcccctcggttctgggaggcacttgtgctattccaggagcatttggctgtggtaaaactgtcattagtcaggcactttccaagtactccaattccgaagctgtggtttatgtgggctgtggtgaacgaggaaacgagatggctgaggttctcatggactttccccagttgacgatgacattgcctgatggccgtgaggagtctgtcatgaagagaacaacactggtggctaacacatcaaacatgcctgtcgctgctcgtgaagcttccatttacacaggaattacaattgctgagtatttccgtgatatgggctacaacgtcagtatgatggctgactccacctcccggtgggctgaggcattgcgtgagatctcagggcgtttggctgaaatgcctgctgatagtggttacccagcttacttggctgcacgtttggcatccttttatgaacgtgctggtaaggtaaaatgtctgggaagtccagacaggaatggcagtgtcacaattgttggagccgtctctcctcctggtggtgatttttcagaccctgttacctccgcaaccctcagtattgttcaggtcttctggggtttagataaaaagctcgctcaaaggaagcatttcccatctgtgaattggctcatttcctattcgaaatactccaaggcccttgagtccttttatgagaagtttgatccagatttcattgatattaggacaaaagcacgtgaggtgttgcagagggaggacgatctaaatgaaattgtgcagcttgttggtaaagatgcgctggcagaatctgacaagattacgctggagacagcaaagcttttgagagaagattatttggcacaaaatgcattcaccccatatgataagttctgcccattctacaaatccgtttggatgatgcgcaatattattcacttcaacacattggcaaatcaggctgtggagcgggcagctggtactgatggccaaaagataacatacggtgtcataaagcatcggttgggggatctattttatcgcctagtatcccaaaagttcgaggatcctgcagaaggcgaagaagctttggtcggcaagtttaagaaactgtatgacgaccttaccactgggttccgcaacctagaagatgaggcacggtgaactgctgtagattttgtgtaagacaataatggctgccaaatgttttataaggtacggaagttgtagattgagaccatgtatgagaattttccccaccgctactcatctctttgccaccactattttagtcatcagtgctggatgggcaccctgtttatttcgacgtaccctttattgctagcattgtaataagcgatgggcatgcttgtagttgaataagtacaatgtccatgtattcaaacatcagcgtcatgtttatttgtttgttaaaaaaactatgttgcctttttggaaaaaaaaaaaaaaaaaaaggtggttgaaaa

SEQ ID NO: 260388 - DNA, 1361 bp, Zea mays
cccacgcgtccgcccacgcgtccgcccacgcgtcacaccaaggagagtacgtggaggagcagccatggcttcatcggtggccgccgcggcgagcacattcctgggcacccgcctggcggacccggcgccacagaacgggcgcatcgtggcccggttcgggttcgggttgggcggcaaggcgaagcctgctccgaagaaggtggcgaagacatcgacctcctctgaccggccgctgtggttccccggcgccgtggcgcccgactacctggacggctcgctggtcggcgactacgggttcgacccgttcggtctcgggaagcccgtggagtacctgcagttcgagttggactcgctggaccagaacctggccaagaatgaggccggcggcatcatcggcacccggttcgagtcctccgaagtcaagtccaccccgttgcagccctacagcgaggtgttcggcctccagcggttccgcgagtgcgagctcatccacggccgctgggccatgctcgccaccctcggcgccctctccgtcgagtggctcaccggcgtcacctggcaggacgccggcaaggtggagctggtggacgggtcctcctacctgggccagccgctgccgttctccatctcgacgctcatctggatcgaggtgctcgtgatcggctacatcgagttccagcgcaacgccgagctcgacccggagaagaggctgtaccccggcggctcctacttcgacccgctcggcctggcggccgaccctgagaagaaggagcggctgcagctggcggagatcaagcacgcgcgcctcgccatggtcgccttcctcggcttcgccgtgcaggccgccgccaccggcaaggggccgctcaacaactgggccacccacctgagcgacccgctccacaccaccatcttcgacacgttcggagggtcctcttaagcccgccattgctccgccccgtccatcgaccggccggaacgtgttcttggattaattaactacgatctctatgagcctggggatggatcaacccgtcgtgcgtggtctcgttttgtgatgagtgggagagagaggatgacaagatcgatcctttgttaatggagatctcgttaattaggagagctaccgctgggacttggtggtttgtaatatatgatccaaccagtgatgaatcaatgcattcacttgtgtacacaaaaaaaaaaaagaaaaaaaaaaaaaaaaaaaaaaaaaatgggaggccgactattaggaaccaaaactacttccgcggggaggctacgtcctatgtgttatatagggcaacctaaattgaatggactgggcgtagttttacaatagtgtgacgggaaaaaccctg

SEQ ID NO: 260389 - DNA, 1800 bp, Zea mays
cggacacgtgggcggacgcgtgggcgcgaggagagctcggagcgggagggtacgggccgtcggatgctcgcagctgccaccgccgcctacggctattttaaccccgcgctcctgccgacgccgcactcgcccccggcctcctcccgcctcccagatctcgctcgctcggcgccagttgcctcgcagtttggatcatctcatacctcggcgaagatgagggagatcctgcacatccagggagggcaatgtggcaaccagattggcgccaagttctgggaggtggtgtgcgatgaacatggcattgaccctaccgggcggtacactggcaattccgaccttcagttggagcgtgttaatgtctactacaatgaagcctcctgcggacgctttgttccccgcgctgttctcatggatcttgagcctgggacaatggacagtgtccggaccggaccctatgggcagatcttccgccctgacaactttgtgtttgggcaatctggtgctggtaacaattgggctaagggccactacaccgagggtgctgagctcattgactctgttctggatgttgtgaggaaggaagctgagaactgtgactgcttgcaaggattccaagtatgccactcccttggtggtggtactggatctggtatgggtacgctgttgatctcaaagatcagggaagagtaccctgaccgcatgatgcttacattctcagttttcccctcaccgaaagtatctgataccgtggttgagccatacaatgccactctttctgtccaccagttggtcgagaatgctgatgagtgcatggttctcgataacgaagccctctatgacatctgcttcaggactcttaagctgaccacccctagctttggtgatctgaaccatttgatctctgcaaccatgagtggagtcacctgctgcctaaggttccctggtcagctgaactccgacctcaggaagctggcagtgaacctgatccccttcccccgtctccacttcttcatggtcggcttcgcgccgctgacgtcccgtggctcccagcagtaccgggccctcacagtccccgagctcacgcagcagatgtgggatgccaagaacatgatgtgtgccgctgaccctcgccatgggcgttacctcaccgcctcggccatgttccgcgggaagatgagcaccaaggaggttgacgagcagatgatcaacgtccagaacaagaactcgtcctacttcgtggagtggatccccaacaacgtcaagtccagcgtgtgcgacatcccgcccaggggcctgtccatggcgtccaccttcatcggcaactcgacctccatccaggagatgttccggagggtgagcgagcagttcactgccatgttcaggaggaaggctttcttgcactggtacacgggcgagggcatggacgagatggagttcaccgaggccgagagcaacatgaacgacctcgtgtcggagtaccagcagtaccaggacgcgactgccgacgaggaggagtacgaggacgaggaggaggtgcaggccgatgacatgtgaggggagggctgttatcgtgtgaagccttgtggtccctagggcaagcggacctcgatgagttcggtgttccctttcgtgttgttgccatcttgctactgctagcgtacccaccctcgtggcccattccgtcgctgttgacgcatgtatttttcttgtgctatggaaccttgcttttggtacggtactatcctgctagtatgcttggcgtttgaggttcctggcgtgaaaaaaaaaaaaaaaaaataa

SEQ ID NO: 260390 - DNA, 1692 bp, Zea mays
caccaccttcctctcctcgctctccctattctggacggccgactcgcttctgtgagctaccggccttagatccagccatgagggagattctccacatccagggcggccagtgcggcaaccagatcggttcaaaattctgggaggtcgtctgcgacgagcatggtatcgatcccaccggacgctatgtcggcacctccgacctccagctcgagcgcgtcaatgtctactacaacgaggcctcatgcggccgcttcgtgccgcgcgctgtgctcatggacctcgagcctggcaccatggacagcgtccgcaccggaccgtacggccagatcttccgccccgacaactttgtcttcggacagtctggcgcggggaacaactgggccaagggccactacacagagggcgcagagctcattgactccgtgcttgacgttgtcagaaaggaggctgagaactgcgactgcctccaaggcttccaagtctgccattcccttggaggaggcactggatctggaatgggcacgcttctcatttcaaagatcagagaggagtaccctgatcggatgatgctgacattttctgtctttccctcgcccaaggtgtcagacactgttgttgagccatacaatgcaaccctgtctgtccatcagttggttgagaacgctgatgaatgcatggttcttgacaacgaagcactttatgacatttgcttccgaactctgaagctgacgacccctagctttggagacttgaaccacttgatcagtgcaacgatgagtggtgtcacttgctgcctccgcttcccaggacagcttaactctgacctgcgcaagcttgcagtcaacctgatcccgttccctcggctccacttcttcatggttggctttgcgccactcacctcgcgtggctcgcagcagtaccgtgcgctcactgtccctgagctaacccagcagatgtgggatgccaagaacatgatgtgtgctgctgacccacgccatggtcgttatctcacagcctctgccatgttccgtggcaagatgagcactaaggaggttgatgagcaaatgattaatgtccagaacaagaactcgtcctactttgtggagtggatccccaacaacgtcaagtccagtgtttgtgatatccctccgcgtggcctctccatggcctccaccttcattggcaactccacgtccatccaggagatgttccgccgtgtgagcgagcagttcactgctatgttcaggaggaaggctttcttgcattggtacactggtgagggcatggatgagatggagttcaccgaagctgagagcaacatgaacgatctggtgtccgagtaccagcagtaccaggatgccactgctgatgaggaggcggaatacgaggacgaggaggccatccaagacgagtaagggtggtttgggccctgccacatttgtacccttgtttcctttcattccggggcttgcctatggtttgcttgttgtattcgctcaagttatgcggtatgtagtagtactttcgtgcgtagcatgctgtatgctaccacaaagactttgttcacctgcactgcttgatatgccagccatggcatatgtgacgagtatttcattattttatctgcttgcttgctccaaaaaaaaaaaaaaaaaaaaaaaaagaaaaaaaaaaaaaaaaaagggcggccgc

SEQ ID NO: 260391 - DNA, 1841 bp, Zea mays
gatacagcctcactctcttcccacctctctctcccctcccctcctcagtcgtcacacacactcagccagtccgctgcctccgcgctcccccaaaacccaccgcctcgccggaatcctagccttcgccaaccagtcgccatgagagagatcctccacatccagggcgggcagtgcggtaaccagatcggggccaagttctgggaggtgatatgcgacgagcacggcatcgaccacaccggcaagtacgccggcgactccgacctccagctcgagcgcatcaacgtctactacaacgaggccagcggcggccgcttcgtcccgcgcgccgtcctcatggacctcgagcccggcaccatggactccgtgcgctcgggccccttcggccagatcttccgccccgacaacttcgtcttcggccagtccggcgccggcaacaactgggccaagggccactacaccgagggcgccgagctcatcgactccgtgctcgacgtcgtgcgcaaggaggccgagaactgcgactgcctccaagggttccaggtctgccactcgctgggaggaggtactggttcaggaatgggcaccctgctcatctccaagatcagggaggagtacccggatcggatgatgttgacattctctgttttcccgtcgcccaaggtgtctgatactgttgtggagccctacaacgcaacgctctctgttcaccagctcgttgagaacgcagacgagtgcatggtgctcgacaacgaggctctctatgacatctgcttccgcacgctcaagcttgccacaccaacctttggtgatctcaaccaccttatctctgcaaccatgagtggtgttacatgctgccttcgcttccctggtcagctgaattctgaccttcggaagcttgcagtgaacctgatccccttcccgcgcctgcacttcttcatggttggattcgctccactgacctcacggggctcccagcagtaccgtgccctcactgtgccagagctgacccagcagatgtgggactccaagaacatgatgtgtgctgctgaccctcgccacggtcgctacctcacggcatctgctatgttccgtgggaagatgagcaccaaggaagtggatgagcaaatgctgaacgtgcagaacaagaactcttcctactttgtggagtggatccctaacaatgtgaagtcgagtgtgtgcgacatcccacccatcggcctgaagatgtcctccacattcatcggcaactcgacctccatccaggagatgttccgccgcgtcagcgagcagttcactgccatgttcaggaggaaggccttcttgcattggtacacgggtgagggcatggatgagatggagttcactgaggcagagagtaacatgaatgacctggtggccgagtaccagcagtaccaagacgccacagctgaggatgaggaggagtacgaggaggaagaagaggaagatcctgctgcctaagccatcatcccaagtgcttggtaaagatatgatgtcccttgtatcgctgctagtcagcactgagtcgtttgaggtgctcgtggtgatgttaggtactagatgggtgtcattacttatgaatgcgatgttgctgtgacagaactgcatttccttttgtactatggttgtccaagttgtcattaccatgatgtgaggtagcttaactggttgttgctataccttatgcagcattttgctgaagttatcaccatgaggtgaggtagtttgagtgatttatgtggtattagagaattcaactgtgtcaagttcgtgcacgtcagtttgttcagagttttatttttttattggcgtgttatcttggt

SEQ ID NO: 260392 - DNA, 1741 bp, Zea mays
cctcacgcttccgcccacgcgtccgcggacgcgtgggcgccgcctacggctatttaaccccgcgctgccgacgccgcactcgcccccggcctcctccgcccgcatacccgatcccgctcgctcgccgccagttgtcccgcagctcggatcgtctcatacctcggcgaaaatgagagagatcttgcacatccagggagggcaatgtggcaaccagatcggtgccaagttctgggaggtcgtgtgtgacgaacacggcattgacactacaggtcggtacactggcacttctgaccttcagttggagcgcgtcaatgtctactacaatgaggcctcctgtggccgctttgtgccccgtgctgttctcatggacctagagcctgggacaatggacagtgtccgcactggaccctatgggcagatcttccgccctgacaactttgtgtttgggcaatctggtgctggcaacaactgggcgaaggggcattatactgagggcgctgagctcattgactctgttctcgatgttgtgaggaaggaagccgagaactgtgactgcttgcaaggattccaagtatgccactcccttggtggcggtactggatctggtatgggtacgctgttgatctcaaagatcagggaggagtaccctgaccgcatgatgctgacattctcagttttcccctcaccgaaagtatctgatactgtggttgagccatacaacgccactctttctgtccaccagttggttgagaacgctgatgagtgtatggttcttgacaacgaggccctctacgacatttgcttcaggactcttaagttgaccacccctagctttggtgatttgaaccatttgatctctgcaaccatgagtggagtcacctgctgcctaaggttccctggtcagctgaactccgacctcaggaagctggcagtgaacctaatccccttcccccgcctccacttcttcatggttggcttcgcgccgctgacgtcccgtggctcccagcagtaccgagcactcaccgtccccgagctcacgcagcagatgtgggacgccaagaacatgatgtgcgccgctgaccctcgccacgggcgttacctcaccgcctcggccatgttccgcgggaagatgagcaccaaggaggtcgacgagcagatgatcaacgtgcagaacaagaactcgtcctacttcgtggagtggatccccaacaacgtgaagtccagcgtgtgtgacatcccgccgaggggcctgtccatggcgtccaccttcgtcggcaactcaacttccatccaggagatgttccggagggtgagcgagcagttcactgccatgttcaggaggaaggctttcttgcactggtacacgggcgagggcatggacgagatggagttcaccgaggccgagagcaatatgaatgacctcgtgtcggagtaccagcagtaccaggatgcgactgctgatgacgatgaggaggccgagtatgaggacgaggaggagccagctgatggcatgtgaggggaggctgttaaatgtgaagcctggtgatgtcccctttcgtgttgtcgccatgttatactagtacactagcataccaccctcgtggcccattccgtcgatcgtggctgttgatgcttgtgtttccttgttctatagaaccttgcttttggtacggagctgcaatgtggattcgatccttccgtatcgctacttatgctgcgctaatttgctgaaatcaaaatc

SEQ ID NO: 260393 - DNA, 637 bp, Zea mays
cggacggtgggcggacgcgtgggcggacgcgtgggccatcctttctcattctggaataatcaaggatgtgagctctttcaaaaaataaaaaaaagggacggccgctcgcggttctgcccattctacaaatccgtttggatgatgcgcaacattattcacttcagcacgttggcaaatcaggctgtggagcgggcagctggtactgacggccataagataacatacggtgtcataaagcaccggttgggcgatctattttatcgcctagtatctcaaaagttcgaggatcctgccgaaggtgaagaagctttggtcggcaaatttaagaaactgtatgatgacctcaccactggtttccgcaatctcgaagacgaggcacggtgaactagtgtagattctgtgtaaacaaggactgccaaatgttttataagatacataaaaaactttttttgtagattgagatcatctgtaagaattattccccccgttgccccatctcttcgcccccactgttttagtcatcggtgcctaatgggcccccggtttatttcatgtaccattaattgcggccattgtaataaccaatgggcataattgtagttgaataagtccaatgtccatgtattcagcccccccc

SEQ ID NO: 260394 - DNA, 1707 bp, Zea mays
gcttctccctcctcctcgctcgctcgatcgctcccacgtcctcgcctccctccacaaaccaccaccaccatccaggatcgcagcgcggcgcgcgagagaggggtgagcaggtcgggcaagatgagggagatcctgcacatccagggcggccagtgcggcaaccagatcggcgccaagttctgggaggtgatctgcggcgagcactgcgtcgactccacgggccgctactcggggacctcctcgcagcagctcgagctcgagcggatcaacgtctactacaacgaggctgggggtggccgctatgtgccccgcgccgtgctcatggacctggagcccggcaccatggaatccatccgcgccggccccttcggcggcatcttccgccccgacaactttgtctacggccagtccggcgccgggaacaactgggccaagggccactacaccgagggcgccgagctcatcgactccgtcctcgacgtcgtgcgcaaggaggccgagaactgcgactgcctccaagggttccaagtatgccactccctgggtggcggcactggttctggcatgggcacgctgctcatttccaagatccgggaggagtacccggaccgcatgatgctcaccttctccgtgttcccgtcgcccaaggtgtccgacaccgtcgtggagccctacaacgccacgctgtccgtgcaccagctcgtggagaacgccgacgagtgcatggtccttgacaacgaggcgctctatgatatttgcttccgcaccctcaagctcaccaacccttcatttggtgacctgaaccatctgatctcggcgaccatgagcggcgtgacgtgctgcctgcggttcccgggccagctgaactcggacctccgcaagctggcggtgaacctgatcccgttcccgcggctgcacttcttcatggtggggttcgccccgctgacgtcccgcggctcgcagcagtaccgcgcgctgacggtgccggagctgacgcagcagatgtgggatgccaagaacatgatgtgcgcggcggacccgcgccacgggcggtacctgacagcgtccgccatgttccggggcaagatgagcaccaaggaggtggacgagcagatgatcaacgtgcagaacaagaactcctcctacttcgtggagtggatccccaacaacgtcaagtccagcgtgtgcgacatcccgcccgtcgggctgcccatggcctccaccttcgtgggcaactccacctccatccaggagatgttccgccgcgtgagcgagcagttcacggccatgttccggcgcaaggccttcctgcattggtacaccagcgagggcatggacgagatggagttcaccgaagccgagagcaacatgaacgacctcgtcgccgaataccagcagtaccaagacgccacagccgaggagtacgacgaggaagagcaggacggcgaggaggagcacgcctgatcgatgcaacgggattcagagtcttcgctgctgtggtacatcaattgggactataagttcctacaatcctatactacctttaagcatatgtattcatgcacttccgtatttccgttgctgctgctagcttgtgtgtgtgtgtgtgtatctacaatcgtgtgtgttagtgttttgtgatatgttgtccccgttgtccaggatttgtgcgcatgattattcaaaaaatcggcttaattgcttgct

SEQ ID NO: 260395 - DNA, 1010 bp, Zea mays
agccttcggccaagccgtccgggggacctaaacccccttttttttgaaccatgaatggggttacgtgctggcgtcgcttccctggtcagctgaattctgacctccggaagcttgcagtgaacctgatccccttcccacgtctgcacttcttcatggttggatttgctccactgacctcgcggggctcccagcagtaccgcgctctcaccgtgccagagctgacccagcagatgtgggactccaagaacatgatgtgtgctgctgaccctcgtcatggccgctacctcacggcatctgctatgttccgtgggaagatgagcaccaaggaagtggatgaacagatgctgaacgtgcagaacaagaactcttcctacttcgtggagtggatccccaacaacgtgaagtcgagtgtgtgtgacattccaccaattggcctgaagatgtcctccacattcgttggcaactcaacctccatccaagagatgttccgccgcgtcagcgagcagttcacggccatgttcaggaggaaggctttcttgcactggtacacaggcgagggtatggatgagatggagttcaccgaggcagagagtaacatgaacgacctggtggccgagtatcagcagtaccaggatgccactgccgaggatgaggagtacgaggaggaggaggaagaagaggaagagacctaagtcattctccgcagtgcttggtacagatatgatattccttgtatcgctgttagtactcgtcagtttgaggttcgtgtggtgatgcttgctaggtactagatgggtggtattgcttatgaatgcgatgttgtcgtgacagaactgcatttcattttgtattatggttgttcaagatgttatattaccatgaggcgaggtagcttgactgattgttgctatattttatgctgcagttcaagtgaaaaagaaggcagctcaaaaaaaaaaaaaaaaaaaaaaaaaaaaaaaaaaaaaaaaaaaaaaaaaaaaaaaagggga

SEQ ID NO: 260396 - DNA, 1374 bp, Zea mays
ggccgcttcgtgccgcgcgctgtgctcatggacctcgagcccggcaccatggacagcgtccgcaccgggccgtacggacagatcttccggcccgacaacttcgtcttcggccagtctggtgcagggaacaactgggccaagggccactacacagagggcgctgagctcatcgactctgtgcttgacgtcgtgaggaaagaggcggagaactgcgactgccttcaaggattccaagtttgccattcccttggaggaggcacaggatctggaatgggcacccttctcatctcaaagatcagggaggagtaccctgatcggatgatgctcactttttctgtctttccctcacccaaggtttcagacactgttgttgagccatacaatgcaacactgtcagtccatcagttggttgagaatgctgatgaatgcatggttcttgacaatgaggcactttacgacatttgcttccgaactctgaagcttacgacgcctagctttggagacctgaaccacttgatcagtgcaacaatgagtggagtgacttgctgcctccgcttccctggacagctgaactcggacctgcgcaagctcgcagtcaacctgattccgttccctcgcctgcacttctttatggtcggctttgcgccactcacctcgcgtggctcgcagcagtaccgtgctctcactgtccctgagctaacccagcagatgtgggatgccaagaacatgatgtgtgctgctgacccgcgtcatggccgctatctcacagcatctgccatgttccgtggaaagatgagcaccaaggaggtggacgagcaaatgatcaatgtccagaacaagaactcgtcctacttcgtggagtggatccccaacaatgtgaagtccagtgtttgtgatatcccgccgcgcggcctctccatggcctccaccttcattggcaattccacctccatccaggagatgttccgccgtgtgagcgagcagttcactgctatgttcaggaggaaagctttcttgcattggtacactggcgagggcatggatgagatggagttcactgaagctgagagcaacatgaacgatctggtgtctgagtaccagcagtaccaggatgccactgccgatgaggaggagtacgaggacgaggaggaggtccatgacgagtaaggtgatcttggaccctgctgcatattgtaccgtctctggacctggctttctttcaagctggagcttaggtttggttgttgtattcgaacatgctatgatgggtatgatgtagtagtactttcgtgggtagcatgctgtatgctaccacttgccctctttcacctaaaaaaaaaaaaaaaagggcggccgctcgcgatctagaactag

SEQ ID NO: 260397 - DNA, 1738 bp, Zea mays
cccacgcgtccgcccacgcgtccgcccacgcagtcccgatcgcaaccgccccccacattccccagagttagcccgatcagatcgtttttccctcgaggtgagagtaagatgagggagatcctgcatatccagggagggcagtgcgggaaccagatcggctccaagttctgggaggtggtgtgcgatgagcacggcatcgacccgacggggcggtacatggggacgtcggacgtgcagctggagcgcgtcaacgtctactacaacgaggcttcgtgtggtaggttcgtgccgcgcgcggtgctcatggaccttgagcccggcaccatggacgccgtccgcacgagcccctacggccagatcttccgcccagacaacttcgtcttcggccagtccggcgccggcaacaactgggccaaggggcactacaccgagggggcggagctcatcgactccgtgctcgacgtggtgcgaaaggaggccgagaactgcgactgcctgcaaggcttccaggtctgccactctctcggcggcggcaccggctccggcatgggcacgctgctcatctccaagatccgcgaggagtaccccgaccgtatgatgctcaccttctccgtgttcccgtcgcccaaggtctccgacaccgtggtggagccctacaacgcgacgctgtccgtccaccaactggtggagaacgccgacgagtgcatggtgctcgacaacgaggcgctctacgacatctgcttccgcacgctcaagctcaccacacccagcttcggcgacctcaaccacctcatctccgccaccatgagcggcgtcacctgctgcctccgcttcccggggcagctcaactcggacctccgcaagctggccgtcaacctgatcccgttcccgcgcctgcacttcttcatggtggggttcgcgccgctcacctccaggggctcccagcagtaccgcgccctgacggtgccggagcttacccagcagatgtgggacgccaagaacatgatgtgcgccgcggacccgcgccacggccggtacctgacggcgtccgccatgttccgcggcaagatgagcaccaaggaggtggacgagcagatgctgaacgtgcagaacaagaactcctcctacttcgtggagtggatccccaacaacgtcaagtcgacggtgtgcgacatcccgcccacggggctgaagatggcgtccaccttcatcggcaactctacctccatccaggagatgttccggcgcgtgagcgagcagttcaccgccatgttccgcaggaaggccttcttgcactggtacacgggggagggcatggacgagatggagttcaccgaggccgagagcaacatgaacgacctcgtgtccgagtaccagcagtaccaggacgccaccgccgacgaggagggcgagtacgaggacgaggaggagggagatctccaggactagaataggctgcttcacattcagtcaccgtcagtctatgaaaaactaatcatttgctgcttttcgtcgtcgtcgtagtagtagtaggtcggtaatcatctgtcgtgggtgtgtttcgtttctatcattaatcaggattagtagtagctgctgctgctgcgggcacaacacaaggggggataggaactgcaataccctgttgcgctttggttgtttcttggaaccgatgttatgttaaattctcaacgctcagtgtctgaacactatttgctcaaaaaaaaaaaaacgcgtc

SEQ ID NO: 260398 - DNA, 359 bp, Zea mays
tggtgtctgagtaccagcagtaccaggatgccactgccgatgaggaggagtacgaggacgaggaggaggtccatgacgagtaaggtgatcttggaccctgctgcatattgtaccgtctctggacctggctttctttcaagctggagcttaggtttggttgttgtattcgaacatgctatgatgggtatgatgtagtagtactttcgtgggtagcatgctgtatgctaccacttgccctctttcacctagctgcttgatttgctacttgtccgacctcttgtgtggctggacctcaatcccatcgctcttgccagaaaaaaaaaaaaaaagggggccgctcgcgatctagccacgcgtcc

SEQ ID NO: 260399 - DNA, 449 bp, Zea mays
cccacgcgtccgcccccgacaccaccaccggacgctagctcaccaccaacctcagcacatcgaggagaagaggagtggccaatggcttcgtcggtggccgccgcggcgagcacattcctgggcacccgcctggcggacccggtgccgcagaacgggcgcatcgtggcccggttcgggttcggcggcggaaagcccaaggctgccgtcccgaagaaggtggcgaagacgtcgatctcctctgaccggccgctgtggttccccggcgccgtggcgcccgactacctcgacggctcgctggtcggcgactacgggttcgacccgttcgggctcgggaagcccgtggagtacctgcagttcgaactggactcgctggaccagaacctggccaagaacgaggccggcggcatcatcggcacccggttcgagtcctccgaagttaattccacccg

SEQ ID NO: 260400 - DNA, 491 bp, Zea mays
  unsure (1)..(491): unsure at all n locations
cggacgcgtgggcggacgcgtggggcaaatcaagcaagagatagacaagcagctccagtccaaccaagaacaaacaacaaccgcagcaagaggagaggaggatcaccggtcgcgaccaaattctcccagagacggtcggaaatgaggagccaagcgctgttcttcctcacgatcgcccttctcaccgtgctcgcgcgatccagcaacaggcaccaccaccaccaccactcccacgttcaaagcagagggcaggaggcagcatcaggaggatgaggaggaggggagctggcgagcggggaaaggcccanaccncatgatgctgaccttttccgtgtttccgtcgcccaaggtgtgcgacaccgtcgtggagccctacaacgcgaccctgtccgtgcaccatgtggtggagaacgccgacgagtgcattggtcctgacaacgaggcgctctatgatatttgcttgcgcaccctcaagcttaccaacccttcat

SEQ ID NO: 260401 - DNA, 532 bp, Zea mays
taaacacacccacccggtcgctccgctccaccgctccgccctcgaccgcgcgcggagcctcctcaacccttcggacctccgcctcccaccgcttccgtagcctcgcctcgcctcgcctcgcctcgtccttctcctccgtcccaaccatgagggagatcctgcacatccagggcgggcagtgcgggaaccagatcggtgccaagttctgggaggtgatctgcgacgagcacggcatcgaccacacgggcaagtacgccggcgactccgacctccagctcgagcgcatcaacgtctactacaatgaggccggcgggggccggttcgtcccgcgcgccgtgctcatggacctcgagcccggcaccatggactccgtgcgctccggcccctacggccagatcttccgccccgacaacttcgtcttcggccagtccggcgccggcaacaactgggccaagggccactacaccgagggcgccgagctcatcgactccgtgcttgacgtcgtccgcaaggaggccgagaactgcgactg

SEQ ID NO: 260402 - DNA, 454 bp, Zea mays
  unsure (1)..(454): unsure at all n locations
cgctgagaagaaggatcggctgcagctggcggagatcaagcacgcgcgcctcgccatggtcgccttcctcggcttcgccgtgcaggccgccgccaccggcaaggggccactcaacaactgggccacccaccttagcgacccactccataccaccatcttcgacacgttcggaggatcctcttaagcccgccattgctccgctccgtccatcgatcgaaacgtggtcttgaattaactatgatatctctatgagcctggagatggatcaacccgtcgtgcgttgtttcattttgtgatgaatgggagagagggtatgggacaagattgatcaacccgtcgtgcttacgtctcgttaattaggagagctaccgctcggatttggtgatttgtaatatatgaaccagtgatgaataaatgcattcacttgtaaaaaaaaaaaaanaaaaaaaanaaa

SEQ ID NO: 260403 - DNA, 408 bp, Zea mays
ggctttcttgcactggtacacgggcgagggcatggacgagatggagttccccgaggccgagagcaacatgaacgacctcgtgtcggagtaccagcagtaccaggacgcgactgccgacgaggaggagtacgaggacgaggaggaggtgcaggccgatgacatgtgaggggagggctgttatcgtgtgaacccttgtggtcctagggcaaacggccccccatgagttcggtgttccctttcgtgttgttgccatcttgctactgctagcggaccccccctcgtggcccattccgtcgctgttgacgcatgcacttttcttgtgctatggaaccctgcttttggtgcggggcgcccttatgctgcctgctagtatgcttggcgtttgaaaaaaaaaaaaaaaaaaaaaga

SEQ ID NO: 260404 - DNA, 862 bp, Zea mays
gtgaatgcattgattcatcaatggttgaatcatatattacaaaccaccaagtcccagcggtagctctcctaattaacgagatctccattaacaaaggatcgatcttgccatcctctctctcccactcatcacaaaacgagaccacgcacgacgggttgatccatccccaggatcatagagatcgtagttaattaatccaagaacacgttccggccggtcgatggacggggcggagcaatggcgggcttaagaggaccctccgaacgtgtcgaagatggtggtgtggagcgggtcgctcaggtgggtggcccagcccacgcgtccgcccacgcgtccgcccacgcgtccgcccacgcgtccgcccacgcgtccgccaccttcatcggcaactccacctccatccaggagatgttccggcgcgtgagcgagcagttcaccgccatgttccgcaggaaggccttcttgcactggtacacgggggagggcatggacgagatggagttcaccgaggccgagagcaacatgaacgacctcgtgtccgagtaccagcagtaccaggacgccaccgccgacgaggagggcgagtacgaggacgaggaggagggagatctccaggactagaataggctgcttcacattcagtcaccgtcagtcatgaaaaactaatcatttgctgcttttcgtcgtcgtagtagtagtaggtcggtaatcatctgtcgtgggtttgtttcgtttctatcattaatcagcattagtagtagcagctgctgctgcgggggcacaacacaagggggggataggaactgcaataccctgttgcgctttggttgtttctggaaccgatgttatgttaaattctcaa

SEQ ID NO: 260405 - DNA, 953 bp, Zea mays
gctcacagttcatcaacttgttgaaaacgctgatgagtgtatggtcctcgacaacgaagctctctacgacatctgcttccgcactctgaagcttgctacacccactttcggtgacctgaaccatctcatctctgcaaccatgagtggtgttacctgctgcctgcggttcccaggccagctgaactcggacctccggaagcttgcggtcaacctgatccccttcccccgcctccatttcttcatggtcggcttcgcgccgctgacgtcaagggggtcccagcagtaccgcgccctgaccgtcccggagctgacccagcagatgtgggacgcgaagaacatgatgtgcgcggctgacccgcggcacgggcgctacctgacggcgtcggccatgttccgcgggaagatgagcaccaaggaggtggacgagcagatgctgaacgtgcagaacaagaactcgtcctacttcgtggagtggatcccgaacaacgtgaagtcgagcgtgtgcgacatcccccccacgggcctggcgatggcgtccacgttcgtcggcaactccacctcgatccaggagatgttccggcgcgtcagcgagcagttcacggccatgttccggcgcaaggccttcctgcactggtacaccggggagggcatggacgagatggagttcaccgaggccgagagcaacatgaacgacctggtggccgagtaccagcagtaccaggacgcgacggcggaagaggaggaggagtacaaggagggagatgaggtggctgcctgatccaccggcacattgtggggttgtgcacattgtggggttgtgttattattgttgctcttcatctggtgtttaaaatgttactgtgatgctgctgcgaaactgacgtaagttttaactgtggaattgattacttctagatcgtggatccgtcgatctgatattagatgtattctat

SEQ ID NO: 260406 - DNA, 555 bp, Zea mays
ctgtattcttgttggtctccagcccatcctagtgttcatgtcaaaggttgatgggaagcttcagttcagttccatccgtgcttactttctgcgtgtggtcttttattgcccctggtgttttatttctctgcccttgacaaatatgccttgtgggaatttcagccaacaaagctaggtgttggagatgtcatcacaggtggagatctatacgctactgtttttgagaacacattgatgcagcaccatgttgctcttccaccgggttctatggggaaaataagttacattgcaccagctggccagtacaacctgcaggacacagtgctagaattggaatttcagggcataaaaaagaaattgaccatgcttcagacatggcctgtgcgttcaccaaggcctgttgcatcgaagcttgctgcggatacacctcttctgacagggcatcgtgtgctggatgcactattcccctgggacatgggaggcactggagctattgcaggaggattatgatcgagctaggcttggactggttggtgactttccaagtactccaat

SEQ ID NO: 260407 - DNA, 293 bp, Zea mays
aggaggcggaatacgaggacgaggaggccatcccaagccaagtaagggtggtttgggccctgccacatttgtacccttgtttcctttcattccggggcttgcctatggtttgcttgttgtattcgctcaagttatgcggtatgtagtagtactttcgtgcgtagcatgctgtatgctaccacaaagactttgttcacctgcactgcttgatatgccagccatggcatatgtgacgagtatttcattattttaaaaaaaaaaaaaaagggcggccgctcgcgatctagaaccgg

SEQ ID NO: 260408 - DNA, 462 bp, Zea mays
ttcttgcactggtacacgggcaagggcatggacaagatggagttcaccgaggccgagagcaatatgaatgacctcgtgtcggagtaccagcagtaccagaatgcgactgctgatgacgatgaggaggccgagtatgaggacgagggggacccacctgttggcttgtgaggggagcctgttaaatgtgaagcctggtggttctagggcccccgttgagttttgatgccccctttcgtgttgtcgccatgttatactattacactagcatccccccctcgtggcccattccgtcgatcgtcgctgttgatgcttgtgtttccttgttctatagacccttgcttttggtacggggatgcaatgtccatccgatccttccgaatcgccccctatgctgcgctaatttgctgaaatcaaaatctccagagctaaaaaaaaaaaaaaaaaaaaaaaagggcggccgca

SEQ ID NO: 260409 - DNA, 648 bp, Zea mays
cccacgcgtccggcgacatcccgcccaggggcctgaagatggcggggaccttcgtggggaactccacctccatccaggagatgttccgcagggtgagcgagcagttcaccgccatgttcaggcgcaaggccttcctgcactggtacaccggcgaggggatggatgagatggagttcactgaggccgagagcaacatgaacgatctggtcgccgagtaccagcagtaccaggacgccaccgccgacgaggagtacgaggacgaagaggaagaggagaacgtggcagaatagccatgacctccggtgccctttttcagggccaccgcatccgacaggttgtgtctctgtgaatgagtttgtttgtttcttttctctgcttctcgtggcttgcgtcatggattggtaattggttaagcttccgctggggttgcgcctgtgcttcgactgcgggcactgtaatgtaactactgtaatgggtcaaagtaggcttcacactggtggtgctggtctcctgtaattcctgacgagtatttgtagggagtgattttatcttcttcttttgtgtgaaaaaaataaaaaaaagggcggcaaaaaaaaaaaaaaaaaaaaaaaaaaaaaaaagggcggctgctcgcgatctagaactagt

SEQ ID NO: 260410 - DNA, 615 bp, Zea mays
  unsure (1)..(615): unsure at all n locations
ggagtacgaggaggaggaggaagaagaggaagagacctaagtcattctccgcagtgcttggtacagatatgatattncttgtatcgctgttagtactcgtcagtttgaggttcgtgtggtgatgcttgctaggtactagatgggtggtattccaccaattggcctgaagatgtcctccacattcgttggcaactcaacctccatccaagagatgttccgccgcgtcagcgagcagttcacggccatgttcaggaggaaggctttcttgcactggtacacgggcgagggcatggacgaaatggagttccccgaggccgagagcaatatgaatgccctcgtatcggagtaccagcagtaccaggatgcgactgctgatgacgatgaggaggccgagtatgaggacgaggagccagctgatggcatgtgaggggaggctgttaaatgtgaagcctggtgatgtcccatttccgtgttgtcggttgtcgccatgttacactattacactagcataccaccctcgtggcccattccgtcgattgtcgctgttgatgcttgtgtttccttgttctatagaaccttgcttttggtaaaaaaaaaaaaaaaaaagggcgaaaa

SEQ ID NO: 260411 - DNA, 429 bp, Zea mays
tcactcgtccgcccacgcgtccggtgtgccgcagacccacgtcatggccgctacctgacggcctctgccatgttccggggcaagatgagcaccaaggaggtagacgagcagatgataaatgtgcagaacaagaactcgtcctactttgtggagtggattcctaacaacgtcaaatcgagcgtttgtgacatcccccctcgtggcctctccatgtcttccaccttcgtgggtaactccacctcgattcaggagatgttccggcgtgtaagtgagcagtttacggccatgttcaggaggaaggccttcttgcactggtacacaggcgagggcatggatgagatggagttcactgaggctgagagcaacaggagcggactcgtctccgagtatcagcagtatcaggatgctacagccgatgaggaggccgac

SEQ ID NO: 260412 - DNA, 554 bp, Zea mays
gtacggtcggaatccgggtcaccacggaccacacggtccgggacctgggagcgggcgagacgcgtgggtctactacaatgaagcctccatgcggacgctatgttccccacgctgttctcaaggatcttgagcctgggacaatggacagtgtccggaccggaccctatgggcagatcttccgccctgacaactttgtgtttgggcaatctggtgctggtaacaattgggctaagggccactacaccgagggtgctgagctcattgactctgttctggatgttgtgaggaaggatgcatctagctcgtgactctctgaccccaagcgacccaagccagggtggtactggaggtactggctcgtgcctatgcaatccgatggagggcgagatcagggacgagtaccgtgaccgtatgacgctggcattctcagtcatcccctcaccggacgcatctgataccgtggttgagccatacaatgccactctttctgtccaccagttggttgagaatgcagatgagtgcatggttctcgataacgaactcctgtatgacat

SEQ ID NO: 260413 - DNA, 275 bp, Zea mays
ctagctcaccaccaacctccgcgcgtccgggagaagaggagtggccagtggcttcgtcggtggccgccgcggcggagcacattcctgggcacccgcctggcggacccggcgccgcagaacgggcgcatcgtggcccggttcgggttcggcggcggaaagcccaaggctgccgtcccgaagaaggtggcgaagacgtcgatctcctctgaccggccgctgtggttccccggcgccgtggcgccggactacctcgacggctcgctggtcggcgacta

SEQ ID NO: 260414 - DNA, 377 bp, Zea mays
tcccacgcgtccgcccacgcgtccgcgggagggtacgggccgtcggatgctcgcagctgccaccgccgcctacggctattttaaccccgcgctcctgccgacgccgcactcgcccccggcctcctcccgcctcccagatctcgctcgctcggcgccagttgcctcgcagtttggatcatctcatacctcggcgaagatgagggagatcctgcacatccagggagggcaatctggttgccacattgccctccctggatgtgcaggatctccctcatccacggagggcaatgtggcaaccagattggcgctgagtcctgggaggtggtgtgcgatgatcatggcattgaccctaccgggcggtacactagcaattccga

SEQ ID NO: 260415 - DNA, 581 bp, Zea mays
tcgatcaccggacgccttgtccgtttggcgtttaatttggactggcgaagaaaatgcaggcccccctgctgctgctgcacgtccgtcaaatagattggtagggagcccagagggtgatgggaatggcgaaggagcagcacttcgtgcttgttcatggcgaagggcatggggcctggtgctggttcaagctccgctggctcctcgagggcgctggccaccgtgtcacgtgcgttgacctggccggaggcggcgtcgatcctaccgaccccaacaccatccggtccttcaagcagtacgacaagccgctcatagacctcatctccaacttgccagacggagagaaggtgattctgatcggacatggcgctggagggctgagtgtgatccatgcaatgcatgaatttgttgacaggatcggtcaagcatttttcgtggccgccacaatgctgccgtttggatttcaagccgatgaagataagaacgatgtaatgtttttgaagaatttgtttgccatctttttaaaccacatagacccttctagcaaatgataaaaaaatatagagtacacatcaaacaaacat

SEQ ID NO: 260416 - DNA, 1004 bp, Zea mays
  unsure (1)..(1004): unsure at all n locations
cccatttgtccgcattctttgattatgcactaatcttatatgtgtttctgcattgcattcatttaccaaatctgtaagatgcattctaccatttcatgatgtcccttatttacatgtgtaaaatgatccacatcaataaaagtcaccccttcgtattatgaagcaaaataacaagcttacatgctattactgatatacttcctgttcttacagccagggtctcttggcctacgcgtagacagactccaggaagatgtcgatcttctgcttctccatcaccgtcgttatcatgcagcctgctggaatgccacagcgggacaggagcatggcgatgagcaggcgcaagatgactgcaagtggcgccggatcccgacgttcggcgactggaacctgcgggacgacatgcccgtcacccaatactgtcatgcaggcacttattcatcagagttccgtcgacataaaaggactacgacgaggatctgttcaaggtgtcccagtgttcctgccaagccctacaactttaagaaggttttgggtggatttgtaggttggtcatgtgaattgcatcaaacagggagtcagggacgatattgaagttgtggctgtggatgacccttttgttgatgctaagtacatggccgttcgcaggatagaggtggtgaggcttctaagcatactaaatttctgcatcatgatgaatcatatgtgatttgtttcgattcaactggatagaagaatcagttgctgatttgatggagtcgcagcttgcttggcggacatagggtctgttgcatggattatggtttatgtgccagcgcccagtggtagacagtgtgattcaatgtgcttgctgttcatctgtccaaaactgctaatgtagcttctgaaaatggatgacatgctgggcacttgctcactggggtcttgattttnattttgaaaagttctgttcaatctccttgtcaaatttgaatgtgtatgcgtgcttggtctgtggaaaatat

SEQ ID NO: 260417 - DNA, 556 bp, Zea mays
aacacatataagattagtgcataatcaaagaatcattaccaaatctgtaagatgcattctaccatttcatgatgtcccttatttacatgtgtaaaatgatccacatcaataaaaatcgtcccttcgtgatctgaagcaaataacaagcttacatgctattactgactccaggaagacgtcggccttctgcttctccatcaccgtcgttatcatgcagcctgctggaatgccacagcgggacaggagcatggggatgagcaggcgcaagatgactgcaagtggcgccggatcccgacattcggcgactggaacctgcgggacgacatgcccgtcacctaatacttgcaagcagggacttcttcatcgttgtgctgccggcagagaacgacgacgacgaggatctgttcaacgtgccccagtgttcctgccaagccctacagctacaagaacgttttgggtggatttgtaggttggtcatgtgaattgcatcaaacagggagtcacggacgatattgaagttgtggctgtggatgacccttttgttgatgccaagtac

SEQ ID NO: 260418 - DNA, 1199 bp, Zea mays
cccacgcgtccgcccacgcgtccgcccacgcgtccgcccacgcgtccgtcctccccttacctcgcctcgtctcctctccttgagatctccagggtacgagcgcattcgcgattttggccgcctccgccgccgtccgggaagatggcgggtctgggaaaggcgatgtacgcggtggggttctggatccgggagactggccaggccctcgaccgcctgggctgccgcctgcagggcaagtacttcttccacgagcagatttcaaggcatcgcaccatcatgaatatctttgacaaaacccctcatgtgcataaagacgcatttgttgctccaagtgcatcccttattggtgatgttcaagtcgggtcaggagcttccatttggtatgggtgcgtcttaagaggggatgcaaacatcatacaaattggatctgggaccaatatacaagacaattctcttatacatgtggctaaatctaatctaagtgggaaggtctttccaacaaccattggtaataacgtcacagtaggtcatagtgctgtgttacaaggatgcacggttgaggatgaggcttttgttggcattggggcaaccctattagatggtgttgttgttgaaaagcacggaatggtagctgctggagccctcgtacgacagaatactaggatcccttgtggagaggtatggggagggaaccctgccaaatttctgaggaagctcacagatgacgagatcactttcattgcggaatcagctgccaactattccaatctgtccaaggtccatgctgctgagaatgccaaacctcttgaaaagatcgagtttgagaaggtgttgggcaagaagtttgctcaccaggatgagtatgattcctcgattggcgtcactgaaggggcaccaccagagctcacgtccccaaatccagcccaatgaacctctgtttctgttttctctttggcgccttaatcattttctgttggacagtgctggatcgttgatcggggtactgttccatgacactggtggtttatgtttacttttcctccccaataatcttgggtcgagcgatgttataaagctggccatgcacttcttccagattctgtattcggtatgtttaagatgtgctccctggagagttccaccaaataaactccaatgcattgcctccccaaaaaaaaaaaaaaaaaaaaatggattaa

SEQ ID NO: 260419 - DNA, 446 bp, Zea mays
  unsure (1)..(446): unsure at all n locations
aggcaatgttctttgaccaccgagcaaaccccagcctccgtaactctccttcctcttggctcgcctcggctcccgtcgcccccttccttgagatctctaggatacgagcgcattcgcatcgcttcgcctccgccgcgtcctggggagatggcgggtttgggaaaggcgatgtacgcggtgggattctggatccgggagaccggtcaggccctcgatcgcctcggctgccgcctgcagggcaagtacttcttccacgagcagatttcaaggcatcgcaccatcatgaatatctttgacaaaaccctcccttattggtgatgttcaagtcgggcaaggagcttccatttggtatgggtgcgtcttaagaggggacgcanacaacatacaaattggatctgggaccaatatacaagacaattctcttgtgcatgtggctaaatctaatc

SEQ ID NO: 260420 - DNA, 1498 bp, Zea mays
cccacgcgtccgcggacgcgtggttattatacagcatccaagtggagagagaataatggtcatcatgttgattatgatcaacgacctgatatctttaggggaacaattagatatgcgagtgtccatgctcatttggggtgcactggtagtaggagggatgatttagagtcactggcatacacccttattttcctgataagaggaagattaccttggcaaggctaccagggagataccaagagtttccttgtttgcaagaagaaaatggctacttctccggagatgctttgttgttattgtccagctccattcaaacagtttcttgagattgtcacaaatatgaaatttgacgaagagccaaattatgccaagcttatctctctttttgatggtttgattgaagcacctgcttcgagacaaatcagaattgatggggctctcaaggttggacagaaacgtggaagattggttgcagatctagaagaagatgaacaacctaaaaagaaggttagattagggagcccagcggctcaatggatttcagtttataatgctaggcgacccatgaagcagaggtaccattacaatgtggctgactcaaggctaagtcaacatatagaaaagggtaatgatgacgggctttacgttagttgcgtggcttcctcggcaaacctttgggcactcatcatggacgcaggaactggtttctgttctcaggtttatgagctctcaccagttttcctccacaaggactggataatggagcagtgggagaaaagctactacataacagcaattgctggatcatccaacgggagctcattggttgtcatgtccaaaggaactccttacacccagcaatcatacaaggttagcgagtcgttcccttacaagtggatcaataagaagtggaaagaagggttccatgtgacatccatggccaccgctgggaatcgctggggcgtagtcatgtcaaggaattcagggttctctactcaggttgtagagttggatttcctgtaccccagcgagggcatccaccggcgctgggagagcggctacaggataacttccacggcagccaccaacgaccaagccgctttcatcctgagcatgccgaagcggaagccgatggacgagacgcaagaaaccctccggacctctgcctttcccagttcacatgtcaaggagaaatgggcgaagaatctctacatagcttccatctgctacggacgaaccgtgtgctgatagtcgaagagaggccgcgctgactcagtacggtggcttgcgtcaagagattagagatgtgagatgaacattaaatcaaaaccagttctaatgatgataggatcagtagatctgaagatacggtatggtatcctaccgtagctgtaaagaaatattgtaccacccagtgccggccgcgagaccgttactgccatgaagtgaagctaatgcattttggagtctcctcccgggcaacaaacaacgggcgccc

SEQ ID NO: 260421 - DNA, 1195 bp, Zea mays
gcgcccacgcgtccgcccactcgtctttccactcttccgggctgactcaaggctaagggagcaggtagaaattggtaatgatgacgggctttacgttagttgtgtggcttcctcggcaaacctttgggcactcatcatggacgctggaactggtttctgttctcaagtttacgagctctcaccagtttttctccacaaggactggataatggagcagtggcagaaaagttactacataacagcaattgctggatcaaccaatgggagttcattggttgtcatgtccaaaggaactccttacactcagcaatcatacaaggttagcgaatcggtcccttacaagtggatcaatatgaagtggaaagaagggttccatgtgacatccatggccaccgctgggaaccgctggggcgtagtcatgtcaaggaattcagggttctctacgcaggttgtagcgttggatttcctgtaccccagcgagggcatccaccggcgctgggagagcggctacaggataacttccacggcagccaccaacgaccaagccgctttcatcctgagcatgccgaaacggaagccgatggacgagacacaggaaacgctgcggacctcccgccttccccagctcacacgtcaaggagaaatgggccaagaacctctacatcgcttcgatttgcttcgggcggaccgtgtgctgatcgcgcgcgcctgggaaatggaagtcgaagcgagggccaccgatccggtacggtggcgcctcgcatcaagagatgcgagatggggcgtcaagtcgaaaccagttctaatgataggatcagtgtatctctgaagatacggtatgggttaccctaccgtatttgtaaagtaatgatgccggccgaacgacctttcctaacgcgtttgggcagaaattcgttgctgtcgccatattttgacgggagtttctcccgtgttgtcggcagaaattggcgcgagcactcttgccgtactggcgcccatgctatgtgttccacccgatgtctcgctgcgctttctgtgtcgtgactccagccgcaatatgtggtggcctgccggctccggttggcatttgatttggagagacgtagataaatcgaactgattgagcacttagagctcactcagtcaaggcccgattaagtaacaaaaaaaataaaacatgtaagaatttaatttc

SEQ ID NO: 260422 - DNA, 615 bp, Zea mays
tcgcgggtcgacgcaagcctctacagagactcgtgctaacgcgtgggtgcaaatctagaggccggtcacccttgctggggccctcaaggttggacagaaacgtggaagattgcatgcaaatctagaagatgaacaacctaaaaagaaggttagattagggagcccagcggctcaatggatttcagtttataatgctaggcgacccatgaagcagaggtaccattacaatgtggctgactcaaggctaagtcaacatatagaaaagggtaatgatgacgggctttacgttagttgtgtggcttcctcggcaaacctttgggcactcatcatggacgcaggaactggtttctgttctcaagtttacgagctctcaccagtttttctccacaacgactggataatggagcagtgggagaaaagctactacataacaacaattgctggatcatccaacgggagctcattggttgtcatgtccaaaggtcttgatttgaccttttcttgtcattgctcaggcttgcatattgatcttccatttcctcactactttcccgttagcagtgcaaaatcctattgtttctcttgtatgtcataatgcaatctctatgttaagcc

SEQ ID NO: 260423 - DNA, 448 bp, Zea mays
tgagattgtcacaaatatgaagaaactgtttgaatggagctggacaataacaacagtttcttgagattgtcacaaatatgaaatttgacgaagagccaaattatgccaagcttatctctctttttgatgggttgattgaagcacctgcttcgagacaaatcagaattgatggggctctcaaggttggacagaaacgtggaagattggttgcagatctagaagaagatgaacaacctaaaaagaaggttatattagggagcctagcggctcaatggatttcagtttataatgcttggtggcccatgaagcagaggtaccattacaatgtggctgactcgaggctaagcatgatgggctttacattagcagcgtggcttcctcggcaaacctttgggcactcatcatggacgcaggaactggtttctgttctcaggtttatgagctctca

SEQ ID NO: 260424 - DNA, 442 bp, Zea mays
caacgatcaagccgctttcatcctgagcatgccaaagcggaagccgatggacgagacccaggacacgctccggacctccgccttccccagctcacacgtcaaggagaaatgggccaagaacctctacatcgcttcgatctgctacgggcggaccgtgtgctgatggcgcgcacgtgggaaatggaagtcgaagcgcctcgcatcaagagatgcgagatggggcgtcaagtcgaaaccagttctaatgataggatcagtgtatctctgaagatacggtatgggttaccctaccgtatttgtaaagaaataatgccagccgaacgacctttcctaacgcgtttgggcagaaattcgttgctgtcgccatattttgacaggagtttctcccgtgttgtcggtagaaatttgcgcgtgcactcttcccgttttggggcccatgcaa

SEQ ID NO: 260425 - DNA, 1109 bp, Zea mays
  unsure (1)..(1109): unsure at all n locations
ttactttttcaaggctgncagcgctgccctagtttttttttttatagaacgtaaccagtggcccgctagcaccggtaaaagtaaattcacaaagcatcgagatgaaaaaaatgagcgaatcacaaagccagaagaacttgttcggctatatgatctgcttattcaggtatgtttgttttctgtcacatcctctttttagacatatttatcatgtgtttactagacttcgtgtgaggccgcttttttcagaatgtaacggacttgacagatttagttagctctggaagaaacaaaaatgaagaagaaaactcttttattcatgagtatgagctgaaaggcttggctttccgagctgagagatgtttctttttggctaagtcatatagttcagcaggcaaaagagctgaagcatatgcattattctgccatgcccatactctcactggttctgcactgcaacagcattcaaacagtcatgacaaggctttaatacaagatctggagtttctatctaacaactgtagatcaaatagctgcatagaacatgcaacaggcattatggaggaggagattgttcctttaaaactttctaaaggagtctcaactatgtcacttgctgataataaaacaaaggagaacaagtatctccttgatatgctagagagctatgaatcagcgattggtgagccgaacaccaaagctccatgtcgcattgctcaattcccacctcctttccaagcagttccatgcaatcctattgtgcttgatatggcttacaactcagttgagttcccaaaccttgagaaccgtatgaaaaaagaaaagaagggtcttctgagcaggttctggggttgaaagatggcatatgcctaggattttggtacattgtcccatcatttgatatgctttgtgcatgaacggtgtaaaactagaatgtcctgataatacctctctgatgggtgaaagatcttcagtatcccgcccaaggatttttgagattctttatcagaaggttaatttagccgttgcaaagtacatctagctcggtgactgatcagcataaccttttgctgttactaaattttgagcaatgactgatttcttggatt

SEQ ID NO: 260426 - DNA, 1030 bp, Zea mays
gaaagcccagcagcttgagagagacttgagtgctgcagccacagaatcagttgctgctgacaaaaagcttgctatatttgataaaatattttctgcataccatgatgctcggagctgcatccgcaatgacctggcttctgctggcaatgctgaggatataaaagatgacctgaatggtcttgacaaggctgttagtgctgttctaggattgagaactatagaacgtaaccagttacttgttagcattggtaaaagtaaattcacaaagcatcgagatgaaaaaaatgagcgaatcacaaagccagaagaacttgttcggctatatgatctgcttattcaggtatgtttgttttctgtcacatcctctttttagacatatttatcatgtctttactagacttcgtgtgaggccgcttttttcagaatgtaacggacttgacagatttagttagctctggaagaaacaaaaatgaagaagaaaactcttttattcatgagtatgagctgaaaggcttggctttccgagctgagaggtttgttacactgtatccaagtttagcgtactctttaacgaccagctttctttacaccattctctcttttcacaataacttttatatcttcacctttttacatgttggtttgtctgtcttccttgctatctgcaccaattatgtatatatcaaacaacaaactaaaagataggttaagtaaaagtttgatgcaatgccacttgcatagtaagtaaatcacttacctgtttaaatctttcaggtggttaacaaggttcaaatatgtttaaatctaatccctggtggattatccttattccttacatgtttcactttgaaatattgtgcagatgtttctttttggctaagtcatatagttcagcaggcaaaagagctgaagcatatgcattattctgccatgcccatactctcactggttctgcactgcaacagcattcaaacagtcatgacaaggctttaatacaagatctggagtttctatctaacaactgtagatc

SEQ ID NO: 260427 - DNA, 616 bp, Zea mays
attggttctgatgatgaggaatatagaatggctgaaacaatgactacaggacgggggaataagttctcagaaagagatagcttgccatcttcaagagatggttttaatgattttgatgatgaagatgatgacattgacagttatgaacttgacttgtcaaaaggtagtcacacaggtggagtgtcaaggatgagttattcggatcttgagagtgcttctgattcagaaggttttagtgaaattgatcatagtagagagtccagatatggtaatagtaaagagtccagatatgataatggtagagagtccagaaatgataataatagagagtccaaatatgcagccaaggttgaggatgaatttgaggatcatcattccctgagatcgactcatcttgctgattcctggcaaaaaaccagaggtcggagtggttcgaatgactacagaagggcatcttttggatcagagagtgatgatgagatcaattcttatccggacgaggacattgacaaaggtcctagaaataatggaagccgtagtcagggaagtaccaacagagcttctgttaggcacaatgcacttgcctacagtgatgaatgacccattttctgatgat

SEQ ID NO: 260428 - DNA, 722 bp, Zea mays
cccacgcgtccgcccacgcgtccggactagttctagaccgccgcccgcgcctgcacagtcatccacactaacgaacgaactcttgctccgatcacgagctagctgaggtcgacgatggcggctgtgctgaacagcaggaagacgccgcaggcggtggtggccgtgctggtggcggcggcgctgctggcttcgtccgcttcggcggcgatcacctgcgggcaggtggggtcgtcgctggcgccgtgcatcccgtacgcgacggggagggccagcgcgctccccgcgtcgtgctgcagcggcgtcaagagcctcaacagcgcggcgcggaccagcgcggaccgccaggcggcgtgccgctgcctcaagagcctcgccaacagcgtcaagagcgtcaacatgggcaccgtcgccaccatccccggcaagtgcggcgtctccgtcggattccccatcagcatgtccaccgactgcaacaagatcagctaagttacgacgaccaagctaataagcctaccgaacgtacacgtacgtcccgcgcgctgcacgagtgatgaagccagggaagaaataaaataaagctagctgtattgccaggagcagcatgcagtatcgatctatatatatactgtactgtagtactctattatatatgtatgtgtggcctgcagtgcgagttgcttcgatccacctacttgttcagacagtttaaaaaaaatctaaat

SEQ ID NO: 260429 - DNA, 477 bp, Zea mays
ctctgccccaccaaagaaagaagaagattcaacggcaccaccggcagaagccctacctccaccttcattcaacgacatcatccttccacctatcatggccaacaaatacgcatctccgcctcctcctctattccaaggatattaagctctatggagagatggtcgaccaagaatgaattgaacaacaatatataaggtcgcatgcgcaaccaaacagctacatgtacattgcaggcgtgtgtgaaattgtttatttattttttgcatgtgcacgcgtgagtatttgcttctccgtacatactctatgtatgaacgtgtgcgtgtgtgaactaactacatgagacgacaaggtgcaagagacatgtctggggcgtcatttgtatggctttaatttttgttattatatatagataaggaaatatcttccttaaaaatggagtacaagggattgttgagaactgcttttggtcatgatat

SEQ ID NO: 260430 - DNA, 604 bp, Zea mays
cggacgcgtgggttcaacgacatcatccttccacctatcatggccaacaaatacgcatgtccgcctcctcctctattccaaggatattaagctctatggagagatggtcgaccaagaatgaattgaacaacaatatataaggtcgcatgcgcaaccaaacagctacatgtacattgcaggcgtgtgtgaaattgcacactaacgaacgaactcttgctccgatcacgagctagctgaggtcgacgcgggatggcggctgtgctgaacagcaggaagacgccgcaggcggtggtggccgtgctggtggcggcggcgctgctggcttcgtccgcttcggcggcgatcacctgcgggcaggtggggtcgtcgctggcgccgtgcatcccgtacgcgacggggagggccagcgcgctccccgcgtcgtgctgcagcggcgtcaagagcctcaacagcgcggcgcggaccagcgcggaccgtcaggcggcgtgccgttgtcttaagagccttgtcaacagcgttaagtgcaaggcatgggctggtccttcggcggcatgagccttggccttcgtctactgcaccagccggcatttgcggcgggcacatt

SEQ ID NO: 260431 - DNA, 1428 bp, Zea mays
ccgagtacggagaggcaagccagtaccagatccaagaagtcattggtaaaggcagctacggggtagttgctgcagctgtagatacccgcaccggtgagcgggttgctatcaagaagatcaacgatgtgtttgagcacgtctcggatgccacacgcatactgcgggagatcaagctcctccggttgcttcatcacccagacatagtcgagattaagcacatcatgctccctccttctcggagggagttccaagacatctatgttgtttttgagctcatggagtcggatctccatcaagtgatcagggcgaatgatgacctcacccctgaacatcaccagtttttcctgtaccaacttcttcgagctctcaagtacatacatgccgctaatgtatgccatcgtgatctaaagcccaagaatatactggctaactcggactgcaaactgaaaatatgtgactttggacttgcccgtgcatcattcaatgatgccccttcagctatattttggacagattatgtggcaacaaggtggtaccgggcacctgaactatgtggttcctttttctccaaatacactcctgcaattgatatttggagcattgggtgcatatttgctgaacttctcactggaaggccactatttcctgggaagaatgttgtacaccaattagatattataacagatcttcttgggactccatcatctgagaccttatctcggattcgaaatgagaaggccaggagatacttaagctgcatgcggaaaaaatatcccgtgccctttactcataaatttcgaaatgccgatcctttggctcttcgtcttctagagcgtttgcttgcatttgatcctaaagaccggcctagtgcagaagaggctctagctgatccatactttgcatcccttgctaatgtggaacgtgagccatcaagacacccgatttctaaacttgagtttgaatttgaaagaaagaagctggccaaagatgatgttagagaactgatctatcgagagattttggagtatcatccacagatgctggaggagtacatgaaaggcggagaacagattagcttcctctacccgagtggagttgatcggttcaaacggcagtttgcacatcttgaggagcattatagcaagggagaaagaggttctccactgcaaagaaagcatgcttctttaccaagggaaagagtggttgtatcgaaggacggtgatactgagcaacatattaatgaccaggagagaagtgcagattctgtcgcccgcaccactgtgagccctccaaggtcagaagacgacgacatgagcgatgtgacatccacaagcttgagctctcggagctacctgaaaagtgcgagcataagtgctttcaagtgtgtcgttgccacgaagaaacacccggaggacaatggaatcactg

SEQ ID NO: 260432 - DNA, 427 bp, Zea mays
caacgctatggccgtcgggagggagagggaccgggagatgctcctcccggcggtgggcggggagcatgtctccggcgatgaggacgacgtcgcatccgaccacccccgtcatcgctgggccgctgccgccaacgacgtccgcgcgcgtgctccaccttcaccaccatcccaccggcatcgaggcattctcacgagtgataaggagctgggcgtggaagaagttcatgtctggatggtgcgcaactctcgtacatatgaatactgcgtcatcctgcttccgatcgccatcaccttttacacgacatggtggttcatccgcttcgtcgacggcttcttctcgcccatctacgtccatatcgggatacacctcttcggcctcgggtttgtcacctccatcaccttcatccttctcgtcggcggtgtcatg

SEQ ID NO: 260433 - DNA, 1746 bp, Zea mays
cggatgcgtgggcggacgcgtgggcggacgcgtgggcggacgcgtgggcgccgagaaaggatggcgtcgtggtcgtcgccctcagccgcctccgccgccgcctcgggcgcccgattcggccccttcccgagcggagggcagcggctcgcgccgtgtccgtcgctcgtccgcggaactcccgccccgacgctcgtcctcaggccccacccggacggccgtggccatggcctcctcgcgcacaccggctcctctccctcctcgcggtgccgcgccgtcgccgccgaggtcgggggcctcaacatcgccaacgacgtcacccagctcatcggcaacacaccaatggtgtatctcaacaacgtcgtcaagggctctgtcgccaatgtcgctgctaagctcgagattatggagccctgctgtagcgtcaaggacaggatagggtacagtatgataaatgatgctgaacagaagggcttgattactcctggaaagagtgttttggtggaagcaacaagtggaaacacaggcattggtcttgctttcattgctgcttccaaaggatataagctgatactaacaatgccttcatcaatgagcatggagagaagagtcctcctcagagcttttggtgccgaacttgtccttactgatgctgcaaaagggatgaaaggggccttagataaggctacagagattttaaacaagacaccaaattcttacatgcttcaacagttcgataaccctgccaaccctaaggtacattatgagactactggtccagagatctgggaggattcaaaggggaaggtggatatattcattggtggaattggaacaggggggacaatatctggtgccggccgttttctcaaggagaaaaatcctggaattaaggttattggtattgagccttctgaaagtaacatactctccggtggaaaacctggtccacataagatccagggaatcggcgcaggatttgttccaaggaacttggatagcgatattcttgatgaagtaattgagatatcaagtgatgaagctgttgagacagcaaaacagttggctgttcaggaaggattactggttggaatctcctctggagcagccgccgccgctgccataaaggttgccaaaagaccagagaatgctggaaagctgatagtggttgtgtttccgagcttcggcgagaggtacctttcatctgtcctctatcagtccataagagaagaatgcgagaacatgcagcctgagccatgagggagccgtcactttaagcgggcatagtaaatgtttctgaaataagacgcgtagccagcatcagtttgctccacttggtatcatttggccatgctcactctatcctttcgctagcctctatgaccggacctaaactggtgtgtgagaaacatccacgactctcctcccaactgctttcctaaagcgaaatgataacacttcttaataattgtctatacgattgaagctgatttgattggtaattgtaaacaacttgtctttggatctttgaagtcaaacaaagtcagttggttgaaaaaaaaaaaaaaaaaaaaaaaaaaaaaaaaaaaaaaaaaaaaaaaaaaaaaaaaaaaaaaaaactaaaaaaaaatgaaaaaaaaaaaaaaaaaaataaaaaaaaaaaaaaaaatgtaatcacttttaaaggttctaaattttataaagcttgcttgcctgataataaatttttttttccgtcccttaaattaa

SEQ ID NO: 260434 - DNA, 365 bp, Zea mays
tcgtctaccactaccagcctactttgtagtagtccccgaagccgcgagtcgcgcatacctttaccgcacgccgacaaggatggcgtcgtggtcgtcgccctcatccgccgccgccgcctcgggcgcccgattcggccccttcccgagccgagcgcagcggctcgtgccgtatccgtcgctcgcccgcggaacccccgcctcgacgctcgtcctcaggccccacccggacggccgtggccatggctctcctcgcgcacaccggtacctcttcctcgcggtgttgcaccgtcgtcgtcgaagccgatggccataacatcgtttaacacgttagtcatctcagcggcaagacatcaatggtatttctc

SEQ ID NO: 260435 - DNA, 1122 bp, Zea mays
  unsure (1)..(1122): unsure at all n locations
ctggtatcgcctgcacggtaccggcccggcctgctcactctcctcccacccactcctgaaaacctcacaaaaccctcgctcgctccccacaaccccgccgcgccgccgcctgtaccagctgcgtcaagatgagtcggcaccctgaggtgaagtgggctcagaggatcgacaaggtttacatcactgtacagttacctgacgcaaaggatgctaaggtcaatttggatccagatggtgtcttcacattctctggcagtgctggtacaaacttgtatgaattgaaactagatctgaatgacaaagtaaacgttgaggctagcaaaataagtgtgggtgtcaggtccatattctgtattgtagaaaaagctgaggccaaatggtggaagaaacttgttcgagatgatcaaagggcacctcactttgtgaaagttgattgggacaaatgggttgacgaagatgatgatggtgctgatgtcaacttggatgggatggacttctcgaatttcggtggcatgggtggtatgggcggcatgggtggcatgggtgatatggctggtatgggtggtcttggtggcatgggtggtatgggtggtcttggtggcatgggcggtatgggaatggatgatttcgaagatgagagtgatgatgaagaagaagtgtcgaaacctcaagctgcggacaaggctgttgaggctgaggagacggagtcagcggaaaccaagattgaggcggctcagagcagttgaagatgcttatgatctaagctagattgtatcctcatgttaattctgctgaatcggaggacaaaccttacatttatggtgctggcaagtcccagtggcgtgccatgaaaatttacgttccgtcttttaactgggtatccgagtgtcgtgctcagcatattatggatattatttccgtaatgcttcctttggtcgccaatcatgtggtgaagagtttgttttactggattgctttatttgttttttggtcgccaatcgaatggtctggtcaaaaggactagtggcgacgtgattttgttatttggttctctacccagcaatacaactcccacggtaaagtgctncagaggagcnccttcaacaataaaaaaaanaaaaa

SEQ ID NO: 260436 - DNA, 631 bp, Zea mays
cctcacaccgcctacttgactcctcccgaacttccacatctctgctctgccttcccagtctcccatccctgaaaacctcacaaaaccctcgctcgctccccaccaccccgccgcgccgccgcctgtaccagctgcgtcaagatgagtcggcaccctgaggtgaagtgggctcagaggatcgacaaggtttacatcactgtacagttacctgacgcaaaggatgctaaggtcaatttggatccagatggtgtcttcacattctctggcagcgctggtacaaacttgtatgaattgaaactagatctgggtgacaaagtaaacgttgaggctagcaaaataagtgtgggtgtcaggtccatattctgtattgtagaaaaagctgaggccaaatggtggaagaaacttgttcgagatgatcaaagggcacctcactttgtgaaagttgattgggacaaatgggttgacgaagatgatgatggtgctgatgtcaacttggatgggatggacttctcgaattttggcggcatgggtggtatgggtggcatgggtggtatgggtgatatggctggcttgggtggtcttggtggcatgggtggtatgggaatggatgattttgaggatgatagtgatg

SEQ ID NO: 260437 - DNA, 926 bp, Zea mays
cctcgatcacactccaccacgattgccaagtgtcaatctcgacacggcagcaggagcctttgggccgtcgttacacgcacctatccatctcatctccgcggcacacgacacgatcgtggttggtgttggttacacgcgcctatatcgccggttcggccgcacgtccgcctcctcctctcctcctccctcttctcactcagctcaccagtgctcgctcacctttcccctccctttcctttcctttgctttcctatccttgtgccctcgaatcggaaacccagccagccatgtcgtactacggcgaccggcgcgcggagtcgtcgatcgtggaggcgttcacgctgtcgccgctgccgtacccggtgatcctggtgctgctgatggtgacgctgctgctgggcgcctcgtggttcttcacgtacgacgacttcatcgaggaggcgtcgcagcagctgagctgggcgctgctgggcgtgcccatcgcgctcgtcctcctcatccgctggatctcctccgtcgactccttcgagggctacctgggcttctacccgagggagagccgctggaagggccgctacgagcggggccccgccgagggcagctcgccctggggcgtcgccttgctcgtcctcctcctcctcgtgctcgccagcttccactccaccatccacgacatgtgggggccgtgaacggccggatgtgggtcctgctcctgttcgattccacgcgcgcacgtatgcgattgtactgctggttgctgcttgatcgatcgatggatcgatgattccatgtacatatttgttagggggatgctgctgctaggctattagctgcaggctatagagtttgagggtgatatacttatcagtttgctgcctgtaagactggttttggttttgctataatcgtgatgtattcagatgtac

SEQ ID NO: 260438 - DNA, 372 bp, Zea mays
tcctcctcctcctcgtgctcgccagcttccactccaccatccacgacatgtgggggccgtgaccggatgtagtgattgtagtcctgctcctgttcggttccacgcgcgcacgtatgcgcttgtactactggttgctgctcgatcgatcgatgattccatgtacatatttgttagggggatgctgcggtccaggctatagagtttgagggtgatatacttgctcatcagatcagtttgctgcctgtaagactggttttggttttggttttgctataatcgtgatatatatattccgatgtacagtacagtaccctctttgctttggtttccctgtcttggaattgactggtggagtggaaccgtctcatgctt

SEQ ID NO: 260439 - DNA, 647 bp, Zea mays
accagaacgcccggggcgacccacgcgtacgctcagcttcgcctaaaacccatagttcgcatactcttcaaccttccatcctctcgcatcgtgtgggggcgcacctgaactacccgatgcatgcttttatgagcaaaaaacctcatgaaaaatccttcaagcgggctcaacagtcatttgctccattaactgcttatttgccatgtgatatacatattgtgaacctgaaggtccctctgcccctaagatttcctcacaccgaatcagcagagccaaaatttgctgttctgttgcagaggagaggctgggacgcatcatactgcaaaaggggtggactgcagtgtacaacagttggggaagagccagtaaatctgttctacatgttcaaagatttgtcagctgtgaatgtgaaggcgacttcgctgaacctcttacacgatgacccagaaatgctaggttaccttgagcagaccggtgatgttgctcaggagggagacgttcttatctcaccaatggagattctggcatacaagttggacctacaaccaccatcatcgcaggaagagtagttttagtttgtgaaaacagtacatgcatattgaacagtcctacatgacagtgaagatggatctttccgaaatacttga

SEQ ID NO: 260440 - DNA, 791 bp, Zea mays
cggacgcgtggcgagacgcgtggggcaagaaagaaagaaagaaaaggggcaggaagaaatcgagcctcactcgatccatcgcctcgccgcagcacacacgaggccggcggcgccatggccatgaagctggacatgtccgcgctcgagaccaacttcgccaacctgaccgcctccgccggcgacgacacgtacttctccgccgaggcccccgacgtgccgtccatggtgctccccatctgcgacgacttcgacggcttccaggcggccaccaaggatatggtgaagaataagaaggggacgaccacgcttgccttcatcttcgacaagggcgtcatcgtcgccgctgattccagggccagcatgggcggttatatatcctcacaaaccgtgaggaaaattattgaaataaatccttacatgctggggacaatggctggaggtgctgctgattgccaattttcatttgttttttatactttgatccatttgttttttattgctttttttttagcataggtttcatttttgttttttttaatattagttttcctttttttttttttagttttttctttttatttttataatttattttttgtttttttttttttttatttatggttttactgttttttattttttcttaatttatattttgatattctttatttttttataattttattttattttatcttttattttttgttttaagttttgtcgtttttatttttctatgtttcttttatttttgttttatttttcttattctttttttttttttttttttt

SEQ ID NO: 260441 - DNA, 1204 bp, Zea mays
cggctagaatggaagaaagaaaaggggcaggaagaaatcgagcctcactcgatccatcgcctcgccgcagcacacacgaggccggcggcgccatggccatgaagctggacatgtccgcgctcgagaccaacttcgccaacctgaccgcctccgccggcgacgacacgtacttctccgccgaggcccccgacgtgccgtccatggtgctccccatctgcgacgacttcgacggcttccaggcggccaccaaggatatggtgaagaataagaaggggacgaccacgcttgccttcatcttcgacaagggcgtcatcgtcgccgctgattccagggccagcatgggcggttatatatcctcacaaaccgtgaggaaaattattgaaataaatccttacatgctggggacaatggctggaggtgctgctgattgccaattttggcataggaacctaggaaccaagtgtcgtctccatgagctttcaaacaagcgaaggatctctattgctggtgcttccaaactgttggctaacatcctttattcatatcgtgggatgggactgtcgattggtacaatgatcgctggatgggatgagaagggtcctggcttgtactatgttgacagtgagggtgcgcggctcgtggggaacaggttctctgttggctctggttcactgtatgcttatggtatcttggatgatggttaccgcttcagcatgtcagttgaggaagccgccgaattagcgcgacgggctatttatggggcaacattccgtgatgcagcaagtggtggttgtgttagtgtttaccacgttggccctgatggttggacgaagctttctggggatgatgtcggggagctgcactaccactactacccggttcagaaaactccggttgaacaggagatggccgatgcgcctactgcttctgcttaaacctgttgctgagaaaaccttgagcggagccgcatgtatccatgaaccatgaattgtagaagcgccatgtttatgaacgaacttggacatgtttgtctcacaacgttagatcactctttgtgttctgttgattgatatcttaaatttgcgcaactgttgagtccttttgagatttttttagatctgtgctatgttgactccggctgcctgcaatcagatctcgttctccgtacgtggacagtagaattcatgcacttctttttgaggct

SEQ ID NO: 260442 - DNA, 2032 bp, Zea mays
ggagatggaaaaggtggagagagcatttatggtggaaaatttccagatgaaaacttcagattactgcacaatcagcctggtgttctgtccatggcaaattccggcccagacaccaatgggtcacagttttttattacattcaaggctctacctcatcttgatggcaaacatgtggtctttgggaaggtggtcagtggaatagctttgcttaaaaagcttgaagcagctggcagtgaaactggaaatccttcttgtcaagtgaaaattgtagactgtggtgaagtttccaacacaaattctcaagatctgctaaagggagagaaagaaaaaaaactaagaacagcagatggtaactccaatgctgaagggagagccaaattaaaaaaagcatctggtgattataagcaaagaaagaagagaaaacattattcatctgattcatatagctcagatacttcagactcgtcgtcctattcttcagatagtggctctgattcagaatcacagtcatcaatgaatactagctcgtccagtgatcataggcgtaagagaagaaagggatctaagaaggataagcgcaagctcacgaagaggaagggtaagcatacaaggagtaagagaaagagtagaggatccaaaaggcgtcctagacggagctatgggagttccagtgatgattcagtaagctcaaagacagataacagcagttctgacagtgaaaatggtggtcattataccaagcgttccttgccgaaagcagataaagagagtaccaaaatgacaaattcagaacaaggaagaacgtttccagatgtagacaaagtcaaacaaacagttactaccatcaaccgatcacaatcacatgatggaagtaaaccctcaaacaaagatgacaatggggctgatgacagatctggaaattacagttcaaaagataggaatgatccaggtgcaagctctaggatcagtcctatacagactgatgtaaatttaacgaaaccagtaaatgtagatggcaacattggtggtgataatgcagatgctggcatgtctataactggtacagaaaggcacctgccaagcaatgaacctgtgtccaccaatggtaaagatttagctgtgggttctgcagacaatgggcagcctcagcgaatcaggaaagggcgtggttttactcagaagtatgggtttgcacgccggtacaggacgccatctcccgagcgcccccctgttcgaccccgctacgatggagggagagaggataggtggaacaatttcaataggtatggaagaactggtccttacagtagacgctctccagtaaggagataccatggctcgccaagagccaatagcccatccaggtaccaaagaagaggccggagcaggtcacgcagcccggcgacgcgtcatgaccgtggagggtatcgccgccccagcccaaggcgcagccgcagccctgcagacccgagacgcgatgcgaacgataggcctcgatcaggtcacggtggaggcggtcctgaccaccgtggccacagcccccctgccaacaacaggtccaggtcgaagagccgggatcccttgagatccaggtctcctgatgctgccccagccaagagggagagctcgagatacaaccgcaggcgcagcagcagctcgaggtccagcagccctgatgctgatggaaacaaaggcttggtctcgtactgagatgtaacgccacaacgatttacatgcgccaagaaccatctttcttgctagtttagcgttatgtacgcttttgtaatggcttctaaacttgtttttttgatgtagctgtacatttggatgtcctgttagacgtgaaatgttttttacgtcagatatttataactacttctgagtcagtataacgcgaagagtgctatgcgttcttaggtcgaggcatgaatgttcgagtgtggttttgggtaaaactgaaacgtgttggtcatctctgttcaacagactttctgttgaaaacggctgagcatggtgatatacatgtacgcaa

SEQ ID NO: 260443 - DNA, 1908 bp, Zea mays
ccgctcgagcggctcgagcagagcgtgtccctctcgcgtgttgagtcctcggttcctccccagttccaacttccaagaacccgtgaagtgaagtgaggaggtcggcggaaccggaacccaggcgatacgagatgatcgcaaacggcctccgcaaatccagtgctgcctcctcccaggttagcaagctggtgaaatacattgctagtgctggaagcttgcaaggggggcacagtttatcagagccgtctgccagacattacagctctgaaccttcacttcaggcgacagaagaaaatgggtttaaggggcacagcatgctggctccattcacagcgggatggcagagcactgatgtacacccattggttatagagagatcagagggttcttatgtctatgacagcaatgggaagaagtatattgatgctcttgcaggactgtggtgcacagctttaggtggtaatgagcctcgactagtcaaagcggcaactgagcaattaaacaaattaccgttctaccattccttttggaaccgtacaaccaaaccctcattggatctcgcaaatgatattctcagcatgttcaccgcaagggaaatgggaaaggtgttcttcacaaatagtggttcagaagcaaatgactcacaggttaaactagtgtggtattataataatgcactgcgaaggccagacaagaagaaatttattgctcgctcaaaatcgtaccatggatcaaccttgattgcagctagtctatcaggtctgccagcgcttcatcagaagtttgatctaccagcaccttttgtcctgcacacagactgccctcactactggcgattccgtcttcctgatgagacagacgaacagttttgaactagacttgccaataattcggagaatcttgtcctcaaacaaggacctgaaacaattgctgctttcattgctgaacctgtgatggacgctggtggtgttatccttactccaaagacctattttgagaagattcaggcagttctgaagaagtatgacatcttgttaattgcggatgaggtcattactgcatttggaagactagggacaatgtttggatgtgatatgtataatattaaaccagatcttgtttccatagccaaggctctttcttctgcatatatgccaattggagcaattctcgttagcccagaaataacggatgtaatctattctcagagcaataaacttggttcttttgctcatggctttacatactcgggacatcctgtttcttgtgccgttgctgtagaaaccttgaagatatataaggaaaggaatattgtagaacacgttaacaaaattgctccaaggttccaggagggaatcaaggccttctcaggcagcccaattgttggggagatacgcggtctgggactgatacttggaactgaatttgtcgacaacaaatctccaaatgatccatttccagctgaatggggtgttggttcgatatttggcgcggagtgcgagaagcgtgggatgctcatcagggtggctggggacagcatcatgctgtcacccccgctgatcatgactcccaatgaagtcgaagaaatcataagcaaattcggcgatgctctgaaggccacggaggaacggattggagaactgaaatccaggaagaattagccgatgctgctggttgtaacgacggtgaggatggtgatggcagtgtccaatatacagtatattttcaaactttatttcagtaaagtgctgggctggaaccttgtagtgggttgcatagcgacagttgtttcttgttatggagcaataaggaatgcatctgcttaatcagagtagaaaaaaaaaaaaacaaaaaaaaaaaaagggcggccgctcgcgaactagaaagacgagtgggcggacgcgtggg

SEQ ID NO: 260444 - DNA, 488 bp, Zea mays
cgctcgagcttcgttctcctgaacgactaataacggtgggatctggaataacaggagcctgatggttgcatcagtagagttgaccacttctcagtattgcgagatgcatcttacatggttgatcagttttgcctagtcccagtaccatacaaagatgttcagctggatataaacatttctccacgtctctcttctgaatacataagttatctggaaaatcctgttgagttgctcaatgaagcggcaaaagctgcagagaaagatctatggaaaatcctgttgagttgctcaatgaaggcttttgcgaatcacttgaagcgttagtacttttgtgaatgattttgtaaagtgtttgtaaatatgtgcaaaacataataacatgtgtaggttttgtgaatgattttgttgtggtgcttgttgatggtttatgtgatgtggatctatcattgtgcaatactaattaaatttgtataaaaaaaaaaaagaaa

SEQ ID NO: 260445 - DNA, 875 bp, Zea mays
cggacggtggatcggacgcgtgggtggtgcttctagttcatttgcagcaacgacaagccacctgctttggcgcggactagggttgtggtcgcagcgccgcacgccacctgctttctgcgcggggccgcgagcagcaagggagaagacgcggagtttggagagaaggaggtgcagcgccgccgccacctgctttggcgcgggaccacgggcagcagatctccgggcagcaggggaggagactagcaggggagggaaatggagattgaagaaaatgagatggaaggaagaggcttgacgggagagagaagaaccttgaagagagaagaacggctctggacggcagaagaaaacggcgcgtgggctgatagcgacggaagatcattattcgttctcctgaacgactaataacgatgggatctggaataacaggagcctgatggttgcatcagtagagttgaccacttctcagtattgcgagatgcatcttacatggtcaagaagataattcctattctgaactacttgctcgtgttgatcagttttgcctagtcccagtaccatacaaagatgttcagctggatataaacatttctccacgtctctcttctgaatacataagttatctggaaaatcctgttgagttgctcaatgaagcggcaaaagctgcagagaaagatctatggaaaatcctgttgagttgctcaatgaaggcttttgcgaatcacttgaagcgttagtacttttgtgaatgattttgtaaagtgtttgtaaatatgtgcaaaacataataacatgtgtaggttttgtgaatgattttgttgtggtgcttgttgatggtttatgtgatgtggatctatcattgtgcaatactaatt

SEQ ID NO: 260446 - DNA, 622 bp, Zea mays
cccacgcgtccgcccacgcgtccggttttattgatctcatgtccccttttcaaacatttcagaagtgttggttcgatatttggcacggagtgcgagaagcgtgggatgctcatcagggtggctggggacagcatcatgctgtcacccccgctgatcatgactcccaatgaagtcgaagaaatcataagcaaattcggcgatgctctaaaggctacagaggaacggattggagaactgaaatccaggaagaattagccgatgctgctggttgtaacgacgcacatgcaattgaaaatgataattgatcttttttatgggcgaagtgttgaagatggctttggtgaaggaaatgtcttgttagcatcaagtaagtggcgacatcacaacccctcaagcttgtgccttaaaacaagaggatacaagaagttggagtgcttttgtgaaggcttttgcgaatcacttaaagcgttaggacttttgtgaatgattttgtaaagtgtttgcaaatatgtgcaaaacataataacatgtgtaggttttgtgaatgattttgttgtggtgcttgttgatggtttatgtatgtggatctatcattgtgcaatactaattaaatttgtataaa

SEQ ID NO: 260447 - DNA, 845 bp, Zea mays
cccacgcgtccgcccacgcgtccgcccacgcgtccggcccacccagcgtgcaacctaggcgagaaccgcctccccctccgctccttccagctcgctctgtaatctgcatcagcctcgcccgccgccgtcgccgccatggggaggggaaagttcaaggggaagcccacaggccgccgcaacttctccacacccgaggagatcgctgctggtacttcaggtcggccacgcacctttaagaagaaggaggaagaggaagatgaggaagaggtagaaagagaagagtctgaggaagaatctgaagaggattctgatgaaaagactaaacataaaggcactgagggtattattcagattgaaaatccaaacttggtgaaagccaagaatataaaggccaaggaagttgattttggcaagacaactgaactctcaaggcgtgaaagagaggagcttgagaaacaaaaagctcatgaacgttatatgaagcttcaggagcaaggaaaaacagaacaagcacgaaaagatttggaacgtcttgctttaataagacaacaaagggctgatgcggcgaagaaacgcgaagaggagaaagctgccaaggagcagaggaagtccgaagcacggaagtaactgcaacagtcatggaccaagagtccacgaagtgacgaaggcacgatctgcgtcgattggatatttgtttctaatgcaccagctaccttttcatagacccggcctctattctgtattcccataaaaatatgcattgacagttgacaccagtctcgtggtcgtggtttcctgtaaacttgagcttgacaaaactgaaaagtagtaaagatcagcttgca

SEQ ID NO: 260448 - DNA, 619 bp, Zea mays
  unsure (1)..(619): unsure at all n locations
ctctctcccctcaactctcctcattcttcgcaggctgagcagcaaccgccccaatctgcagttcaagaaccgcccacgcagaacccctccgccctccgctccttccaacttgctctctacctgcaccagcctcgcccacccttcgctcgccgccgccatggggaggggaaagttcaagggaaagcccaccggccgccacagcgtctccacaccagaggagatcgctgctggtacttcaggtcgccctcgcacctttatgaagacatgcaattgaaaaagagaattgatcttttttatgggcgaagtgtcgaagatggctttggtgaaggaaatgtcttgttagcatcaagtaaatggcgacatcacaacccctacaagcttgtgccttaaaacaagaggatacaagaagttggagtgcttttgtgaaggcttttgcgaatcacttgaagcgttagtacttttgtgaatgattttgtaaagtgtttgcacatatggtgcaaaacataataacatgtcccccgctttgcgactgggttaataagtttggcgtgattgttttcttgagctcccaaaaaaaaaaaaaaaacaatgtgaaaaaaaaaaaccntaaaaaaannna

SEQ ID NO: 260449 - DNA, 444 bp, Zea mays
ttttctttgttacctttggtgttgttcttgggctgccatcattcacattggatgagttcgtgcaggctcttcatgattatacagacaattgaaaaagagaattaatcttttttatgggcaaagtgttgaagatggctttggtgaaggaaatgtcttgttagcatcaagtaagtggcgacatcacaacccctacaagcttgtgccttaaaacaagaagatacaagaagttggagtgcttttgtgaaggcttttgagaatcacttgaagcgttatgacttctatgaatgattttgtaaagtgtttgcaaatttgtgcaaaacataataacatgtgtaggttctgtgaatgattttgttgcggtgcttgttgatggcttatttgatgtggatctattattgtgcaatactaattaaatttgtataaaaaaaaaaaaaaagggcggcc

SEQ ID NO: 260450 - DNA, 415 bp, Zea mays
tgacttggtaataaatatgaatccatgtaaggaagaacaggagcctgatggagtgcatcagtagagttgcccgcttctcagtattgcgagatgcgtcttacatggttgatcagttttgcctagtcccagtaccatacgaagatgttcagctggatataaacatttctccccgtctctcttctgaatacattcgttatctggaaaatcctgttgagttgctcaatgaagcggcaaaaactgcagagaatgatctatggaaaatacctgttgagttgctcttttttaggcatttttgttttcacttgaagcgtgtttcctcctgtgaatgattttgtaaagtgtttgtaaatatgtgcaaaacataataacatgtgtaggttttgtgaatgattttgttgtggtgcttgttaatggt

SEQ ID NO: 260451 - DNA, 1655 bp, Zea mays
cgagacgcgtgggtgtcagaccagaactggatggttgaagctggtgaaaaaatcaagtttccaggtggtgggacccattttcaccatggagctgacaaatacatatcaaatattgcaaatatgctaaatttcaaagataacaatataaacaatgaggggatgcttcgtacagttcttgatgttggttgtggagttgctagtttcggaggataccttctttcttctaatgtgatagcaatgtctttggcaccaaatgacgtgcatcagaatcagattcagtttgcactcgaaagaggaatccctgcatatcttggtgttttgggaacaaaaaggcttccatacccgagtagatcatttgaactagcccattgttcacgttgtaggatcgactggcttcaaagagatgggattcttctgcttgaactagatagattgctcaggcctggaggttattttgcttactcctctcctgaagcatatgcacaggatgaggaggatctccgaatctggaaagaaatgagtgcccttgtagaaaggatgtgctggaaaatcgcagagaaaagaaaccaaactgttatttgggtgaaacctctggacaatgattgttacaagaggcgagcacatggtacaaagccacctctatgcaaaagtggcgatgatccagattcagtatggggagtgccaatggaagcttgcattactccgtatcctgaacaaatgcacagagctgggggaagtgggctagctccctggcctgctcgattaacaaccccgcctccccgtcttgctgatttgtatgttactgctgacacatttgaaaaggacacggaaatgtggcagcaacgagtagaaaaatattggagtttgttgggcccaaaggtaaaaccagacactattagaaacatcatggacatgaaagcaaattttgggtcatttgctgctgcactcaaggagaaagacgtatgggtgatgaatgttgtgccacatgatggaccaagcaccctcaagataatctatgatagagggctgataggcagcaatcacgactggtgtgaagccttctcaacctatcctcgaacatatgatcttctccacgcatgggcagtcttctccgacctcgataaaagaggctgcagtgctgaagacctgctcctcgaaatggaccgtatcctcaggccgaccgggtttgccatcgtgagggacatgggcaccctcatcgagttcatcaagaagtacctccacgcgctccactgggaagcagtagcggctgcagatgccgagcccagctcggaatcagaggagaacgagatgatcttggtgatccggaagaagttgtggctaccagaagcaggctcgcacacgtgattcccttcccggcgtctgcagctcagaagcgaggcgccagctgcaccagccatgatttatttctagccctactgcacacatggagatagatttattatttacgaggatacggaaaatatgtggcaggcctggattaaaaaaaggctatttttttctcattctcgacagatatgggacttgatgtttgttctctagtttggttaggaaataaacattctttttcgtcttaatgttgaggctcatttaggtgtttgatgtccatcaatggaagtctgatgtagtctgtagct

SEQ ID NO: 260452 - DNA, 608 bp, Zea mays
cggacgcgtggcggacgcgtgggcggacgcgtgggcggacgcgtgggaaattcttgtctgcacacatatcattgaaagtggaatagatattgcacatgccaatacaatgattatccagtttgctgaactatatggacttgcccagctgtatcagttacgaggaagagtaggaagatcaggtacagaaggcttcgcataccttttctacactgataagtcttcgcgtctcgaagagttgcaacggatagactcggagctattgaggagcattcagagcttggccaaggtttccatgttgcagagaaggatatgggtatcaggggatttggaagcttgtttggtgagcaacagtctggagatgttgcaaatgttggcatcgatttattctttgatatgctttttgatagcttgtcaaaggttgaccagttttgcctagtcccagtaccatacaaagatgttcagctggatataaacatttctccacgtctctcttctgaatacataagttatctggaaaatcctgttgagttgctcaatgaagcggcaaaagctgcagagaaagatctatggaccttgatacagtttacagaagacctccgtcgacgata

SEQ ID NO: 260453 - DNA, 501 bp, Zea mays
  unsure (1)..(501): unsure at all n locations
ggcttctctcccagctgtagccgcagccgccgccgcctcgatctctcccttccctctcctctctcccctcaactctcctcattctccacaggctgagcagcagccgccccattctgcggttcaagcaccgcccacgcagaacccctccgccctccgctccttccagctcgctctctacctgcaccagcctcgcccgcccttcgctcgccgccgccatggggaggggaaagttcaagggaaagcccaccggccgccgcagcttctccacactagaggagatcggtaacgacgcgcccgcccaccccatggtcccatttataggtcgaattcgatttcatatctggagcgtgccacggtgagcctagacgactgcttgatctgatgatttcgatgtgagctagttctggaccgggttttgcgtgatcgagcagaactcataccatttatttagtagctgagctagttcgatctagaggctcaatgattcacctatntgcacgt

SEQ ID NO: 260454 - DNA, 825 bp, Zea mays
cagcccaccaaatgaggtagggtttccgattgcttccgcggttcaatcaccgcctacgtagaacccctccgctccttccagctcgctctctacctgcaccagcctcgcccgcccttcgctcgccgccgccatggggaggggaaagttcaagggaaagcccaccggccgccgcaacttctccacaccggaggagatcgctgctggtacttcaggtcgccctcgcacctttaagaagaaggaggaagaggaagaggaggaagaagaaagagaagagtcagaggaggaagaatctgaagacgagtctgatgacaaacctaaacataaaggtactgagggtattattcagattgaaaatccgaacttagtaaaagtgaagaatataaaggccaaggaagttgatcttggaaagacaactgaactctcaaggcgtgaaagggaggagcttgagaaacaaaaagctcatgaacgttatatgaaacttcaggagcaaggaaaaacagaacaagcacggaaagatttggaacgtcttgctttaataagacagcaaagggctgatgctgcaaagaaacgcgatgaggagaaagctgccaaggagcagaggaagtcggaagcacggaagtaactgcaatatcatggacgatgagaccacgaaggcatgatctgcgttagttggatatttatttctaatgcatcagttatcttgttataaacctggtccctattctgtatccccataaaatatgcattgacaaaattagtaacagtcttgtgggcgtgtcttcctgtaaacttgagcttgccaaaattagaaagtagtattaaggt

SEQ ID NO: 260455 - DNA, 760 bp, Zea mays
  unsure (1)..(760): unsure at all n locations
ttctttcaaaaatttgggaatacatttcattgtcactgtcattggctaccagagtccgggtacagaatctgggaacaaagtctgggaacacaaaaatctgggaacaaaatctgcctttggctaccagagtttattgctcccatatcattcgctgtccatttcactgtccattcgctgaacacaaaaatctgggaacaaactcattttcccagtgaacaggtagcacaatttagttcacaaaatctgggagcacaatttagttcacaaaatctgggagcaataaacaggttgaacaggtagaacaaaatctgggagcaataaactgccatcccagaacaaaattcgcagctcacatttcagttcacaagctagttcacaatttagttcccaggtaccacaatttagttcacaagctagttcacaagctcacatttcaatggagcaatacacaggtagcagtttgacaagctattacacaagctcacatttctgggagcaatacacaggtagcagtttcacaagctatcacacaagctcacatttctgggagcaaaaaacaggtggcgtagtagcagtcgtgtgttcatcttcatttgcagcaacgacaagttcacggcttggtgcttcatcttcatttccagctacaacaacgacaagccacctgctttggcgcggactagggttgtggtcgcagcgccgncgtcacctgctttggcgcggngccgcgagcagcaagggagaagacgcggagtttggagag

SEQ ID NO: 260456 - DNA, 492 bp, Zea mays
cggacgcgtgggtttttatggctctcgatcctgtaaatttagatgggatttatatctgggctgggggagatgctctaccttaggaatcctttggctttcatgcctccttcccatcccagccaaaatgtcttcggggatacaatctgcggttcgtgacgtcgtcagtgcaagacaaggccgaagctagccctgaccagaagcaggagcgtagcaccaagaaagatgaatctggcgatcaagaatccgaagctgtcggcaatgcggtgccatgaaagggtgtttgcaaatatgtacaaaacataataacatgtgtaggttttgtgaatgattttgttgtggtgcttattgatggtttatgtgatgtggatctatcattgtgcaatactaattaaatttgtatatctatgttattatgtgtataaaaattgatgatctgtgatgcttttgtatatataacagttgttgaatgttaattaatggtatattattatt

SEQ ID NO: 260457 - DNA, 717 bp, Zea mays
gcaatcactttgggaaggtggtcagtggaataactttgcttaaaaagcttgaagcagttggtagtgaaactggaaatccttcttatcaagtgaaaattgtagactgtggtgaagtttccaacacaaattctcaggatccgctaaagggagataaagtaagctcaaagacagataacagcagttcagacagtgaaaagggtggccatcgtaccaagcgttccttgacgaaaggcttcaatgcagcagttgctgggtgcttctttgccattgaaactgtattaagacctcttaaagcagaaaattcacctccatttacgactgcaatgataatattggcatctgttatatcatctactgtttcaaatgttttacttggagccagaccagcttttatagtgccagcctatgagctaaaatctgcttgccggttggaatggctgctacactagcttcagtctgttcagtcccattgacttcagtactgcctgctctttgagctgacaaaggattacaggattttgcttcctctcatgtgaacaagggagaatattatgaactgaaggtcatgtatcagcgaaaagcaggctttcctcttgtagcaattgtgcactgaaaaactacagtgcccttatgacaccacaacagttctaagcatgagcaagctgggttatgatggtgttgtggcactgctggttgctgatatatcactttcaatcg

SEQ ID NO: 260458 - DNA, 734 bp, Zea mays
cttcatttgcagctttgactattggtgcttcatcttcatctgcggtgtttcataatcccaaaattctctggaaatggaggccccaggtatggttcttttcaggtgtcttttacaagtagtttgctatttcagttttagctgactataacctgcattgagagctataacgctgttatatctgtaaggcgtggtttcagtgtgtagccaattttttatttatttgcccttattttagagttacatctgcgtggacatattgttttcttacagctatatgaagtttagtagctgtctgaagtttagtagctgtctatcttgtttttcagggatctggaataacaggagcctgatggttgcatcagtagagttgaccacttctcagtattgcgagatgcatcttacatggtcaagaagataattcctattctgagctacttgctcgtgtacaagtctccttatcatgtcctcctttcaagccagtctattctttgcttgattcatcacgggtgcacattattgtaattagaatcttcagagtactcgaaggatagttaaagctgtttagctagtccttcagattactgaaaatatagttaagaacatttgtattttgctatttcgatttccaacagtacaactattgagtacaactattggggatgattgtttatgtgatgtggatctatcattgtccaatactaattaaatttgtacatctatgtgattatgtgtat

SEQ ID NO: 260459 - DNA, 194 bp, Zea mays
ctgccatatgatcaagatctggggcaaccactgccatactggtcaagttttgaagagagactacatcttgtaagtgccgacatcacagacccctacaagcttgtgccttaaaacaagaggatacaagcagttggagtgcttttgtgaaggcttttgtgactcacttgaagctttggtacttttgtgaatgattt

SEQ ID NO: 260460 - DNA, 329 bp, Zea mays
gagccagccagccagccagccagccagccgcttgggcgccatctctctagagcttcgtaccctcgaagagagatccggcgcggcccaataaacacccggctcactacagactcgcagatggccggcctcaggatgaagttcgtcgccgtcgccgccatggccgccgcgctcgtggcgtccgccgcagccgccgaggctcccgtccgtcccggtcgacgcgggcgtctaagatcaactactacctgctcacgatactcttatggactaatcatactgcgcgttcacgcggatggaacctgcgtccactatcgctgagaatcccttgcagt

SEQ ID NO: 260461 - DNA, 1011 bp, Zea mays
tcccgaatcgaccgacgcgtccgtgcactcctctggacgcatatagccaagcggccgaagccccatcccgttcccgccccgcggcccgcgcctcgccttgagatctgtggcgtcgtcggcgccggataacgagtagagatggaggagacggcggcggtagcggggacggctgagaaggcgtcgtcgtacaggtactgggtgcgggaggccaccggcgacgccgcgccgctccccgtcccgcgcaagctcgacaccgctgccaacgggaacgggaacccgccgcccgtcggctccgtctggaatcaggctggaacatgggaggaaaagaacctcaactcatgggccaatagtagaataaaggatttgatgggctctttaggttcattggccttccctacagggaaggcatctattgacgaagtgtccaagtgctcaagcgacgcatttcaggtcattgtccgcaacaagaagagagtaggatataactatgaactaagcttgagatttagcggtgaatggttaatcaaagaagaaaacaagaagatcaaagggcatctagacattcccgagttttcattcggcgagatcgatgacttggaggtacaagtaaggttcggcgatgacaagggcctcgcgtctgatgatagaacacggatctgcaaggatctcaagtcctttttggcgccgatccaggagaaaatgcgcatgtttgaagaagaactcaaaggtagatagcgagtattagcaagagttcgcagtgctaggcaagtgacttggcagttggcaccgccgtgctagctgtgatgtgtgtgtcgcaacgctctcaaagctgagactgtatgtgtactggtgtaatacacttgtcaagatgagcacgtacgaactgttctcttggtatccctcattttcagcatgtgatagtaaaaggaattcaagatgtttttgcatgaatggtatggatatattttgatttaaaaaaaaacccaaagggggccgctcgcgatctagacc

SEQ ID NO: 260462 - DNA, 464 bp, Zea mays
cagaattggagtgcaagcgacgcgtcgagccccatcccgttcccgcgcctcgccgagagatctgcaccgtcgtcggcaccaacccgtcagtccgtacgtcgtccgcgccggcgaacgagtagagatggaggagacggcggcagcggctacggctgagaaggcgtcgtcgtacaggtactgggtgcgggaagccaccggcgacgccgcgccgctccccgtcccgcgcaagctcgaccccgccgccaatgggaacgggaacccgccgcccctcggctccgtctggaatcaggctggaacttgggaggaaaagaacctcaactcatgggctaatagtaggataaaggatttggctgggctctctaggttcattgaagttccctacagggaatgcatccgttgatgaagtgtccaagtgctcatgcgatgcctttcaggtcactgtccgcaacatgaagagagtagga

SEQ ID NO: 260463 - DNA, 433 bp, Zea mays
cagaattggagtgcactcgacgcgtcgagcggtcgagccccatcccgttcccgccccgcgcctcgcctcgccttgagatctgtggcgtcgtcggcaccagtccgtccgtccgtccttccgtcgtcggcgccggagaacgagtagagatggaggagacggcggcggtagcggcggcggctgagaaggcgtcgtcgtacaggtactgggtgcgggaggccaccggcgacgccgcgccgctccccgtcccgcgcaagctcgacaccgctgccaacgggaacgggaacccgccgcccgtcggctccgtctggaatcaggctggaacatgggaggaaaagaacctcaactcatgggccaatagtagaataaaggatttgatgggctctttaggttcattggccttccctacagggaaggcatctattgacgaagtgtc

SEQ ID NO: 260464 - DNA, 1117 bp, Zea mays
cccacgcgtccgcccacgcgtccgcccacgcgtccgcccacgcgtccggttcagcggaaactgagccgtgagcaccgccgccgccaccacctttgcgtttgcggtgacgacacgacaccaataatggcggcggcaaggacaaggagcctgctcgcggcggcgttcctggcgctggcggcggtgccggcggtgctctgccaggcgccaggccccgcggcggcggcgccgcccaacaagggcccgccgaacgttacggcgatcctggagaagggcgggcagtacacgacgttcatgcggctgatgaagtcgacgcagcaggacacgcagctgaacggccagctgaacaactcgttcggcagcgggtacacggtgttcgcgcccaccgacagcgccttctacaacctcaagcccggcacgctcaactcgctgacgcagcagcagcaggtggcgctggtgcagggccacgtcctgccccagttctacagcatggactccttccagaccgccagcaaccccgtccgcacccaggcctccggccgcgacgggccctacacgctcaacatcaccgccaccgccaacaaccaggtcaacgtctcctcgggcgtcgccgaggtcaccatcaacaacgcgctcagcgccgtcaagcccctcgccgtctactccgtcgacaaggtgctcctgccgctggagctgttcggggccaaggcgcccgccgccgcgcccgccgcgtcccaggggaagcccaagaagggcgggtcctcggacgctccctccgggtcggccggctccgacgacgccgcgcccacgggcgccgccggcgccagggccgtcggctggagcttcgctggcctcgccgccgtccttggctgcctgttgtgagagtgagaccgtgcgtcatttctagggacggaggacggacggacgacaagctagttgaagatgagaatgccatgaccgtgcccgggcatgggcgccctcttccatttccatctttgcctgagattgtagtgggcgtgtcccttcccgtcttctctcggctgttatttaaactcttcatctgctagttcttatttgactatggggttgtagatggctatggatcattatgcctgcgtgt

SEQ ID NO: 260465 - DNA, 429 bp, Zea mays
ctcactacgcgaccgctagctactccgatcggatcctgaccacgcccgcctaccaggccaccaccaccaccaccacccacaaatccccaatggcgaggcgcatcgccgtggcggcagcgttcctggcgctggccgtggtggctcccgccgcgctggcgcaggctcccggccccgcggcgacgcctagcgggccgccgaacgtgacggcgatcctggagaagggcgggcagttcaccatgttcatgcggctgatgaaggagacgcagcaggacacgcagctgaacagccagctgaacagctcgtacgccagcagcggcggcgggtacacggtgttcgcgcccaccgacaacgccttcaacaacctcaagcccggcacgctcaactcgctgacgcagcagcagcaggtggcgctggtgcagggccacgtcc

SEQ ID NO: 260466 - DNA, 289 bp, Zea mays
gcgccgtccttggctgtctgttgtgagagtgagaccgtgcgtcgtttctagggacggacggacgacaagctagttgaagatgagaatgctatgcccgggttcccccccccttctttctctctgtttatttatttaaacttctttcatctcgctagtttctttaatttgtactattggtggtttgtaagattggcttatgtgattcaatttatgcgcctgccgctgttgatactgcatcaaaaaaaaaaaaaaaggggccgctcgcgatctagaactacccacgcgtccg

SEQ ID NO: 260467 - DNA, 212 bp, Zea mays
gtttgtaagattggcttatgtgattcaatttatgcgcctgccgctgttgatactgcatcactactcttgagtcatttgtgggtacaaaactacaaatccttgtaagaggtcacatccagtgatccaccatttttcttagctgcagtgaaatgtggtgcttttctcttgttaggtgggacacaacgatccagaaaattgacgcaacgtttatt

SEQ ID NO: 260468 - DNA, 740 bp, Zea mays
ttctcactcgtccgcggacgcgtggggttccggattcccctgccgtcgccgcaagaccggagccctaattccaagcggtaaacgatgaggccgcacgcggtgggtatgggtggcggtggcgtggggaggcggaaggcggtggccgccgccgccgcggctagccgggagtggatggtggtgccggcgtcgggcccggcgcgggtggaggaagccgggaagcacgcggtgatggcgcgtacggggcttcccgcgcgcgatctcagggtgctcgacccgttactctcgtacccgtccacgatcctgggccgcgagcgcgccatcgtcgtcaacttggagcgcgtcaaagctctgatcacagccgcggaggtgctgcttcctaacaccaaggatcccgccttcgcgcgcttcgtccgcgacctccagacccgcgtcctcgcatcttcgtctgaccaggcagctgagctcactgacatggaacgtgaatcacctattgttgcttcaccatttcccctaccaagtgcatccagagggcatgaaatggagatgactaagaagactgctgctgttgtgcctgagatgactagcagcagcagtatgcccaatttagctgttgcaaaagatggaaataccaaggttttgcctttcgaatttcgagctcttgaagtgtgccttgaatcagcctgcagatctttggaagaggaagtatgtgcttgcatctggaattgtttgtctggttatat

SEQ ID NO: 260469 - DNA, 831 bp, Zea mays
cccacgcgtccgttgtcgcgtgggttgtgcctgagatgactagtagcagcagtatgcccaatttagctattgcaaaagatggaaacaccaacgttttgcctttcgaatttcgagctcttgaagtgtgccttgagtcagcctgcagatctttggaagatgaaacttctactctggagcaagaggcatatccagcattagatgagctgacatcaaagatcagcacattaaaccttgaacgagttaggcaaatcaagagtcgtctggttgcgatatctggtcgagtacagaaggtgagggatgagctagagcatttactggatgatgaaatggatatggctgaaatgtacttgacagagaagcttactcaacaagaaattagtgaggcttcatctagagctgaggttgatgatccatctcatacagaagaggatagggatgaagattatagaagtgagccagatggaagcaatgatagctttattggttataagcctaatattgaagaactagagatgcttctagaagcttattttgtgcaaattgatggcacacttaacaagctatcacatcttagggagtacgttgatgacacagaagattatatcaatataatgttggacgacaagcagaatcagctgttgcagatgggagttatgctctcaactgctactgttgtcatcactgctggagtggctgtagttggcctttttggtatgaatattggcatatcactttacgcagacccaacaactgaggaggaaacttgagcagcaaacagaaaattttgggaaactacttttgggaccgttgctggctgcgtgattttgtaca

SEQ ID NO: 260470 - DNA, 555 bp, Zea mays
ggcatatccagcattagatgagctgacatcaaagatcagcacattaaaccttgaacgagttaggcaaatcaagagtcgtctggttgcgatatctggtcgagtacagaaggtgagggatgagcttgagcatttactggatgatgaaatggatatggctgaaatgtacttgacagagaagcttactcaacatgaaaatcagtgaggcttcatctagagctgaggttgatgatgcatctcttacagaagacgataggcaagtatcatagcaagtttttttttctttgaaagaacggaacaagcaatactccatttgttatccacggataacatgaagtggtttatatgcaccttcttgcaaatttgcatataccaattctctaatgtattttatcatttgtgtgtgtgtgtacgcgtttagggatgaagattatagaagtgaaccagatggaagcaatggtagtgttataggttataagcccaatattgaagagctagagatgcttctagaggcttactttgtgcaaattgatggcacacttaacaagctattacatg

SEQ ID NO: 260471 - DNA, 426 bp, Zea mays
cggacgcgtggccttgcatcttctgccagccggcagcacctaacccggcacgagcgcaccgccgcacgttccggatgccccaccgccgccgggatcccgaccggatccctaattccaaggggtaaacgatgaggccgcacgcggtggggacgggcggcggtggcgtggggaggcggaaggcggaggccgccgctgctgccgcaagccgggagtggatggtggtgccggcgtcgggtccggctcgggtggaggaagccgggaagcacgcggtgatggcgcgtacagggcttcccgcgcgcgatctcagggtactcgacccgttactctcgtacccgtccacgatcctgggccgtgagcgcgccatcgtcgtcaacctggagcgcgtcaaagccctgatcacagccacagaggtgctgcttccaaaca

SEQ ID NO: 260472 - DNA, 942 bp, Zea mays
cggtcttttgggctccagcgtgcgcggcgtcccgggcgcttcttaaccgcctgatggatccgcctgtcctccgaggctttcaccgcgcggctttaatcccgattgggttggctggaccgcaacccaattgggggttaattgggattgctactccgcggctgcctgtccctcgtgttcctggattggcgaggccaatcgactggtttgctgcagcctcctgggtagaatcatgaagctaaaaaatagcgcagtggagacttttaaggagaacaatatgattttcacttctgaaggaaatctccactctaaaaaaatgcgagaagattatgttgctagtccaaaccaaccgggtgctgtccagacaagatgcaaatggataattggagatgtaactgaggtctttgatcgcagcacatggaagcttggaaagatcttaaagatgctaaagaacaactactttgttatcaggcttgctgattgcatccagctcaaagagttccacatatctagtttgagaatcccacgtggtctggaagctcctcaaagcaagccctttcatgcagcagataaggccaccggacgcggtaatcgtcgacctgctgatggcgccttgcccggcgcaagggctgcggatcaaatgggtcaccgagcctacgagctggggagcagcggcaagaagcggaaagcaaccgcagacgcccctcaccatctgggcagagcagcagcagcagcacattcccggaatgtcgccgcagcctccaacccgaacggcggcagctacccgcacagctcttcacaggccatataagacgccgaatgctcggttgccagctgcagcgtggacgacctttaccgcctcggcaatggcggcaacgccaagcgtcgccccgccgctgcagggtgcctccctgacgacgccatgttcgcgtgcccgtgcacgcc

SEQ ID NO: 260473 - DNA, 520 bp, Zea mays
gtgaattcttttatctatgactacttatgttaccacatgggtgtctgaatatgactccttaggacctcttccttacatctgtcttctatgtatcacatctgcatttcacacttcatgacagcatgcatttcttggaaacataggtgagctttcttgcatcatattgacatgtgggttttgcagtaccttttgccagtaatggtgaagcctgccatttctattatttatagaatcacaactttctggaattgattcctttcttcaaatttaatcaggtcttactttcccaagctaccctggtgttcctggtggttatatgattccgcaggtgccatataataatgctgtgaactatggacctaataacgggtatggaggaaggtaccaaaacaacaaggtggggggttctctgtgggttgctctgcttgctatctcacacttgtggacttgttctgcaggtgcaacatgcatgcattcagttcatctttgttgaaactgagctattctatgtgttattttt

SEQ ID NO: 260474 - DNA, 871 bp, Zea mays
gctagagtttcctgcatccgccttcgccccccaccggctccacctccgccccccaccgccccgccccacagcaggaaggatggaagccccgggctccccctacgcctcctcgccggaatccgcccccaagcgtgccccacgctcccctccgcagcagcagcagtctccctccgaggaaggagatgacaaggagaaaccaacacatttgagatttctagtgtctaatacggcagcagggtgcatcattggcaagggtggatcaaccattaatgattttcagtcccagtctggggctcgtattcagttatcacgtagcaatgagtttttccctggtacaaatgacagaatcatcatggtttctggactgtttgatgaagtaatgaaggccatggagctgattcttgagaaactgttggctgagggtgaagaattcaacgaagcagaagctagacctaaagttagacttgtagttcctaatagctcttgtggtggtataattggtaaaggtggagcaacaataaagtcgtttattgaagaatcacatgctggaatcaaaatctcgccacaggataacaactatgttggtttgcatgataggcttgttacaatcacagggacctttgataaccaaatgaatgcaatagatttgatactgaaaaagttatctgaggatgttcactatccacctaatttgagctccccatttccttatgcaggccttactttcccaagctaccctggtgttcctgttggttatatgattccacaggtgccatatagttatgctgtgaactatggacctaataatggttacggaggaaggtatcaaaataacaagccaactacacctatgagatcacctgctagtaat

SEQ ID NO: 260475 - DNA, 907 bp, Zea mays
acgcgtccacccaagcgtccgcccacgcctccgaatcagagtacgatattcacacagcgaaccgagaaaccaacacagcaacaagcaaagcagcgatccgacatccgagagatggacgcggtgatgttcgggctggagactcccctgatggcggcgctgcagcacctgctggacgtgcccgacggcgacgccggcgcgggcggcgacaacaagacgggcagcggcggcagcgccacgcgcacctacgtccgcgacgcgcgcgccatggcggccaccccggccgacgtgaaggagctgcccggcgcgtacgcgttcgtggtggacatgccggggctgggcacgggcgacatccgggtgcaggtggaggacgagcgggtgctggtggtcagcggcgagcggcgccgggaggagcgcgaggacgacgccaagtacctgcgcatggagcggcggatgggcaagttcatgcgcaagttcgtgctgccggacaacgccgacatggacaagatctcggcggtgtgcagggacggcgtgctcaccgtgaccgtcgagaagctgcccccgcccgagcccaagaagcccaagaccatcgaggtcaaggtcgcctgaggtgggactaggtcgaccgatcgtggctctgaagatgtgggagcagtgccagcgagttgtgaggacctctacctgtgtggaatgtggcgaggaataatcgtagtctgtagtgggggtgcttctggtgtgcgtgtttgcgttccttcggtctcggtgtctgtctaccaattcctatctgatgtatcggcttcggtttcgtatgaaccatgccggatgctttcagtatgttcatctacctgtgtcttttgtctaaataatccgtagtcttcattgacagaaagactacacacgctatcctgtc

SEQ ID NO: 260476 - DNA, 836 bp, Zea mays
cccacgcgtccggaatcacacaacagcagctcaaaaacctaacacacctcaacaagcagagcaaagacccgggattcgccggcgcggtagcgagagcgagagatggacgggaggatgttcggtctcgagacccccctgatggtggcgctgcagcaccttctggacgtgcccgacggcgacgccggcgcgggcggcgacaaggcgagtggtgccgcggcgggcggcgggcccacgcgcacctacgtccgcgacgcgcgcgccatggcggccaccccggccgacgtcaaggagctcccgggcgcgtacgcgttcgtggtggacatgccggggctgggcacgggcgacatcaaggtgcaggtggaggacgagcgggtgctggtgatcagcggcgagcggcgccgggaggagcgcgaggacgccaagtacctgcgcatggagcggcggatgggcaagttcatgcgcaagttcgtgctgccggacaacgccgacgtcgacaaggtcgccgccgtgtgcagggacggcgtgctcacggtgaccgtcgagaagctgcccccgccggagcccaagaagcccaagaccatcgaggtcaaggtcgcctgagggagcaagcagtagctgtgcttctgaaactttgtgtgtttgtgtttgcttccttctttggtatcaccaatcatcctatctgatatatcgactggggtttttgctgtctccatagaataaatctctacatgtctcttgtaaccttttctggtgaagatcgtgtcgcgatgaatctataagttaccgtttgttttcgttttgaaaaacagcgggtgtgtagggggaggggggggggg

SEQ ID NO: 260477 - DNA, 779 bp, Zea mays
ggccgacccacgcatccaatcacaatacgaaacgaattaatccccaatcaacacagcaagtcagcaacaagcaaagcagcgacccgagagatggacgcgaggatgttcgggctggagaccccccgggtggcggcgctgcatcacctgctggacgtgcccgacggcgacaaggcgggcggcggcgccacgcgcacctacgtccgcgacgcgcgcgccatggcggccaccccggccgacgtcaaggagctcgcgggagcgtacgcgttcgtggtggacatgccggggctgagcacgggcgacatcagggtgcaggtggaggacgagcgggtgctggtgatcagcggcgagcggcgccgggaggagcgcgaggacgccaagtacctgcgcatggagcggcggatgggcaagttcatgcgcaagttcgtgctgccggacaacgccgacatggtcaagatctcggcggtgtgcagggacggcgtgctcaccgtgaccgtcgagaagctgcccccgcccgagcccaagaaacccaagaccatcgaggtcaaggtcgcctgaggtgggattaggtcgcccgatcgtggctctgaagatgtgggagcagtcccagcgagttgcgaggacccctacctgtgtataatgtggcaagccattgtagtagcctgtagtgggggcgcttttcgagagagtgtatgtgatcttctgggggtaagctttaaccttcaactacatgtaaacggattaagaatcctcagttaattcaaacccccctcggcttcagt

SEQ ID NO: 260478 - DNA, 364 bp, Zea mays
caagcctctacagtaagtcgctatataatccccaatcaacacagcaagtcagcaacaagcaaagcagcgatccgagagatggacgcgaggatgttcgggctggagaaccccctggtggcggcgctgcatcacctgctggacgtgcccgatggcgacgccggagcgggcggcgacaaggcgggcggcggcgccacgcgcacctacgtccgcgacgcgcgcgccatggcggccaccccggccgacgtcaaggagctcgcgggagcgtacgcgttcgtggtggacatgccggggctgagcacgggcgacatcagggtgcaagtggaggacgagcgggttcttgtgatcagcggcgagcggcgccggg

SEQ ID NO: 260479 - DNA, 1595 bp, Zea mays
tccggaattcgggtcgagccacgcgtccgtcctctaatcaatcaagacagccccgtgctagctcacccgccggggctcgccacgatgagaggcctcctcgcgtgcgccaccctcgcccgccgcgccgccgcctcctccgcgcccgcgcgcgtccgccacctggcgggcgccgcggaggcggcggaggccgagctcaagaggacggcgctctacgacttccacgtcgcccacggcggcaagatggtgccgttcgccggctggagcatgcccatccagtacagggactccatcatggactccaccgtcaactgccgcgccaacggcagcctcttcgacgtcgcccacatgtgcggcctcagcctcaagggccgcggggccatccccttcctcgagtccctcgtcgtcgccgacgtcgccgcgctcagggacggcaccggcaccctcaccgtcttcaccaacgagcagggcggcgccatcgacgactccgtcatcgccaaggtcaccgaccaccacatctacctcgtcgtcaacgccggatgcagggacaaggacctcgcccacatcgaggcgcacatggaggccttcaacaagaagggcggggacgtcaagtggcacatccacgacgaccgatcgctgctcgcattgcagggtcctcttgctgcacctactctgcagttgctgacgaaagaagatttgagcaaaatgtacttcagtgacttcaagatgattgacatcaatggatatgcatgctttctgacgagaactggctacaccggcgaagatggttttgagatctctgttccgtcagagaatgcagtggatcttgcagaggccatcctagagagatcggaaggcaaggtgcggctgaccggcttgggcgcccgtgacagtctccgactggaggcaggcctgtgcctgtacggcaacgacatggagcagcacatcacgccggtggaagccggcctctcatgggcgatcggcaagaggaggagggcagagggcggtttcctgggcgcagacgtgatcctgaagcagctccaggaagggccaaagatcaggcgcgtgggcatggtcacgcaggggccgcccgcgcggagccacagcgagctggtgagcggctcgggggagaggatcggcgaggtgaccagcggagggttcagcccgtgcctgaagaagaacatcgctatgggctacgtgaagtcgggaatgcacaaggctgggacggagttgaaggtggtcgttcgcgggaagtcctacgacgccgtggtcaccaagatgccgttcgtgcccaccaagtactacaagccctcgtagattatattcttgtacagagggacgccttgcgtttctcttttgtcgttgcggcttgttcttggcagattggttaagcattgcaactgtaacttctgtgagattgtcttacggttcacatttcatgtatgcctgcctaataagccttcttttcccaaatacaaagcatgcatgtgcctatgtgaagaatcgaatcttgaaaaaaaaaaaaaaaaaaaaaaaaaaaaaaaaaaaaaaaaaaaaaaaaaaaaaaaaagggcggccgcccgggaatccggacggta

SEQ ID NO: 260480 - DNA, 585 bp, Zea mays
gttctgtttagccacacgttacattaagcgtctgtgatttatgcctgccaaaacattatcgttgctagttcaaaatataactgatccaaaagcagcatacacacatggttcattagaaatccgaacagactattagcgagtattgcttgcacacaaaagcacagagttcgtttgtccagcggcaatattagcagaagacaagtgctattctcgttggacagaaaaacgacatgtcccttcatttccaacgatagaccatcttggagagtctcttcttgcccttggtgttcttcttggcgagcaagtgttgcttcccggcgcaccgccgcacgatcttgtccttccctgtcactcgaaaccgcttcaccgacgccatgacgagtgatgacacacataaccgaacgagacatgaatcagtagaaggcatcgtacaaccaaaggactcgcaggaactaaggtcgagctagtaggaaagaaccgtgtgtgtcttcctcttgcagcccttctttgacgtgccgctggccatcaccgcgacctcagtcgcatcgaccggacgagtgggtcgacccgggaattccgagaccg

SEQ ID NO: 260481 - DNA, 768 bp, Zea mays
ctccaacgcccctcacggcttcgcttcagtgtcttcacgggccgccggcggagatgcggttcacggcgtctccggtggtggagcttccggtcagcggcgcggtgttgactttcgagcaggacaacgactccttcgaggtgggcacctctgtgtggccctcgtccctggtcctcgtcaagttcgtcgagcgctgcatccgcgacccggccctcccctttgccgacgtgctccgcttcccgggaacccgggccgtggagctcgggtccgggtgcggaccggcaggacttggcctctcccgcctcggcctcaccgatctcgtcctcaccgacatcgccgccgtgctcccggcgctccgccgcaacctgcggcgcaaccgagtccacctcgcgcgcgcgccccgcctcgcccagctccactggaactgccccgcgcatctcgcgacgctagccaccccgcgccgcttcgatctcgtcgtcgccgcagacgtggtctacgtgcaggagtccgtgccgcacctcatcgcggccatggatgcgctcgccgacgccgagcgcggcgtggtgctgctcggctaccagatccggtcgcccgaggcgcaccaggtgttctgggagaccgttccggctgtcttcccggtgatcgagaaagtggcacgggagcacctcgaccctgagtacgcctacgaggaatccgatgtattcatactccgaagaagcccgcgtcagtgaggtcaggtggtgaacttttgccagcagtttactccccgat

SEQ ID NO: 260482 - DNA, 413 bp, Zea mays
  unsure (1)..(413): unsure at all n locations
gcgtctccggtggtggagcttccggtcgncggcccggtgctgatgttcgagcaggacaacgactccttcgaggtgggcacctctgtgtggccctcgtccctggtcctcgtcaagttcgtcgagcgctgcatccgcgacccggccctcccctttgccgacgtgccccgcttcccgggaactcgggccgtggagctcgggtccgggtgtggcccggcaggacttggcctctcccgcctcggcctcaccgacatcgcccccgttgaagcagtcaaaaatagcatcttggagagtctcttcttgcgcttggtgttcttcttggcgagcaagtgttgcttcccggcgcaccaccgcaccatcttgtccttccctgtcacccgaaaccgcttcaccgacgccatgacgagtgatgacnc

SEQ ID NO: 260483 - DNA, 867 bp, Zea mays
cccacgcgtccgggcggccaagcattagcaaagcataccccaaaatccccaaaccctagcgaactcggcacggcggcgatggcagcggcgggcctgcggaaggggaacgcgcgcctcccacccgaggtgaaccgggtgctgtacgtgcggaatctgccgttcaacatctcgagcgaggagatgtacgacatcttcggcaagtacggcgcgatccggcagatccggctgggcaacgccaaggacacgcgcgggaccgcttacgttgtctacgaggacatatacgacgccaagaacgccgtcgaccacctctccggcttcaacgtcgccaaccgctacctcatcgtgctctactaccagcccgccaagatgtccaagaagtcggatgtcaagaagaaggaggacgagatcaccaggctccaggagaagtacggaattgggtccaagacgcccggcccgggctccagcgactgagcggccagggtattgcctctgcagcctcttgtatgatgaagagcaatcaaaaggcacaaattggttgtgctgtgctgtgttacatccagcgtcgctaattactctgttgttattctggctccataacaattgaatagatatgtgcttgtctaatcgccagcggtaatgtttagcttctaccaaaaacaagaggaatgagtagtgtacacctcacacctgtggctatgcttgaattgttgatctatattctgttgtgagactgagagtagcatggttaggctgttaaatttgtgcttccattattggttagtatgtatctttgttttggtagctggtatgtgttatcgtaagctaaaagttcaagcagaatcaagtgggtgtgcttcttgccccatt

SEQ ID NO: 260484 - DNA, 491 bp, Zea mays
ttcgcccggccacccacgcgaccggaggccatacgcaacaagcaaagcatacccccaaatccccaatccccaatccccaatccccaaaccctaggttatctcggcgcggcagcgatggcggcggcgggcctgaggaaggggaatgcgcgcctcccgccggaggtgaaccgggtgctctacgtgcggaacctgccgttcaacatctcgagcgaggagatgtacgacatcttcggcaagtacggcgcgatccggcagatccgtctgggcaacgccaaggacacgcgcgggaccgcttacgttgtctacgaggacatctacgacgccaagaacgccgtcgaccacctctccggcttcaacgtcgccaaccgctacctcatcgtgctctactaccagcccgccaagatgtccaagaagtcggatgtcaagaagaaggaggacgagatcaccaggctccaggagaagtacggaatcgggtccaagacgcccggccc

SEQ ID NO: 260485 - DNA, 1540 bp, Zea mays
  unsure (1)..(1540): unsure at all n locations
cgtctgcctccccctgcacaccacgcgacgccacacacaggatagcagggacggcggcgcggagctagggttttgatccgccacgccggctaggctgcaccatcccgacgaagccatggagagggagctactggagacgttcgatgcggccaagaaggcggccgacgctacggcaggacagggcgactcgccggaggctggccgctgcctcgacgcgctgcaccggctgcgcgacatacgcgtcaacaccgacatcctcgtctccacgcaggttggcaaacgtcttcgacctcttactaagcaccctcactcgggcattcaggcagtcgcatcagacctttttgggtactggaaaaaggttgtccttgaagagacaggaaagaaaaatgggagctcagagaatgaaaaatcaatggactcttcaggaaaggttgagaaggtgaggcccatgaaggttgaaaagaattctgcatcagcaagcatgaaggttgagaaaagagatgtggatgataggggtcagaagcctgacaatgtcaaagttgagaagaccgctagtaatggttccagaactcaatctgtgaaggtagaaagggtatccaaagaagtcaacagaactgatgcaaagaagccagcatctgtccccaatggccccccaaagcttacatctcttgtcaaatgcaatgatcctacccgagataaaatccgggaactccttgctgaagcctttgcaaaggttcccagagagactagtaatgatgaccgagatgaagtgagaaacatcttggatgaagttgatgcatgcgacccattcagagttgctgtgacagtagagtctgcactatttgagaggtttgggcgttccactggggcccacaaggcaaaatacaggtcaatcatgttcaacctgagggctgaaaacaacactgattttcggagaagggttctcattggtcaagtgaccccagagaggcttccagacatatcccctgatgagatggctagtgatgcaaggaagcaagagaatttgcagatcaaggagaaggctctgtttgactgtgagcggggagcggcaccaaaggcgacgacggaccagttcaagtgtgccagatgtgggcagcggaagacgacttactaccagctgcagactcggagtgctgatgaaccgatgacgacgttcgtcacatgcgtgaactgcaacaatcactggaagttctgctgagtgtcagccttgctaaagtgtttacttagttgtgctgagcacactatcctgctgtgatgtgtgtgctctgttagttgtgactggaagttcgacagggcaggctgaacaactcaacttttttccccttttttaccccccgtaaactaggagcagttatcctcttcctctgtcaggcagcctcctgattcattcagattgtactagtcgaacgcgtgaatgttgttgacttgatcgcatcgtcaccagatgtgaatgttcttgggtggagttagaatagaatggtcccaagtaaaaaaaaaaaaataaaaaaaaaaaannnaa

SEQ ID NO: 260486 - DNA, 431 bp, Zea mays
ctcgccctccacaccaggccacgccacacactggatagcgagcgggagcgtcggcggcggcgggggagctagggttttgatccggcctcgccggctaggctgcgccgccccgacgccgaagccatggacagggagcttctagagacgtttgacgcggccaagaaggcggccgacgcggcggcaggggacggcaactcgccggaggctggccgctgcctcgacgcgctgcggcggctgcgcgacattcgcgtcaacaccgacatcctcgtctcgacgcaggttggcaaacgccttcgaccccttactaagcatcctcactcaagcattcaagcagttgctgcagacctttttgggtactggaaaaaagttgtccttgaagagtcaagaaaaaaaaatggcgggctaaaaaatgaaagatcaagtgactcttt

SEQ ID NO: 260487 - DNA, 816 bp, Zea mays
gttgctgggtcagatcctcatccatttgcaggactaggaggcagcagtgtcgagcttatggagtcctcgaggcaatccttgggtgcctatcacagctattctgttgggagcttaggtcagatgcagttttctagcggggtgaggaaccctagccgaggtcagactacacttcaaagtcggaggtcgcaatcaagagaggatctcagttcttcacttgctgatattcattttccaaaagtgtagcactgcatcaaggaatgactagaatgagatccttacatgccataacaaactctgtaaataatagctccagagttcgaactgcttgatttcttctctaatcagaagtcaattttgtctgtccgcttacacttcaatgaggtttaggattcatataaatgaacttatgacttgtgcctatcctggacatgatacatccattcatcccattgtatgtgctcaagaacataccatagcagtgaagttctggtagtgtactggaagatatatttatgccgttcaccagactggttgaccatggctacagcctacaactttatagatcgattgtgctgcaatcagggatgttattttgttttgtatctgagacgttttaaaggtgcatgtggtctcatgtactgttgtaccctctaggctctagtggctctgtgaggttactcttctttcctggaataccttttgataggctactctgtggtatcaactgaaatcatgaaacactgacatcagttctactggattatctagttgcgtactgtgtatacacatctattgagttttttttgttggcatagt

SEQ ID NO: 260488 - DNA, 2023 bp, Zea mays
  unsure (1)..(2023): unsure at all n locations
tctcacgcgtccgcccacgcgtccgcccacgcgtccggcgtggttcgttaggaaaggaaatcgattccccccgcatctgatctcttcggtgctagagaaatataggccgccgccgcctcctccttattcggtgaaaggtgggcagttagggttgggagatctcttgactcacgacacgagcagcagaattcgtcgagggccgctggttgctgcgagaggtccgggccttcgtgggatcttgaaaattgaatgttctaatggagtccaagggtggcaagaagaagtctagcagtagtcgttcctccctgatgtacgaagctccccttggctacagcatcgaggatatccgccctgcaggcggcatcaagaagttctccgctgcttactcgaactgcgcgaggaagccatcctgatatctctgtcgtcatccccatcctagtagcgtagaaacctcctgcattttcattttgatctccctaatctctccggctagctgctttccagtgaccaaaagatatcagagaccacctcccgtggctgtctgccatctggctctgaaacgatggcagtcctacaagctgctgcccctccccctgtctctgtgattggattcgagggatttgagaagcgccttgagatcagcttctctgaggcacctgtcttggctgaccccagcggaaggggactgcgtgcgctctcgcgtgcccagatcgactctgttcttgaccttgctcggtgcaccattgtgtccgagctctcaaacgaggacttcgactcttatgtcttatctgagtcgagcctgtttgtctacccatacaagattgtgatcaagacctgtggaactacaaagcttctgctcgctattccgaggatccttgaacttgctgaagagctcctgttgccactcgctgcagttaaatactcccgtggaacgttcatattccctgaagcacagccttccccacacaagaacttcgctgacgaggttgccttcctgaatcgcttcttcggtggcctcaagtccggtggcaatgcttatgtgattggtgactctgcgaagcccgggcagaagtggcacgtctactacgccgctgagcaccctgaggagcctgtcgttactctagagatgtgcatgactgggctggacaagaagaaagcttctgtcttcttcaagaccactgctgatggttactcgctgtgcgccaaggagatgaccaagctctctggtatctcggacatcatcccagagatggagatctgtgacttcgacttcgagccctgtggctactccatgaatgctgttcatggccctgctttgtcgaccattcatgtgaccccagaggacggcttcagctatgcaagctacgaggtcatgggctttaacccgggctctttctcttatggtgacctggttaagagggtgctgaggtgctttggtccaactgagttctctgttgccgtgaccatcttcggtgatcgggacaatgcgaagacctgggggacgaaactggatgctgaggcctatgcttgcagcaacatggttgagcaggtgctgccgtttggtggcttgctcatctatcagagcttcactgttacggccgaaacgacccatgggtcgccgaggtcagtcctgcatgacttcgctggtgacattgtcaagaatcgctcagagagtgatgctccctgggaagctgatgctgtggatgagagcgaggaaagagatgtaaagaagatgaaatgctgatgtggtcgacgatagatcagattcagagttgctgccactggttatcttgtgaagcagccaagcctaattatttatgccacataaacctgtgctattgtaatgtgtcacatgcttatatttgcaataaacagctctaggtggtcagctttgtctgccgcaatgagcagtgtatcgatattgtggttttgaattgtttggatctaaataaagtccaatttcgatgccttttctattggcatcaaaaaaaaaaaaaaaaaaaaaaaaaaaaaaaaaaannaa

SEQ ID NO: 260489 - DNA, 595 bp, Zea mays
  unsure (1)..(595): unsure at all n locations
acccacgcgnccgcggacgcgggggcggacgcgnggggnncttttgagatactagnggaancgttctctgaatggtatggatcatgacgttgggtggaatggatatgtcatcataataactctgcagttttcatcggttctttggttcttctctgcagtgaaaattgaatgttctaatggagtccaagggtggcaagaagaagtctagcagtagtcgttcctccctgatgtacgaagctccccttggctacagcatcgaggatatccgccctgcaggcggcatcaagaagttctccgctgcttactcgaactgcgcgaggaagccatcctgatatctctgtcgtcatccccatcctagtagcgtagaaaccacctgcattttcattttgatctccctaatccctccggctagctgctttccagtgaccaaaagatatcaaagaccacttcccgtcttcctcccgtggctgtctgtcatctggctctgaaacgatggcagtcctgcaagttgctgctgctgcccctccccctgtctctgtgattgggttcgagggatttgagaagcgcttgagatcagcttctttgggcacctgtc

SEQ ID NO: 260490 - DNA, 427 bp, Zea mays
gagaaatataggccgccgcctcctcctcattcggtgaaaggtgggcggttagggtggggagatctcttgactcacgacacgagcagcagaattcgtcgagggcacgctggttgctgcgagaggtccgggccttcgtgggatctgtaagaatctcttgctctccatacatgttcttgttgtgcgatctgatccagtttgatgttcgttttttgtctggtattcgattatgctgggatttctaagaaaccctaatcccagtttgatggttagggaagtaataattacttgatttgtgaaaggggattaatttgtgaaggagaatggggtgcctatattccttcactaggactcgatttttcgtttcgttgagaatcttggatagccctctggcgtctgggtttctagtttcttcggttgcgtatcgaat

SEQ ID NO: 260491 - DNA, 523 bp, Zea mays
cggacgcgtgggcggacgcgtgggcggacgcgtgggagacgttcaacgacggtggggacacgccgctgcaggtgtgcgcccgccatctacgacgaggccatgtttcttcaatagatccgtcgtcgtgggctactacaagaaccgcgtcaaggtagagtatcccgcttgttgctttatgctaccgctgcatgcagtctaggtgttcagtgaaatgtcaatgcaattttgctattgttttgcgattgattgctatgtgctagcgtctgttgtatggtggtgagttacgaggccattgagttccttctgtcgcggaaggttacagtcaaagttttgtgattgactgctatgtgctagcttctgttgggtctgatcaaaatgaacaatacctgattttgtcagtagcggaaggtcccagtcaaagtttttggttttgccggcattcagatctgaagcgagtccaagtgcatacacgcctaccaaccttggattcctctcctggttatgtatcgaaagcccttaaatc

SEQ ID NO: 260492 - DNA, 1467 bp, Zea mays
ctggtgcacgtgccggtaccggttcgccgggtcgacccaggccacccttcacgcgtccgcgcgagctcgagccctcgcccgctcagtaaacaccaaagcctcagatctcagtcacctgcgccgccgcttcgttcgtgtggaggggagaagagaggaaatggcggcgaccgagggcgtgctcctggggatgggcaaccccctcctcgacatctccgccgtcgtcgatgacgccttcctgacaaagtatgacatcaagctgaacaatgctattctcgctgaggagaagcacttgcctatgtatgacgagttggctagcaagagcaatgttgaatatattgccggaggagccacccagaactctatcagggttgcccaatggatgcttcaaactcctggtgcaacaagttacatgggatgcattggaaaggacaagtttggtgaggaaatgaagaaaaacgctcaagctgcaggagttactgctcattactacgaggatgagactgctcctactggcacatgtgctgtatgtgttgttggtggtgaaaggtcattgattgcaaatctgtcagcggcaaactgttacaaatctgagcatctaaagagaccagagaactgggcactagttgaaaaggcaaaatacatctacattgctggatttttccttacagtgtcgcctgattctatccagctagtcgctgagcatgctgcagcaaataacaaggtgttcctgatgaacctctctgctcccttcatttgtgagttcttccgtgatgcccaagagaaggtcctcccgtatgctgactacatcttcggcaacgaaactgaggcaaagatctttgccaaagtcagaggatgggagactgagaatattgaggagattgctttgaagatctctcaacttcctttggcttcaggcaagcaaaagaggattgctgtgattactcaaggtgctgatccagtggttgttgctgaggatgggaaggtgaaaacgttccctgtgatcctattgcccaaggagaagcttgttgacaccaacggcgcaggtgatgctttcgttggaggcttcctctcacagttggttctaggcaagggcattgaagactgcgtgagggcaggttgctatgccgcaaacgttatcatccagcgcccgggctgtacttacccggagaagcctgacttcaactagtgcaaaactgaggcacgtcatgagagggactgttataggcacacttaattgttaaccagtgcgtggttcggtgtctacacaccctgtattcttccgaggcttctcttctgatccggccaatatttttgccgtgaaatttgtgttctgcaactatggacgtctcctttgttgctgtataaggcatgatttgccatcattctgttgcttcggtgatgcttgcaatgcaatgagaatgtgttggaacgaaaaaaaaaaaaaaaaaaaaaaaaaaaaattattta

SEQ ID NO: 260493 - DNA, 790 bp, Zea mays
  unsure (1)..(790): unsure at all n locations
gctcagcgactagctggatagaatcaggcgacactgtaaggaaaaaggtgttcctgaggaacctctctgctcccttcatttgtgagttcttccgtgatgcccaagagaaggtcctcccgtatgctgactacatcttcggcaacgaaactgaggcaaagatctttgccaaagtcagaggatgggagactgagaatattgaggagattgctttgaagatctctcaacttcctttggcttcaggcaagcaaaagaggattgctgtgattactcaaggtgctgatccagtggttgttgctgaggatgggaaggtgaaaacgttccctgtgatcctattgcccaaggagaagcttgttgacaccaacggcgcaggtgacgctttcgtcggaggctttctctctcggctggtccagggcaagagcatcgaggactgcgtgacggctggttgctacgccgccaatgttatcatccagcgcccaggctgtacctacccagagaagcctgacttcaactagtgcaatactcaggcaccgaggcacgttacgagcggttcggcgtgtacactcccctgtatcctttccggtccggccaattttttgtcgccgtgatatttgttcagcaactatggacgacgtcgcctctgttctgtacgaggcatggtttgccatcattattctgttagcttcggcgatgcttgcaatgcgacgagaatgcgttggacccatatatgcaatgcaaagataagcagctcaaaaaaaaaanaaaaaaaaaaaaaaaaaaaaagggcggccgc

SEQ ID NO: 260494 - DNA, 520 bp, Zea mays
cccacgcgtccgcccacgcgtccgcccccccgtcccaaagcctcagatctcagtcgcctgcgccgccgcttcgttcgtgtggaggggagaagacaggaaatggcggcgactgagggcgtgctcttggggatgggcaaccccctcctcgacatctccgccgtcgtcgatgacgccttcctgacaaagtatgacatcaagctgaacaatgctattctcgctgaggagaagcacttgcctatgtatgacgagttggctagcaagagcaatgttgaatatattgccggaggagccacccagaactctatcagggttgcccatcggatgcttcaaactcctggtgcatcatgtttcatgggatgcattggattggacatgtctgctgcggtaatgtttgacattccttatttctacattatctcccgtcctatctcctccttttttattctccttccttcatatctttatattctctattttttactcattattcctttcctctccaccacattcctacatcttt

SEQ ID NO: 260495 - DNA, 246 bp, Zea mays
caaattcttgatgttgtcacattaagcacccatgagacggggagaaacgtagtggactcctaatttttatggccaggtatgacgaattggctagcaagagcaatgttgaatacattgctggaggagccactcaaactctatcagggttgcccaatggatgcttcagattcctggtgcatcaagttacattggttgcatcgggaaggataagtttggtgaggagatgaaaaaaaatgcacaagctgc

SEQ ID NO: 260496 - DNA, 1038 bp, Zea mays
tttcttcagttcattgacgagaatctaacatttgtgtgtgctcatgttgaaggttaccgttttactccgaagcaaagctgatgttctttgtatacttgtggtaccctaagacaaagggaactacgtatgtttatggaactttctttaaaccatatatttctcagcatgagaatgaaatcgaccggaatctccttgagctgagagctcgagccaccgacacggttgtcctttattttcagaaggctgcttcggcaggacaaagtactttctttgacgttttaaaatatgttgctgcccagtcaccttctcagaaatcaaggcaacgccttcatcaggaatcacagcagccgccacaacaacagcaaccacaagtgcaggtgcagcaggcgcaaccacaaaaacaagcagcacctgttatgcgcagagcatcatctattgctgctcggcaagcagcaatggcacagcaatctcaggagactatacccgttccatcttcgcccaagatcaagcgtcaaacatcagggagacctggttcagtggcatccacaaagcctccggtagctgcatccacaccaaaacctggtggtagcccaaagaaaggcgaggtcaaacctgctgccgacccagttcaaactccaaccacaggtgccgattcaccaaaacccgagcctagcgccccatcacttcctggagccgaaggggtggacaacatggccatcgatgaggtcagtggtgacgccccagagggcgcggaagagcttgaccctgcgctcgaggagacgccgatggaggagacgatccgtgtgacgcgcgccaagctaaggaggcgcacggccaccgaggatcctgctgggaattagctgcatgccgttgttttccctgcacattgtgttgatcttttttttgggttttaggctgtcatgttgtttggtggaatggagatgtgttgttgaattggttctttgtgacacagttgaaaaacaactgattactggaccttggattctatgctttcttagtgcccttgtgatttaggtt

SEQ ID NO: 260497 - DNA, 1036 bp, Zea mays
agtagccagagtgtgagctgacggcggacgtgctcgcctctcctctcctcacatttccggctcccctctccgcattccatggcaccgcattaccggtatttttagccgccggaggagacgggttgcgtagagagaggggaaaccagagctcctgactgttcctctctccctcctcacgggcgggctccgtctgttccgtccatccaccgccccggtcgtctcccggccagatccctctcctgcaaggtttctttgcgagtggccggagaagatgatgggcgggttcctctccagggtcctcctgctggcttttggctatgcctatcctgcctatgaatgctacaagaccgttgaactgaacaaaccacagattgagcagctcatattttggtgtcagtattggattttagttgccctgttgacagttttggagagatttggagattttacaatatcatggctaccgttttactcagaagcaaaggtgttgttctttgtatatttgtggtaccctaagacaaagggaactacgtatgtttatggaactttctttaagccatatatttctcagcatgagaatgaaatcgaccgaaatcttcttgagctcagagctcgagccaccgatatggttgtcctttacttccataaggctgcttcggtagggcaaaatactttctttgacgttttaaaatatgttgctgcccagtccccttctcggaaatcaaggctgcaccctcatcaggaaccacagcagcagcaaccacaagtgcaggtggagctggagctgcagcagccgcaaccacaaaaacaagcagcacctgttatgcgcagaggagcatctattgctgctcggcaagcagcaatggcacagcaatctctggagactatacccgttccatcttcacccaagatcaagcgtcaaacatcagggagacctggttcggtggcatccacaaagcctgcagcagctgcatccacaccaaaacctggcggtagccaaagaaaggtgaggtcaaacctgctgtcgacccagttc

SEQ ID NO: 260498 - DNA, 577 bp, Zea mays
gacgcgcgggccgatacaagactctataatgagtcggattagttctttgtatatttgtggtaccctacggcaaagggaactacgtatgtttatggaactttctttaagccatatatttctcagcatgagaatgaaatcgaccgaaatcttcttgagctcagagctcgagccaccgatatggttgtcctttacttccataaggctgcttcggtagggcaaaatactttctttgacgttttaaaatatgttgctgcccagtccccttctcggaaatcaaggctgcaccctcatcaggaaccacagcagcagcaaccacaagtgcaggtggagctgcagcagcaaccacaagtgcaggtggagctgcagcagccgcaaccacaaaaacaagcagcacctgttatgcgcagaggagcatctattgctgctcggcaagcagcaatggcacagcaatctctggagactatacccgttccatcttcacccaagatcaagcgtcaaacatcagggagacctggttcggtggcatccacaaagcctgcagcagctgcatccacaccaaaacctggcggtagcccaa

SEQ ID NO: 260499 - DNA, 672 bp, Zea mays
tttcttcgtccgggcatttgatgtgccgatttcctgtattttggcttttggctatgcctatcctgcctacgaatgctacaagactgttgaactgaacaaaccagagattgcgcagctcatattttggtgtcagtattggtaaggcgtttcaataaattattatgcggtcgcaatattgacttccgtgaacaatctgccaaatttaggtttgtttcctgtgtctaggattttagttgccctgttgacagttttggagagattcggagatttcacaatatcatggctaccgttctactcggaagcaaagctgttgttctttgtatacttgtggtaccctaagacaaagggaactacgtatgtttatggaactttctttaagccatatatttctcagcatgagaatgaaatcgaccggaatctccttgagctcagagctcgagccaccgacacggttgtcctttacttccagaaggctgcttcggcagggcaaagtactttctttgacgttttaaaatatgttgctgcccagtccccttctcggaaatcaaggctgcaccctcatcaggtttggtcgaatgtattctcttttttgtccaaaaaaaatccattgaataatttgttgttaagtgttcatcatgtttacacagatactcaaaaccttttttaaaggtc

SEQ ID NO: 260500 - DNA, 751 bp, Zea mays
ggaaaccagagctcctgactgttcctctctccctcctcacgggcgggctccgtctgttccgtccatccaccgccccggtcgtctcccggccagatccctctcctgcaaggtttctttgcggtatggtcggttctctgtggtttctcttctgaatgtgctggcgcggtggatggtgttttgatctgtgttcgcttttggcggatctggtcgcgcgcagaggggccggagtcggagtcggagaagatgatgggcgggttcctctccagggtcctcctgcttggcttttggctatgcctatcctgcctacgaatgctacaagaccgttgaactgaacaaaccacagattgagcagctcatattttggtgtcagtattggattttagttgccctgttgacagttttggagagatttggagatttcacaatatcatggctaccgttttactcggaagcatagctgttgttctttgtatatttgtggtaccctaagacaaagggaactacgtatgtttatggaactttctttaagccatatatttctcagcatgagaatgaaatcgaccgaaatcttcttgagctcagagctcgagccaccgatatggttgtcctttacttccataaggctgcttcggtagggcaaaatactttctttgacgttttaaaatatgttgctgcccagtcgccttctcggaaatcaaggctgcaccctcatcaggaaccacagcagcagcaagcacaagtgcaggtggag

SEQ ID NO: 260501 - DNA, 564 bp, Zea mays
ctcctcttctttcggttctccctctccgcatgccattccaacggattacgggtatttttagccgccggaggagacgggtagcgtagccacactagcgagagagagagagagagggagggaggggaaaccatagctcctggccgttccgcgctcctcacggccggcctccgtcccttctgcctgcccatccaccgcgccggccggccggccgtctcccgtccacatccctcctcctctcctgcatggttcctgtgcggtatgtagcgcagaggggtcggagtcggagtcggagtcggagaagatgatgggcgggttcctctccagggtcctcctgttggcttttggctatgcctatcctgcctacgaatgctacaagactgttgaactgaacaaaccagagattgcgcactcatattttggtgtcagtattggattttagttgccctattgacagttttggagagattcggagatttcacaatatcatggctactcgttttactcggaagcaaagctgatgttcttttatacttgtggtaccctaagacaaaggaactacgtatg

SEQ ID NO: 260502 - DNA, 734 bp, Zea mays
gaccggtccggatttccggttcgttcacacgcccgcgctccgaaccgcatagaaggcacagaaacctcgggggacttttaaaggagcattggcacccaaaacccaagcgtcaaacatcagggagacctggttcggtggcatccacaaagcctgaaacagctggcattcacaccaaaacctgtggggagcccaaagaaaggtgaggtcaaacctgcttgcgacccagtttaaactccagccacaagtgcagattcaccaaaagccgagcctagcgccccaccactatgtgagaccgaacaagtagacaacatggctatcgatgaggatcagtggtcatcactgcacacggcgcgtgatgaccttgaccccgcagctcgaggagacgccgatggaggagacgatccgtgtgacgcgcgccaagctaaggaggcgcacggccaccgaggattctgctgggaattagctgcatgccgttgttttccctgcacattgtattgatctttttccgagttttaggctcacatgttgtttgctggaatggagatatgttgttgttcacttggttcttgtgacacagagttaattatcttatttccgtgctttcttagtacctttttgtgtgatttaagttgtaaataacagttcccctccgcatttgtatatagtttagcggcatgggcaacgaatgcctgtaattgcaacattacacgcttcaatctggtcactccttgggt

SEQ ID NO: 260503 - DNA, 1179 bp, Zea mays
ttttgacaccggagaccatcacatcaaaccggagaccacccttccctccagaactccagaccattcccttctacctttcctcttctccacgcttcgcccctcgccgactattttaaacccacgcttcttttagttctttcttccccgtcggcttccggagtggaaaccattttcctaccacccgcgggagatccacacgcccacgagcagtggagctcggcagcgaggcttcggagttctgccatggcgtcgtcccacatcatcctgcccaaggaggaggaggaggaggcggctgcggcagcggtggcggaggtcgggttgggagcggcggtggaggcggaccacgaccaccggccgtaccaggagcaggggcccgggaaggcggcgctgccgttctcggcaacgtgcgcccggatctcccgcgactcgtacccgaacctccgcgcgctgcggaacgcgtcgaccatgacactccacgatgatgacgccgccttcgtcaagctcgaggagggcgactacggatacgtgctcgacgacgtcccgcacctcaccgactacctcccggacctccccacttttcctaatcctctgcaagatcatcctgcgtattcaactgtcaagcaatattttgtcaatgcagatgatacagtccctgaaaaggtagttgttcagaagaacagtccacgaggagttcacttccgtcgtgctggacctcgtcagagggtgtattttgagtcagaagaagcgaaagcttgcattgtaacctgtggaggcctttgccctgggctcaatactgtcatcagagagttggtttgtggcttgtcccacatgtacaacgttagcaatgtcttcggaatacagaatgggtacaaggggttctattcgagcaattatcttcccatgacaccaaagagtgtgaatgatatccacaaacgaggtggtacagttcttggaacatcacgaggtggccatgataccaaaaagatcgttgacaacattcaagatcgtggaattaatcaggtattcattataggaggagatggaactcacaagggtgcatatgagatttacaaggaaattcggagacgtggtctacaagtagctgttgctggtattcccaagactattgataatgatataagcggttatagacaagtcatttggttttgatactggtgt

SEQ ID NO: 260504 - DNA, 597 bp, Zea mays
aaaccggggcgacccacgcgttcggcacgaggcataccttggccggggaatcagtgggcatttgccaccgatgaaccctccgccgccgccagaggcatcaccgtcgaaaccaccatctacatcgccagcagcatcaccatcggaatcaccaccagcagcatcgccaccagaatcgccgtcgacaccaccaccagagtccgtcgactacaccgccgacaccagcagcagcaccaccgaaatcaccgtctgatccaccaccagctacgccaccaaaatcatcatctgatccaccgtcgacaccagcagctacaccaccggcgactccatccccatcatcttaatcacgaaggatatttcaaaagcagtagtagtttagtcaaattagatatgcgttttaggattctagttgatatgcgtccattattttgttcacatcgaatgcagcagtgtgttagctatgtagttgcatacctatcataactaagtctattagaagtatttctaataatatttaggatctgtcatcaataaaatgtatgcaacaatacgactataaaaaaaaaaactaataaaatattaaatgagaaataataaaaa

SEQ ID NO: 260505 - DNA, 1023 bp, Zea mays
ggaaacatgaacagaaattggatgccccatcatggttgcttgttcaaccgagcaggctattcataatagcctgtttccttgtttgaaacaaattgaaggcgtgagctgagtgatactacggcaaataatctgattgtacagaatgttgcatactcagtctgcaacttgcatatgttgattaggcaatcgacctccacacatcagttttggtctagcattagttctgatcgtggtgctttccttgagggttttgaattgcttggttcaagaaaagcaaaaaatatatttctcctttctacttcaacatctagtgatgtatctggatctagcctcgacaccaacgaagagcctacatctttgttagtttcgtcaatcctaaagaagatgggaagaattgcaatgcaaatgcaggatacacagataaagaacgtgttcaattgcttcaatatgatttcatcagctcttggtcctgatgaatcactaacctatgctgatcacctcttggccccattgtataaagtttctgaaggatttgctgggaaagttgttagtgatgaagtgaagcaactggcccagggggtccagaacaagttacgtgacctgattggttccgagaaatttgttgaagtctacaagagcgttcggatgggcctgaaacagaagcgggacggtagaaagcaggcacagaagattgttgcagccgtggacccagaacgcaatgccaagcgaaagcaacgaatggcagccaagcaccgggaacacaagaggcgaaagataatggcgatgaagattggcaggtggatgagatagcttggtatttaggctctgcggaattcggtgaatcatataattgtagaggataatttttcgtgctacaagtgctggcataaaattatgtttctgttttatatgctgtctcactgacttactgcccgacgtaattttactgttgagttaccgaaccataccgtaagtaaaaattaagaggcatatgcaatgaagacagagaattgattgaattat

SEQ ID NO: 260506 - DNA, 1391 bp, Zea mays
actcctccgctgttgcggaattgccgggtcgaccgcacgcgtccgcccacgcgtccgcccacgcgtccgcccacgcgtccgcccacgcgtccgcccacgcgtccggacggtcaagcccttcgttaacggcggggcctctgggatgctcgcgacctgcgtcatccagcctatcgacatggtcacggtgaggatccagttgggtgagggctctgctggtcaggtcacaaggaacatgcttgcaaatgagggtgtccgttctttctacaagggtttgtccgccggattgctgaggcaagcgacgtacacgactgctcgtcttggatcctttagggttctaactaacaaagcagttgaaaagaatgaagggaagccattgcctctatttcagaaagcttttattggtctgactgctggtgcaattggtgcttgtgttggtagtcctgctgatctggcactcattagaatgcaagccgattcgaccctgccagttgcacaacgacgcaactataagaatgctttccatgcactctaccgtatcagtgctgatgagggagtccttgcgctttggaagggtgcaggtccaactgtggtgagagctatggcactcaatatgggtatgcttgcttcctatgaccagagtgtcgagctatttagggacaaatttggcgcaggagaaatttctactgttgttggagccagcgctgtttctggattcttcgcctcagcatgcagtttgccctttgactatgtgaagacacagattcagaagatgcaacctgatgcgaatggcaagtacccatacacagggtctttggactgtgctgtgaagaccttcaagagcggtggcccattcaagttctacactggtttcccggtgtactgcgtcaggattgcaccccatgtcatgatgacctggatattcttgaatcagatccagaagtttgagaagaagatcggcatataggattcccatcggacggatacagggttgacagttctatgctattactgcttgactctgtaataacattccagctgctttcgcaccatggtagttggttttggtagagacaagtctgttacaattttttaccttagctttccaattattgtgttgcaataatcgaattaattgttgctgggggatttttttggggggttgggagggtggcatgcttttgttggctgggatgtagccataaggagagggggatactgcctagttatgtcattgaatggaattggaccatattttatacagatttttaccttcagttcttttgaacttattgcatttgggacattgattttttttgtaatggaaacgatgggaattgataaaaagtgagtttaaaaactaaaaaaaaaaaaacaaataagggcgagcggca

SEQ ID NO: 260507 - DNA, 597 bp, Zea mays
caacaaccatttcttcttcctttttctatatcgcgttacgtccctagagccacgcgtccccagcgatctaggccgccgcctctcctactgcatctccctcgctctcgtcgcctcgttcgcttcgcctccgccccgccccgccccgagcagagcgcagccctatccggagctgggatggcggacgcgaagcagcagcagcagcagcagccacagcaggcggcagcggcagccaccggcgtgtggaagacggtcaagcccttcgttaacggcggggcctctgggatgctcgcgacctgcgtcatccagcctatcgacatggtcaaggtgaggatccagttgggtgagggctctgctggtcaggtcacaaggaacatgcttgcaaatgagggtgtccgttctttctacaagggtttgtccgccggattgctgaggcaagcgacgtacacgactgctcgtcttggatcctttaggggtctaactaacaaagcagttgaaaagaatgaagggaagccatttgcctctatttcagaaagcccttattggcctgactgctggtgcaattggtgcttgtgttggtagtcctgctgatctggcact

SEQ ID NO: 260508 - DNA, 478 bp, Zea mays
cccacgcgtccgcccacgcgtccgcccacgcgtccgcccacgcgtccgtccacgcgtccggccacgcgtccgatgaagggaagccattgcctctaattcagaaagcttttattggtctgactgctggagcaattggtgcttgttttggtagtcctgctgatctggcactcattagaatgcaagccgactcgaccctgccagctgcacaacgacgcaactataagaatgctttccatgcactctaccgtatcagtgctgatgagggagtccttgcgctttggaagggtgcaggtccaactgtggtgagagctatggcactcaatatgagtatgctcgcttcctatgaccagagtgtaccgctatcaaaggacaatttatatagcatatgaacacactactgcttgggctataactaatgacctgggtttccaaatccattcttaaataattttgtgattaatagatgtagtcttttaat

SEQ ID NO: 260509 - DNA, 816 bp, Zea mays
tcgccgaggagcgcaaggcctggcgcaagaaccacccccacgctgttttgtttcgtggcgaggccggagtcgctgaccgacgggtccgtgaacctcatggtctggaactgtaccatccccggcaagcacgggaccgattgggaaggtgggtactacccacttacccttcatttcagtgaagattacccaagcaagcctcccaaatgcaagttcccacagggttttttccacccaaatgtttatccttcaggaacagtctgcctctcaattctcaatgaggatagtggttggagacctgctatcactgttaagcagattctagttggaatacaagacttgcttgatcagcccaatccagctgatcctgcccaaactgatggttatcacctattcatccaggatccaacagaatataagcgacgtgttcgtctgcaggccaagcaatatcctgctctggtctgaggatgttggcataccagagatccatgatccatcctgcacatccgcatagtagttgcaaatgttaaaattatggtctcaaattggatttgacaggacataagttgtctggaggattgtccagtgtaaacctgaaccttctatgatgtgtatgagtccagtattgatagcaagaacagattcgtttactgctgggagtgctgcagccactgatattttgtctatttaacttaaactatttgttgtgttggtgctctatcttgaagacatgtttcgtttgtttatcgaagaaagttatatacataatacatcttctaagcatataactttcttgataaacatttgtcttcaagatag

SEQ ID NO: 260510 - DNA, 972 bp, Zea mays
ctgttggttgcttctttctactcgcgctcgcaccaaccagaggagcaaccgagcagtagcgactcctctgcgtgaggcctgccgtcatcccccgtgggccgtggccgtggccgtggccgtgcgcaaaaaaacaaaccatcctcgattcgaccggaggggaaggagacgcgccgggagaagggggaagagacgcggcgaccatgtctccgatctgggtgttcgggtacggctcgctgatctggaacccaggcttcgcctacgacgaccgcgtcgtcggctttgtcagggactaccgccgcgtcttctaccaagggagcacggaccacaggggcacgccgcagttccccgggaggaccgtcacgctcgagcaccagcccggagcgacttgctggggagttgcttacagaataaaggaggaagataaggagatagctttggagtatcttgaggtcagggagaagcaatatgatgagaaggtttaccttgacttgtatactgattcatcgcccaaagtaccagctgtcgaaaatgtgatggtatacttcgccaccagtaacaaggagaacaatcaaaactatcttggtcctgcacctctggaagaaatgaccaggcaaatttaccttgctcaaggcccatctggacctaacaaagagtatgtgttcaaactcgaggacgcgttacacaaattaggagttgtagaccaacatgtccaagaactggcaaatgctctgcgtgagtattctgacaccgagttatctaagtgaaagatcacatttaccccttgtttggagggtaaggatttataaataaagttagaattcattcatgcatgtcccaacatggatatattcttgtaagctgcgttttgagtgactacattacgattatattcctgtgcacatgtggtttgcaaaaatctgttggtttcccctgttcactttttctgatctaggagagcgatcatttgctttg

SEQ ID NO: 260511 - DNA, 1619 bp, Zea mays
cggacgcgtgggcgacccacgcgtccggagctcgagagcatcgccagcacgtccgccgaggcaaaccgccagcttctcgcggcggaggagctccccgacgagctcgccggtaagcgagagctgctgtcccggacgctcatggggatcgacgaggcggccaccgaggccaagcgccagcttgatgaggcgacgacggagaacaccatgtccggcgaccacagggtactgaccacgggcctcatcggcacgttcgatgagatccaagacgggcgcagcggggtgccgcccagcgacttccccaagtggctgccggccacccagcggaggctcctgcagcagacccagaagcctaacacggtggtcgcccaggacgggagcggcgacttcaagaccatcaccgaggccatcaccgccgtgcccaacaccttcgaggggcgcttcgtcatctacgtgaaggccggcacgtataaggagtacgtcaccgttcccaagaacatggccaacatcttcatgtacggcgacgggccgacacagacggtggtcaccggcgacaagagcaacgcaggcggcttcgccaccttcgcctcagccaccttctctgctgagggcaacgggttcatctgcaagtcgatggggttcgtcaacacggcggggccggaggggcaccaggcggtggcgatgcacgtgcagggcgacaagtcggtgttctacaactgccggttcgaggggtaccaggacacgctgtacgtgcacgccaaccggcagttcttccgcgactgcgaggtgctgggcaccgtggacttcatcttcggcaactcggcggcgctgttccagaactgcctcatgacggtgcgcaagcccggggacagccagtccaacatggtgacggcgcaagggcggacggaccccaacatgcccacgggcatcgtgctccagggctgccgcatcgtgccggagcaggcgctcttccccgaccgcctccagatcgccacctacctcggccggccgtggaaggagtacgcgaggacggtggtgatggagagcaccatcggcgacctcatcaggccggaagggtgggcggagtggatgggcgacctcggcctcaagacgctctactacgccgagtacgccaacaccggcccgggcgccggcaccagcaagagggtcaactggccaggctaccacgtcatcggacaggccgacgccacgccattcaccggcggcgccttcatcgacggcgcgtcatggctgcagagcaccggcacgcccaacgtcatgggattcaccaaagggtaatgatcgggggattgcagtatgcatgcgatgatgatacgcgcgcgtgtcttcatgcatgcaacatgcttttgggtttatccggaaactgctagcatttttgtgcgcatatatatagctggaagctcctgtgcacgcatgcacggtgaataggatgacctgtctatatgggtagtacgtggagctaacgcaagtgtgtgtacgtgtttggcacggctccggctacttttaaattgactccggctccaacatttttacaggaggaatttttaataaattatttggcaaaacgacatctcttgtatttttatttgatatatataagg

SEQ ID NO: 260512 - DNA, 1399 bp, Zea mays
caagttccttctgccaagcacaacacagaccatcgtctgcccgcccaacccgccgccggcgcctctccaaaacccaaccaaaccctagattcgccgcactcagttccggtgagaccctcctttccagcgaaaatgccgaacctcgagtgccggatgtatgagcagcggttcccggaggtggacgccgcggtgatgatccaggtgaagcacatcgctgacatgggcgcgtacgtctcgttgctcgagtacaacaacatcgagggcatgatcctcttctccgagctctcccgccgtcgtatccgctccatctcctccctcatcaaggttggccgccaggagcccgccatcgtgctccgtgtcgaccgcgacaagggctacatcgacctttcgaagcgtcgcgtctccgaggaggaggcgcacgcatgcgaggacaggtacaacaagtccaagctcgtgcactccatcatgcgccacgtcgccgagacgctcgaggtcgacctcgagccgctctaccagcggattggctggccgctctaccgcaagtacggtcacgccttcgaggccttcaagctcatcgttgcggaccctgacgctatcctcgacgtactcacctatgaggaaaaggaggtcggcccagatggccaggaggtggctaaggtggtgcctgctgtcacccccgaggttaaggattctctggttaagaacataaggaggaggatgacaccacagcctctcaagatccgtgctgatatagagatgaaatgcttccagtttgatggagtgctccatattaagcaagctatgaagaaagctgaagctgcgggcaatgataactgtcctgtgaagattaagctagttgctcctccactttatgttttgaccacacagacccttgacaaggatcaaggcatttcagttctcactactgcagtcaaggcttgtacagcagagattgaaaagtacaaaggaaagttagtagtgaaggaaccaccaagagctgttagtgagcgggaagacaagctattcctcgaccagattgattccctaatggagcaaaacgcagaggtcgatggtgacgctgacagtgaagaggaggaagatacaggaatgggggacgtcgacattacaaattctggcgtcgctgcttactaaggctacactggttgatttggatgagctttgctgtacagcaccagctaagttctaagccgttctgtttggaagcagtttctttctgttaggttttggtgaattcgctgaaactcgttacctgcgttgttaatgttttgggctcagccggtgttggggtagcgtttacttctgtcgagaatcaccaattttttcttgggactgaaaacaaagcccgttgctataagtgtttatattcccttcatatacc

SEQ ID NO: 260513 - DNA, 1689 bp, Zea mays
gagccaccacaatttgtggctattttccagccaatggttattcttaagggtggtactagcgctgggtataagaaatttgtagaagagaagggtctgaaagatgaaacgtattgttctgatggcactgctctcattcaaatttctggaacagcggttcataacaataaaacgcttcaagttgatgcggtcgcaacatccttgagttccacaggtggttttgttttgcaagctaaaaactcgatgtttatatggaatgggaatgcaagttcttttgaacaacaacagtgggctgctaaagttgctgaatttctgaagaccggtgttgctgtcaagcattgcaaggagggcactgagagctctattttctggtcttctattggtggaaagcagagttatacaaatagaaatgctgcacctgatgttgttattagagagcctcatttgtataccttctctctgaggaatgggaagctggaggttactgaaattttcaatttttcacaagatgatctgttgaccgaagacatgatgatacttgatacacactgtgaggtttttgtttggatgggtcagtgtgtggagacaaaagaaaaacagaaagcatttgacattggccagaaatacgtacgacatgccgtggcctttgaaggtatttctcctgatgtgcctctctataaagtcaatgaagggaatgaaccttgcttcttcaggacatacttctcctgggatagcgcacgatccgtgattcatggaaactcttttgagaagaaactttcagttcttttcggaatgcgttcagagggtggcaataagagctcaggtgatggtgggccaactcaaagggcatcagccttggcagctctttcatccgcattgaatccatcgtcgcaaggaaaacagtcagatgagaggcccacaaaacccagcagcacacaggcgcagtctcattcaggccaagggtctcagagagccgctgctgttgcagcactttccaatgttttgactgcagagggatcgcacagcccccgccacagtaggtcgtccccaacagcagatgctgagaagactgaattagctcctgcttctcctcaccagttggaaacagggcctgcagaagatgtccggacagagcctgatgtctcacaggaacaaactgctaacgaaaacggaggccagaccacctttagctacgaccgattgatatcaaagtccactgaccctgttagtgggataaacaacaagcgcagagagacatatttggtggacagtgaattcgagaccgtatttggcatgactaaggaggagttctacgagcagccaaggtggaagcaagagttgcagaaaaagaaagccgatcttttctgagacaaggctggcttcgaactaataaaagcccttactccgcacaggattgtccagcattctcatcatgctcgttccgcggatgatgatcgatcaccagcagctttatccgtgagttgtataggctactcttttatctgcacatggtttgggagcattatatatatatcccccttgcccgtccattattctgaggtcgttcttgatgttgacctttcacgtgttttctttttttattgtattataaaaaatcaaactggtgtaaatggcattactagtgagatttttgtaagtaatggtgcatgggccccaaggtgtatgccccat

SEQ ID NO: 260514 - DNA, 661 bp, Zea mays
gatgggtcagtgtgtggagacaaaagaaaaacagaaagcatttgacattggccagaaatacgtacgacatgccgtggcctttgaaggtatttctcctgatgtgcctctctataaagtcaatgaagggaatgaaccttgcttcttcaggacatacttctcctgggatagcgcacgatccgtgattcatggaaactcttttgagaagaaactttcagttcttttcggaatgcgttcagagggtggcaataagggctcaggtgatggtgggccaactcaaagggcatcagccttggccgctctttcatctgcattgaatccatcgtcgcaaggaaaacagtcagatgagaagcccacaagctcagatgacagcgagcatactcaacgagcttcagcaatggctgccttgtcctctgcccttaatccatcgacaaaacctagcagcacacaggcacaatctcattcaggtcaagggtctcaaagagccgctgctgttgcagcactgtccaatgttttgactgcagagggatctcatagcccccgccacagtaggtcgtccccaacatcagatgcagacaagactgaattagttcctacttctccccatcaattagaaacagggactgcagaagatgtccgaacagagcctgatgtctcacaggaa

SEQ ID NO: 260515 - DNA, 491 bp, Zea mays
gtgacgcgacgcccttcgctcatctcatctacctccgcctcactgtcgctttctctgacctcctcctcctcggatccgtcctcttactggcgagggacgcgcagcggaaacagcggccgttcctcgctctcgcgctcgtcctatggtcgccggcgctgttagctgtcgaccacgtccactttcagtacaatggattcctcatcgggctgctgctgctttcgctgcacttcctcgagcaggggtgggatcttatcgggggagtcgtgttcgcatgcttgctgtgctcgaagcacctgttcctcgtggcagcgccggtgtactttatgtatttgttcaggcattattgctgcggccggggtgtcgtgaaggggctgggaaggctcgtgctgatgggttctggagtggctgctgttttggccgcaccatttgtgcccttcgggtattatggtcagatgcaacacgtaattagccgattgtttccctttgggcga

SEQ ID NO: 260516 - DNA, 520 bp, Zea mays
tttttcgcgtccattaggtccatagcatctggaggggacccgtctggcgtctggcgtctggcgtctggcgtctgtctgggaccgggctgcccagccgctcgatcgacgttcggcgaggacgctgctccggtactccggttggttggaccggagggcggaggcgcggcgatgggggcgctgtcgcggccggaggaggtgctggcgctggtgaaattgcgggtggcagcggggcagatcaagcgtcagatcccgcccgaggaacactgggccttcgcctactccatgctccagaaggtctcccgcagcttcgccctcgtcatccagcagctcgggcccgaactccgcaatgccgtgtgcatcttctacctcgtgctccgtgccctcgacaccgttgaggatgacactagcatcccgaccgaggtgaaggtgcccatcctccaggaattttatcggcacgtttacaaccgcgactggcattattcatgtggaacaaatcactacaaagtgctgatggataagt

SEQ ID NO: 260517 - DNA, 530 bp, Zea mays
cgcatccttactccactgcatctgccatcttggggaactctttggcctctggaaccggcctgcccagccgctcgatcgacgttcggcgaggaggctgatccggtctgttggatcggaggcgcggcgatgggggcgctgtcgcggccggaggaggtgctggcgctggtaaagctgcgggtggcggcggggcagatcaagcgccagatcccgcccgaggagcactgggccttcgcctactccatgctccagaaggtgtcccgtagcttcgctctcgtcatccagcagctcggacccgaactccgcaatgccgtgtgcatcttctacctcgtgctccgtgccctcgacaccgttgaggacgacactagcatcccgaccgaggtgaaggtgcccatccttcaggaattctaccggcacatctacaaccgcgactggcattattcgtgtggaacacatcactacataatgcttatggattagtttggccacgtattcactgccttcctggagcttggtgaaagttatcaaaaggg

SEQ ID NO: 260518 - DNA, 1552 bp, Zea mays
cacaactagtcacaagctgcttctccatattccacaatccacacatcccgaccgagcgcgaccccacctcccagatctcatctgcgacgacctcctccctcccgatcccgctccgtctccccccaccgccaccgctgccgctgccgcctcccccaccgaggtcttgtcttcggcgatccagccggagcccgcggcggcgacgatgtacgggtgggagatgctgtcgttcaacatacacgatgggttcctggaggccatcgtgcggggcaaccgctcgggcctcctcaccgccgccgactacaacaacctctgccagtgcgagaccctcgacgacatcaagatgcacctcaccgccaccgagtacgggccctacctccagaacgaaccttcacccttgcacacaacgacaattgtggagaagtgcactcttaaactagtcgatgagtacaagcacatgctgtgccaggccactgaaccactatctacgtttttgcagtatataacttatggccacatgattgacaatgttgtccttattgtaactgggacactgcatgagagagatgttaacgaacttttggagaaatgccacccattgggcatgtttgacagcattgcatcacttgctgttgctcaaaacatgcgtgagctttatagattggttctagtcgatacaccactggccccttacttctcagagtgcattacatctgaggatttggatgacatgaatattgagattatgaggaacactctctacaaagcatatcttgaggacttctacaaattttgccagaaactaggtggtgcaacagctgagatcatgtgtgatctcctttcatttgaagctgacagaagagctgttaacattacaataaatagtattggtactgagttgacaagagatgaccgcaggaagctgtactccaactttggtttattgtatccatatggccacgaagaattggccgtttgtgaagatgttgaccaggttcgtggtgcaatggagaagtacccaccataccagtctatattttccaggatttcatatggagaaagtcagatgttggataaggcattttatgaggaggaagtcaagaggctatgcttgtcctttgagcagcagttccactacgctgttttcttcgcttacatcaggctccgcgagcaggagatcaggaacctgatgtggatctctgaatgtgtcgctcagaaccagaagtcccgggtccatgacagtgtcgtcttcatattctgagaacccccgccactatatatgtatgtacaaaatgcctgctttgatgatggcacaatcgctcgacaattataaatctgggacttattattattcccattccctctgttagacgccggcgtaaaaaatgccagacctggagttgatgtattatttgttttgtagtcaaataaaggtgtgattatctggcacacaaaataaaatcttgtgtattttggaacagaccttcatcgtcaatgcacagtatgctgtcaatgcacaatatgtgtgtgcaaaagcaaaatagatatatcatgc

SEQ ID NO: 260519 - DNA, 433 bp, Zea mays
actcctggaaattcaaaatcgttctccattcatggtgctatcttctgacacgtattgtatgggccttgtagttccactacgctgttttcttcgcttacatcaggctccgcgagcaggagatcaggaacctgatgtggatctctgaatgtgtcgctcagaaccagaagtcccgggtccatgacagtgtcgtcttcatattctgagaacccccgcccctatatatgtatgtacaaaatgcctgctttgatgatggcacaatcgctcgacaattataaatctgggacttattattattcccattccctctgttagacgccggcgtaaaaaatgccagacccggaggtgatggattatttggtttggaggcaaataaagggggggttatctggcccacaaaaaaaaaaaaaaattaatttatataaatatttttttt

SEQ ID NO: 260520 - DNA, 1134 bp, Zea mays
tgtatctctcgagcctcggtgggggtatgaacatctcccgccaccacgcccggatattctacgacttccagcgccgcaggttcgcgctcgatgtcattggcaagaacgggtgccttgtcgagggcgtcctgcaccttccagggaacccccctgtcaagcttgactcgcaggatctgctgcagattggggacaagaagttctacttcctactgccaacacggtccatcttcgcttcggctgctgctgctcggcatgctcctattattccacagcagcttcctcctccaccgtatgcacatgcacgggcaggccgccctcgtttgtccgagtttcatgaccgctccttcgaaggtgattatgggcgggaggttgatgagattgggaatggtatcagtgaaactgggatgaggggaaagctggtaaagaggaacaagaagtcttctggcgacttggatatctatggtgggcatagaatcaatgtggaaccaatagggacgctaggtgaagacagtagatcagaaataagatcaaggggtgacagggatattgacaaccaacaagcccttcaagcagaagagaaggatgttgtgtcatctgtggccacagtgttatctgatctctgtggccctggagaatggatgcccatggcaaaactccacaacgagcttcttgagcagttcggcaacgtgtggcaccccagcagggtccggaagtacctgacacaggacgactggtcgccgacggagaccaagggcaggccttggttcggccttctggcgcttctcaggaagtacccggagcactttgtcatcaacacgaggtccaagggcaggatgacctcggagttcgcctcgctggtctccttgctctcctagagggacggagagggcgtgttgtgtccaagtccgtgttcagaagggtcggctctcgtttgtttgccccttgctgtgcttcagcagctgttatatggacccaccctgttgtgctgtagtatctcgtgtggttgaggcagctgcactgcactgggccgtgaccgtctcttgaactgtagtgtctgcagcagtgtatggaaagcatgcgttttagttttaacctatgctagcaggttcgcagcagcttggtgattaccgtatc

SEQ ID NO: 260521 - DNA, 583 bp, Zea mays
  unsure (1)..(583): unsure at all n locations
ttttgacgcgtggatgcccatggcaaaactccacaacgagcttcttgagcagttcggcaacgtgtggcaccccagcagggtccggaagtacctgacacaggacgactggtcgccgacggagaccaagggcaggccttggttcggccttctggcgcttctcaggaagtacccggagcactttgtcatcaacacgaggtccaagggcaggatgacctcggagttcgtctcgctggtctccttgctctcctagagggacggagatggcgtgttgtgtccagcccgtgtccagaagggtcggaggtgtactggctctcgtttgcttgccccttgctgtgtttcagcagctgttatatggacccaccctgttgtgctgtagtatctcgtgtggtcgatcgaggcagctgcactggtccgtgaccgtctctgtagtgtcggcagcagtgtatggaaagcatgcgttttaagttttaacctatgctagcaattcagcagcagctcggtgattcccgtatccagcatgtatatccggtcccatacttgtaaaaaaaaacaaccnnnnnnnnnnnnnnnnaaaaaaaantat

SEQ ID NO: 260522 - DNA, 475 bp, Zea mays
ggggaagccggaaaccgcacggccggcctgcctctagtcgtcgtcgtcgtcgtcgactcgtcgcggtggtgcttgcggcagctccggagtccaggcagcacgctagtcggggggcgcgggggaggagatatggatcggtcgtatctccccgtggcggcggcggccgtcgccctggtcctcgtgtgctgctccggcctctgccgcggcgagcggctcggggcgagggagtgcgaggacctggggttcaccggcctcgctctctgctccgactgcaacgcgctctccgagttcgtcaaggaccaagagctggtggaggattgccataaatgttgcaccgaggattcagatgattctatcagcaagctcacattttctggtgcaattattgaggtgtgcatgaggaaactggtattttatccagaagttgttggcttcctcgaagaagataaagacgacttcccatatgtgggaaccc

SEQ ID NO: 260523 - DNA, 811 bp, Zea mays
catgcaccagtgtccttccagatcccgccgcgcgtctccttccgcgacacgctctcagtctcacgccacagctcgtcgcgttcgtcaacggtcgacccatcgcctatggaaggaaggcgcgaaccggaggcggacggcggaaaggccgggggcctcccgccgtcggagccgccgcacctgcagggccagccgccgcaggagtacgggtacggcacgttccagggccctcgacatcctcccgtcgggttcccgcagcctgccccgcctcccgggctcggcggcggcggctatcacaaccagcagcagccgtacgcgcctgcggagacgtactacgcccaggggtaccaggccgtaccaggctatggtcctgttgctgaaggaagacctgtgagaatgaggcgtctcccatgttgtggcctcggcttaggctggtgtctgttcataactgggtttttcttggctgccattccatggttcattggagctttcgttcttatatgtgtgcgggtacatgaccaacgagagaaaccaggatacgttgcttgcacaattgctgccgttgttgctgccgttgccatcctcctgggggtaactaaaggaacgcacgtgtggtgaattgcctccagagaaggcaatcaatgtgtatttgcgttgtatatctgtgtgtgctaaaaagtgtggagcaacatccatgtgatcttatgtccatatatattctactttgcaatgaagtttgaaatgtagtaatgtaccatctgcttcttgtaagcagcactgcatcatatataataagataccttttatttaaaaa

SEQ ID NO: 260524 - DNA, 443 bp, Zea mays
gtccttcctgatcccaccgcggtctccttccgcgacacgcgcacacgccacagcgcattcgcgtacgtcaacggacgtcgaacccatcgcccatgggaggagggcacgaggagcaggagggtggcggcgcaaaggccgggggctactcctccggtctcccgccgtcggagccgccgcacctgcagggccagccgccgcaggagtacgggtacggcacgttccagggccctcggcatcctcccgtcgggttcccgcagcctgccccgcctcccgggttcggcggcggcggcggctaccacaaccagcaacagccgtacgcgcacgcggagacgtactacgcccaggggtaccaggccgtgccaggctatggtcctgttgctgaaggaagacctgtgagaatgaggcgtctcccatgttgtggcctcggcttaggctggtgcctg

SEQ ID NO: 260525 - DNA, 769 bp, Zea mays
cggacgcgtgggcggacgcgtgggcggacgcgtgggttgcgaaaaaagaacaacaaaggaggaaacgaaaacgagcgggggagctcgcggaccccaaaaccctaaccccgcggacccacctggcggcggcggcggcggcgatggcggacggcggaggagaaggaggacctcctgcggcgtcggcggcgctcaaggaccaggggaatgagcagttcaaggcggggagctacctcaaggctgccgcgctctacacgcaggccatcaagctcgaccccgacaacgccaccctctacagcaaccgagctgcagcattcctgcagttggttaagcttagcaaagcgcttgctgatgcagagacaacagtcaggctgaagccacaatgggagaagggtcatttcaggaaaggttgtgttttggaggcaatggagcgctatgaagaggcgatagctgcatttcagatagctttgcagcacaattcacaaaatacagaagtctcgagaaaaatcaagaggctatctcagttggccagggaaaagaagcgagcccttgatgtagagaacatgcgttcaaatgttgacattgcaaagaacttagaatcactgaagactgagttggctacaaagtatggagatgcagaaacagggcagagtatcttttctttcattgttaatgtggtagaatcagcaataaaggtttggcatgatacaggaaaagtagatccaagggtcaatattcttctcgatgatcagaagaccgatacctgaaaata

SEQ ID NO: 260526 - DNA, 713 bp, Zea mays
tggttgagttgtgaaagttgagacgcctcagaaaaacgcaacccttttttgggctttggcttttgctgcaaacaaaaggcgacgcggctgggatctagcacgctagcgagcgagagagacgcacatctatctgtcaagcgacgccgcggcctcgatcagagtcggaggcgaacacccccatggcggcggctggcggcggcgcaggagggaaggtatccttcaagatcatcctcacctccgaccccaagctccctttcaaagtgttcagcgtgcccgaggcggcgccctttaccgcggtgctcaagtacgccgcggaggagttcaaggtcccgccccagaccagcgccatcatcaccaacgatggaattggcatcaacccccagcaaagtgcaggcaacgtgtttctgaaacatggttcggagctgcgtctcatccctcgcgatagggttggagctgtagtcatgtcttccggttagaggatatatacagtccaatgcataatgagcaaaacttgagagaaataaagctttgatgttggccttgcttggctgtaggatgttgttacaaggataataagcgaaccttaccgtacatgtctcaagttgtatgctctctgtttgtatgtggagagatttcttaaagtgaatccagtatctgaatcgactcaaaaaaaaaaaaaaaaaaagggcggccgccccgggaatttccggtcc

SEQ ID NO: 260527 - DNA, 592 bp, Zea mays
  unsure (1)..(592): unsure at all n locations
cgcggctttgatttagcacgctagcgagcgagagagacgcacatctatctgttaagcgacgccgttgtctcgatcagagtcggaggcgaacacccccatggcggcggctggcggcggcgcaggagggaaggttcagcgtgcccgatgcggcgccctttaccgcggtgctcatgtacgccgcggaggagttcaaggtcccgccccagaccagcgccatcatcaccaacgatggaattggcatcaacccccagcaaagtgcaggcaacgtgtttctgaaacatggttcggagctgcgtctcatccctcgcgatagggttggagctgcagtcatgtcttccggttagaggatatatacagtccaatgcataatgagcaaaacttgagagaaataaagctttgatgttggccttgcttggctgtaggatgttgttacaaggataatatgcgaaccttaccgtacatgcctcaagttgtatgctctctgtttgcatgtggagagatttccgaaagtgaatccagtatctgaatcgactcaattagaagctttctgtcaaaaaaaaaaaaaaaaaaaaaaaaaaaaagggcgaccgcn

SEQ ID NO: 260528 - DNA, 322 bp, Zea mays
cggacggtggtgctgacgcgtgggcaccacccatcactgcagtactgcaaatgaagtgcaaaatggccagcagtagtagagtagtagcagccgccgccgtccttgtagccttttgcgccgccgccctctcgtcggccacggtgaccgtgaacgagcccatcgtcaacggcctctcctggagcttctacgacgcgtcctgcccgtccgtcgagggcatcgtgcgctggcacgtcgccgacgccctccgccgcgacatcggcatcgccgccggcctcatccgcatcttcttccacgactgcttcccgcacggctgcgacgcgtc

SEQ ID NO: 260529 - DNA, 703 bp, Zea mays
tagcggctcgagaatcaatccttcaagcgcaagctgcctcctcctcgtcgtccggtcgtgagaagggatggcgggccgtggcaaggctatcggcgctggcgccgcgaagaaggcaacgtcgaggagctccaaggccggactccagttccccgtcggcaggattgccaggttcctcaaggcgggcaagtacgctgagcgcgtcggcgccggcgcccccgtgtacctcgccgccgtcctcgagtacctcgcggctgaggttctcgaacttgccgggaacgccgcgagggacaacaagaagacccgcattgtgccgcgccacatccagcttgctgtgcgcaacgacgaggagctgaccaaactgttgggtggtgccaccatcgcgagcggaggtgttatgcctaacatccatcagcatctgctccccaagaaggctgcctcctccaaggccagtgtcgacgacgacgacaactgagactgcttcctgcagaaatgatccgaccaccgccttgttttgtaggaataggatgatgttgtcttcgatcggggaggagtcgggtatgctgggaaggagaattagattagtatctgtttttttgaatgggatgtgaacgtggctgtgaatctcaggattgtatgctcgttgagaaagaaatggaaggacttcgtgatgcacgatgttgatgccgcatcatattcagcgtag

SEQ ID NO: 260530 - DNA, 1267 bp, Zea mays
  unsure (1)..(1267): unsure at all n locations
tgcgtccacacgtctnccacgcgtccgcggacgctggcgaccgcgttttcccgtcctgtccttccacccggcggcttaaaccctagttctcactcccatcgccgcttcagctccgccgctgcagatggagttctggggtctcgaggtcaagcctggttccactgttaagtgtgagcctggatatggctttgtgctgcacctttcccaggctgctcttggggaatcgaagaagagtgataatgccttgatgtatgtcaaaattgatgatcagaaacttgccattggaaccctctctgttgacaagaacccacacatacaatttgatctgattttcgataaagagtttgagctgtcgcacacatcaaaaactaccagcgttttcttcactggctacaaggttgagcagccattcgaggaagatgaaatggatcttgattctgaagatgaagacgaggagctgaatgttccagtagtcaaggaaaatggcaaagctgatgagaagaaacagaaaagtcaagaaaaggcagttgctgcaccttcaaaatcaagtccggattccaagaagagcaaggatgacgacgattctgatgaggacgagactgatgattctgatgaggatgagacggacgattctgatgagggtttatctcctgaagaaggcgatgatgattcaagtgatgaagatgataccagtgacgatgaggaggaagacactccaactcctaagaagcctgaggtaggcaagaagagagctgctgaaagttccgtgctgaaaactcctctatctgataagaaagcaaaggttgccacaccgccagcccagaaaacaggtggcaagaagggtgccacccatgtggcaactccacacccagcaaaaggcaagacccctgcaaacaatgacaaatcaacggagaagtctccaaaatctggtgggtcagtcccttgcaaatcatgcagcaagacattcaatagtgagatggctctgcaggctcactccaaggcgaagcatggggccaaatgagttgcaggtccaactgagtccatgaaggagaagcatggtggccaagtgagtcgaaggtccattcgagtccatgaaggtgaagcatgggagatccaagcgagtctggaaagattgtcgatgttagtaggctgtccttattttgtttagagacttgtggctatgtgattgatgtagcgaaacaaggctgtgatgtgttaactctgccttataatattttggttgaacgtgctcgattgttgtgcttcg

SEQ ID NO: 260531 - DNA, 797 bp, Zea mays
cgaccgacgcgtccgaaaagaaaagcaaggattactctgatgattctgattatgatgattctgatgattctgatggggaggattcttatgattctgaggagggctatgtattatctcctgactaaggcgattatgattcaagtgatgatgatgataccagtgacgatgaggaggaagacaccccaactcctaagaagcctgaggtaggcaagaagagagctgctgaaagttccgtgctgaaaactcctctatctgataagaaagcaaaggttgccacaccgtcatctcagaagacaggtggcaagaagggcgccgccgtccatgtggcaactccacacccagcaaaaggcaagaccattgtaaacaatgacaaatcggtcaagtctccaaaatctgcgccaaaatctggtgtcccttgcaaatcgtgcagcaagtcattcatcagtgagacggcacttcaggctcactcgaaggcgaagcatgggggcaagtgagtcgcaggtccaatagagtcaacaacaaatgcgaaacatgggagaggagggtaagcgagagtctcgaaagagtgtcggtggaagtaggcctaaccttattttgtttagagacgggctatgcgttcgatgtagcaaaacaaggctgtggtttgtgtacttcaatatttgggttgtgtgtttcgaatttttttttgaacgtgtctcggattgttgtggtgcgaattggttgtttctgtcgctatggtgagatagtgtcacgtttctttctctatttgaaagacctgtcgcattctatttcttggg

SEQ ID NO: 260532 - DNA, 519 bp, Zea mays
gaaacatgggagaggagggtaagcgagagtctcgaaagagtgtcggtggaagtaggcctaaccttattttgcatttgttgttgactctattggatctgcgccaaaatctggggtcccttgccaatcgtccagcaagtcattcatcagtgagacggcacttcaggctcactcgaaaggcgaacctagggggcaagtgagtcgcaggtccaatagagtcaacaacaaatgcgaaacatgggagaggagggtaagcgagagtctcgaaagagtgtcggtggaagtaggcctaaccttattttgtttagagacgggctatgcgttcgatgtagcaaaacaaggctgtggtttgtgtacttcaaaatttgggttgtgtgtttcgaatttttttttgaacgtgtcacggattgttgtggtgcaaattggttgtttccgccgctatggtgagaaagtgtcaaaaaaaaaaaaaaaaaaaaaaaaaaaaaaaaaaaaaaaaaaaaaaaaagggcggccgcccgggaa

SEQ ID NO: 260533 - DNA, 453 bp, Zea mays
cgacaagcaggtcctccctcaagctcgcggcggatcagcgaccgatcgacccgtcatcctcggttcctcatccaaccgggcatccggattccggtgagcggaggaaggcgccatgaaagctgcggaggacgccactcgctgccctcagatcccccggcgttgccaccactgtgccgggccactctccaaggacatggaaacgagcagctggacagtacctccgttggttcgagatagcttctccatgattggttcggctcttgggggtatagcaggagcgttttatggtttcaaccatgttatgcctgttgttcgacgtcacataaagggcccaatgtggatgcatttttttgttggtgcaccaccagttattgtgttctcttctgcatgtgctggattagcaggtggtacaataccagccaccgtacagttggtttcatcatcctgtcatgc

SEQ ID NO: 260534 - DNA, 798 bp, Zea mays
gcgtgacttcaaatggtagtgcaactgcagttgggagccagcaactgttgaaaaacgatggaagtgtggatgtctctcttaagggcaataatgcctcagctgtacctgttccatctttattgggaataggtggtccggctgcgcatattgctgcaatgcattcttttatgattcatcctcaaggcattcctcaacctttagcatcacccaactctggcattcctcagtttggcagttttcagacacagcctatgattcaaccaaactcacattggccaaatcagcaggaagtacaaattgtctcacaaccacaagatgaaacaaactatcagacatcccaatcaggtcagactgcattgcaacaagacactattaatactgatgagctgtcccccaaggcaagtgagggtggccatccagaccatcttaatgcccaggggaaacaacagcagagccctgcaagtgcacctactgaatcaactcatgaacttactgttgttgaaacaaacatagctgaacatgtaccttatgatgaacaacaaaaaaccttaaaagaacaggattcactatcaaatataaaaagccatgttggaagagttgagcctcaagagcaaaatgctgaatccaaggttgaaagagctgcatctgacaagcaacctgaacctcaatctagacagcataaaccttcaaactttcctccgttcactacccagattcacttgaaaaagagtgcaacagagaatcctaatgttgtaaatcaggttgatataatgaaatcagttgcaggtggttttagtt

SEQ ID NO: 260535 - DNA, 2592 bp, Zea mays
ttttctgctggtacaattcatgtgaagtttactggaagtgctggtcaaagttttggcgcttttctttgtcctggaatcactcttgaactggaaggagacagcaatgattatgtcggtaaaggattatctggtggaaaaattgttgtgtacccaccaaggaacagttcttttagtccagaggacaatattgtcattggtaatgtggctctgtatggtgctaccatgggagaggcatatttcaatggtatggcagcagaaagattttgtgttcgcaactcaggtgctcaagcagtggttgaaggaattggagatcacgggtgtgagtacatgactggaggcactgttgttatcctcggaaaaacagggcggaactctgctgctggcatgagtggaggcattgcctatgtttatgatgttgatgggaaattcagtgctcgctgcaacaatgagttagttgatctatatcatgtggaggaagaggatgacatcatcacattgaaaatgatgattgagcaacatcgtcgcaacactgagagtgttttggctagagatatactctccgattttgataaccttcttccaaaatttgtaaaagtatatccaagggactataagagggttctagaaagcatgaaggtggaaaaggctgttgctaagcatgcaaaggagcctaagatggcaaatggaatttctgtgacaactaagaaagtacaacctgatcagtcagcaagccgaccaacacatgttgccaatgccaaaaagtacaggggctttattacatatgagcgagagagtatttcatacagagatccaaaagagcgtgttagagattggaaggaagttgcaatcgaatctacacctggtccactattaaatacacaatctgctcgttgcatggactgtggcactcctttctgtcatcaggaaagctcaagtgctggttgtcctcttggaaataagatcccagaattcaatgaattagttcaccagaacagatggcgcgaagcattggatcgactacttgagacaaacaacttccctgaattcactggacgagtttgccctgctccttgtgaggggtcatgtgttcttgggattattgagaatccggtgtctatcaaaagtatagaatgtgcaatcatagacaaaggttttgaagagggatggatgattccacgacctccacttcaaagaacaggaaggaaggtggccattgttggcagtggaccatctggtttggctgctgcagatcaactaaataaaatgggccacttcgtaactgtgttcgaacgtgcagatcgaattggaggtttaatgatgtacggcgttccaaacatgaagactgacaagattggcattgtccagcgccgtgttaatttaatggctgaagagggtgtcacatttgtggtgaatgccaatgttggtagtgatcctttgtactcgattgaacgtctacgttctgaaaatgatgcggttattttggcttgtggagcaacaaaaccgagagatctcaccatccctggacgcgagctatctggagttcattttgcaatggaatttctccatgcaaatacgaaaagtttactcgacagcaacctggaggatggtaaatatatctccgcccgtgggaaaaaggtggtggttattggtggaggtgatacaggcacagattgcattggcacatctattaggcatggttgcaccagccttgtaaatcttgaactcctgtcaaaaccaccaagcactagagctgctgacaacccatggccccagtggccaagaattttccgtgttgactatgggcatcaagaagctgctaccaagtttgggaaggatccaagaacttacggagtcttgacaaagcgttttattggcgatggaaatggcaaggtgaaggcccttgaggtagtgcgtgtgaagtgggagaaagtagatggaagatttcaactcaaggagatggaaggatcagaagagattattgaggctgatctcgtcctcctagctatgggattcttgggtcctgaagcgacaatagctgagaaattgggtttggagaaggacaacagatcaaacttcaaagcgcagtttggagacttcgctaccagtgtcgatggtgtgttcgccgccggggactgcagacgtggacaatcactggtggtttgggccatcacggaggggcggcaggctgctgcagcggtagacaagtacttgtcaaggtatgatcagaatgctgctgctacaggcgacagcactccctccgggacagggctcgttcagccggttgcggcatagtagcataaactggagcaagttttacgtttgtcagtgtatcctgtggttccacacagcaaacaccgttcttgtagttgtctaaaagaaacagagaaatccgggctcattaaggaatgaaagcccttctatattttttttgacgatagataaacagttgaaagttttggtggctattgtctcttttttctgctgcatgtggttttgtagtccaaacaatgtacagtttcccctttcttaaatagatgtaaatttgtcgtgtgattaaaaaaaaaaaaaaaaaaaaaaaaaaaaaaaaacaaa

SEQ ID NO: 260536 - DNA, 2123 bp, Zea mays
gataaattctaaacaaaatgcattttcagaaaatagtcatttggtcatatattgttactaagttaccgaatctcccttccaaattagtcaaatcaagatagtttgacctacagtgacagtagaaatcagtgaactgtgtagtcgcagatcttgacaattttgttccgaggacttcaccagtgagcgtgcttgacaggaatcccgctatcatcagtggttgaaaaaaaaaagcactccgaaagggggcatgaaacagtgaataatgttaattatatgttcataggattggttagcacccgctgcctcttctacagtaaagattatgctattacaagaaaaacaatagcaatccctagcgacacatgctaacgacaaaaatgcagactataccaatctcaaatttgttctcaagtgatcatctcgtcgacggcatctgtctgaaggggggctaaacaatggcagtacagagggttttgtgatgcctttgacctcgtatcgacaaacctgctgattaacaggctcgtcagatcgccatcgaagattactctacttgtcagtagtaggttgttccataataaggttgaggagctgccgcaggttgctgagggtaagctgacgccggtgtaggtgctggtaccactgctggcactggtgctgccggaattgctgcaggttgtgtgtagctttgttgtgtataggcctgaacagagtatgttggaggataagcgccataggcagctgtttgaggagcaggctgtggcatttgatggctgtagtcataagttccatatgcaggatatgcagcctgctgagcataagaagctccccattgatgtccagatgtttcagaagtcgcaggccaaacaggaggattggaagcatttggatcagttcctgtggctgactgaacagacccagttttagcaaacttgtccctgtctgacacaacagcatcatcagccttccgtttctttgatggcagaatgcttctcttacatgaaaaaaaagttgtatgccgagttgaagccttcttgattgactttgcatcaccaaagagatccaaaaactctaaaaatatggaagatatttcttctttgtcaactagacttgccaactctccctgagatgattcaggtgtaacaaacttctccacaagtgagtctaaaaattcaatacgcttttcgcatggaaaaatcgactctagatggatgacagcctcaagcactggttttgttaaatttaactgctcatgcagcacagttaatatctcccttgccttctccaagtctctgatgaccaaaaataagaaacgggagtactgaataagcaatgttggtaagagctggctctgttcctttcccttctcagcagcgatggccttttcataaactgaacaggacaattctttatctcccagtcggtgttccatattagaatgcttcacgatggcctctagaaagccaggacataaatctgagtaaagatgctgatattctgcacgtgctccagaaatatccccattaagctccttaaagcgagcactaaacagatggatctccggctgcttcttgacaaacacatgagtagcacgagccagggcattgtttgctaggtctagactccctttatcctccatacattgcacatagcggatccagaattctgaataactagcacatgcaatcacacacctttcatacaatttgataacctgaaaacaatttagcataccatcagaaaccttgtgcatgtgaggaaataaagggggtaaataatgatagtaaggatatggtattgacaaaaaaaagagaagttcacacagattactccattagctgattatggaggcccctccataagaaaggagggaccatcctgctcgatagatagatggttaagaaggtgagcattaagcaaatacctgcatatgagattaaaaattcaaaactggaatttggtaccatatatcatgaacccagaacgaccactgccaaatgaaagtttggagtacttagcctcatcgaaaccaaacattatgtccacgctctatcctcagttcaacatcccattacaaaggaagcttcgtccaaatactagccgttaaaggatatagttgagccaat

SEQ ID NO: 260537 - DNA, 1555 bp, Zea mays
ccatattagaatgcttcacaatggcctctagaaagccagggcataaatctgaatacagatgctgatactctgcacgtgctccagaaatatccccattaagctccttaaagcgcgcactaaacagatggatctccggctgcttcttgacaaacacatgagtagcacgagccagggcattgtttgctaggtctagactccctttatcctccatacattgcacatagcggatccagaattctgaataactagcacatgcaatcacacacctttcatacaatttgataaccttattaatgtcttcttccttctcgataaagtcaaggtagctatgccaattttcaagctctggattgtcaagaggcttgacatgaaaatatggccttctaatagctagctcaaaaccaatgatctcagattcgtactctttagccttcttgtacatctcttccctcatggagacatactttgcaaggttttctgcatctgccaaagatgaaagttctggttgaccaggcttatcaacatcatcaggatgtgtgtcaccatcaggcgcttgagcagtggtctcagatgtgacaacatacaacgaggcttcttccgcagtaagtatttctgaaaaactgtgctttgaagccaattccttgaggcaattaaaatagcgatcaagctgctggatgggatgttccaatactcttgtatatataacagcgaggtgactccatgcctccagtgactcttcatacttaatatactcatcccacaaaatattggagcgataatcagttccaacgtatgccaagccacgttcaaacagtcttcggatgatatctgggtcatcatatgttgaaattgcgaattgacaatagttataccaaatgtccactgaataagtaactgcaagaactgctcgttcatacacctcaataactttattgacaccatcaagtctcgcttcatgatcagcatatttcttccagtacccaaagcaaagaggcaattccgcaagaaatgaatcatacactttccgtatcttcaaaatatcgttctcagcatttttctccgtctcctcaataagtgtggtccaggcattgaaatctaagcaatttgcagtaacaacactccacaatctagcctcttctgctgaaagcacagcttcctcgtaggatggctcaggaaccggctcgcctatctcggtgacggctgtgccattctctgcagctcctgcagattggtaattagacatatcgccagtcgtcccattcaactccgtgtgctcggcctggtaggcagaagtatcagctgcctgagccccaccgtcaggggccacggcgcttccgctggtcacagccgagctaggtgcattgccagtcgcaaaatcaaaagccgcggcgccagaatccgcgctgtcgacggctgggctttgatcttgctccattgcgcgcggatcgcacgagaggtaccccggacccacgtccaccccggagagccgccgatgagagacactgatggggagtgtggcggggtagagcaagccggcgaggagccggcggacgcg

SEQ ID NO: 260538 - DNA, 1756 bp, Zea mays
  unsure (1)..(1756): unsure at all n locations
tttttnntttaaatcaatagcggtttattatcagtataaagaccgaatcctttggcgtcgacatattgcaaataaacatgtaaatcctgaccctagctactagtattaactactctaaaatatcacttattccaacagccccaaaaaggctattaacctcaaatcgacacaataaatgaatactagcagtaacataacattgcaaaaatgacaggctcaccaaccgacgaccaaaactaaaactacatctgaataggtgtctattctacaattactcaattagtaatcacttttttagcttttgttgcctgcaaaaatagtgatgaacaggaactccaaaaatttgtatccagccttttctggtaaccccgcactcgaccaattgatggatctctatgccaacttcaaaacaatctgagggccaccgaacgacacaggagacgtgcaacagctatgttgtccctcattttgcaggtgcaccagcggctactgtgcggccaccacgaccaccagcatatccagcatggtcaaccctctggtagccgacatcagctccacgtgatgagacacctctgccaccacttctgaccccgtaatcagacctgtaactaaattcacccctcccgtagccccttcctccaccgtagttaccacgccctctggtaccttcacttctgaaattgttgcccctgcctggtgcgaacctgccgcctctgctggagcctcgtgaaccaggtgccctcttttcctcaatgtaacattgacgaccgccaatcgccacaggggaagcctctatagcactctggacagatgtagaatcctcgaactcaacaaatccgtaacagaacccttgaatcttattgcttctgacttgaatgccattttgcttaatggtaccaaacttcttgaactcatcctccagttgagtttcagtggcatttaaaggtaaattcctcacatagattgcatgcgcgtcatcttcaggctcttggatattgatgttctcggggttagaactgaaaggcggtacatctgtgacaggagcaagagcaggagactgcttctctggtttggccggtgcagtcctagtaggaggtgcaggagcaggcaatgaaacttctttcatgactttgacaattgaggcgtatgacttctttggtgcctcctcctgcaacacaggggcaactgtagttgccaaaacagctgccacgttgtttggaacttcatttatcacttcaggaacaggttgttcctcatccactacttcctctggcggcggatcgtaaacctcagcctcctcctcctcctcaggttgaggtggtgatcggtccacaacatgatgttcctgctgtggcacggcatctacaaacagtgaaagaagagtgttgttatcatctgcctcatgaaaaacacgactgaactgcaggccgggcgctccgcactacggtcatcaggggtggcaggctccacagcaagagtagatgtgccgttggcagccacagacaggactacagcatccgcctcgggctgcgcctctacagcggtaggggcagggatttccccgacgaagcggaacatgtcgttgagcacgaagtagcccatctcctgcggcgcgaggaagaaggattgcgagaactcgcggcgcactccatcacggccggtgaggtgacctgtgacgagcacagcgacgccgccgcctaaagactcctgcgagtccaccgtcctgatctccgctttggacacgtccatctccatt

SEQ ID NO: 260539 - DNA, 736 bp, Zea mays
aattcaaaaaaagaccaatattgtcagtataataaatactaagagaatcttttggcgtcgacacattgcaaagaaacatttaaatccttaccctagccactattaacttccttaaactgtcacttattccaagtctaaaaaagctattaacctcaattcaacagaataaatgaataccagcagtaacaaaaacttagatgatgcgttgcaaaaaagacaacaaggcacatcagtcgacgaccgaaactagaactacatctgaataggtgtctaatctacaatgactcaattagtaaccatttttgctgcctgcaaaaataatgatcaaggacaggaaccctcataatttgtatccaggcttctcttgtaatcccgcactgaaccaattgatcaaggacaggaaccctcataatttgtatccaggcttctcttgtaatcccgcactgaaccaattgatgagcctctatgccaacttcaaaataatcttagagccaccgaacaacactcccaaaagacgcgcaacagctatggtgcccctcattttgaaggtgcgccagcagctgctgtgcggctaccacgaccaccagcatatccagcatggtcaaccctctggtagccaacatcagctccacgtaatgagccacctctgccaccacttctgaccccgtaatcagacctgtaactaaattcacccctcccgtagccccttcctccaccgtagttaccacgccctctg

SEQ ID NO: 260540 - DNA, 435 bp, Zea mays
gttcctcatccactacttcctctggcggcggatcgtaaacctcagcctcctcctcctcctcaggttgaggtggtgatcggtccccaacatgatgttcctgctgtggcacggcattacggtcatcaggggtggcaggctcctcagcaagagtagatgtgccgttggcagccacagacaggactacagcatccgcctctggctgcgcctctacagcggtaggggcagggatttccccgacgaagcggaacatgtcgttgagcacgaagtagcccttctcctgcggcgccaggaagaaggactgcgagaactcgcggcgcactccgtcacggccggtgaggtggcctgtgacgagcacagtgacgccgccgccaagcgactcctgcgagtccaccgtcctgatctccgcttttgcggacgcgtggaaggacgcgtggg

SEQ ID NO: 260541 - DNA, 419 bp, Zea mays
ttccgggggcggccgccctttttttttttttttttttttttttaacctcaattcaacatattaaatgaataccagcagtaacaaaaacctagatgatgcgttgcaaaaaagacaacaaggcacatcagtcgacgaccgaaactagaactacatctgaataggtgtctaatctacaattactcaattagtaaccatttttgctgcctgcaaaaataatgatcaaggacaggaaccctcataatttgtatccaggcttctcttgtaatcccgcactgaaccaattgatgagcctctatgccaacttcaaaataatcttagagccaccgaacaacactcccaaaagacgcgcaacagctatggtgcccctcattttgaaggtgcgccagcagctgctgtgcggctaccacgaccactctcac

SEQ ID NO: 260542 - DNA, 326 bp, Zea mays
ataatctgagtaaagatgatgatactctacactgctccagaatgatccccattaagctcctgaaagcgagcactatacagatggatctccggctgcttcttgacaaacacatgagtagcacgagccagggcattgtgtgctaggtctagactccgtgtatcctccatacattgcacatagcggatccagaatgctgaataactagcacatgcaatctacacacctttcatacaattggataacagactactccattagctgattacggaggcccctccataagaaaggagggaccatcctgctcgatagatagatggttaagaagg

SEQ ID NO: 260543 - DNA, 1662 bp, Zea mays
gcctgctgtaccggcccggacttacttgctggaccgacccacgcgtgcctgttcagtttgaagaatgcaggctctgagccaacagagcggatgtacaagttagcggagctacagtggacacatgcccaccagtctacactcagaactgcacaggatatcgcgaagccaattattgctgagaacactgcaaagtataagatagactctgttgagtttgaatcacttactttgggtagcttaccacccacctttcaagggatgaaagtctatgtcacagaggagcaagagctgataatggaaccatctcttaaatgggctgcaaacccaaatattactgttgctgtaaaagcctatggtttgaaagctactatccagattgtggatctacaagtctttgcatcacctcgcattactctgaagccattggtgcctacatttccttgctttgcaaaaatccttgtctcactcatggagaagccacatgttgactttgggctaaaacttcttggagcagatgtaatggctattcctggtctttacagatttgttcaggagaccatcaagaaacaagtagcaagcatgtatttgtggccgaagacgctagaagtacctataatggatccctcaaaagcatcaaaaaggcctgttggaattctacttgtgaaggttgtgagagcccaaaatctgcggaagaaggatctgctgggtaaatctgacccatacgtgaaacttaagatgtcagatgataaacttccatccaagaagacaactgtaaagcgcagcaatctcaatccagagtggggtgaagacttcaagtttgttgtgacagatccagaaaaccaggctcttgaagttaatgtcttcgactgggaacaggttgggaaacatgaaaagatgggaatgaacatgatcccacttagagaactcctaccagaggggactaaagttactaccctcaacttgcttaagaccatggacccaaacgatgtacaaaatgagaagtctcgtggtgagcttactctagagctcacatacaagcctttcaaggaagaagatatagagaaagaagatacacagggtgctgatgtgatagagaaagctccagatggcactccagctggtggtggcttgctttatgttgttgttcatgaagcccaagatcttgaggggaagcaccatacaaacccatatgcaaaaataattttcaaaggcgaggagaagaaaactaaggtcatcaagaagaatagggatccaagatgggaggatgagtttgagttcgtgtgtgaggagcctcctgtgaatgataaactgcatgttgaagtcataagtaaagccccgaaggcagggctgatacatggcaaggaaactttgggctacattgatattagccttgcagacgtgatcagcaacaagcggattaatgaaaagtaccatctcatagactcgaaaaatggtcagatccagatcgagttgcagtggagaacttcctagacaggaaggagccagaatgccttgatgttcctctattcagtttgcgtatatctgtgattgagattgaggtcatgtagatatttcttttttttatagacatctgttgttcggatcttctcttaatcgatcaacgttccgccataaaaaaaaaaaaaaaaaaaaaagggcggc

SEQ ID NO: 260544 - DNA, 439 bp, Zea mays
caattctgaaatctgaaaacaaagcttgtccgctgccgaccgagcactccgttccatggcgtcgccttcctcgtgggactagcaagcctcgcctcgctggagaccatcaagaagcaagtggcaatcatgtatttgtggccgaaggcgctagaagtacctataatggacccctcaaaagcatcaaaaaagcctgttggaattctacttgtgaaggtcgtaagagcccaaaatttgcgaaagaaggatctgctgggtaaatcagacccatatgtgaaacttaaaatgtcagatgataaacttccatccaagaagactacttgtaaagcgcagcaatctcaatccagagtgggatgaagaatttaagtttggtgggactgagccagaaagccagtctctttgaattaaaggcttcgactgggaacaggtttggaaacatgaa

SEQ ID NO: 260545 - DNA, 799 bp, Zea mays
cgccccgccggccgaaaccaagtttctccgcggccgcccggatccccgacccccggccccgagcgttccatgggctcgccttccgcatcgaggcattagcaagcctcgcgccgcactgccgtgcccccgacgcctgcctttgcctcactggttttggaaggaatccaagatgggtgttatcagcacagtgctgggtttctctggttttggctttgggttctcggctggcattgttattggttacttcctcttcatctacgtccagccaaccgatgtcaaggatgtcaaggttcgcccgcttgtagaatatgattcaaaatccttggagggcatccttcctgaaattcctttatgggtcaagaatcctgactatgatagaattgattggctgaataggttcttggagttgatgtggccttatcttaacaaggctatctgcagaactgcacaggatatcgcgaagcgaattattgctgagaacactgcaaagtataagatagactctgttgagtttgaatcacttactttgggtagcttaccacccacctttcaagggatgaaagtctatgtcacagaggagcaagagctgataatggaaccatctcttaaatgggctgcaaacccaaatattactgttgctgtaaaagcctatggtttgaaagctactatccagattgtggatctacaagtctttgcatcacctcgcattactctgaagccattggtgcctacatttccttgctttgcaaaaatccttgtctcactcatggagaagccacatgttgactttgggctaaaa

SEQ ID NO: 260546 - DNA, 381 bp, Zea mays
tggttttggtcggaatccaagatgggtgtaatcagcactgttcttggtttctctggatttggctttgggttcgtggctggcattgttattggctacttcctcttcatctatgtccagccagctgatgtcaaggatgtcaaagttcgcccgcttgcggaatatgattcaaaatctttggagggcatccttcctgaaattccattgtgggtcaagaatcccgactatgatagaattgattggctgaacaggtttttggaattgatgtggccttatctcaacaaggctatctgcagaactgcacaggatatcgccaagccaattatcgctgagaatactgctaagtataatatagactcctgtgagtttgacgcacttactttg

SEQ ID NO: 260547 - DNA, 1074 bp, Zea mays
ctattattgtacccatggatttgtgttcatttgaaggtgattcttctgttgccatcgcggaggcactctatgagatggttaagggttttgtgctgcagcatcaagttatactcttctgtcttggagaaactttcacagagctacctcctatttaccctctggttgatttgcctataaatactagggcaagcgctgcagattttggtggttcagttcctaaacctgggcttgaagtcaacttagtcgacgctgttccttgtcgaatagcatttgagaggggcaaagaacggcacttctgctttttagccatagctcatggaacttctggttggattcttcttctagaagaattacctctaaaacgggaacgaggaattgtccgtgtcatggcacctttggcaggatctgatccaagaatagatacaaagcatgggaagtggttacatctacgcattcgcccttcttcggtcccttttttggacactgagaagcataaagcgaagacaaagaagtatcttgttgatgggagatggacccttgcttttagggacgagcagtcctgtaaggttgcagagagtatggttattgaagagatgaaactccaacgaggtgctgttgcagagcaattgaagccattggttgaatttgacatgcctgaggatggaatgcagcacccccagacttcacatgaaaccccttctgatgatggatcatgactaaattttcatcaagtgcagtgttgagcttctcaattaaggagacatggcaacagatggccgcaaaagtgccgcattgaacatttcaagcatgctggcaggaaaacccaccatggcaagtcatcgacaattctgtacattacattgggagattagagatgtctccttgttaacacacaactgtagagtttcgggccgtcctgagttgaactagctggataggattctttgtacaatagtttgtttctctccttgcccgttgtaaccttatatatcacatcaaaacccattctttgttaagtttcagggcacagttgtgttgtgcacacgaaatgtttaaagaaatttgcagttagtc

SEQ ID NO: 260548 - DNA, 731 bp, Zea mays
cccacgcgtccgatttccgacctctcctactggggggtcggccggattccgcatgtccttgtcgtgttggagggtgcggtttcctggtgcggatgtgagggaagccgggaggggcagggaaggaatgcagaggtcgcggaaggcccttctgcggaggacggcggcggcgcaggtgcagagcgcagtggcggaggctgctggtaacgggaggaagaggcgtctgtacggcttctccgtctccctcgtcgtcaccttgtgggtcgccgggctcctgctccactccctggtcgggcacggcgatggtcaacgagatggaggcggttctggtgtcgatattacttttatcgagcctgccttgaatggtggtcctgttaattcggctgtacaggaagtgcatggagagaatttggcagtgccgggtgatacctgtgttggatctgtcgaaaatgctgtgcttccagaggacacgctggtgcaagcagctcagttgtgctccaatgatgaggcacggagtgagaacacagaagctctaacaaaaaacaatcaggttgagctttcaggggatcagtgtgggtatcttcctcagccagattttgattctggagttcaaccagggagaaggtggagagtgaaataatttgcccgagaccaccaagactatcacgggttgctcctcctgatcttgatgaattcaagacaagagcaattgcttgaaggggacctggtatttc

SEQ ID NO: 260549 - DNA, 1139 bp, Zea mays
cgctttcattagcaatcggtggccacagagagttaactaaaaatcattcagcgacagacatcttcgactcctcgttcgtggttccccatcgtcatcgccatggatttctcttaggctcacccgtccgctcggctcgcttccttccccactctctctgatcccgtcgcacttccctcctcgctgcagcccctctactattgcgattaccgtttcctcgctgccctttcctttttcggtcggcagcaatcaccggggcaagcgaaccctcgatttgcgtccccgctctctgctagcgcccctaaaagaggagcgaacgatgtctatgtcgaagacgggtcaggccgcggagaaggatgagcagcagcagtcccgagggatagcactgatgcagggcatctgcgccgtggtgtaccgcaaggccgataacacgccctgccccatcaagcagggtctctacttgggatctgttggagcagcattcaataaggacgctctcaagagtttgaacatcacccatatcttgatcgttgcaaagtcactggatccagtatttccagctgaatttaattacaagaagatcgaagtacttgatatcccagacactgatctgttaaagcattctgatgaatgctttggtttcatagatgaagctataagctctggaggcaatgttttggtccattgctttgctgggcggtcaaggagtgtgacaatcgttgttgcatatctcatgaagaagcatcaaatgagcctcgaaagtgccttgtcactagttagaagtaaacgacctcaagtggctcctaatggggggtttatttcccagctggagaagtttcagaaatccttgcaagtggagcaggaatggagaatgcaacctgtgcagcactgataattatactagtgttataataggtgcagaaggcctcatatgtagtgaaggcgtatgcgttgtaagagcgtcttgaccgcgtattatgacatctggataacaagcgaggccttggcaaactttatgatgtaaacagcaagcaacgttgttcatccattgggatgcagtttacatgttgaataatattcactgcaatttctcttcaaatgaaccaaagaggggtaatagttagtgaaccctccccttgaag

SEQ ID NO: 260550 - DNA, 353 bp, Zea mays
gccgcggagaaggatgagcagcagcagtcccgagggatagcactgatgcagggcatctgcgccgtggtgtaccgcaaggccgataacacgccctgccccatcaagcagggtctctacttgggatctgttggagcagcattcaataaggacgctctcaagagtttgaacatcacccatatcttgatcgttgcaaagtcactggatccagtatttccagctgaatttaattacaagaagatcgaagatgaagctataagctctggaggcaatgttttggtccattgctttgctgggcggtcaatgagtgtgacaatcgttgttgcatatctcatgaagaagcatcaaatgagcct

SEQ ID NO: 260551 - DNA, 445 bp, Zea mays
gacgtcgtgggcaccgagcctgcctgctacctcaccttgaacgcgcagccgccgcctgcgccacgcgtgaagaagcagccgcctgcgctccccccgaatcaccgcccggagctccgcgacttcggcggcgtcacgcagcctcaggcaacacgggagcgcttcagcgtcgtcgtcgtcgtcgttgcggccgttctacaacttcatgccgctgccggttggtccagttcgctgtgagaggcccctgagcgagatcaaggcccacggctccgacggcgtcgacctggaactgaagctgtaagggagcgcatataactggaaccctcactccctctggtggatgttccttcctgcagcgggaacagcgctcgtcgtcgtccagaagaagactgtggcggcgtgtttggttttgtaacctgaaacaccgccatgtgcatcagaatctgcg

SEQ ID NO: 260552 - DNA, 1247 bp, Zea mays
tcgtccaatcgcaacagtttcactgcgccacagtacaaatcctgtctcgcaccgccccagccggccagaacagcgacaggcccctcgcgccgatcgccgggcaatgggagctgggcgggggcggtgatgggcgcggcgggctccaggttggagaaggcgctgggcgagcagttccccgagggcgagcgctacttcggcctcgagaacttcggaaacacctgctactgcaacagcgtgctgcaggcactttatttttgtgttcctttccgtgatcaattgctggagtactatgcaaacaataaaaacaccggagatgttgaagagaacatgctaacctgcctggctgatctgttctctcagatcagtagccagaagaagaaaacaggggttattgctcctaagcgttttatacaacgattgaagaaacaaaatgagattttccgcagctatatgcatcaggatgctcatgagtttctgaattttttactgaatgagctagttgacattctagagaaagaacataatgctgcaagagagtctcttcaaaatctctcactccaaaagaattcaaatggccctattgatggccaacccaatggtagtcacaaagaattagctgtcacatgggttcataaatgcttccagggaatattgactaatgaaacaaggtgtctgagatgtgaaactgtgactgatagagatgaaacattttttgacctgagcctggacatcgaacagaatagttcactcaccagctgtcttaagaacttcagctcaacagagactttgaatgcagaggacaagttcttctgtgacaaatgctgcagtttgcaggaagcacaaaaaaggatgaaaataaaaaaaccaccaaacattctagtaattcatctcaagcggttcaagtggtattgagcagcttcagcgctacaaaaaactatcatacagagtggttttcccactggagcttaaacttcttaatacagttgataattcggacttggaatactcccttttcgctgtggtagttcatgttggaagtgggccaaaccatggccactatatcagtttggttaagagccacaatcattggctattctttgatgacgagaacgttgagatgactgatgagtccatggtacaggcattctttggctcaccgcaggagttcagtggtaatactgataatggctacatactcttctatgaaagccttgctgaaagaagttgatgtccttctcataccatgt

SEQ ID NO: 260553 - DNA, 626 bp, Zea mays
cagagaaccagattccgttcccctggacccgatcgagatggagtcggaagctgacagagccgcggcgccggcgccggcagttgccgcggagaccagcgacgacgccatccaggaggagtctccagccacggccccttcctcagacggaaagcccggatcaggggcggcggcggccccggcgccggaggtggaggtgcagctgttccggcgcgggcgtccggtggccgtgttccggtcgcagctgggcgggtatacgcaggaccagctggaggtgggcgacatcctggagcagcacggcctcaagtccgtcttcgccttcgaccctgccgcccgcaaacgcggcgtcgccatccgcttcaaccctcgcaacggccgctccctcctcccctacgcccctggttccacgatcttcctagacggcgagcccaaggattcttatgctgaagcccatcacgaagatggtgattggggtcgccgctatgactgtggtagctgcagtcctattgaaggaggccaagatgcccgagtggcttcagtcatccaagctgggcgccgtgagcttcccaccatgggtgctggcttgcatggtcatcgtgttcatgaggctccggaagagaaccatggat

SEQ ID NO: 260554 - DNA, 1053 bp, Zea mays
gcctgcccctttttttattcccaaaaaaactcccatctcgcggcggaaagagagagagagaggagaggtgcgagctggtgagatggatcggttggaggagcggaacattaagaagggggagagggagatggaggaggcgcgcaaggaagaggagcggaaggaggaggcgggggacaggaatacccaggagccgcagcaaggtcaaggcctcagcctctcactcgccaacggcagcgacagcggcaggtctggaatgttgccgatgtcgaacccttcagctaatcccacacagcttacaattttctatggtggatcagtatgtgtgtatgactcggtgccaccagaaaaggctcaggcaatcatgcttatagctgcggctgcagcagctgcggcagccaccaaaggcagtgctgccactgcttttaatcctccaatgagcacttctgtagcagctggacaagctcaggttgttgctgaccctagctcaataagcaagcttcaggctgatctccccattgccaggaggcactctctccagcgcttccttgagaaacgtcgtgacagggtcgtgagcaaagctccgtacagccccgccaagtcgttcgatggcatggagtcagcgggaatggagatgactgcggacggcaagcagggcgcaaggcccagtatcttgaaaggttggggagccgcgaagtctgaagtctgaacggtgaaaggctggctgacgctgtggggaggaagggacagggacgtgctgttggttttattatattggtatttatgttattatatatatgtggtagcagcagcgtggaaccgcattaataatggggaccttaacacctctattttactgtcgttgctttgttgtcgcgtgctaggttgtattctgaagtggattcctcaataccgcataccgtactgctacgcctgttgactttgttacattgattgatcgttgtccccttgtaatggaatgccgccccatgttttctgtcgtgccaaaaaaaaaaaaaaccaaaaaaaaaaaaaaaaaaaaaaaaaaaaataaaa

SEQ ID NO: 260555 - DNA, 1144 bp, Zea mays
cacagtttcatcacatagttgctggcggctggccggcctctttctctttctcgtttctgccccctctgcttgcccccctttcattccaggcgtcgaaaagagggagggagagagagagagagagagagaggagttgcaagttggtgagatggatctgttggagcggaatattaagacggagacgggggagacgcgcaaggaacaggagcgtaaggaggaggtggaggcggaggcgggggagaggaagacccaggagccgccgcagcaaggccagggcctcagcctctcactcgccaacggcagtggcaggtctggaatgttgccgatgtcaaacatgtcagctaatccttcacagcttacaattttctatggcggatcagtatgtgtgtatgactcagtgccaccggaaaaggctcaagcaatcatgcttatagctgcagctgcagcggcagcggcagctaccaaaagcagtgctgcccctactgttaagcctccaatggtgcctgcagccactgttgccccagcagctgtcgtttctcctgtgcttacacggtctccatcactgcagagcacttctgtagcaactgggcaacctcaggttgttgctgaacctagctcgatatgcaaacttcaggctgatctccccattgccaggaggcactctcttcagcgtttccttgagaaacgccgtgacagggtcgtgagcaaagctccatacagcaccgccaagtcgtccgatggcatggagtcaccgaggattgaggtgacagcggagggcaaggcccagtaacttgaaaggtccccgcggagtcccatcggtgaaggctgacgttgtgggaaggggcagggacgcgctgttgttgccttatgttatgtggcggcggcagcgtggaaccgcactaataatgtggaccggaacctctgttaccgtcgtttgtgctgtcgcgtgctaggtttatgctgaagtggattcctttactccgcacaccgaactgtgtctgttgtacatcacgccgtgacgccggtggtctcgtctgtctgacttcgttacatggatcgtctagtagtaacggaatgcagtaccacgtgtggacatgtgtttagtgtgaaagatgatggggctttgcttgcttgtttccaaaaa

SEQ ID NO: 260556 - DNA, 347 bp, Zea mays
gttgcaagttggtgagatggatctgttggagcgggatattaagacggagacgggggagacgcgcaaggaacaggagcgtaaggaggaggtggaggcggaggcgcgggagaggaagacccaggagccgccgcagcaaggccagggcctcagcctctcactcgccaacggcagtggcaggtctggaatgttgccgatgtcaaacatgtcagctaatccttcacagcttacaagtgtctatggcggatcagtatgtgtgtatgactctcttcagcgtttccttgagaaacgccgtgacagggtcgtgagcaagctccatacagcaccgccaagtcgtccgatggcatgga

SEQ ID NO: 260557 - DNA, 307 bp, Zea mays
gagccggcgtggcggatccgggaaggcgtgttcgccctctcctcggctcctcgctcgcaggcgcaatccccttcgctgcttcggtctggaatgttgccgatgtcgaacgtgtccgctaatccttcacagcgtacaattttctatggcggatcagtatgtgtgtatgactcagtgccaccggaaaaggctcaagcaatcatgcttatagctgcagctgcagcggcagcggcactaccaaaagcagtgctgcccctactgttaagcctcgaatggtgcctgcgagcactgttgccacagcagctgtcgt

SEQ ID NO: 260558 - DNA, 771 bp, Zea mays
actgtttcctccaggagaagatcatgagagtcccgtatggagtggagaaggagttcttcagatactcgcttttccttgttttctgtaaccgcatcaccacatccatggtgtctgcaatggtgttactggcaagtaagaaatccttggaccctgtggctccgctacacaaatatggtgttgtctccatatcaaatatactgaccactacctgccagtatgaggccctcaagtatgtaagcttccctgtccaaacgcttgccaaatgcgccaagatgatacctgtcatgatctggggcacaataataatgagaaagaagtatgttgcaaaagattacttcttttctgtcgtcgtgactatgggttgcgcattgttcattctatatccggcgtcgatggatgtgagtccatttaataaaggcagagaaagcactatttggggtgtttcactcatgctcggttatcttggttttgatgggttcacaagcacgttccaagataaactcttcaaagggtatgacatggaaatacacaaccaaatattctacacgacagtgtgctcttgtcttcttagtttaagtgggctgattctccagaatcatctgattccagctgtggattttatgtttcatcacccagattgcttctctgatgttctaatcctgtccagcgttgcaacagctagtcagttctttatatcctacaccattcgaacatttggggctctcacatttgctaccataatgacaactagacagctggtaagtatattgc

SEQ ID NO: 260559 - DNA, 966 bp, Zea mays
gaaattccggggcggaccaaccggtccgcccactcttccgcggacgcgtggccgcgaacgcagaacgccgccggcccgtcgtgcactcgtgtttcccttcctccacttgccttcgtgttcgtgattcgtgatttcgccgccggaaagccgagggagagggagcgatatggggttcgtcggagacacgatggagtcgatccgctccatgcagatccgccaagtgctcatgcagatcatcagcctcggtatgattgttacctctgcattaatcatatggaagggtttgatagttttcacggggagcgagtcaccagttgtagtggtgctctcgggtagcatggagcctggatttaaaaggggtgatatcctgtttttgcatatgagcaaagatcctattcgcacaggagaaatagttgttttcaatgtcgatggtcgtgagattccaattgttcaccgagtgattaaggtccatgaacgtcaggacactgcagaagtggacatcctcaccaaaggtgacaataattttggggatgaccgactattatatgcacatggccagctttggctccagcaacaccacattatgggacgtgcggtgggctaccttccatatgttggctgggttacaattatcatgactgagaaaccatttattaagtacctgctgattggcgcactgggcttgctggtcataacgtcgaaagattagagtgtcaaacttcgcgcagtatagattttgctcttatggtgcaacatcagaggttagtggctttgctgcgttaagagaagccgttctgttgcaccatggatcaaacgagaatatttgtttatagactgtgagagcacctgcccactaattagatagtcggttctcatccagcatccatcttttggtatttttagcctagctaatgagttgaaccagttcgttgttctatttgatgatcaccattcattgcagctttc

SEQ ID NO: 260560 - DNA, 1106 bp, Zea mays
cttcatcgctttccctgctccgtctcgtcgttgtcttcccctttttttttcctcagccacctctctccctcgctagagcaaaaaccttgccacgaatcgccgacactccaacccggaagaggcaacgaggtgactccgcgcctcggtcatgggtgacagccaatactccttctcgcttaccactttcagcccgtcgggaaagcttgtgcagatagagcacgcgctcacggctgtcggatccgggcagacctccctagggatcaaagctgccaacggtgtagtgattgccactgagaagaaactgccttctattttagtggatgaaacatctgtgcaaaagattcaggcactaacaccaaatattggagttgtctatagtgggatgggtccagattttcgtgttctggtgagaaaaagtcgaaagcaggcacagcagtattatcggttgtacaaggagcatatacctgtaacacagcttgtacgagagactgctgctgtcatgcaggagttcacacagtcaggtggtgtgagaccatttggagtatcactgttgattgctgggtatgatgacaatggcccgcagttgtatcaggttgatccctcaggatcatacttctcctggaaggcatcagccatgggaaaaaatgtgtccaatgcaaagacgtttcttgaaaagagatacacagaagatatggagcttgatgatgccatccacactgcaattttgactttgaaagaaggatatgaggggcaaatttcctccaacaacattgaaatcggaattattcgagctgatcgtgagttcaaagttttaagcccagcagagatcaaggatttcttggaagaggtggagtaagctgtctgttgatgatactagttcagacaacaatagcagcgtcacttatgagcagccagcctgaagattgtcttggttttattactctgtaaactgatttgctccagcgccatgtggtggttacatttgaaccctcctcaacgcatactgtagacaatgagataacgtaggatgaatgctgtatttgacatactttgcagcttgtttatgtgatgcacgttcttgcgggcgaaatatcaagaaaggagaa

SEQ ID NO: 260561 - DNA, 548 bp, Zea mays
atttgtcttcgtctcccaggttttcccctccaatcacccccaggtcttcctctcgcgagtagcggtctcgcgcccccctccgccgaccgccgcctcctcacaaccgcggaagctgcttccctctccattggacgcggccagcttccatctctcggtcacctccctctacatcccacggccgctaccaccttccctctacctcacacggccgccggcctctccaaggtctgcacacgcaggaaaaaccttgccacgagtcgccgacactccatcccggaagagctaacgaggtgactccccaccgcgcccatgggtgacagccagtactccttctccctcaccaccttcagtccgtcggggaagctcgtgcagattgagcacgcgctcacggctgtcggatccgggcagacctcgctcgggatcaaagctgccaatggtgtagtcattgccactgagaagaagctgccttctattttagtggatgaaacatctgtgcaaaagattcaggcactaacacctaatattggagttgtctatagtgggatggg

SEQ ID NO: 260562 - DNA, 1398 bp, Zea mays
ggcaacgtgctcatcttcatctcccaggttttcccctccaatcacccccaggtcttcctctcgcgagttgcggtctcgcggccccctccgccgaccgccgcctcctcacaaccgcggaagctgcttccctctccattggacgcggccagcttccatctctcggtcacctccctctacatcccacggccgctaccaccttccctctacctcacacggccgccggcctctccaaggtctgcacacgcattcagcgacgcatttgcctatatcagcactgtggtcataactctagtagagaaaggagaagatgcaggcatctagggcaaggcttttcaaggagtacaaggaggtacaacgagagaagtcagctgaccctgatatccagttaatatgtgatgattccaacatattcaagtggactgctcttatcaagggcccttctgaaacaccttatgaaggtggtgtgtttcaacttgcgttcgcaattccagagcagtatcctctactgcctcctcaagttcgatttttaaccaaaattttccacccaaatgtgcatttcaagacaggtgaaatttgtcttgatatattgaagaatgcatggagccctgcatggacccttcagtctgtttgtagagcgataattgctctgatggcccatcctgaaccagacagcccacttaactgtgattcaggcaatctcctgcggtcgggtgacatcagaggctatcaatcaatggcccgcatgtatacaaggctggctgccatgccaaagaaaggttagatgtagaacatgtgccaagccaagagcctatgtcagtccatatgttgtcaggtttgctgtgtgctgtctgtctgtgaacttggtggttcttgtttcctaataagtcctaaccattcatgtgtgtgtattctgtattctgtatcccggattcccgatgcttggtctgtgatgtaataaatcctggaattcaacagttgttacttctgatctatttatttagttgctcagtatggccggcgaaaaaaaaaaaaaaaataaaaaaaaaaaaaaaaaaaaaaataataaaaaaaaaaaaaaaaaaaaaaaaatagggggggtgaaaaaaaagttccaatgttttaataagcgtgcatgttacttgggggggggcctttttaggggacccaagttaatgtccccgggcttgcgaggtaaaagcttttttttggggacccccaattttattccaccggccgggtgttaaaaaccatgggcttgggaaaaccttggggtttcccaaataaacccctttcgatatcatccccttttttcaagggggctgtatatggaaatggcccccacccttttgccttccaaaaagttgccccgccttaatggtttagtgggccccccccctt

SEQ ID NO: 260563 - DNA, 941 bp, Zea mays
ctttaaagtcaacccacccgtcttttccggtcctcccttctctccgtagaaacatttcccgacgggtgtttcccacgccggaatggaccagccggcaccataagcccaagattcgtttgatgagtttgtacgatactggctctacagttaggagaacacatttaatctaccttcactagcattcagtaatgcctttgcctaaatcagacctggggtcataactctttagtagagaaccaagaagatgcaggcatctagggcaaggcttttcaaggagtacaaggaggtacagcgagagaagtcagctgaccctgatatccaattaatatgtgatgattctaacatattcaagtggactgctcttatcaagggcccttctgaaacaccttatgaaggtggtgtgtttcaacttgcattcgcaattccagagcagtatcctctgctgcctcctcaagttcgatttttgaccaaaactttccacccaaatgtgcatttcaagacaggtctcacctgtctggatatattgaagaatgcatggagccctatatggacccttcaggctgtttgtagagccataattgctctgatggcccaccctgaaccagacagcccacttaactgtgattcaggcaatctcctgcggtccggtgatatcagaggctatcaatcaatggcccgcatgtatacaaggctggcggccatgccaaagaaaggttagccgtagaacatgtgccaggccaagagcctattgtccatgcatggctacatgttgtcaggtctgccttgtgctgtctgtatgaactttgtggttcttgattcatgaaatactaaccgttcgtgtgttgcgtgtgtgtctggggtaatgagaggacactcgggttctcgatggtgttggtctgtgatgtatttagtaataagaaaataaaaaatgctttctcgat

SEQ ID NO: 260564 - DNA, 382 bp, Zea mays
ggacctgattgaaatcggaattattcgagctgaccgtgagttcaaagttctaagcccatcagagatcaaggatttcttggaagaggtggagtaagttgtctgttgatgatttactgtttcaaacaagaatagcagcatcacttatgagcagccagcctgaagcttgtcttggttttatcactctgtaaactgatttgctccagcgacatgtcttggttttatcactctgtaaactgatttgctccagcgacatgtggttcttacatttgaaaccctcctgaacgcatactgtagacaaatgagatacgtaagatggatgttgtatttgacagtctctacagtttgtttatgtgattcacgaacttgtgagcaggacaagggg

SEQ ID NO: 260565 - DNA, 301 bp, Zea mays
tcttcatctcccaggttttcccctccaatcacccccaggtcttcctctcgcgagtcgcggtctcgcgcccccctccgccgaccgccgcctcctcacaaccgcggaaactgcttccctctccattggacgcggccagcttccatctctcggtcacctccctctacatcccacggccgctaccaccttccctctacctcacacggccgccggcctctccaaggtctgcacaccgaattgtgctattgtgatgttgattccacaatgtcaagtgtctgaggcgtctccagcaagtacacactac

SEQ ID NO: 260566 - DNA, 430 bp, Zea mays
gaaacatttcccgacgggtgtttcccacgccggattggaccagccggctccttaggcccaagattcgttggcattcagtaatgcctttgcctaaatcagacctggggtcataactctttagtagagaaccaagaagatgcaggcatctagggcaaggcttttcaaggagtacaaggaggtacagcgagagaatgtcagctgaccctggtttccaattaatatgtgatgattctaacatattcaagtggactgctcttatcaagggcccttctgaaacaccttatgaaggtggtgtgtttcaacttgcattcgcaattccagaacaataatcctttgctgcctcctcaagttcgatttttgaccaaacttttccaccaaatggtccttttcaggacaggtgagatttgtctggatatattgaagaatgcat

SEQ ID NO: 260567 - DNA, 657 bp, Zea mays
  unsure (1)..(657): unsure at all n locations
atactgaacagtccagtcagtcgtctctacctcatccgcctgacgaatcttgattcgtgagcttgattgggtgtcatctcttttagctgcaactgcagctggctgtgatcatggcatcgctgagtgctgacctcttttacgacatactcaagcgtctcgatgctgcagctctggcaagagcaggctgtgcctgcgctgattttcgtgccatatcaaatgaagaggatctgtgggaaaatgcctgcacatctctgtggccatcaatgagacgagatgacgttaggagcttaattgcctctgctggtgggttcaggaagttctatgcggattgggtcacgcttatactgaacaggggcgtccctgtggttcaagccaatgaaactaacttctttgccgaagaatgggctgagtctgactactactacgacgacgacggcggcatggactattctgaaaactcattgccttcggatttcgtgtctttggtcgatgtatggtacaaaggccatgcgctctactcgaaggtcanatgggggaattcccaactcagacagtgccaatggatggttctacaactacccgttccggatcgacctgtctcaacactcggctgaaaacaacgagaacaacaacggagatgtattcctatccactgtc

SEQ ID NO: 260568 - DNA, 734 bp, Zea mays
  unsure (1)..(734): unsure at all n locations
ccggtccggaattctccggtgtcgatcccacgtcgtgcggtagagcagcagagcagaggtcaacaagacgagacaagagaatgcctgtgagcaggatcgccgtgggcgctccgggcgagctgtcccaccccgacaccgccaaggccgccgtggccgagttcatctccatgctcatcttcgtcttcgccggctcaggatcgggcatggccttcagtaagctcacggacggtggcgccgccactcctgccggcctcatcgccgcgtctctggcgcacgccctagccctcttcgtggccgtctccgtgggtgccaacatctccggcggccacgtgaaccctgccgtgaccttcggtgcctttgtgggcggcaacatcagcctcctcaaggccctggtctactgggtggcccagctcctgggctccgtcgtcgcctgccttctcctcaagatcgccacgggcggcgcggccattggcgccttctcgctgtcggcgggcgtcggcgccatgaacgccgtggtgctggagatggtcatgaccttcggcctcgtgtacacggtgtacgccacggccgtggaccccaagaagggcgacctcggcgtcatcgcgcccatcgccatcggcttcatcgtcggcgccaacatcctggcggngggcgccttcgacggcgcctccatgaaccccgccgtctccttcggcccggccgtcgtcaccggcgtctgggagaaccactgggtg

SEQ ID NO: 260569 - DNA, 295 bp, Zea mays
tcgtgatggtccagatggaagcttagcaactgttactgagtttatggttaatgggtctctcaaacagttcctgaggaaaaaagacaggacaatagatcgccggaagagagtaatattagccatggatgctgcatttggcatggaatatttgcacgggaagaatatagtccattttgacctgaagtgtgagaatctactggtgaacatgagggatccacagcgaccaatctgcaagatcggtgatctcgggctatcaaaggttaaacagcatactttggtatctggtggtgttaga

SEQ ID NO: 260570 - DNA, 1446 bp, Zea mays
ggagcggacggggggtcaccgaaggcgtccaattcatccaccttgtccctcccggagaaccagaaggccacccaccttccaaggcaggggaggggccatggacgaccccgtcgagcgcttgaaggacgggttccacaagttcaagaccgaggtctatgacaagaagccggagctgttcgagcctctcaaggccggccaggcccccaagtacatggtgttcgcctgctccgactcccgcgtgtgcccgtcggtgaccctgggcctgcagcccggcgaggcattcaccgtccgcaacatcgccgccatggtcccagcctacgacaagaccaagtacaccggcatcgggtccgccatcgagtacgccgtgtgcgcgctcaaggtggaggtcctcgtggtcattggccacagctgctgcggtggcatcagggcgctcctctccctccaggacggcgcacctgacaccttccacttcgtcgagaactgggttaagatcggcttcattgccaagatgaaggtaaagaaagagcacgcctcggtgccgttcgatgaccagtgctccattctcgagaaggaggccgtgaacgtgtccctggagaacctcaagacctaccccttcgtcaaggaagggcttgcaaatgggaccctcaagctgatcggcgcccactacgactttgtctcaggagagttcctcacatggaaaaagtgaaaaactagggctaaggcaattctaccggcccgccgactcctgcatcatcataaatatatatactataactatactactacgtacctaccgatatgcacccgagcaatgtgaatgcgtcgagtactatctgttttctgcatctacatatatataccggatcaacaatcgcccaatgtgaatgtaataagcaatatcattttctaccacttttcattcctaacgctgagctttttatgtactatatctcatattattattcatcatataagatatagtacataaaaagctcagcgttaggaatgaaaagtggtagaaaatgatattgcttattacattcacattgggcgattgatccggtatatatatgtagatgcagaaaacagatatatagtactcgacgcattcacattgctcgggtgcatatcggtaggtacgtagtagtatagtatagtatatatatttatgatgatgcaggagtcggcgggccggtagaattgccgtagccctagtttttcactttttccatgtgaggaactctcctgagacaaagtcgtagtgggcgccgatcagcttgagggtcccatttgcaagcccttccttgacgaaggggtaggtcttgaggttctccagggacacgttcacggcctccttctcgagaatggagcactggtcatcgaacggcaccgaggcgtgctctttctttaccttcatcttggcaatgaagccgatcttaacccagt

SEQ ID NO: 260571 - DNA, 1659 bp, Zea mays
cgcacgatcaatgtacacattgcccgtccgcgccaccacatccagcatcgtcgccagcctcgccacccccgcgccgtcctcctcctccggctccggctccggccgccccaggcccaggctcatccggaacgcccccgtcttcgccgcccccgccaccgtcgtgggcatggaccccaccgtcgagcgcttgaagagcgggttccagaagttcaagaccgaggtctatgacaagaagccggagctgttcgagcctctcaagtccggccagagccccaggtacatggtgttcgcctgctccgactcccgcgtgtgcccgtcggtgacactgggcctgcagcccggcgaggcattcaccgtccgcaacatcgcctccatggtcccaccctacgacaagatcaagtacgccggcaccgggtccgccatcgagtacgccgtgtgcgcgctcaaggtgcaggtcatcgtggtcattggccacagctgctgcggtggcatcagggcgctcctctccctcaaggacggcgcgcccgacaacttccacttcgtggaggactgggtcaggatcggcagccctgccaagaacaaggtgaagaaagagcacgcatcggtgccgttcgatgaccagtgctccatcctggagaaggaggccgtgaacgtgtcgctccagaacctcaagagctaccccttcgtcaaggaagggctggccggcgggacgctcaagctggttggcgcccactacgacttcgtcaaagggcagttcgtcacatgggagcctccccaggacgccatcgagcgcttgacgagcgggttccagcagttcaaggtcaatgtctatgacaagaagccggagcttttcgggcctctcaagtccggccaggcccccaagtacatggtgttcgcttgctccgactcccgtgtgtgcccatcggtgaccctgggcctgcagcccggcgaggccttcaccgttcgcaacatagccgccatggtcccaggctacgacaagaccaagtacaccggcatcgggtccgccatcgagtacgctgtgtgcgctctcaaggtggaggtcctcgtggtcattggccatagctgctgcggtggcatcagggcgctcctctccctccaggacggcgcacctgacaccttccacttcgtcgaggactgggttaagatcggcttcattgccaaggtcaaggtgaagaaagagcacgcctccgtgcccttcgatgaccagtgctccatcctggagaaggaggccgtgaacgtgtccctggagaacctcaagacctaccccttcgtccaggaagggctggccaaggggaccctcaagctggtcggcgcccactacgacttcgtgtccgggaacttcctcgtatgggaaacttagccacacccgccgctcagcgcgcggcttcgtcgtcacaactcctatatcttcataaatatatatatccactacctatatatacctaccgatatgtgaatgcgaggagtactattacctgcatgttttcagcagtatgcagctacgtacatatatatgtaccggatcgcctaacgacgtgaatgtaataagcaataatattttctaccgcttttttttatttctttctaacgtcgagcttctatatgtagcaacaacattttctacgtacatatatatat

SEQ ID NO: 260572 - DNA, 515 bp, Zea mays
gtgaagaaccagagaacccacccaccctccttcatctcctacatccacatctatccaagaaggccatgggcgacgccgtggagcacctcaagagcgggttccagcagttcatgtccgatgtctatgacatgaagccggagctggtcgggcctctcaaggccggccaggcccccaagtacatggtgttcgcctgctccgactcccgcgtgtgcccgtcggtgtccctgggcctgctgcccggcgaggccttcaccgtttgtcttattatttttatggtctttgtcttcttcttgtccaatttctctggttttcttttcttttttttattttttttttttatctttttttttctatttttttcattttttttttctgttttttttttttttttattttttttttttttttgttttttttttttttttttttttttttttttttttttgttttttttttttttttttttttttcttttattttttattttttttttttattttttatttttttttttt

SEQ ID NO: 260573 - DNA, 514 bp, Zea mays
cccacgcgtccgtgtccctcccggagaaccagaaggctacccaccctccaaggcaggggaggggccatggacgaccccgtcgagcgcttgaaggacgggttccacaagttcaagaccgaggtctatgacaagaagccggagctgttcgagcctctcaaggccggccaggcccccaaggaggccgttaacctgtccctggagaacctcaagacctaccccttcgtcaaggatgggctggccaacgggacgctcaagctggtcggcggccactacaacttcgtgtcaggggagttcctcacatgggacaataagcagccatcatgaatctatatatatacactaatgcatcatgtacgttttcagcatgcagctacatacatatatatataccggatcacccaatgcaatgtgtgaatgtggtaataagcaataccatatattctaccattctaccgcttttttattttctaacgccgagcattattcttgccaaaaaaaaaaaaaaaaaaaaaaa

SEQ ID NO: 260574 - DNA, 940 bp, Zea mays
aacacgcgatccgcagagactcggaagtcggaaagaatccctcctgttcttcgtcaaccctccagaacctgctctctcttcctctacgagactacgaccgtgtaaggacatggccgtcgagcgcttgaagaccgggttcgagcagttcaaggccgacgtctacgacaagaagccggagctgttcgagccactcaaggcgcaccagtcgcccaagtacatggtgttcgcctgctccgactcccgcgtgtgcccgtcggtgaccctgggcctgcaccccggcgaggcctttgccgtccgcaacatcgccagcatggtgccgccctacgacaagaccaagtacgccggcgtcggctccgccatcgagtacgccgtctgcgccctcaaggtggaggtcatcgtggtcataggccacagccgctgcggcgggatcaaggcgctcctctccctcgaggacggcgcgcccgacaagttccacttcgtggaggaatgggtcagggtcggcgccccggcgaagtccaaggtgctggccgaccacgcctcggcgcctttcgaagaccaatgctccatcctggagaaggaggccgtcaacgtgtcccttgagaacctcaagtcctacccgttcgtcaaggaagggctggagaaagggaccctcaagctggtcggcggccattacgacttcgtcaatggaaagttcgagacatgggaaccctaagtggccatacgtacaaatacgccccaccggacttatttgccgcgtggagtgcttaattatttgccgatatatatatacacatataccggaaatgaccggtgagaactatactgttgtaataataatagcgaggaaaaaaatatttgcatccgggatataaaaacacttctttacaaatagaagacaaataaattattaagggattaatttataaatttgatatgtttt

SEQ ID NO: 260575 - DNA, 565 bp, Zea mays
aaaaaaaagaactctatttcagaattatgaaacagaatatcctgttttattatttactctttctttttttttttcttttcaagatcggcttccctgccaaggtcaaggtgaagaaagagcacgcctccgtgcccttcgatgaccagtgctccatcctggagaaggaggccgtgaacctgtccctggcgaacctcaagacctaccccttcgtccaggatgggctggccaacgggaccctcaagctggtcggcggccactacaacttcgtgtcaggggagttcctcacatgggacaataagcagccatcatgaatctatatatatacactacaatgctgcatgttcgtattcagcatgcagctacatacatatatttataccggatcacccaatgcaatgtgtgaatgtgtattgtgtaataagcaataccatatattctaccattctaccgcttttttattttctaacgccgagcattcatgtactgtgtattttatgatgaccgccctgtgtgctcgtcaaaagacatctgctatatataatcatctttggcgagattaattatt

SEQ ID NO: 260576 - DNA, 458 bp, Zea mays
cccacgcgtccggcctgccttccccatccgcacctccgcgtcgtcgacaacctcgccaaaacccgccaccccaggctcatcaggaacgccgccgccgtcttcaccacaaccccctccacccttgtggccatgggcgacgccgtggagcacctcaagagcgggttccagaagttcaagaccgaggtgtatgacaagaagccggagctgttcgagcctctcaaggccggtcaggcccccaagtacatggtgttcgcctgctccgactcccgcgtgtgcccgtcggtgaccctgggcctgcagcccggcgaggccttcaccgtgcgcaacatcgccgccatggtcccggcctacgacaagaccaagtacaccggcatcgggtccgccatcgagtacgccgtgtgcgccctcaaggtggaggtcctcgtggtcatcggccacagctgctgcggtggcatccg

SEQ ID NO: 260577 - DNA, 572 bp, Zea mays
  unsure (1)..(572): unsure at all n locations
gcacgccgtggcccagatgtccggcggcaccttctccttcatcgacgtggtggggtcgatgcangacgccttcgcgcagtgcatcggcggcctcctcagcgtcgtggcgcaggagacgacgctcagcgtcgagtgcgccgaccagggcgtgctcctcacgtncatcaagtctggcagctacgccagcggagcggacggcgacggccgcggcgggttcgtcgacgtcggccgcctctacgccgacgaggagagggacttgctcgtcaccgtgcgcgtcccgccgtcacgcgcgaccatcgcgctcgtccggccgagctgcacctaccgcgacgcggccaccacggagatggtgcgggtggggggcgacccggtgacgctgctccgcgcggcgagcccggtgagcgcggcgatgtccctgcaggtggagcgcgagtggcaccgcgtccacgccaccgaggacatggccgcggcgcaggccgccgcagaggagcacgactacgcccgcgcggcttcgatcctcgaggcccgccgccggctgctggagtcgtgcgcgtggctgtcctcggaccagc

SEQ ID NO: 260578 - DNA, 1878 bp, Zea mays
tcgtctcggctagtttcataatgtgtcccatctcatattgagctatatatctcgctcacgatgtctgttagacttgacgagcttattgatgcttccttgtactgacaagagtgtcgctgtagcaggggcaacgcagaatctattgttcaagatattgtaaacatggttcgagcttatgttgacaagccaaattgcatcatcttggctatctccccagcttaccaagatattgcaacgtcagatgctatcaagcttgccagggatgttgatccttcaggtgacaggacatttggagtcttaacaaagcttgatttgatggacaagggtaccaatgctgttgatgtacttgaagggaggcaatatcgcttacaacacccctgggttggaattgttaatcgctcacaagctgatatcaacaagaatgttgatatgctttcagcaagacgcaaagaaaaagagtactttgagagtagtcctgaatatggtcacttggcacataaaatgggtgcagagtatcttgccaagcttctgtcacagcatttagaggctgtgatcagggcaaaaattccaagtattatagctatgattaacaaaacaattgatgaaatagaagcccagttggatcgacttggtaggccaatcggaggtgacgctggggctcagttgtacacaatcttggatatgtgtcgggcatttgaccgtgtctttaaagagcacttagatggcgggcggccaggtggagatcggatttatggtgtctttgacaaccagttacctgcagcactgaaaaagcttccatttgaccggcatctttcaatgcaaaatgttcgtaaagttatttcagaagctgatggttaccagccccacttgattgcccctgagcaaggatacagaaggcttatagatagttctttaagctactttaagggtccagctgaagcgtctgttgatgcggtccatttggtcttaaaagagcttgttcggagatcgattgcagcaacagaggaattgaagcgatttccaacacttcaatcggatatagcagctgctgcaaacgaaagcctggaaagattccgcgaggatggacgaaagactgttcttcgtctagttgagatggaagccagctacctaacagtagagtttttccgtaaacttcctactgaaccagagaaagcagctgataagaacactccagtgagtgataggtatcaggacaatcatctcagaagaatcggatcgaatgtgtcatcttatattaacatggtctgtgagactctgaggaacacggttccgaaagccatcgtgcattgccaagtgaaagaagcaaaaagaaatttgcttaaccgtttctatgctcatgtgggaagcaaggagaagaaacagctgagcgcgatgttggatgaggaccccgctttgatggagaagagggatgccttggtcaagaggctagagctgtacaaatctgcaaggaatgagatcgactcggtcgcatggaaatgattggcttgtgacagctacatctggaatgtatgtaaaatgtacaaccgcagcagcacacgtgtgattgcagtagaatgttcaattcttttttacatttgaatttactctggaggccttgtacgcagttttcactcgagtctttgccggacatgcttatttggccgtcttggccttaacacgattgtgttatgcgtggatgatctggtctccggttgatataagagtgtatatgtattcttttgttgattttactgccttgatggcctccatacttctattgggtggggtgccaggctgggcaatctgtcagatgctacaaaatgaaattgtgggataggatgaccaactgtccatgatatggatgaatattaatgcgtc

SEQ ID NO: 260579 - DNA, 561 bp, Zea mays
ttcccggtcgaccactcgtctcggctacgcatcgtgacacgagaagaatgagtatatgtacaaaacatgttgataacttaacggatgggtgagcttactggactgacaaaaagtaactgaaaagagggcaagctgaatctattgatcaagatattgaaaacatggttcgatcttatgttgacaagctaaatagcatcatctcggctatttacccatctaaccaagatatagcaacgacagatgctatcaagcttgccagggatgttgatccttcatgtgacaggacatttggagttttaacaaagcttgatttaatggacaagggtgcttgacgggaggcaatatcgcttacaacacccgtgggttggaattgtcaatcgctcacaagctgatatcaacaagaatgtcgatatgctctcagcaagacgcaaagaaaaagagtactttgagagtagtcctgaatatggtcacttggcacataacatgggtgcagagtatcttgccaagcttctgtcacagcatttagaggctgtgatcagggcaaaaattccaagtattata

SEQ ID NO: 260580 - DNA, 2046 bp, Zea mays
  unsure (1)..(2046): unsure at all n locations
cccactcgtcctcccacgcgtccgcccacgcgtccggagcacactagcagcaagggctgtacctacggccctccagctgaatggcaaatctacaccgctcttggaggcacacacggcgtgcccaaggtgcattataaaggtcgtcagggtgactactatgtcatgattatggatatgctggggcctagtttgtgggattcatggaattcattaggccaatccatgccatcggaaatggtggcttgcattgccatggagtccatttccatcttggaaagcatgcattctaaaggatatgtgcatggagacgtcaaacctgagaactttcttctggggcagccttcaacgcctcatgaaaagaaactttatcttgtggatcttggattagcaacaaagtggagagatactgctaatgggcagcatgttagttatgatcaacgtcctgatgcctttagaggaacagtcagatatgctagtgtccatgcacatttaggaagaaccgctagcaggagagatgatttggagtcacttgcctatacactagtattccttcaccggggcaggttgccatggcagggatatcagggtgataataaatcatttttggtgtgcaagagaaagatgagtacctcacctgaggccctctgcggcatatgtcctcaacctttcaaggagtttcttgaggccgttgtcaacatgaagtttgatgaagagccaaactattccaagttgatttcattgtttgacagtttaattggaccaatcccttccattagaccaatcaatactgatggagcccaaaaggtagggcagaagcgtgccaggttgcttaatgatgacgacgaccatgtaaaaaagaagattcggctgggtgctcctgcaacacagtggatttcagtatacaattcaaggcaacctatgaagcagaggtaccactataatgtggctgatgcaaggttagcgcaacatgtggagaaaggaaatgaggatggtttgttgataagttcaatatcatcatgcgcaaatctttgggcaatcattatggatgcaggaactggcttctcagctcaagtttatgagctatcttcacactttcttcataaggagtggatcatggaacaatgggataaaagtttctacatcagttctgttgctggctccaacaatggaagttctattgtagtgatgtcaaaaggcacaccatatacacagcaatcttataaagtcagtgattcctttccatttaagtggataaacaagaaatggaaagaaggttttcatgtgactgcaatggcaacatcaggcaatcgatgggctatagtcatgtcccgcagtgctggattttctgagcaggttgtggagttggacttcttgtacccgagcgagggcatccatagacgctgggacaatggcttccgtattactgcaatggctgccacgatggatcagtctgcgctgatcctaagcaagccaaggcgtcgcccaagagacgagacacaagagactctgcggactacacagtttcccagtcaacatgtcaaggacaagtgggccaagaatctctaccttgctgggatatgctatgggcgaaccgtggcctaacatcgtccgttgctgacctagctgttgtttgatgtatattttgagttttttatcagctgctaccagcatgagccacaaggcatttgccttgtcgtaacccatggaaattggaaaggggatgaattccgatgtatgtgcccgaacttgattctagggttggtctcgtaagttaatcgggaaaggcgggtgcagacactactgatgagccgtaacgtacccgtcagatcccccagatacaataaaacgagtctgtaatgtggcttttgcatcgtattttctgcatcgtgttaaggagaattctgtttttttattaaaaaaaaaaaaaaaaaaaaaaaaaaaaaaaaaaaaaaaaaaaaaaaaaaataaaaaaaaaaaaaaatnngggggcggccgttttaaaggaaccaagtttacgtgcgcgtcgcttcaaagaaataaattttt

SEQ ID NO: 260581 - DNA, 1188 bp, Zea mays
cccacgcgtccgcccacgcgtccgcccacgcgtccgcccacgcgtccgcagcacgcctggcctgggctggccgcctccgaccaccgtacgtcctccaccgcgtcgccgccggccggcctctgcccagcccgggctgcctgcgagggcttctgatggccctcgacgccgtcctttcctcctagtgcccagctttattgcagatccagccctctgatcctcgtcttctttcacctctccaacatgaaggtcaacaccaagatcaagctggagccggtcatggcgccgtcgtcgtccctgccgcggagcgccagcgagctacccgacccgccgtcaccgttcagctccaacacggcgcaccaccccgtctccgtgcccaccacacctaggttgtccttatcgtgctcgtcgttcggccacatggtgaccccgcccaccgacacaccgccgatcacgcccaccaagaagcaggacgacaagccgaagccgacgccggaggccgccaccgcggcgaactacgcgtcgttgtggtcgcccaagcgcctcatgcagcgcgctgcccgcgctttccgccgcagcaggtcgcgcgcccgcgtcaggacggtcaaggacctcgccgaggaacgggcctcagtgctcgccgccagcagcaaggtctctgatgaggcggcggcggcggctaccgcggtgccgcctgcaggtgccaagacctccagcagcaacgatgcccgcgacggcgccatgggcagcgtgcaggacgagccgcggcagcagcgccacgatgactatcaccccgagatcgtccccgagaagatcatacacgaggacgcgttgccggtcgttgctgcggagaaggagactgccgccgccgccgcaacctcgaaggaggaggaggaggtggagtcgcccaagaaaggagcggctctgtcgccggtgccggaggctatcgtcatcgccacagccgcaacctcgaaggaggaggaggaggaggtggagtcgcccaagaaagaagcggctctgtcgccggcgccggagcctatcgtcatcgccgccgccttaacctcgaaggacgaggaggaggtggaatcgcccaagaaagaagcggctctgtcgccggcgccggcgccggaggccatcgttgccgtagcagcagtggaagacgtggtggcggacaagttcgtgacggttgtg

SEQ ID NO: 260582 - DNA, 1067 bp, Zea mays
attaaaccgtgcttttttatttttgattatcgacggcctaggcccgtgcctgaagaacggaagaactcggactcgagcaccccgaagcgagccaccgccgatctgctcctcctgagtcctgaccctcctccgtgcgctgcgcaggcatgaggctcctcctcgtcggcgccctcctcctatgtgccaccgcggcggtggagtccaagccgcccctcgacaccctgggcatacccccgcaagatgaggcgtactacagaggcggcgtgattaaatgcagggacggatcgggcaggttttccagggaccagctcaacgacgacttctgcgactgccccgacggcaccgacgagcccgggacatctgcatgccctgaggcgaaattctactgcaagaatgcaggccacactccagtcacgatcttctcgtcacgagtgaatgacggcatttgtgattgctgtgatgggagtgatgaatatgacagcaatgtcacctgtaagaacacttgctgggaggctggaaaggtggcaagggagaaattgaagaagaaaattgctacatacaaaaatggtgttgttattcggaaacaggaagttgaaagggcaaaagaggcttttgctaaagatgaagcagatttagcaaaattgaagggcgaagagaaaatgctccaaggacttgttgataaactcaaagagcaaaagaaattaatagagaatgcagaggaagaagagcgtttaagaaaagagaaggaagaaaagagaacaaaagaagaagatgaaaagcaagctgctgttgaaaagggagcgcttgatgcctctcgggatgtagattctaaggaaattcatgatcatctgcaagaaggtgaaaacaagcatgatggacatgcaacaggccatgataatcatgtaacagaaagcagggcatctattgagcagcatggttctgtaagcaaagatggtattagcgttgaaggtggaactgtagatgaattgccgcaggagtctgcagcacctaccatagagaaggattctagccctgacaatcctgagggtttatctagggaagagtta

SEQ ID NO: 260583 - DNA, 995 bp, Zea mays
  unsure (1)..(995): unsure at all n locations
gcgggcccgaccaagcgtccagctggggcagggcgggttcgggtacgtgtacaagggcgtgctcgccggcagcgggaacgaggtggcggtgaagcagctcaagtccggcagcgggcagggggagcgcgagttccaggcggagggggagatcatcagccgcgtgcaccaccgccacctggtgtcgctcgtgggctactgcatcgcgggcaaccagcgcatgctcgtctacgagttcgtggccaacaacacgctggagcaccatctgtacgccaaggacggccctgtcatggactggagcacccgcatgaagatcgcgctcggctccgccaagggcctcgcctacctccacgaggactgccatcctcggatcatccaccgcgacatcaaggccgccaacatcctgctggacaacaacttcgaggccatggtggcggacttcgggctggccaagctcacgacggacaccaacacgcacgtctccacgcgcgtcatgggcaccttcggctacctggcgccggagtacgcgtccagcggcaagctcacggacaggtcggacgtcttctccttcggcgtcatgctgctggagctgctcacggggcgccgccccatcgataccaccaactacatggaggacagcctcgtggactgggcgcgcccgctgctgagcgccgcgctggcggggggagacgggcttcgccgagctcgtcgacccccgtctgggaggcgagtactccgtcgtcgaggtggagcgcttggcggcctgcgccgccgccagcacccgccactcggccaagcgccgccccaagatgagccagatcgtgcgcgcgctggagggcgacgcatcgctggaggatctgcaccaggacggcggcaagcccgggcagagcgtgctcttcttcggcgggggcttcgacaacatctcccgcctaaggcagctcgccttcgacagcggcgactactcggactacagcaccgactcctncaccggtggtggt

SEQ ID NO: 260584 - DNA, 1191 bp, Zea mays
tcggtccagggaaactggtgcttcggcccttggcggtaccgacacgcttcggcctctggctccaccggctgccttcctggctctgtgaccgtgaccagacacgtcgccgagaggccaccccgcttgggattgtgaggtaaagcgtgatggcagcgccaccggcgagggcccgagccgactacgactacctcatcaaactgctcctcatcggtgacagcggagttggaaaaagttgtctcctgttacggttttcagatggatcattcaccactagcttcattaccactattggcattgacttcaagataaggactgtcgagttggatggcaaacggattaagttgcagatctgggacactgcaggccaagaacgtttccgcacgattactactgcttactacaggggagcaatgggcatcttgcttgtgtacgatgtcacagacgagtcatctttcaataacataagaaattggatcagaaacattgagcaacatgcttcggataacgtgaacaaaattctggtggggaataaagctgatatggatgaaagcaaacgggctgtgcccacttcgaaggggcaagctctcgctgacgaatacgggataaagttttttgaaacgagtgcaaagacaaacctgaatgtcgagcaggttttcttttccatagcaagggacatcaaacagagactttcggagaccgattccaagcctgaggatcgaactatcaagatcaaggctgaaggggaagctgaggcagcggcggcggcgcagaattcagcttgctgtggctcctgagcacttgtcaccgcaagatagtggcgttctcgcgcatgtaattttcatcgtttcattctttgccagcgactctctccttgtgcttcttgagctatcgcagttgctgtggcctggacaaatgggtgttaactgttaagtcagagcagttacttgctgtattgtgggaactctacccatggtaaggcgtgcataatggctgtgcaaagtacctttttacactatcgatcgactacactgtttatatggtagagtttaaaatgagaggtgggctgtttgatctcgaggaggctgctactgctatagagatgacgttgggattgcgggaattttcaatgcgtacaagcggtaacatttgcttgcagcactggataatctttgcttcacagatttgctgtat

SEQ ID NO: 260585 - DNA, 541 bp, Zea mays
ccctcgcgtccgcccacgcgtccgcggacgcgtggccagggcccagggccgagcaacctggtgctccgcccctcgccgttacagcggcgcctcggcctccggttccacagcgtctgcctgcctgcgcggccctgtgaccgtgaggcgacacgacgccgagagatcacccgccccccgcatcgagtccgccccgcttgggattgtgaggtaaagcgtgatggcagcgccgccggcgagggctcgagccgactacgactacctaatcaaactgctcctcatcggagacagcggcgttggaaaaagttgcctcctgttacggttttcagatggatcattcaccactagcttcattaccactattggcattgacttcaagataagaactgttgagttggatggcaaaaggattaagttgcagatctgggatactgcaggccaagaacgtttccgcacaattaccactgcctactacaggggagcaatgggcatcttacttgtgtatgatgtcacagacgagtcatctttcataacataagaaatg

SEQ ID NO: 260586 - DNA, 329 bp, Zea mays
atcgagccagggccaggcaacctggtgctccgcccctcgccgttaccgcgacgcttcggcctctggctccaccgcctgcctccgtggctccgtgacgagacacgacgccgagaggtcacccccacaccgcgccgaggccaccccgcttgggattgtgaggtaaagcgtgatggcagcgccaccggcgagggcccgagccgactacgactacctcatcaaactgctcctcatcggtgacagcggagttggaaaaagttgtctcctgttacggttctcagatggatcattcaccactagctttattcacactattggcattgacttcaaga

SEQ ID NO: 260587 - DNA, 375 bp, Zea mays
cgcaaagacaaacctgaacgtcgagcaggttttcttttctatagcaagggatatcaaacaggggcggtcgcgggctgattccaagcctgaggatcgaactatcaagatcaaggctgaaggggaagctgatgcagcagaggcgcagaaatcagcttgctgcggctcttgaacggttgtggccgcaggatagtttcataatttttattctttgccagcaagtctctccttgtgcttgagctatcacaattgttgtggtttggacaagtgggtgttacgtcagaactaattacttgctatattgtggaaaccctgctcttgataaaaaaaaaaaggaaaaaaaaaaaaaaaaaaaaaagaaaagaaagaatagtaggg

SEQ ID NO: 260588 - DNA, 549 bp, Zea mays
ccgcactctcagcagcttcagcatgaactccgcatacagcgagaagaagcccagcagcaagggcgcaagcgcaactgatcccgcacacgggtgatgttccacatccatgcctataggccactcacctcaccacgcagcgttaccggccgtactactatatctacatacgaccgtgggacaacgtcgaccggagctcgatcggcgcagttgccgcatgggcgtggctgtcaaagttcctttgtttctttcttgatttgtgcttgcgttgggttcggtgttccactttctttttatgtgattattaatcttgttttcagatgcatgtacgcatgtatgtgccggcaccatttggtcttgtgttaagtttattcttggattccaatctctagtgtagggtcgtttggtttgtgtgtgcatgttgtactcataccaacttctgtctttacatcagtatttattaagaaatagcaatgtgacctatccaaattagacagagtcgctagaattgctaaaaaaaaaaaaaaaaaaaaagggcggccgtcgcgatct

SEQ ID NO: 260589 - DNA, 601 bp, Zea mays
cccatgcaaagagccaaaatttattatagatgatatgtcttttagctaagcaaaaaaaaacctatctcatttctttactaataataacaagaagaaataaaaatatattttagagccttactacttatctaagatgtcacaaaaatccccagggcccccaggtagtagtagtaggtagggtacttctagttagccccaactgggatagatcatgcgaggccgttgacgacgacggggcttctgacatagtgggtcccgtctgtccagccgagcctcccaaagacgtagcccatcccgagcttgtcctgctgcgacgtcaccgtcaccttgaactccttttcctcaccgaccttgctgaactcaagcaccctcggcttcacctccatggtgatcccaaccggcgcgcgccaggacgcgaggtacttggccggacggccgacgttcttcagccgtcgcgtcaccgtctgcgtgccgcgcagcgacggcaccacgatggacgggtagttgaggtcctccatggcgggcgcctccttagcgctattagctgggcacgcgaacttgccggcgctgagccgcttcatgtctgccgcggagatgccca

SEQ ID NO: 260590 - DNA, 1679 bp, Zea mays
  unsure (1)..(1679): unsure at all n locations
aactgcccgcgttcccgtgcccgtactaaaaataaataacggactgccatctcctcgtgcactccgccaaccgccgccgccactcgccactctcacgtctcgcccatcccgccactgctgctctccagagtccaggcgacccaggctgcgcggtcgctcggtgttgttagtcccgaccgccgccggccatggcatccaacggcatcgcccccagagatgtatgtgttgttggcgttgcacgcacccctttgggtggtttccttggtgccttgtcttccttgcccgcaacaaagcttggctctatagcaattgaagctgctctgaaaagagcaaatgtggatccggccctcgtgcaggaggtctttttcggaaacgtcttgagtgctaatttgggacaagctcctgcaaggcaagccgctctgggtgcagggataccaaacactgttgtttgcaccactgttaacaaagtctgcgcatctggcatgaaagctactatgttcgccgcacagtcaattcagctgggtatcaatgatattgttgtggcaggtggcatggaaagcatgtccaatgccccaaagtacattgctgaagctaggaaagggtctcgttttggacatgacacacttgttgatgccatgcttaaggatggactttgggatgtatacaatgactgtgccatgggaatgtgtgccgaactttgtgctgacaatcatgccctcacaagagaagaccaggatgcttttgctatccaaagcaaccagcgtggaattgctgctcgtgacagtggtgcttttgcatgggagattgttccgattgaagttcctgttgggagaggaaaaccacctgtacttattgagaaagatgaaagcctggataagtttgacccagcaaaactgaagaaacttcgcccaagtttcaaggagaatggtggtaccgttacagctggaaatgcttctagtataagtgatggggcggctgcattagttttggtgagtgggcagaaggctaagaacttggccttgaagttctttgaaggatccaaagattttccaaatccagttaaggttccgaacctgttaacaccaacccaagacttggcaatcccaaaggttttttaaatgcctgatttaaagtcatcccgtgttgatttctatgagattaatgaagccttttcggctgttgcgcttgcaaatcaaaaacttcttggaattccttcagaaaagattaatgttcatggaggagctgtatccttaggacatcctctcgggtgcagtggtgctcgcattttggttacccttattggtgttctcagggcgaagagtggcaagatcggagttgctggtgtctgcaacggtggaggcggagcatcagctcttgttctggagctcgcataagaaatctagaccttgtagttagcaaaagctccctgaggtgatcttgtagtcttattttccgttgtagtagtcccatagaacatttcttaatttaatttggcaataaagcaaaagctccctgaggagatattgcttctgttggttgcatagtagagtatcatgtaataagagctacagaaatatttttgatatatttgtgaggatactacagaaatattttatatatttgtgatgtgtcttggcccaaaaccaaaaaaaaaaaaaaaaaaaaagaaaaaaaanaaa

SEQ ID NO: 260591 - DNA, 509 bp, Zea mays
gctggtgcgcctgcaggtaccgccgcggcattctctgggtggcgcccgacgcgcgctctttctttccctagcgccgcgccggcgccgccattcgatcaggccgcttcgccggcgacagcatattccaggtcggttggttttggcacttcggaccggcggccatggcttccgacggcatcggccccagagatgtatgtgttgttggggttgcacgcaccccaatgggcggtttccttggtgccttgtctcccttgcctgctacgaaacttggctctatagtaattcaagctgctctggaaagagcaaacgtggatccagccctcgtgcaggaggtctactttggaaacgtcttgagtgctaatttggggcaagctcctgcaaggcaagctgctctgggtgccgggataccaaactctgttgtttgcaccactgttaacaaagtctgtgcatctggcatgaaagctactatgtttgcagcacagtcaattcaattgggtatcaatgatatt

SEQ ID NO: 260592 - DNA, 966 bp, Zea mays
gggccgacccaagcgtccacagtggtgcttttgcatgggagattattccggttcaagttcctgttgggagaggaaaaccacctgtacttattgagaaagatgaaagcctggataagtttgacccagcaaaactgaagaaacttcgcccaagtttcaaggagaatggtggtaccgttacagctggaaatgcttctagtataagtgatggggcggctgcattagttttggtgagtgggcagaaggctcaagagcttggcctgcaagtccttgcaaggatcagaggatatgcagatgcagctcaagctccggaactttttacaaccaccccagcacttgcgataccaaaggctatatcaaatgctggattagagtcatcccatgttgatttttttgagattaatgaagcattttctgctgtcgcacttgcaaatcaaaagcttcttgggattccttcagaaaagattaatgtccatggaggagctgtgtctctagggcatcctcttgggtgcagcggtgctcgcattttggtcacccttcttggtgtccttagggaaaagggcggcaagatcggtgttgctggtgtctgcaacggcggaggtggagcatcagctcttgttctcgaactcgcataagaagcattggcttgaagcactggatatgtagctaattcagtcgcatgcatctatgcatgatgaagtattgaaaaaaaaagaccctacgatatccatgccgggtgccactgtctgcttaattcaacagaatatgattgtgcaatcattctgccgtgccgcttttgctgaccttaggaacacggcgtcggaggcgcaatcattctggcaattagcaccagctagctccctgaggggcgaccttgtactctctacattgatgtatgtgtagtgctggacattcttaagttaattcggcaataaagtgtgttgtgcttctgctacctgcatcttagat

SEQ ID NO: 260593 - DNA, 615 bp, Zea mays
cggctcgaggcgataccataggctatatcaaatgctggattagagtcatcccatgttgattttactgagattaatgaagcattctctgctgtcgcacttgcaaatcaaaagcttcttgggaatccttcacacatgtggggttgcatgaaaagattaatgtccatggaggagcttgtgtctctagggcatcctctcgggtgcagtggtgctcgcattttggttacccttattggtgttctcagggcgaaaagtggcaagatcggagttgctggtgtcttcaacggtggaggcggagcaccagctcttgttttggagctcgcataagaccttgtagttagcaaaagttccctgaggtgatcttgtagtccatagaacatttcttaatttaatttggcaataaagcgaagtcgtgcttctgttggttgcatagtagagtatcatgtaataagagcaatggggatgtttcatagacacagtttaaatattcccccggatgctacaaaaaaactttatatatttttgatattttaaaaaaaaaaaaaaaaaaaaaaaaaaaaaaaaaaaaaaaaaaaaaaaaagggcggccgcgcgggaatccggacggtacgtgcggcg

SEQ ID NO: 260594 - DNA, 414 bp, Zea mays
tgttgcgttccctacttgctcttttctgcctccgcttcaacctgtccccagcgccccccgcgcacacactgtctttctctgcctttctttccctagcgccgcgccggcgccgccattcgatcaggccgcttcgccggcgacagcatattccaggtcggttggttttggcacttcggaccggcggccatggcttccgacggcatcggccccagagatgtatgtgttgttggggttgcacgcaccccaatgggcggtttccttggtgccttgtctcccttgcctgctacgaaacttggctctatagtaattcaagctgctctggaaagagcaaacgtggatccagccctcgtgcaggaggtctactttggaaacgtcttgagtgctaatttggggcaagctcctgcaaggcaagct

SEQ ID NO: 260595 - DNA, 2104 bp, Zea mays
cccacgcgtccgcccacgcgtccgcccacgcgtccgcgccgctgttccccgcaacctatcgacccaatctcgtccgacccggcgcgtcgtcccctccagatctccgtcgccctctccaggtagcagaaactgttctgctgcagtctgacaaagtggagggcttaggagcttctgcttcttttatgtctgaacaatctttgctttatttgggattgttgggagagtactctcgtgcaacgaggaaaaggcacaaggttccgtcccactgcatgcgtcaagagcctgtctggttttcttgttctgatttgtcatttgctggtgctcaaagccggcttggtttcctcgaaggatcagcatctactcttgattgtggactttgtcgcatctgatatcaacttcataaatctttatccaagatggcgctgcaaaacattggtgcttcaaacagggatgatgccttctacaggtacaagatgcccagaatgattaccaagatagaaggccgtggtaatggtatcaagacaaatgttgtgaacatggttgacatagcaaaagcacttgccaggccagcttcctacacaaccaagtactttggatgtgagcttggtgcacagtccaaatttgatgagaagacagggatttccttggttaatggggctcatgatactgcaaagctggctggtctccttgaggtattcatcaagaagtatgtccaatgttatgggtgtgggaatcctgagactgagattctcatctcaaagacccagatgatatcactgaaatgtgcagcctgtgggttcgtctcagatgttgatatgagggacaagctcacaaccttcatcctgaaaaacccaccagaacagaagaagggcggaaaagacaagaaggccatgaggagagctgagaaggaacgcctgaaggaaggtgaggctgctgatgaggagcagaagaaactgaagaaggatgcaaagaagaagggttccaaggattccactgctaagggtttgaagaagaaggctactactgctactggctctgatgaggaccactcatcctctccaactcgcagccatgatggtgacaaagcagctgcagatgatgatgacgatgatgtccagtggcagactgacacttcaattgaggctgcgaagcagcgcatgcaagagcagctgagtgcagcaactgctgaaatggtgatgctgtcgactgaggagactgagaagaagatgaaacaggcaacccacaaagatggaagcactaatggttcagcaaaagaaatccctaatgacaagcctgccgtcactaagcctagtccctatgaagaactgattggagacatcaaggctagcctaggaagtgctccgacccctacccagctcaaggctgtgctggcctcatcaacccttcctccccaggacgtgatgaatgctctcctggaggctctctttggtggtgtgggtaagggattcaccaaagaggttgtgaagaacaagaagtaccttgcagttgctgtgccagatgagggtgcccagacccttctggttcaggccattgaggcttttggtgggaagtgcaaccctgaggcgctgaaggaggttcccgttgtcctcaaagccctctacgatggagatatcctggacgaggaaaccattgtggactggtacaatgatgctgtcgcagctgggaaggactcccaggttgtcaagaatgccaagccgttcgtcgagtggctccagagtgccgagtctgatgaagatggtgacgacgagtgaagaagccacgctgctctactgctaatggccaaacttgataatattatttcaataagtttgttttgcttgcctggtgtcggtgtttaaaactgttaattgtcgtgtggcgcagcatactcttatgtgtcgtcgtcagtttgtttgtgtcgtcagtttggttgtctgttggatgtcacggtttacttatgttcttatggattgctactatacaagtatttgttttggatgtgtcatgtgttgtataacctttcgggatgtaacattttattattgcactgttgcttctctaccccgctatgaagaccatgtgtgaagctctggtctcccggtgc

SEQ ID NO: 260596 - DNA, 576 bp, Zea mays
  unsure (1)..(576): unsure at all n locations
ctcactcgcccggctagcccttctaaccttgctcgacccttgcccgccgcctgaactcgcctcccccgcggccggtcccctgcatctgttcgccgcgccgcaacccggaggagactacgactacgagcaccaccaggtagcagcaactgttttgctgcaatctgacaaagtggagggtttaagagtcgctgcttcttttatgtctgaacaatctttgctttatttgggattgctgggagagtattcttgcgcgacgaggaaaaggcacaagtttctgctccactgcatgcatcaagagcccatccggtttccttgttctgaggtgtcattcgctagtgctcagagccggcttggttttctcgaaagatcagcagccactcttgattcaggactttgtcacacctgatagcatctagttaatacatctttatccaagatggcactgcaaaacattggtgcttaaacagggatgatgccttctacaggtacaagatgcccagaatggttaccaagatagaaggtcgtgggtatggtatcaagacaaatattgtgaacatgggtgacatagcanaagca

SEQ ID NO: 260597 - DNA, 486 bp, Zea mays
  unsure (1)..(486): unsure at all n locations
ctggtacaacgctgctgtcgcagctggaaaggactcccaggtcgtcaagaatgccaatccgtttgtcgagtggctccagagcgccgagtctgacgacgaggatggcgatgaatgaagaggcgatgctgctctactgttcatggcttcacttgataatattaattcaataagtttattttgcttgtctggtgtcatcgatgtcagtcttcgtttggtgtcagtcggtctggtgtcgatgtctaaaaactgttattgtcgtgccgcgcagcataccctatgtggttggctgcgtttggtgtcagtccgttttgtgtttggatgtcacggtttattatgttcctgtgggctgccactatatattatagttgcttgggatgtgttttttataaccttttggggtgttgcactttcttattgcattgttttatagtattttaaggggttgatcagcattttataaaaaaaaaaaaaaaaaaataaanaaaa

SEQ ID NO: 260598 - DNA, 382 bp, Zea mays
ccattgtggactggtacaatgatgctgtcgcagctgggaaggactcccaggttgtcaagaatgccaagccgttcgtcgagtggctccagagtgccgagtctgatgaagagggtgacgacgagtgaagaggccacgctgctctactgctaatggccgaacttgataatattatttcaataagtttgttttgcttgcctggtgtcggtgtttaaaactgttaattgtcgtgtggcgcagcatactcttctgttgctgcatgtgtcgtcgtcagtttggttgtctgttggatgtcacagtttattatggattgctactatacaagtatttgtttcggatgtgttgtataaccgttcgggatgtaacttttatgattgcactgttg

SEQ ID NO: 260599 - DNA, 779 bp, Zea mays
agctgtcttctacaacagacatgcatatctcggcaccaatcccatgttgggggaacccttcttcaacagtcaccaatcggttggttttcctgacagatgcattaatagcagctctatcaagtggtctgattgatcgaaggttgatcacctcagcactgattccttccttggacagtatctctgcagcctggagagcatagccaaccatcttggagaacgcagtaatggtaacatctttaccctcacgttctatcttagctttgccaatcggtaggcaaaaactagaatcaagcacttcagcagaaactgggaaagattctccataaagcaattcattttccaggaaaataacaggatcagggtccctgatagcagctttgagcaagcctcgggcatcttctgaagagtatggtgtgagaaccttaagtcctggaacatgtgcaaaccaagctgcataacactgtgagtgttgagcaccaactccagcagcagctccgtttggtcctctaaaaacaataggaacagatatctgaccagctgacatataatttgacttggcagctgaattgatgatatgatcaatagcctgcatcgagaaattaaatgtcataaactctataataggccgaagaccatgataagctgcaccaacaccaatgccagtaaaaccagcctctgtgataggcgtgtcaagaaccctatcaggaccacctacctatcaaccgcaaggcccttagaaatttcttggtatggcaccttggggtacttctcccggacgg

SEQ ID NO: 260600 - DNA, 528 bp, Zea mays
cagtaaagccagcctctgtgataggcgtgtcaagaacccagtcagcaccatacctatctatcaagcccttagaaatcttgtatgcaccttggtactctccagcctcgtctcccatcagaagatcggaaggatcagcagacatctcttcatccaatgcagagttcaatgcatcacggacagtcatctccttcgccgcggcggagtagcccctcgccacctcagccgccaccgctggtcggagccttcgcaaaacctgtcccagcatgggaccggatccaagctgcctcctccctgcgcccagcatcctcgtcgtcgtcgtcgaccggtgcggtggatggaagaattcgacgcggcctggagatggaggcggcgaagaaacgggatggaaaggagggagggaggaggaggagacgccctgccgggatgggagaatggcaggaaaggagggaggaggaatggtagaggaattggttcgttggccttggccgcgaccacgatggaggaggcgaaggaaagcccacgcgtccg

SEQ ID NO: 260601 - DNA, 1736 bp, Zea mays
cggacgcgtgggggcgctcagataaaaatctcacgcagtagacaaatccacgctttccttcggctcctctcctctatcgcagtcgcggccaaggccaacgaaccaattcctctacggcccaccttcttcctacctgccattctcccatccagcacagcagggcgtctcctcctcctccctcccgcttttatcgccgcctccatttccaggacgcgtcgaattcctccatctaccgcgccggccgccgaggcccgagggggaggaggatgctgggcgccgcgaggaggcagcttggatccggtcccatgctgggacaggttttgcgaaggctccgcccggcggcggcggctgaggtggcgaggggctactccgctgcggcgaaggagatgactgtccgtgatgcattgaactctgcactggatgaagagatgtctgctgatccttctgtttttctgatgggagaagaggttggagagtatcaaggtgcatacaagatttctaagggcttgcttgacaagtatggtcccgatagggttcttgacacacctatcacagaggctggctttactggcattggtgttggtgcagcttaccaaggtcttcggcctgttatagaatttatgacatttaatttctcgatgcaggctattgatcatatcatcaattcagctgctaagtcaaactacatgtcagccggtcagatatctgttcctattgtttttagaggaccaaatggagctgctgctggagttggtgctcaacactcacagtgttatgcagcttggtttgcacatgttccaggacttaaggttctcacaccatactcttcagaagatgcccgaggcttgcttaaagctgctattagggatcctgatcctgttattttcttggaaaatgaattgctttatggagaatctttcccagtttctgctgaagtgcttgattctagtttttgcctaccgattggcaaagctaagatagaacgtgggggtaaagatgttaccattactgcattctccaagatggttggctatgctctccaggctgcagagatactgtccaaggaaggaatcagtgctgaggtgatcaaccttcgatcgatcagaccacttgatagagctgctattaatgcatctgtcaggaaaaccaaccgattggtgactgttgaagaagggttccctcaacatgggattggtgccgagatatgcatgtctgttgtagaagaaagctttgagtaccttgatgccccagttgagaggatcgctggagctgatgtacctatgccctatgctgccaaccttgagagaatggctgttccgcaggtcgatgacattgtgcgggcggcaaagcgggcctgctacagggcagtaccaatggcagcagctgcctgattggtggacaagcctttctgttttccttccatcggttttcgctctctagccagaaacatgtagtattcataaggcgccggcaaattggccggaccccagactccaagcgagctagttttgtagatctgctatggtgtgctttattccgttagtcgatatatgttgcattgtttctagtttcgaagtccatttatttacttctctatgatttctacacacggcctaataatcttgctaaggccctgattgaatggaaaatattttttgggagttttaggaaaatactacaattttgtgaaataccttgtgttttcgagtaacatgaagatgatgtttggttagaag

SEQ ID NO: 260602 - DNA, 504 bp, Zea mays
agaatctttcccagtttctgctgaagtgcttgattctagtttttgcctaccgattggcaaagctaaggtatgttgtgtcttgggtgcatatgggtgtatgggaaggagattactttaggtaggactatttctataagtttaccttgggatggttttgagtggacttcctattgctttcaaaacggttctccatttccttttctggattatacttgataccatgtgcacttcactgtgggcctcatctttctgtagatagaacgtgggggtaaagatgttaccattactgcattctccaagatggttggctatgctctccaggtatgcgatgttgtactttgtaaacaatgtaaaggaggattaattattaattcattaatcgaataagcattaccctatagggtggacaataattagcatatgtgtttcccaatatatgtttacttctgtagggatttggatgtactgcatcaatgcacttttgttagtcgttaaactgatcta

SEQ ID NO: 260603 - DNA, 1004 bp, Zea mays
cattaacaccggcgccaccgccagcacacaccagctcgccggagatcacaagaagatacaagaccgtgctcctcgacgccgcccgacatggcggacgccgcctctggccgcggccacgtcgtctaccctccccgctccgccgaggacatcttcaaggactaccgcgcccgccggtccgccatcctccgcgccctcactcacgaggtcgaggacttctacgcgcagtgcgatccagacaaggagaacctgtgcctgtacggctacgcgaacgaggcgtgggaggtggcgctgccggcagaggaggtgcccacggagctgccggagcctgcgctgggaatcaacttcgcgcgcgacggaatgaaccgccgcgactggcttgcgctcgtcgccgtccactccgactcgtggctcctctccgtcgccttttactatgccgctcggcttaatcgtaatgaccggaagcgcttatttggtatgattaatgaattgcaaactgtttttgaagttgtctccggtgcgagacaacaacaatctaaagagaggtccagtatggacaatggtggtagagccaagcctgtaaagatagaaaataatggaaaagtcacagacgaagcatacgaagatgacagtgatcacggtgaaaccctatgtggaacctgtggtgggatatacaacgcggatgagttttggatcgggtgtgacatgtgcgagcgatggtaccatggcaagtgtgtcaagataactcctgccaaggcagagagcataaagcattacaaatgcccgagctgcagcttcaagagggcgaggcagtagcaaaacccatgaacgcaggaagcctccgaatgtgggatgtatggtgcagaagaggcgcattgcaaagtttccaggcagtagaaggccaagagacctccatttacaagattagaaccatattgctatcttccctgtgccttattgctacttttttacatatgataagctgatgtgaggaaagataagacatt

SEQ ID NO: 260604 - DNA, 481 bp, Zea mays
  unsure (1)..(481): unsure at all n locations
tgcttggctcccgaccgcatcgcgatcagtcatctcctgcgtctcgttctcgccggagatcagacgcgccaccgccgggcgatggatgcctcctaccgccgcgccggtgccggaagcggttctgctccccgctccgtcgaggacatctacaaggactaccgcgcccgccgctccgccgtcctccgcgccctcacccacgacgtcgaggagttctacgcgctgtgcgatccagagaaggagaacctgtgcctatacgggtacgcaaacgaagcgtgggaggtggcgctgccggcggaggaggtgcccacggagctgccggagcctgcgctcgggatcaacttcgcgcgcgacgggatgaaccgtcgcgactggctcgcgctcgtcgccgtccactccgactcgtggctcatatccgtcgcattctactacgccgcgcggctcaaccgaagtgatcggaagcngcttgttggcatgatgaatg

SEQ ID NO: 260605 - DNA, 338 bp, Zea mays
acggctccaggccgcatcgcgatcagtcatctctttccctcccagccttcctcctgcgtctcgctctcgccggaggtcaggcgcaccgccgccgggcgatggacgcctcctaccgccgcgccggcaccgggagcggctccgctccccgctccgtcgaggacatctacaaggactaccgctcccgccgctccgccatcctccgcgccctcacccacgacgttgaggagttctacgcgctgtgcgatccagagaaggagaacctgtgcctgtacggctacgcgaacgaagcgtgggaggtagcgctgccggcggaggaggtgcccacggagcttccggag

SEQ ID NO: 260606 - DNA, 2446 bp, Zea mays
catcgcgtccgcccctcccagaaacctccgcccgagatctcgccgcctctcccgcccctgctcgcgagccgccgtcgacagccaccgccatgggcacggccaacggccagcagccggcagagggcgctccctctgacaagctccgccacgtcgagtccatgtcggagctgccctccggcgccggcaagatctcggggatcaacgccgtcgtgctcggggagtcgctcgccgccgaggagaacgacctcatcgtccccagccccgagttctctgccagcgccctcgtctcttctccgaaacagtatcgcgagatgtatgagaggtccattaaggacccggccgggttctggtcggagattgccgagaccttttactggaaggagaagtggaaccccgccgaggtctgctcggagaacctcgatgtcaccaagggacccgtccagatcaactggttcaagggagggaaaaccaacatatgttacaacgctgttgaccgcaacatcgagtctggcaatggcgacaaggttgcaatgtactgggagggtaatgagcccggtcaggatgggaagcttacctattccgagctcctggagaaggtttgccagcttgcaaattacttgaagagccttggtgtcggcaagggtgatgctgttattatatacctaccaatgttgctggagcttcccattgccatgcttgcctgtgcccgcattggtgccgttcactcggttgtgtttgctggcttctcagcagattcgctagctcaaaggattgtcgattgcaagcctaagcttgtcatcacgtgcaatgctgtgaagcggggagtcaagcccatctttctcaaagatatagtggatgcagctttggttgaaagtgagaagaatggagtctctgtaggtctctgtttgacgtatgaaaaccagtcagccatgaagagggaaaacacaaaatggcaagcagaaagggatgtttggtggcaggacgttgtcacaaaatttccaaccaaatgtgatgtggagtgggtggatgcagaggatccattgttccttttgtacacaagtggcagcacagggaagccaaagggtgtactgcatacttctgggggctacatggtgtacactgcaacaacatttaagtacgcatttgactacaagccaactgacatatactggtgcactgcagactgtggctggattactggacatagttatgtgacatatggtcctctcctgaatggtgctacggttctcgtttttgaagggacgccgaactaccctgattcgggccgatgctgggatattgtggacaagtacaatgtgacaatattttatactgcaccaacacttatacgttcacttatgcgtgatggtactgagtatgttgctcggtactctcgcaagtctctccgagtacttggaagtgtgggtgagccaatcaaccccaccgcatggaggtggttttatgatgttattggtgactcacgatgccccatatcagatacttggtggcagactgtaaccgggggattcatgatcactcctttacctggtgcttggcctcaaaagccaggatcagcaacgtttcctttcttcggtgtgcagccagtcattgttgacgagaaaggtcgagaaatggaaggagaatgcagtggatatctttgcataaagaaatcatggcctggggctttccggactctgtatggagatcatgagagatatgagacgacatacttcaaaccatttgctggatattatttctcgggcgatggctgcagcagggacaaagatggttaccactggctgactggaagagtagatgatgtcatcaatgtcagtggacaccgaatcggcacagcagaggttgagtcagctttagtgtcacatccacagtgtgctgaggctgctgttgttggtgttgagcatgaggtcaaaggtcaaggaatttatgcttttgtaactttggtggatggtgttccgtatagtgaggaactacgaaaaagcctcataatgacagtgcgcaaccagattggggcatttgcagctcctgacaagatccactgggcaccgggacttcctaaaacccggagtggcaagatcatgcgaaggattttgcgcaagattgctgcacggcaactggatgaacttggggacataagcaccctcgctgaacctgctgtagttgaccagcttatttcgctcagcaattgttaggttgcaacgtaattggatggtggatacatccttgagcgcatgttgcgtttgtctgtaatatgagtagaaggtgcatttcaatatcgagaactcaagtgggacgtggtgacatgttgtcgatgtttccttttaaacttttgtatcagatatcaagataggtccatcagaatgtattattgattgacacagacaaatatatcaataaaattgttaatttttcaaaaaaaaaggaggaa

SEQ ID NO: 260607 - DNA, 339 bp, Zea mays
gcttttgtgactttggtggatggtgttccctacagcgatgatctacggaaaagcctcgttacgacggtccgcagtcagattggtgcgtttgctgctcctgacaagatccattgggcacctgggctccctaagacacgaagtgcgaagatcatgcgaagaatcttaagaaaaatcgcatccaggcaactagatgagctcggcgacacgagcacgcttgctgaccctggtgttgtggaccagctgattgcactcagtgacagctaatctatcggctatgtgggagggggtgagacatgatcactgcctgcactatacttatgcaaaattcagctttatgat

SEQ ID NO: 260608 - DNA, 461 bp, Zea mays
ggggtattttctgcatccgcccttcccaaaccctagcatgtcgaatccgccggtcgccatggcaccgttacggcgctgggcagacctgccggcagatctcctctgccgcatcggagaccggctcgacctcaagtggtacgccagcgcgcggggcgtctgcacggcgtggcgctgcgcgctcccgccgccgtcgcccgcgctcctcgtggtcgctgacgacgctcgctgttgcccctacgctgcctccctccccacgcggaggtcattcgagctcaccgccatcgtctcgggaagccgctgcattggctccagcaacggctggatcgcgctctccggcgtcctcttcaacggcaagaccgtcttcgggctcctcaaccccatcggccgttgggagaaccttcttccggcggttgtccaataaaagccgttgggtttccaaggccgctttaacccgaagcccg

SEQ ID NO: 260609 - DNA, 386 bp, Zea mays
cgagcgcaagaatacgacaggctcggccacactctggcgctgtacgaactggagcactgcgagcggtgggcgtcggtgaccgttctgggagtgggagagggcgaacacggacgacgacaaggtccggggaagaagaagatgggtggctgtccggggatggggagcaagagcaagtcgttgttctgcggggccttcaatctcttctccagatagccggcgccgccgcttgtttttgttcctactgccgtgacaaaccttcttgtgatttctttatttgcctttttgctagaagttcttattttcatgtgtaaattttgtaccattgccgtgggttagaaaacacatttttcatactcagcctatggttactgagagttcgtgacttg

SEQ ID NO: 260610 - DNA, 430 bp, Zea mays
agtattgatgcatcaatagccaatgctttccggagaatcctcatttcagaggttccaactatggcaattgagaaagtcttcatggctgacaacaactcagttatagcagacgaggttctttcacatagactaggacttattccacttgatgcagatccaagactctttgaatatatctcagaaaacgatgtcccaaatgaaaggaatactattgtttataaactgcacgtttcttgtccaaagaattctcaacgaattacagtgaaatctagtgaactagagtggttaccagaaggtagccaattaagcatgtcagcccctgcacagtctggagacaaacagaagactttcacttccttcagtcaaagccaaaaggagatcttagaaaagcctcttggtgttggacaagagtttttttaaaaattttttt

SEQ ID NO: 260611 - DNA, 428 bp, Zea mays
gtcgtttgatgcgattccggcggcgatcgtcagcgcctccaacaccacccgctcccccgtcctagcgtgcgttcgggcgatctcccctctcgcggcggtcatggctggcgttggcggcggggcgcgcagctcagacagggcgggggcggcgcgctcgcccaccaccaccaccaccaccaccacggcgatccagtccaccatccagtcgatcaaggaggtcgtcgtcggccactccgacgccgacatcttggacaccctccgcgagtctaacatggaccccaacgagacggcgcagaagctgctgaatcaagatccatttcacgaagtgaaaagaaaaagggacaagaagaaagagagtgctggccagaagagctttgctgatagtactggacaagttgaccagaaccctcaatggatgaggccacata

SEQ ID NO: 260612 - DNA, 562 bp, Zea mays
accacgcgtacggccacgcgtccgaccacgcgtgcgcccacgcgttcggcgagaaatcccccatttcatcagaaagcgcgattactgctaaacaagagcctctatccaggtctataccaatcggatcgatcgcgaggaccttatcatgggacgacgcttcccaagaggctcctccgcagtgttctaccaaaggagacagcaaccacgagcaggagcagcacgagttcgtcgagaagacgctggcatccgctggcttctgcaacgagaagacccaggacatctttgcccggtggcattcgctcgaccggcccttggaccccgccgtggtcgagcagctgctggaacgcaaggtggaggacgccaagtgccgagagaggcggtcgaaccagaggctcctaatcgactctgtcaacgccgccctgctcgacatcggccagagcaaagtctgggggggcgcgtacccttgcaccgcacggcactattccaacccttcgggaagtggcacgtgcgatgatgatgtgctagtgaccgaccaggcgtggaggctggtgaggaagctggc

SEQ ID NO: 260613 - DNA, 863 bp, Zea mays
cccacgcgtccgcccacgcgtccgcccacgcgtccgcaccagttgtgtgagccaacagttggcgtatcatctaactgtgctgttggcgaaggtgagggagaaagctccctcaggaaaatctcgaggtcacgatctgttccggtctcttcaacagcttttgatagcctgcggttagatggtggctctttggtggctcagcataaagaacctacagtgccgaaggaggtcaaacctaagagtgggaaatcatctttgaagggaagaatcacgagtttcttctcagaacgtaagagagcagagaaggagaagcctagcccatctcccttgggaaccctgaacggtcgaggttcgtcagtcagcactgtagcagttgctaaaccagacgttccacagcatgtttgtgctagttcacaggatgatgtttccttcgaaagtttagaagaccagtttaatcacggaccaatcggagctccggttgatgaacccgaagcaccctctgtgtctaagcctccagcttcgcttgagaagacgctatcatttgagattcgagcttcccacttcgaccagcccagccctacatcggtttttgatgtacaatttgaggatatcagcgagaaatcccccatttcatcagaaagtgcaattactgctaaacaagagcctctatccaggtctataccaatcggatcgatcgcgaggaccttgtcgtgggacgacgcttcccaagaggctcctccgcagtgttgtaccaaaggagacaacagccacgagcaggagcagcacgagttcgtcgagaagaccctggcatccgctggcttctgcaacgagaagacccatgacatcttttgcccgtggcattcgct

SEQ ID NO: 260614 - DNA, 750 bp, Zea mays
  unsure (1)..(750): unsure at all n locations
tcgacccactcttctttttcagaagcttgttncnatnagtgggtgagcatatcaagcagggagtggggttatacaaaatgagggttgcgttgaggagtctgttacctggctctgcaactttgatggcaggggggaagctaagcaacaacttgcagctgatcaacagtccggtgttaacttgaagattgatatagctgatgagctttcaaagattgtgagcttggaggtaaaatataagtgtacaaagcaagaagttgaaagagcagttgtttcctgtgaaggtgatctagaaagggctgaggaggccttgaagacacacaagcaagaatcaactgcaatcccaccaaagcctgaggggtctggctattcaagtggcttgcctaataagccgcaagttgtacttgcacagaaccctgcaaggcctcaaacaaatggattatcatcagtaggatctcatcagatgagaagagaggagaaggacataaactataagcttttgatgaatggtagtggtccaaaggaacctgcaattaaaggttttcagtcactggcaacaccgattaagccagatttggtccgtcagcaattagttcaacctgagaagagacgtctcaatcccaactcgaatccatcagttccttctgtggcatcgtcttctttgcctgttgcagtgccacaagtgaagccagacatgcggcatgtggcaaggaccaatgaggtgaaaagtttgatgcccaatggaagcttgcc

SEQ ID NO: 260615 - DNA, 895 bp, Zea mays
taccggtccggaattcccgggagtttatgtacaacagaaatactgtatagaagtcaccatttaggtagtgtttggatggagggactaggaaggatgaaaaggaatgagataggatcattctaacttgacccgcgtttggtttggaggctttcaaggtagaaaagaagtcttttgttccatcatggccttaccaactccagcgcctattttggttgacgagaaccaacagataaatagaggtaagagggccaatggaccaagggccaaagggctgaagccatccgagaatcctggcaatcaagggaggagagctcttaaggatttgtccaacttctctaaaggcactggtttgaaggacactttcaccctgaaagagaagtcccagcagaagcctcgtagtaatgtggccaacactattaaaggcaatgctttgaaggacaagcccatcctgaaagagaagtccacccaggaacagaggtcaaaagctcttaagaacccaatgaaaattttagttgatgaagagatcaaaatgtgccatgagtgggctaaggatggggtggagggatttcactcaacacaaaataattctcacaagttggataaggatctgctagacaaacgtgtcaagaagaaagtggcggcagtaaactcagccttgtgtggttggccagatacagtatttgattctctaatgtatccatctatggaggttgctgagctcttttatgaacaaaacgtgctggaggtggaacctgagattctcccggacatcagttggcgtctctctagttcagtagatggtaaagcaaagattgatgaagaccgtcttaccgatgctgagcttgaccagtaccattctttggagaacaatccaattatttttgagctgagagac

SEQ ID NO: 260616 - DNA, 2039 bp, Zea mays
gcccagcaaaccactcccacccggtggctcgtcctcggacgccaagccactccgcgccccaatccggaagcgccgccgccgccgatcgaccggccgtcgacccatgctccgctcggcgctcttccgctcagcccccgggctccgccggtctccggcgacggcccacttatccaccgccgccgccgccgccgcagcgtggctctccaacggccctgcctccgccccgtctagggtgcgcctcctcatcggcggggagttcgtcgagtcgcgcgccgacgagcacgtcgacgtcaccaaccccgcgacgcaggaggtggtgtcccggatcccgctcaccacggccgatgagttcaaagctgccgtcgatgccgccaggacggccttccccggctggcggaacacgcccgtcacgacgcggcagcgcgtcatgttcaagttccaggagctcatccgggctaacatggacaagcttgcagagaacatcactacggagcaggggaagacgctaaaagatgcttggggcgacgtgttccgcggcctagaggtggtggagcatgcttgtggaatgggaacactgcaaatgggcgaatatgtatcaaatgtttctaatgggattgacaccttcagcattcgggagccacttggtgtttgcgctgggatatgcccatttaattttcctgctatgattcccctatggatgtttcccatagcagttacgtgtggcaatacttttgttcttaagccatcggaaaaggacccaggggctgctatgatgcttgcggagctagcaatggaagctggtttgcctaagggtgttttgaacatcgttcatggcaccaatgatgttgtcaataatatttgtgacgatgaggatattaaggctgtatcttttgttggttccaatacagctggtatgcatatttattctagagcatctgctgcaggcaagcgtgttcagtgcaatatgggagcaaagaatcatgcaattatccttcccgatgctgatagagatgctacattgaatgcccttattgctgctggatttggtgcagcagggcaaaggtgcatggcattgagcactgctgtttttgttggcggttcagaatcatgggaggatgaattagtcaaacgtgcaagtggccttgttgttagttcaggaatggttaatgatgcagaccttggtccagtgatcagccgacaggcaaaggatcgtatctgtaaattagttcaaagtggtgttgacagtggtgctcgtatattgcttgatggaagaaagatagtggttcctcgctatgaagatggaaattttgttggcccaaccattctggctgatgttaaaagtgacatggagtgttacaaggaggaaatatttggtccagtgcttctcttaatgaaggcggagagcctagaagatgccatccaaattataaacagaaacaagtatggcaatggtgcttccatatttacaacatctggcgtctctgccaggaaatttcaaacagacattgaagctggccaggtgggcatcaacgtgccgattccagtccccctgccgttcttctccttcacgggcagcaaagcttcattcgcaggagatttgaatttctacggcaaggctggcgtgcagttcttcacccagatcaagacgatcacgcagcagtggaaggagtcgccggtgcagcgggtctcgctctccatgcccacctcgcagaagtgagacgtcaaggacgctcacgccactctccaaagctccactcctctggacatagacccacgcatggccacaagagaaggataattggtaggcatggcgacactccatgcatggccatgatactagtgtgtgctcgctttgctcttttgtctggacatcttgcacgcgcattcagaacatccaatgacgaaggtttagatatatgtgagcgctgcccattatgctgttaggattactgtaaaagccccaggtcctttgatcgagtgtcatgtgtaaacccccaataagaggagaaataaaaatgtcgccgtgctggtttgtggcc

SEQ ID NO: 260617 - DNA, 765 bp, Zea mays
cccacgcgtccgcccacgcgtccgcccacgcgtccgcccacgcgtccgcccacgcgggcgcgatcctttagttgccaatttaaaggaacagtagaaggaataccgatttgatggcccaaaataagcagatcattgttgtggtggctctcctttttcttgtggtggcaacatcatcatcagtgtgggttgcagaaggagccgatgacttaaaagtttcttgcgttaaagagtgcacccaaaattttaacactcccgagggcaagaagatctgtgaaacgatgtgtgccaaccctaaaggaaggcctatcgacagagttagagctgattgatcaatgctcatctttatttgtagctagctatcatgcatgcgatgatggccttcttgattattattatttcattcctcatgttgtttgttcttgcatgttttttccaccactaatattgtcctaattgatgcatacaagttgtcactcaaagcattttctatgctttacttattggttaaataaatacaaaggcttccttttacctatgagctatgtttagttcatcgtacatgtatttcattggaagaggtgatgtggagtcaacaaaatcctatatggtgggtaacacatgtcagttcaagtgatgagctacccaacaagtttcatgagtactagacgagtgctatccctagtcaaccgtccttgggaagtacagagatccgaaagaaaagatatacaatagtttctgctatactttgtagtatatgtaagtctt

SEQ ID NO: 260618 - DNA, 1022 bp, Zea mays
  unsure (1)..(1022): unsure at all n locations
ccgggcagacccacacgtcaacccacgcgtccgtccacgcgtcctctctcgcgtccccgcctcgggtcaaaccctaagcagggagttgatttatccgctgcagccatgagtaagttgcagtctgagtctgtcaaggatgccatctcccagattgttggggatgccaaggagaagaataggaagttcactgagactgtggaacttcagattggtctgaagaattatgatccacagaaggacaagcgtttcagtggctctgttaagttgccccatatccctcgtcccaagatgaaggtgtgcatgcttggtgatgcccagcatgttgaggaggccgagaagatgggacttgactacatggatgttgaggctctcaagaaaatgaacaagaacaagaagcttgttaagaggcttgccaagaagtaccatgctttcttggcatcagaggccatcatcaagcagattccccgtctccttggtcctggtctcaacaaggcaggcaagttcccgaccctggttactcaccaggaatccctcgagtccaaggtgaacgagactaaggcaaccgtcaagttccagctcaagaaggtcctttgcatgggtgtcgccgtcggcaacttggcgatggaggagaagcagatccagcagaacatccagatgagcgtcaacttccttgtttcccttctgaagaagaactggcagaatgtgagatgcctctacgtcaagagcaccatggggaagccatacagggtgttctaagtatgctcttttgtgaagtctgctaggttctggcaccgaggttttattgaattaaacttttgttaagagtatgtttttggacgatcctatatttcgtcctggcgctactatgtttcagaatggtggtactactataagtatcctggcgctttaagtattgcttgaaaggatcaatataatttgcgtgtcatacccaaaaaaaaaaaagcaaaaaaaaaaaaaaaaaacccaaaaaaaaaaaaaaaaaaaaaaaaaaaaaanaaaaa

SEQ ID NO: 260619 - DNA, 636 bp, Zea mays
accgcctcggaattcccgggtcgacgcacgcgtccgcggacgcgtggggaagcttgttaagaggcttgccaagaagtaccatgctttcttggcatcagaggccatcatcgagcagaggccccgtctccttggtcctggtctcaacaaggcaggcaagttcccgaccctggttactcaccaggaatccctcgagtccaaggtgaacgagactaaggcaacagtcaagttccagctcaagaaggtcctttgcatgggtgtcgccgtcggcaacttggcgatggaggagaagcagatccagcagaacatccagatgagcgtcaacttccttgtttcccttctgaagaagaactggcagaatgtgagatgcctgtacgtcaagagcaccatggggaagccatacagggtgttctaagtctgctcttttgtgaagtctgctaggttctggcaccgaggttttattgaattaaactcttgttaagagtatgtttttggacgatcctatatttcgtcctggcgctactatgtttcagaatggtggtactactataagtattgcttgaaaggatcaatataatttgcgtgtcatacccccaaaataaaaaaaaaaaaaaaaaaaaaaaaaaaaaaaaaaaagga

SEQ ID NO: 260620 - DNA, 445 bp, Zea mays
ctggtcactcaccaggaatccctggaatccaaggtgaatgagacgaaggctacagtcaagtttcaactgaagaaagtcctttgcatgggtgtcgcggtcggtaacctgtctatggaggagaagcagatccaacagaacatccagatgagcatcaacttcctcgtgtctcttctgaagaagaactggcagaatgtaagatgtctctacatcaagagcaccatggggaaaccattcaggattttctaagtctgtttttttgtgaagtctgctctttatgatatttggtttttgaaccgaggttgtcttgaactaaaactcttgttagatcatgtttggttggtaggatatttgagtctgggcaggtgtcttactcttgcgccatgtctttgtaatctctctatataagttttttgagaggctcagtataatatgcgtattatacgtt

SEQ ID NO: 260621 - DNA, 411 bp, Zea mays
  unsure (1)..(411): unsure at all n locations
aggtacgcttccgccgccgtgtcctcctcttttgctgacggctcgatttgcgaaatcacatgttttggtgccctatctggtctccatttcaccgtgtcatatttctgttccttccgcagggagttgattgatcgattgcagccatgagtaagttgcattccgagcttctcaaggattgcatctcccagatagttcaggatgccaagaagaataggaagttcactgagactgttgagcttcagattagtctgaagaattatgatccagcaaaggacacagcgttcagtggctctgttaagttagctcacatccctcgtccanagatgaaggtgtgcagcttggtgatgccagcacgtgacgaggcgagagatggactgactcatgatgtgagcctcaganatgacagacaga

SEQ ID NO: 260622 - DNA, 315 bp, Zea mays
cccacgcgtccgcttggttataacatgctgtgctgtgtgctgtgcaggtgagatgcctgtacgtcaagagcaccatggggaagccatacagggtgttctaagtatgctcttttgtgaagtctgctaggttctggcaccgaggttttattgaattaaactcttgttaagggtatgtttttggacgatcctatatttcgtcctggcgctactatgtttcagaatggtggtactactataagtatcctggcgctttaagtaaaaaaaaaaaaaaaaaaaaaaaaaaaaaaaagaaaaaaaaaaaaaaggggggccccc

SEQ ID NO: 260623 - DNA, 655 bp, Zea mays
  unsure (1)..(655): unsure at all n locations
ggtccgaccacgcgtgcgctccgttgctcgcctcgttcataccctattttggagtngatttatccgctgcggccatgggtaagttgcagtctgagtctgtcaaggatgccatctcccagattgttggggatgccaaggagaagaataggaagttcactgagactgtggaacttcagattggtctgaagaattatgatccacagaaggacaagcgtttcagtggctctgttaagttgccccatatccctcgtcccaagatgaaggtgtgcatgcttggtgatgcccagcatgttgaggaagccgagaagatgggacttgactacatggatgttgaagctctcaagaaaatgaacaagaacaagaagctcgttaagaggcttgccaacacataccagtgcttttttggcatcataggccatcgagaaacagggtccccgtctccgtggtcctggtctcaacaaggcaggcaagttacgaacgcatgggtactcaccaggaatcccttgagtgcaaggtgaacgagactaacgcaaccgtcaagttccagctcaagaaggtcctttgcatgggtgtcggcgcctcaacctttttcctgttaggttagcgtttacatcttagctagaggaagagagggggctttcttttttcttttctt

SEQ ID NO: 260624 - DNA, 1351 bp, Zea mays
tgtaatacttaaaggtgcttatcccaggtaagctgcaattcgaagcagcgattctggcaaaaacattgtcacagagggtgtggaggcatctcttatctatgttcgcttcaaggcggctgctagcgagctaaaaccaatattaggtgaaattgaaagtagatcttctaggaaggagtacgcacagattctttctgagtgtcacagtttgttctgtgagcagcggctgtacttggtacgaggcatggtgcagcaacgaatcttggagtttgcaagaaaagaggccttgccttctttgacaaggtctggctgtgcctatctgatggaggcatgccagtttgagcaccagctttttgcccacttcttcccagcatctgctgctgatgtttctagtatggctcctttaatggaccctctgtgcacctacttgtatgatactctgaggcctagactgatatatgaaggaaacattgattctctttgcgaacttgttgatattctgaaagttgaagtgctgggggaacaactaagcagacgcggtgaatcagtagccggtctccgtccaatattgcaaaggatacttgcagatgttcatgagcggctagcattttgtgctcggactcatatccgtgaagagattgcaaatttccgtccttctgtcgaagatctagattatcctgggaaacttgaacgacctgtggatatgtcttcaagtgctactgttggtgacaactcagacatatatataacatggtacagaccattggagaaaacagtttcatgcctttcaaagctatatcgctgcttagagccttctgtcttcactggattagcccaggaagctgtagaagtttgctcaacatctcttcagaatgcaagcagggttatctcaaagaaagcaaccccaatggatggtcagctttttctgattaagcacctcctcattctacgagaacagattgctccatttgatattgagttctctgtcacacataaggagttggatttctcccatttattggatcacctaagaaggattctcaggggtcaggtctcattatttgattggtccaggtcaacatcactagctaggaccttttctcctcgtgttttggagaaccaaattgatgccagaaaagagttggagaaaagccttaaagctacctgtgaagagtttataatgtccataactaaattagtagttgacccaatgctttcttttgtaacaaaggaactgccgtcaaagttgcattgtcctctggtagccagtgtcagaaattaaattcagttctagcaaaaccctttgaaagaaccttctaaaaatggggttcccccccttttttttttatttttt

SEQ ID NO: 260625 - DNA, 1067 bp, Zea mays
aggacgcgtgggcggacgcgtgggtgctttctttgagataaccctgcttgcattctgaagagatgttgagcaaacttctacagcttcctgggctaatccagtgaagacagaaggctctaagcagcgatatagctttgaaagcaaccccaataaatgggagaaatccaactccttatgtgtgacagagaactcaatatcaaatggatcacctaagaaggattctcaggggtcaggtctcattatttgattggtccaggtcaacatcactagctaggaccttttctcctcgtgttttggagaaccaaattgatgccagaaaagagttggagaaaagccttaaagctacctgtgaagagtttataatgtccataactaaattagtagttgacccaatgctttcttttgttactaaggtaactgccgtcaaagttgcattgtcctctggtagccagggtcagaaattagattcagttctagcaaaacctttgaagactcaagcttttgcttctcctgataaagttgctgagctagttcagaaggttgccgctgccattcaacaagatttgcccaaagtaatgaccaagatgaggttgtatttgcaaaatccatctactcggatgatcttattcaaacctatcaagacaaatatagttgaggctcatatacagctgcattcccttctgaagtcggagtactctagtgaagaaatgcaatccatcggtatgttgccgatacctgacctgcagtctcagcttgacagccttttgtagtttgcatacaccatacagcggcgctgctgtagtccatgttgacgttgcagtgcagttctttcaagtaacgcaagtaaagttgttaccacaatttcgaacctctctaccatatcgttgttgtaacttttcattgtttatattgaaaaatggaaatggaacgcctcccatgattcatgtgattgtggacaatctggaagtttgaactcatatcctgtggtgacttatgtatattgtacacgcacgttgtttcctcctctgaaattgactggaatagtttcaacagatcatgggttgatc

SEQ ID NO: 260626 - DNA, 1324 bp, Zea mays
atccgggggtgggtagtttctagggttttcgcggcgaagggaaatggggctgcacgacgagatggggttcagccgcccgagcaagatccaggcgatcaccctgcccatgatcctcacgccgccctacaaggacctcgtcgcgcaggcgcacaacggctctggcaagaccacctgtttcgtcctcggcatgctcagccgcgtcgacccgcaacacaagataccccaggctatctgcatttgccccaccagggagcttgcgcacagaataaggcagttctcatgaggatgggcaagtttactggcattacatgcgcctgtgcaatcccgccagctcaaaaagactacatgccgatctcaaaaatggctccgatcactgaccagatcgttatcggcacatctggtacgctcatcaaatggattacccataagaagctggccacaagggacatcaagatacttgtgtttgatgaggcagatcatatgcttgctgaggatggctttaggagtgactctgaaaggatgatgagggatatacaaagaagcgctggtggttgtcaggtgcttctcttttctgcgaccttcaatgatagggtgaaggattttgttacaaaggtcattatggatggaaatcagatatttgtgaagaaggaagagcttactttggaaaaagttaagcagtacaaagttcaagtacctgatgaatcggcaaaaatagaggttataagggacaagatatttgaatttggacagaaagttggccaggttatcatatttgttagaacaaagcaaagtactaagaatgttcacaatgctttgacgagggaggactatgtgtgctcctcaatccaaggatcccttgaccaatcagagagggaaaagataatacaggaattcaaagatggctacaccaaggttcttatatcaaccgatgttcttgctcgaggttttgaccaagcacaggttaaccttgtcatcaactacgacatgccaatcaaatttggtacaagagatgaacctgattatgaggtgtacttgcacagaattggcagagctgggcgctttggccggaaaggtgctgtgttcaacttgctgtgtggtcaaaccgataatgttgtgatgaagaagatcgaggactatttccagcacagtgtgcctgaggttcggaattggcaacgtgaagaagattttgaggctgctctcaaggatgcacgtttacttttaagttaccacggaaacttgtggtgttttttgctgagcctgctgcacaacgtttattttggggtttttgggggggccccctttttttcccccttttttttttttt

SEQ ID NO: 260627 - DNA, 1020 bp, Zea mays
cccacgcgtccggggaaaggaaacctagacaagcgaggcggcggccccgcgttctccgtctccgtctccgtctccgtccgcccggcgtaaagaaaagcctccctcaccacagccgccacgccatggccgaggagaccgacaccaggcctgcctccgcgggctcccgaggccgccccgcgcccgaggacgacgacagggaggagggcgagatcaccgacctcgcctgcgctccttccccgcccgccacgcacccgctcgagcactcctggaccttctggttcgacaacccgcagagcaagtccaagcaggccgcctgggggagctccatccgccccatacacaccttctccaccgtcgaggaattctgggggctttacaataacattaatcaccctagcaaattgatcgtgggagctgatttccattgcttcaagaacaagatcgagccaaaatgggaagaccctatttgtgcgaatggtggtaaatggaccatcagctgtggaagaggaaaatctgatacgttttggctgcacactctgctggctatgattggtgaacaattcgactatggtgatgaaatttgtggcgcagttgtcagtgtgcgtgggaagcaggaaagaattgctatttggacaaaaaatgctgccaatgaagctgctcaggtaagcatcgggaagcagtggaaggaacttctggactacaaggactccattggattcattgttcatgacgatgcaaagaagatggacaaaggcctgaagaaccgttacacggtttgatcctgatgctggaatcccagagagttgtagcagtagctggcccaaatgcatgctgggtggttttatctattgctgatgagttgtttaagcaagatccattcctgtattgtactccataagccacttgggtgttgctttgtattgttcactgctgtgttttttctgtggcaccgcatctacagtactagttgcttgtcgttgttcagttgcgcttgaatctgaactaacggagtctgagcaa

SEQ ID NO: 260628 - DNA, 1026 bp, Zea mays
cccacgcgtccgcggacgcgtgggcggacgcgtggagcgccggcgcctccacttcgttttcctcactctctcctccagctcagggtccggcggcgaagggaaggcaagatgtacaccgcgaggaagaagatccagaaggagaagggccttgagccctccgagttcgaggactccgttgcccaggctttctttgatctggagaacgggaaccaggagctcaagagcgacctcaaggacctgtacatcaacaatgctatccagatggatgttaccgggagtaggaaggctgttgtcatccacgtcccataccgcctgcgcaaggccttcaggaagatccatgtcagactcgtcagggagctggagaagaaattcagcggcaaggatgtggtaattgttgctacaaggaggattgtgaggccacccaagaagggttcagctgttctgcgccctcgcaccaggactctgactgctgttcacgatggcatcttggaggatgttgtctacccagctgagattgtggggaagcgtgtcagataccgtctggatggttccaagattatcaagatcttcttggacccaaaggagaggaacaacactgaatacaagctggacacctacactacggtctaccgcaggctgtgtgggaaagatgtggtctttgagtaccctatggccgaaaatgcataaatatgacgcccggatatccccattttattttgttgaatctggatgtttctttggggtctcaactagactgctccgtatgtacttcaaaaaccatagttttgatgccaaagttgttgcctaggaatttggtactcgggaattggtagcggacgtgaacaatgttaagttttgagcatttaaatttacctttgtcatgataacatgttgcgagtttttatttaattgctggacgtgtttgatgtcaaaaaaaaaaaaaaaaaaaaaggaaaaatgatgctgttggtagcatcaaaagggcggagaaggcaaagattgtcgtatttgctggtggtgtcgaca

SEQ ID NO: 260629 - DNA, 725 bp, Zea mays
cgcatgagcaaggagatcaccgcgctcgcgcgggttcagcggttctgcgccctctcaccaggactctgactgctgttcacgatggcatcttggaggatgttgtctacccagctgagattgtggggaagcgtgtcagataccgtctggatggttccaagattatcaagattttcttggacccaaaggagaggaacaacactgaatacaagctggagacctgcactgcggtctaccgcaggctgtgtgggaaagatgtggtctttgagtaccctatgaccgaaaatgcataaatatgatgccctctggatatctccactctatttcgttgattctgaatgttatgttgggtctccctatgtacttcaaaaaacatagttttgatgctaaagttgcctaggaatttggtacggggaagtggcagtggacgtgaacaatgttaagttttgagcatttaaattaaacctttgccctgataacgttgcgagttatttaatttcttgctttgttcgcggcttgtcagtctgttaaactgtttattttatttggcatagcctgaaggagtgaaatcaacagttgtcgtagttgtaactggtttttcttcttgccatgtcatataatacagtatgtttcaataaaatctcttaggaaaaaaaaaaaaaaagggcggccgccctttttttttttttttaaacaaagacattattgaattacaggtgtacctccga

SEQ ID NO: 260630 - DNA, 515 bp, Zea mays
  unsure (1)..(515): unsure at all n locations
tggatatcccccctctatttcgttgattttgaatgttatgttgggtctccctatgtacttcaaaaacatagttttgatgctaaagttgcctagcaatttggtacggggaagtggcagtggacgtgaacaatgtcaagttttgagcatttgaattgctccttggacctgatatgctgccaatgaagctgctaggttagcatcgggaacaagtggaaggaacttctggactacaaggactccattggattcattgttcatggcgatgcaaagaagatggacaaaggcctgaagaaaaccgttacacggtttgatcctgatgctggaatcccagagagtagtagcagtagctggcccaaatgcatgctggatggttttatctattgctgatgagttgtttaagcaaggtttatttaagatgaagcaaccattcaagtattgccccccataagccncttgggtgttgaaatatgtaaatccaaaaaaaaaanaaaaaaaaaaaaaaaaaaagggcggcg

SEQ ID NO: 260631 - DNA, 443 bp, Zea mays
gaaccgtcggctcctccacttcgcgttctcgcctcatgttctccctctcaggatccgccggcgaaggtaaggcacgatgtacaccgcgcggaagaagatccatattgataagggccttgagccctctgagttcgaggactctgtcgcccaggctttcttcgacctggagaacgggaaccaggagctcaagagcgacctcaaggacctgtacatcaacggtgctatccagctggatgttgccgggagcaggaaggctgttgtcatccacgtcccataccgcctgcgcaaggccttcaggatgatccatgtcaggctcgtcagggagctggagatcaaattcagcggctagaggtttgacatggtagatctgccattatcagaacaagatgaattaatggacatgctttggaatatctcttgattgaacaacgccagtatgcaga

SEQ ID NO: 260632 - DNA, 603 bp, Zea mays
  unsure (1)..(603): unsure at all n locations
gctagctcctcctgcacgtgccgctcactgaattggctcgatccgcacgcagtccgttttctttctttgatctggagaacgggaaccaggagctcaagatcgacctcaaggacctgttcatgaacaacgctattcagagggatgttaccgggagcaggaaggctgttgtcatccacgtcccatacagactgtgcaaggccttcaggaagatccatgtcatactcgtcagggagctggaaaagaaattcagcggcaaggatgtggtaattgttgctacacggataatagttagcacacccatgaagggttcagctgctctgcgccctcgcaccaggactctgactgctgttcacgatggcatcttggaggatgttgtctacccagctgagattgtggggaagcgtgtcagataccgtctggatggttccaagattatcaaggtagatgcttccgtcttcctttcttcagatagtctacatgtcctactgaggaactgaaggatgccactggcatctctactgacaactgtattcacttgtataaaaacatctaaaattttggcttggcattagttacctagaatntctttgtataccattatgg

SEQ ID NO: 260633 - DNA, 775 bp, Zea mays
ggacacaaaggaggcggcggcggctgcggcgggagcgagctagtcgcagcaactagcgggtctggtgattcccctgacgcagtcgccgtggatgaggatggggatctcgttctggaccggaggtgaagaagaaacaaatatgctagaggtgaccgccatctgttcactattcagcatggtgttaccagctcgctcaagagcgttgggcttcagccgtgcaggtttggaaagcggccttactattatctgacttgattctgcacgaaagcttttcatcgccaaactttgatggtgttactgccattgagataggtgctggaacaggtttggtaggtttagcactagctcgagttgctagaaggatttttgttacagatagaggcactgatatccttgataattgcttggctaatctccatatcaactctggtatgctaaggttcgatgaagctaaagtctgtgtacgagaactggactggaaaatggcatggcctccacctgtgggtacatatgacccttctgatccaagtcggtatttatggtctgcaagtgaagttgaggaggctgagaaagcaacagtcctgtttgctgcagatgttatttacagtgatgatctcacaaatttgttcttcaacacggtgaagaaattgatgtcggtcggtgctaagaaggtgctatacttggccctggagaagagatacaacttcagtgtagacgaactagatgtcgtggccaatggttacacgcacttccgaagtttcttcacagcccaaga

SEQ ID NO: 260634 - DNA, 386 bp, Zea mays
gggggaaatgtgttaccatcaaaattagaggacatcacagagagtgactggacaaggttagagaattacgcaagtaccggagaaaaggttgaggtggagctgataaattgcagtgtgaaggggtttgttgtgtcacttgactcactgataggtttcttaccgtaccgtaatcttgctacaaagtggaaattcttagcctttgagacttggttaagaaggaagggtggcgatccttccttgtacaagcagagtttgggattagaggatagttttgaggttaatgacacatacctagaaccagaatctagctcagtttccaaaatagctggtggatgacccataagttaaaaaaaattttttttctctctttttttttcttttttttt

SEQ ID NO: 260635 - DNA, 1883 bp, Zea mays
  unsure (1)..(1883): unsure at all n locations
gttggctgttgcaaaagcaaccgtttcaagtggcctccctagtgcacccaggaggtcgccagcacctcccctgttccctctctgtctctggctctctctcctctccgcccctttttatcgcccgatctcacacattttggaaagaggagagagagagggagagattagagggagcgccctgcccaagcaaagagaaaccgcggcgcgagaagagggaggaagggcagacgggcgagcaggatgagagagatcatcagcatccacatcggccaggccgggatccaggtcggcaacgcctgctgggagctctactgcctcgagcacggcatcgagcccgatggcaccatgcccagtgatacctcggttggcgtcgcacatgatgccttcaacacgttcttcagcgagaccggttctggcaagcatgtgccgagggccatcttcgtcgaccttgagcccactgtcattgatgaggttcgcactggctcgtaccgccaactcttccacccagagcagctcatctcgggcaaggaagacgcagctaacaactttgcccgtggccactacacggttgggaaggagattgtcgatctatgcctggaccgtgtgcgcaagcttgcagacaactgcactgggctgcagggattcttggtgttcaatgctgttggtggtggtactggctctggacttggttcactgctgttggagcgcctttcagttgattatggcaagaagtctaagcttggtttcaccatttatccttccccacaggtgtcaacagctgttgtagagccatacaacagtgtcctctccacccactccttgcttgagcacactgatgttgcagtcctcctggacaacgaggctatctatgacatatgcaggaggtcccttgacatcgaaaggccaacctacaccaacttgaacaggctgatctcacagatcatatcatctctaaccacctccctgaggtttgatggtgctatcaatgtggatgtcaccgagttccagaccaaccttgttccatacccacgtatacatttcatgctttcctcatatgcccctgtaatctctgctgagaaggcttaccatgagcagctctctgttcctgaaatcaccaatgccgtctttgagccctcaagcatgatggccaagtgtgacccaaggcatgggaagtacatggcttgctgcttgatgtaccgcggtgatgttgttcctaaggatgtcaacgctgcagttgcaaccatcaagaccaagagaactgtccagtttgtggactggtgccccactggattcaagtgtggcatcaactatcagccaccctctgttgtccctggaggtgacctggcaaaggtccagcgtgccgtgtgcatgatcagcaacaacaccgccgttgccgaggtgttctcacgcatcgaccacaagtttgaccttatgtacgccaagcgggcattcgttcactggtatgtcggtgagggtatggaagagggtgagttctcagaagcccgtgaggacttggctgctcttgagaaggactatgaggaagtcggtgcagagggtgcagatgacgagggtgacgagggcgatgactattgagtagccggttaataattagttcgctggtgcttaatggttgagttattttgagtatactctgtatgggtccactccattgcgtgctgctgctgtgtgtttccattttgtattttgtgataaattgttcgtagccccctattggccatgattgttgttcatatcatcctgttttgatttgcaatgctattcatcgaatttcggtgtatatgctataatgctattatgttgcaagtgttctgtgcccccaaaaaaaaaaaaaaaaaaaaaaaaaaaaaaaaaaaaaaaannaa

SEQ ID NO: 260636 - DNA, 543 bp, Zea mays
gacggaggggtcggagggaggcccctgcccagggcgggtgataccgcggcgcgcggggtgggaggaagggcagacgcagacgcagacgggcgaacaagatgagggagatcatcagcatccacatcggccaggccgggatccaggtcggcaacgcctgctgggagctctactgcctcgagcacggcatcgagcacgatggcaccatgcccagtgattcctcggttggcgtcgcacatgatgccttcaacacgttcttcagcgagactggttccggcaagcatgtgcccagggccatcttcgtcgaccttgagcccactgtcatcgaccaggttcgcactggctcgtaccgccagctcttccacccagagcagctcatctcgggcaaggaagacgcagctaacaactttgcccgtggccactacactgttgggaaggagattgtcgatctatgcctggaccgtgtgcgcaacttgcagacaactgcactgggctgcagggattcttggtgttcaatgctgttggtggtgggactggctctggact

SEQ ID NO: 260637 - DNA, 354 bp, Zea mays
cccacgcgtgcgcccacgcgtgcgcccacgcgtgcgttctcaagagcagccaagtcctgaccggctcctgagaaggactatgaggaagtcggtgcagagggtgccgatgatgagggtgacgagggagacgactattgagtagctggctaataagtagttctctggtggttaatggttgggttattttgagtatatactctatggttccactccattggatactgctgctgcgtgtgtttccattttgtactatgtagtaaattgttcgtagccccctattggccacgtgtcttcatatcaaaaaaaaaaaaaaaaaaaaaaaaaaagggcggccgatagcgatctagaactagt

SEQ ID NO: 260638 - DNA, 458 bp, Zea mays
attcaacgcatcacctccttcctcgctcctgtggtacccggaggcggaggcgccttgtgccgtcttgtcccggccgagaacgtgggacggttccgcgcgggctcgcgcggctctctggccaccagaccatagaggatctctccaaggtcacttcctcgctcatgtcacctaagggcgaccaagtctaggcggaggaggcagcgggtcgagggtcaccgaagaggtgatgaatggtgtgcgcccccgtctggaacaacttcgtgctccgtacacagaggacaatgtgctgtgggtggtgttgtcggccatgtacaacatgaggtgtgtgggcatagggttgtccgagaacgacctcattgtgggagtcgactgcgtggtgtatgaggcagtggtcctaggagacttcccaagaattcgccacccaccttcacacaagatattccagcttttcacatttg

SEQ ID NO: 260639 - DNA, 518 bp, Zea mays
tggcggcgcggcgggagacgcggcgcgagcgggtgggccggcgggcggaggagcgcggggcgcgagctgaccggctcaggcgcgcggctgagggcgcgggccagaaggtggtgctggacctcgagtttgcggaccttatgaggcccaacgagattcatagcctcacgcagcagattatgtactgctatgcagtgaatgggagatctgcaaacccagctcacctgtggctgacaggttgcagtggtgaaatggcgacccatcttcagagaattcctgggtatgataagtggatcattgaaagggcggccaggccttatattgaagcatttgaagaccgtaaagaaaacctcgtgtatcttacagcagatgctgagacagtgcttgatgatctagacatgtcgaaaatatacatcatcggcggcctggtggatcgaaacagatgggaaggcataacactgaagaagtcagcttgaggccaggggggggggaaaaaaaaaaaatttttttttttccccccc

SEQ ID NO: 260640 - DNA, 539 bp, Zea mays
gctacgcaccaccattatattgatcgatctatgctgctgctggtcgcaaacgcgccgcggcttcacgggcggccctctcccgaaaatcgagcaccagagtgttccaatcccttctccatataattattggtgttagtttcctgctttccctagtccctcgcaatcaacagatacctcatggacgatcaggagaacgagaatgagcacgagaagcatgctgatgctgggactgacgtcgaggaagaagaggaggacgaagatggccacaagcgtgtcgtcgttcttgggccccaagtccccctcaaggaacagctcgagcttgacaaggatgatgagagcctgaggaggtggaaggagcagctcctcgggcaagtcgacaccgagcagctcggagagactgcggagccggaggtgaaggtgctcaacctgaccatcctgtcaccggggcggccagatctagtgccaccgatcccgttcgaggccgacgacaagggctatgcgtttacgctcaatgatggcagcctctatagcttccgttt

SEQ ID NO: 260641 - DNA, 1298 bp, Zea mays
cggacgcgtggcggacgcgtggggaagggagaaaggcgaactcgaattgggggaagagagcgagagacgaatcgcatcgagccggagaggatcgtcagagacagggaggagggcggcggaatcggcgccggcgggaggcaggcatggaggacctgagcgtggaggagctcgcctccaacctctccacctacaaagagcagctacgcgaggtcaagaagcttatcaaggagaagaaggatgatgctggaatttctgaatatattgatatggagaaggagcttcaagaggtcataacgttaaccgaagagattttggcaactgcaaagcaaactgagagtgcccagaatgttgcaggtctatcaccgccaagctattcagctggagtgcagtctgagggactggatgacctttcacattcccataagtttgccgttggtactagagttcaagctgtgtggagtgaagatggagaatggtataatgcaaccgttgaagctttgacaccaaatggatactatgtagcctacgatggctggggaaacagtgaagaggtggacccagataatgtgaggctgcttgaggaagaagcagctgatgccttgggacaagctgaaaaggaagctgaagctacaaaaatggcaataaagaggaaaattgaacaagcagcaacatctgattttcaggcgcgtagcttgccggccaaacttcgtatcgaaccaagtgaccctgaggatgttaaagctgcaaagcgtaagaaaatacatgctttcaaatcaaaatcccgctttgagcagcttgaatttgcccaaaacaaaaggcagaatgcatggcagcagtttcaaaccaaagggaaagccaaaaaggtggggttcttctccggtcgcaagaaggagagcatcttcaagtcaccggacgaccacagaggtaaggtgggtgtcactgggagtggcaagggcctgaccgacttccagaggagggagaagcatctgcaccttaaaggtgggtccggggatgcagcggatgatgacgaggagtaaactgaagaaccgagcctctgtttgtatcccgccgaacagacatttccatacctgttctttagcgccgacatggcctcgaggggactcttgacttaaaccagaaaatttcaatgtttgtcccattctcattgttgaatgtcgctgccgttttggagctgcattctggtggcgaggtcacgctgctagaggagggcgtcctgagcgtacagatcgacttgtcttgctagtctgtagtgaagtatcaatccttaaacgtttact

SEQ ID NO: 260642 - DNA, 856 bp, Zea mays
ggaggacgaatttcggatcccacgaggatgaagataagagttctggtaaccctcagtctgggaaagctttgtatgacttcacagcaggcggtgatgatgagctgagtttaaactctggagaagaagtggagattgaatacgaggtcgatggttggtattatgtgaagaaaaggaggcctggaagggatggaaagatggcaggtctggttcctgttctgtatgtgagttcatgataacagccgtgtgtatcgtttcccacacttgtggaagctgtttggagttcatgggcttaacaaaaaggcacactggaatgctcccgagagatcttcgcataaactcgtgcccgtcgtataggcacgtggccttgtggaagcaggtcatatccagtcatcttggggttcgtatgatgctgcagtgctgttcctgggaaagatttacgtgttgatttgtctggacccacaccactagtcattcaattgattgttttttgttgctaaggtggagactcttcagaggttaaaccgttcatctgtgccattttgctgccgtctgtgttcaagaaggcaatttcgtcgtctccagttcgtgttgtgcgatatatattctagtaaaattgtagaggcatcatttccccggcatatattattttggtcgtgtatggtgtgattctggtggtaaaatagtgtcattaatcttgtgtatatttgtttccgggtggattacggagtatacaactataaaggggtgtttggtttaaggatcatcaggctaaagcttggtaccgaagtccggcacagcaccaaacacaatttaggcaattaaggctgtttgcttcagattaaagttagccactgat

SEQ ID NO: 260643 - DNA, 566 bp, Zea mays
agcgtcaccgtcctggtgatcacgcccagatcaaatcctattcaaatttggagcgcaatatggctgaagagaagagccgtccgcggctgaacgagcggatcatgtcgtccctctcaaagcggtcggtcgctgcgcattcctggcatgaccttgagataggacctggagcccctgctgttttcaattgtgttgttgagatcacaaagggcagtaaagtgaaatatgagctagacaagaagaccggaatgatcaaggttgacagggtgctatactcatcagtggtctacccacacaactacggtttcattccacgaacattgtgtgaagacggagatccaatggatgtgctggtgttgatgcaggaaccggtgatacctggctgttttcttcgggcaagggccatcggccttatgcccatgattgatcagggtgagaaagatgataagataattgcagtttgtattgatgatcctgagtaccgccacttaaccgatctcaaggagctttctccgcaccgccttaatgaaatccgtcgcttctttgaagactacaagaagaaccgaagg

SEQ ID NO: 260644 - DNA, 1531 bp, Zea mays
aggacgcagacgcgcgcgcagcaggccattcttctcgccttactccctcacagaacccagtaaaatattgccagtcccgccgtcgagatggccccacgccgcctgctcgtcctcgccgtcgtcgccctcgcggccaccgccgccgcggccaactccggcttcgcggactccaacccgatccgccccgtcaccgaccgcgcggcctccgcgctcgagtccacggtcttcgccgcgctcggccgcacccgcgacgcgctccgcttcgcacgcttcgccgtcaggtacggcaagagctacgagagcgcggcggaggtccacaagcggttcaggatcttctccgagagtctccagctcgtccgctccaccaatcggaaaggcctctcctaccgcctcggcatcaaccgcttcgcggacatgagctgggaggagttccgtgcgacccggctcggcgcagcccagaactgctccgccacgcttaccggcaaccaccggatgcgcgccgccgccgttgcgctgccggagacgaaagactggagggaggatgggattgtgagcccagtgaaaaaccagggccactgtggatcatgctggaccttcagcactactggtgcacttgaggctgcatatacccaggcaactggcaagcccatctctctctctgagcaacagcttattgactgtggttttgcattcaacaatttcggatgcaacggaggccttccatcccaggcctttgaatacatcaaatacaatggtggccttgacactgaggaatcttacccttaccaaggtgtcaatggaatctgcaagtttaagaatgagaatgttggagtcaaggttttggactcggttaacatcaccctgggtgctgaggatgaactgaaggatgctgttggtctggttcgcccagttagtgttgccttcgaggtgatcactggtttcaggctgtacaagagcggagtttacactagcgaccattgtggaactacaccgatggatgtgaaccacgctgttctggctgttggctacggtgtcgaagatggtgtcccctactggctcatcaagaactcatggggcgctgactggggtgatgagggttacttcaagatggaaatgggcaagaacatgtgcggtgttgctacgtgtgcatcctaccctattgtcgcatgaggcccttacgaagtgttacatggtctgtttggcatcaataatgcatgtttaacctgagcttggcgatgggttatacagaacggaaactctgtttgtgaatagaaaatcatgaagggaaggagttgaccggacccctgcttgtacgtctccccgactgtgtaggtagattgtcagttggggttccgaagtactctactcatacgtgtgtatgacagtttatttatgaaacaaaatacgcattgatcgttatggtgcagcctgggatttcttattataacataatgtatcgtatgtataaacggaccgtcctcagcacggacctaatataagcacgacctgttggcatcacatcagggatggg

SEQ ID NO: 260645 - DNA, 1144 bp, Zea mays
cgacctcacgcctctccacggccacccagctccagcagtacgcggctaggatgtacggcgggcagatgagcttctcgggtggcggagggctcgtgggccagcagcagctggcggggcgcgcccccatgcttgggcagggccagctggggatgctgcaaggccagggtaaccccgcatctggcggcacattttgggcttcagtcgcagatgttggcgcaggctaggcaaaaggtcatggcacaaaacacccaattgaataatgctaatacagctcaagtgctgcaagggatgcaacccatgggtgtcatgggtgctatggggatgaaccagacgagaccgaatgtaactattccctatggtgctcaacaaaggtttgcccaggcacaaatgaggccacaagcatctcaacaacctgcactgtctccacaggtacctggtcaaggtttgtcgaggacagcatcaattaccgcattacattcacaactgtctggatcatcacaaaatggacagatggtggcaatgtctatgcctcagcaacagcaacagcagcagcaatggttgaagcaaatgcaaccatccatgggctcaccactttccccacagcaacaatatcagaaccagcagaggctcctgttgatgcagcatcttcagcagaagacaggattgaaccaacagcaacttctccaaatccaacaacagcatccacatctcaatgtccaacagctgattaagcagcaacaatttctgaagcagtttcagcagcagcaaccgctacaatctcctcgtgttttagcatctggttcacagaaatctgcgaatcttacaggctcgcagccgggtacaccattgtcaggtggaactatgactggtggaagtggaagtcagggagctgaaggaactagccaacttcttgggaaaaggaaaatacaagatctggttgcacaggtagatcccttaggcaaggttgacccagaagtggaggatttacttctagaaatcgctgatgacttcattggctcggtgactgcatttgcgtgtaccttggcaaagcacaggaaatcatcagttgtcgaagccaaggatgtgttgctgcacttagaaaaaaattggaatttatctattcctggtttctcaataggggata

SEQ ID NO: 260646 - DNA, 1177 bp, Zea mays
gcccacgcgtccggacaaggggggcggtcacacacacgcggaccgcgcgagctagcgagcgagcgagatccccctctcgcgctgctggatccgatctgacctgaccttacctcgtcgccgccagccgtgagagagagaagaggaagaggaggaggaggcggagatggcaccggtgtcggcgctcgccaagtacaagctcgtcttcctgggggaccagtccgtcggcaagaccagcatcatcacccgcttcatgtacgataagttcgacaacacttaccaggctacaattggtattgatttcctgtcaaagacaatgtaccttgaagatagaactgtgagactccaactctgggatacagctggtcaggaaaggttcaggagtttaattccaagctatatcagagactcttcagttgctgtcattgtattcgatgttgcaagcaggcagtctttcttaaatacatccaagtggatagatgaagttcgcactgagaggggcagtgatgttatcattgtgcttgttgggaacaaaactgaccttgttgacaagaggcaagtctcgatagaggaaggagaaggcaaggcaaaggaccttggtgtcatgtttattgaaaccagtgctaaagctgggtttaacattaaggcgctgttccgtaaaattgctgctgcccttcctggtatggagacactctcatcagcgaagcaggaagacatggttgatgtgaacttgaggtctggcaatgcaaactcgtcccagtctcaggctcaggctgggggatgcagttgttagttgcagtctctgacacttgctgctcatgatctctgagaccctgagcatcagaacgcgttaccactgatgcttctctcgggaaggagagttgatcggcattgaacacgcacacgctatagtttttacccggtgaatggaccatttgcattggaacgatacgtttgagttctctagtgttatttccagtggcctaagctagcaacagtgtatagttgggttggcactgcaaacttctaccgttcgagttgggtattagagctagttattggttcatgttgaacttatattattttctatcttgctgcagttatgtttgctatgtgtaccaaacatgtattggaatttttgtaagctataatatggccagcacagcagtagcctcacatg

SEQ ID NO: 260647 - DNA, 852 bp, Zea mays
cccacgcgtccggtggatagaggaagttcgcactgagatgtatttaagaaggactgcctgcttgcaacatctaagtggatagaggaagttcgcactgagaggggcagtgatgttatcattgtgcttgttgggaacaaaactgaccttgttgacaagaggcaagtctcaatagacgaaggggagggcaaggcgaaggaccttggagtcatgtttattgaaaccagtgctaaggctgggtttaacattaaggcgctgttccgtaaaattgctgctgcacttcctggaatggagacgctctcatcagcgaagcaggaagacatggttgatgtgaacttgaggtccggcaatgcaaactcgtcccagtctcaggctcaggctgggggatgcagttgttagttgcagtctctgacacttgcttgctcatgatctttgggactctgagcatcagaaggcgttatcactgatgcttctctcgggaagaagagttgattgcctctcgccagtgaacacaccatagtctttacccggtgaatggaccgtttgcattggaacgatacgttttatgagttttctgttatttcctcagtggcctaagctagcaacagtgtatagttgggttgacactcaaacttctaccattcgagttgggtattagaactagttattattggttcatgttgaacttatatatatttccatccttttgcagttagtttgagtcatatttgctgtgtaccaaacatgtattgcaaatttggaatttttgtaagctataataaggccagcacggcaatatccccacatgaaaaaaagaaaaacaaaaaacaatgatactggatgaagagcctctcg

SEQ ID NO: 260648 - DNA, 326 bp, Zea mays
cggctcaactcggcgaatcggctcaggaagggggagcgcaacacgcgcggtcgccgggagagagagagagagaaagggcgagctagcgagcgagatccccctctcccgctgccggatccgatctgacctgacctcgtcgccgcctgccgtgggagggagaagaggaagaggaggcggaggcggcggagatggcaccggtgtcagcgctcgccaagtacaagctcgtcttcctgggggaccagtccgtcggcaagacgagcatcatcacccgcttcatgtacgacaagttcgataacacctaccaggctacgattggtattgatttc

SEQ ID NO: 260649 - DNA, 998 bp, Zea mays
cattcacacgctggatgttacgtgcccccaagagtccctgtaacctcgcgttaccaaagagtcgtacagaagtgcctcctccggtgttcataccagatattggatgaatcaacaacagtgaggattctgatggtcccgcctcaaaagaaaattcccacgttgctcacgtggactcttggagggaggaatatctacgttgaaggatcatgggacaactggacatcaaagaaactcgttgagaaatcgcggaaaagatcacaccattcttttgatgctttcatctggagttcaccgttatagattcattgtagatggagaaagaagatttatacccgaccttccatgcgaaactgacaatatgggtcagattgtgaacctagtagatgtccatgacttcgttcctgacagcgtggaaagtgtatctgagctgatggcccctccctccccggactccagctacggtttccatgttcccggcgagaaggagttctccaaggagcctcctcagctgccggcccagctctatctcggcgtgctgaattcccggagcaccgaagaaggctgcgcgaggccgaggcacgtcgtcctcgaccatctctacatcgagaagggctggggcgcacatccgttggtggccctcagctacacccacaggttccgctccaagtacgtgacctgcgtcctgtacaaggccatcgagcggtagcctgaccattgctgtgttgtgggccggcaactatagctagatgtggtggacttagcatttcattcaggtttagaagtctctcctgcataattcgttcatctgctaaactaaagaggtgggtgcaaatccatgtgaatcttgttttttagctgctagagcttacatattgttattattattcgattgttttcttggcagataattgtaaactagtgactaacgtgcgcctagcgcgcgtagtttgcatgattttgtcaaagttgtgcgtataaaataagagagtattatatat

SEQ ID NO: 260650 - DNA, 473 bp, Zea mays
ccggtccggaatttccgggtcgaaccacgcgttcggtcgccgtcctcgggttcgcgttcgccgtgttcgcgttcgtggtcacccaccggggcgcgggcggcgccgtgtccgggagcgggtacagggagtaccgcctcggggactactccggctggctgcaggcgcggatcgccgagccggagacgtggcggcgcgtcgagagctgcctctctgaggcgcgcgtgtgcggcggccgggaattctacaggcaacacctctcgccaatccagtccggttgctgcaagccgccgacgtggtgcaggttccggtacgtgaacgccacgttctgggaggcaccgagatcggggctgtctgcggcggcggccagcgacggtgactgccgggcatggagcaacgaccagcaggtgctttgcttcgagtgcgacacgtgcataggccgcgtgctggagaccgccaagaagaagtggaagaca

SEQ ID NO: 260651 - DNA, 720 bp, Zea mays
caggacctggactcgcgggatcgacacacgcctccacaatgcgtcgaacgacggggtgttggacgccatggcggtgttgcggatgcaggtggacgcgttcaacaagcgcaccgaggcggcgagggcgcacgtcaaggaggccgccgtgacggcgtcccccaaggcgcggacggtgctggacctgtgcaacaacctgtacctggacgtggaggacaacctgggagcctgccgccgcgccatcggcttcaaggacgccgtcaccatccgcgccaccatgggcatggcggcgcaggacatgcagaactgcgacgagcagttcaggcagatcggcgagaagaaccccatggagcagttcgacgcgtcgctcgtcgagatgtccgagaactgccgctcgctctccaacatgatctgatcgatctccttctccacggacgacaacagagagccgggcgttttgggccctcgcatcgtttgtcgccgctgctaacgttcgcatgcccatgcccgcgagcgcgctctcgcgcgacaataactgatgagttaagtttgttttgctttgaccatctcacatcgttatttcctgtagagatgcgttaatttggtctcggaaacggggaggcgaattgaggtggaatatttataattcaagaaacacagttttggttctaaaaaaaaaaaaaaagggggccgctcgcgatctagaactagcggacgcgtggg

SEQ ID NO: 260652 - DNA, 502 bp, Zea mays
ctcgcgggtcgatacaagcctctacagtgacgtcctactattcatcttctcaccagcctcctccgacacgtaaattgcaccgatcgagacacagggaacaaaggcaacagccatggcgggaacccgtgccctgtacctcctcgtcgcggctgtcgcggcgctcttagccacgcctgcggccgtggacgcggccacgctggcggagatctgcaggggaaccgcgttccccgacatctgcaccagcacggtggggagcgaggcgcagagcgccggggtgttggacgccatggcggtgttgcggatgcaggtggacgcgttcaacaagcgcaccgaggcggcgagggcgcacgtcaaggaggccgccgtgacggcgtcccccaaggcgcggacggtgctggacctgtgcaacaacctgtacctggacgtggaggacaacctgggagcctgccgtcgggccatcggcttcaaggacgccgtcaccatccgcgccaccatgggcatg

SEQ ID NO: 260653 - DNA, 468 bp, Zea mays
  unsure (1)..(468): unsure at all n locations
aaattaaaatccaagtcttacgcgagtgcccttcccgatccgccggcccatccacccaccgccgccatgccggcgttcaaggccccggcgccgggcttcgccgtgcgcttcagccccttccacgagaaccgcctcctcgccgccacgtcccagcacttcggcctcgtgggcaacggtcacctcatcgtgctcgacctcgccggcggcgggcccggggccgccccgacgccggtcttctccttcccgacctccgatgcgctcttcgactgcgcgtggtccgagtcccacgactccctctgcgccgccgtctccggggacggctccgtgcgccttttcgacgccgctcttccgccggcgcagaaccccgtgcggctcctncgggagcacgcacgggaggtgcacggcctcgactggaaccccgtccgcgggacgccttcattttcgccttctgggacgacacgctcaagc

SEQ ID NO: 260654 - DNA, 1366 bp, Zea mays
cccacgcgtccgggagtctgagctcgccgctttagcgagcgcaagcagagcctgccaaaaggctagagaaaaaaaaatccgccttctcctcccagtcgcaggccaggctcagcctcccctctcccctcctcggcatcttcgccgccggcgatctatctctctcacaatggcggcgcccatgtcagccatcgactcagcgtggcagctcctgatcgccaacttcaccgagttccagctcgccaccgtcgtcaccttcctgctccacgagaccgtcttcttcctctccggcctcccctccctcctcttcgagcgcttcggactcttcgccaagtacaagatccagaagaagagcaacacctctgcttaccaaaacagatgtgtcttgcgcctcattctctaccatgtatgtgtgaacctgcctgtcatgattttctcgtatcctgccttcaaattcatgggtctcaggagctctcttcctttgccacattggtcggttgttgtatctcaagttcttttctactttgtccttgaggattttatattctattgggggcacagggcattgcatacgaaatggctatacaaacacgttcacagcgtccaccatgagtacgccacaccctttggtttaacatcggaatatgcccacccagctgaaattttgttcctgggattcgccacagttgttggtcctgctcttactggccctcatctcttcaccctgtggctgtggatggtgttgagggttttggagacagttgaagctcacagcggctatcacttcccatggagcccatcaaatttcctgccgctgtatggcggctcggacttccatgactaccatcaccgtgtgctgtacacaaagtcagggaactatgcctcaacatttgtttacatggactggttgttcggcacggacaaggattatcgcaaggcaaagaccattgaggagaaagaagggaaaaatctgtagattgtggaagctgctcagcaagactggcgatagagtttcactcatggaaggagatatggatgcaccctagaaacagtcagtttatctcctgaccatcgatactataggttgagatattgatttcctgtgtttgctatgatcaagaatgaggccctggtggccctggtctgtcatgaactgaatttgatgatttgtcatctcctcctggtggtttgctttgcgtttctttcgtgactcgacgggatgtatacatatggaatggcctggcagcagtaataaccatctgaattgagtcgtcagcgatggtgggggtagctttgcaccctagaaactttcctctgcacgcttgtgtattttgttggtaatagattccccaattgcattgttcctcgt

SEQ ID NO: 260655 - DNA, 590 bp, Zea mays
gcgatccgcaggcgggctacacacacatacatggcggcggagggcgccggaggccggagacgagccatgcggtacccggctgtgtcggcgctcgtggtctccgccatcgcagccttctccggcgtgatcgtccttgccgtcgtccactcggcgtacgacgacgccatgtcgcggacgcggacgctgctgggccacaacctggagccgacgccgtggcacccgttcccgcacgacaagggccggccgccggcgcgcgcggcgctgcggtgcgcgccctccatcgcctgcctgccgccgctatcaccgtcgtcgtcgtcgtcgccgccgcaaggtaacaagaagaagaagcagaagcagtgccctgcctacttcgctgccatccaccgggacctggctccgtggcgcgggcagggccggggcgtgacgcgcgcgctcctggacgaggcgcggcggcgcgcgtccatgcgcgtcaccatcacgggcggcgggcggcggctgcacgtggacctctactacgcctgcgtgcagagccgcgccctgttcacggtgtggagcctgctgcagctgatgcggctgttccccgggcgcgt

SEQ ID NO: 260656 - DNA, 641 bp, Zea mays
cgggtcgatacacgcgtctacacacacgcctgctaacgcgtccgcccacgcgtccgcccacgcgtccgcccacgcgtccgggatccccccacaccttgagacctgcgttgtcacccacccatcaaggttggggccgccagcaggttcagccgttcctgttcttgataaaacgagagaaggatggcagtgtctcagggagctgtcctattcttgtttctcctcctcgtcgcagcagaggtgggaaccatcgatgccaaaatgggagtagccatgcccatgcatgccttgataatggagaaagcgaaacagcaggagacggagaagaaggaggagaaaagcacggagaaggaagagagtcaatgcttatcgccgagtctccagttcgagggcttctgcttcaacagcgacagatgcgccgaggtgtgcatgaaggagagctttcccggtggcgagtgcaagcgggacgtggccatgcgcaagtgcttctgcaagaagccttgctagttcatcggtcttgctaattgttgatgggtgcttcattaatttgatttgatgggtctcatggctacgagaaacaaaactacttttgataaaatgcagggcatgaaaagcgtttctgcagtccttaaattgctcgtttt

SEQ ID NO: 260657 - DNA, 443 bp, Zea mays
  unsure (1)..(443): unsure at all n locations
cggacgcgtgggtgggatctcaccgtttcttcctcgtctccgtctctacacggcggcgccgccgccgccagctgctgccaggagccaagcccaagcctgagcttaaaccatgccgattggttctcttttcgtgtcgaggctggccaggtctagccatgccctccccgctgccgccgccgcggccatctctcaggcgcccaggccccagcacatcgcatctcctatattctccggccttggagcagcggctcgtgatttcagctcaagggctctatggaagggagcattcgtcgatgccttcctggctagaataaagaagaacagagaaaacatgaatgggaagaagatttggtctcgtatttcttctattttgccgggaatttagtggttccactgtgctcatttacaatgggaaaaagcatgtncggtgcaagatcactgaa

SEQ ID NO: 260658 - DNA, 839 bp, Zea mays
aaccaaaaaggagaggaggggagccccggacggagaagagaacagaagaaaccccgcggccaccccttcctgcctatatttctctctctgtcttgcgcgacagggagagaccagcgccaacacctccggtttcttgattgggtggtgatcggtgaaggaaggagaaattaagatgagcctcttcgggcttgggagcaagaatcagaagacgttcaggcctaagaagaatgcaccgtctggcaacaagggtgtgcagctgaagaaacacatcgatgcaaccttaggaagcggcaaattgagggatgctgtccgattgccaccaggggaggatctcaatgaatggctagctgttaacactgttgatttcttcaaccaggtgaacatcctgtatggtactctaatggagttctgcacaccagctacatgcccaacaatgtcagctggaccaaagtttgagtatagatgggccgatggggtgcagatcaagaaaccaattgaggtttcagcaccaaagtatgttgagtacttgatggattggatcgaagctcagcttgatgacgaatccatcttccctcagaaactcggaaccccttttccacaaaatttcaaggaagttgtgaagacaatctttaagcgacttttccgtgtttatgctcatatttaccactcacattttcaaaagattgtcagccttaaggaggaagcacatcttaacacttgcttcaagcattttacattgttcacttgggaattcacgttgattgacaaggctgagcttgccacccctattcccctttttgttttcattgtgtcagtttgttggcatgacatcaatgatt

SEQ ID NO: 260659 - DNA, 620 bp, Zea mays
  unsure (1)..(620): unsure at all n locations
cttgatgacgagcgccgcggcggaggggacgacggagaccttggcctgccggttctggacggtgagcttgacggtgacgcggaggcccttccagtccttggccgtctccttggcgctcaaggagccagagagggaccgcaagaaggtcaagaacatcaagcacagcggcaacatcagcctcgacgacgtcatcgagatcgccaggaccatgaggcacaggtccatggccaaggaattggccggcaccgtcaaggagatcctcggtacctgcgtcagcgtcgggtgcaccgtcgacggcaaggaccccaaggacctgcagcaggagattgacgacggcgaggtggagatcccgtccgcttaagaaggattggtgtccaggactgtgttatctttgctgctgaagccattctctgcctagattttctcatatttatttgaggtgggggtggacgtggacgtggaactatggaagttatcacagcggagttttgcttagaaactttgtcatgctttaagtctgagacaatttctgtcaaattttatgaacattcctaggtacaatcgaagttaccagtgcctgagtttttggaatttcatgcagttaaatngcttatgatgcc

SEQ ID NO: 260660 - DNA, 850 bp, Zea mays
cccacgcgtccgcggacgctggccgccagtcctcactcctcaccatttcccaaaccctacccatacccccgccgccgccgcagccatgccgcccaagctcgacccgtcgcaggtggtggaggtgttcgtccgtgtgaccggcggcgaggtcggcgcggcgtcttcgctggcccccaagatcggcccgctcggtctttcccccaagaagatcggagaggacatcgccaaggagacggccaaggactggaagggcctccgcgtcaccgtcaagctcaccgtccagaaccggcaggccaaggtctccgtcgtcccctccgccgcggcgctcgtcatcaaggcgctcaaggagcccgagagggaccggaagaaggtcaagaacatcaagcacagcggcaacatcagcctcgacgacgtcatcgagatcgccaggaccatgaggaacaggtccatggccaaggagttggccggcaccgtcaaggagatcctcggcacctgcgtcagcgtcgggtgcaccgtcgacggcaaggaccccaaggacctgcagcaggagattgatgacggcgaggtcgagatcccgtccgcttgaagactagacatccaaggggacttccattggtgctgctgaagtgttgttgttctgcatgctgtcgatgtacctttttcaagcaacgcgagccatctatttcttttgtctagctatgttagtgatatcttgtgagagacctcaatgttaccaccgtatctttgtctttgttggatggagagatttaagcccctcaccacacctttgttctttgaaaaatggagagttttgtaaaaaaaaaaaaaaaaaaaaaaaaagggcggccgc

SEQ ID NO: 260661 - DNA, 639 bp, Zea mays
tcgcgtcagcatcaagctccttgctccccgaccaaaccctacctgtacccgccgccgccgccgcagcagccatgccgcccaaattggacccctctcaggtggtggaggtcttcgtccgcgtgacgggaggcgaggtcggcgcggcgtcgtcgctggcccccaagatcggcccgctcggtctctccccgaagaagatcggtgaggacatcgtcaaggagaccgccaaggactggaagggcctccgcgtcaccgtcaagctcaccgtccagaaccggcaggccaaggtctccgtcgtcccctccgccgcggcgctcgtcatcaaggcgctcaaggagcccgagagggaccgcaagaaggtcaagaacatcaagcacagcggcaacatcagcctcgacgacgtcatcgagatcgccaggaccatgcggcacaggtccatggccaaggagttggccggcaccgtcaaggagatcctcgggaccatgcgtcagcgtcgggtgcaccgtcgacggcaaggaccccaaggacctgcagcaggagattgacgacggcgaggtggagatcccgtccgcttaagaaggattggtgtccaggactgtgttatctttgctgctgaagccattctctgcctagattttctca

SEQ ID NO: 260662 - DNA, 787 bp, Zea mays
ataatacccacaacccactcgatagacgcgtccgcccacgcgtcctagctcccgcaactgccgccgccactcccacgcccgcagccatgccgcccaagctcgacccgtcgcaggtggtggaggtgttcgtccgtgtgaccggcggcgaggtcggcgcacgtcttcgctggcccccaagatcggcccgctcggtctttcccccaagaagatcggagaggacatcgccaaggagacggccaaggactggaagggcctccgcgtcaccgtcaagctcaccgtccagaaccggcaggccaaggtctccgtcgtcccctccgccgcggcgctcgtcatcaaggcgctcaaggagcccgagagggaccgcaagaaggtcaagaacatcaagcacagcggcaacatcagcctcgacgacgtcatcgagatcgccaggaccatgcggcacaggtccatggccaaggagttggccgggaccgtcaaggagatcctggggacctgcgtcagcgtcgggtgcaccgtcgatgggaaggaccccaaggacttgcagcaggagatcgatgatggtgaggtcgagatcccctcagcttaaaggctatacaactagaaatcatcggacactattaaagtggtgttttgctccaaatgcagttcctgcacctcaatcgcctattattgtctgctttagttccttcaagtcttgtgagagacctaatcagtaccttgtgccttataaaattacatcttccgattcaaaaaaaaaaaaaaaaaaaaaaacttgagactagttctc

SEQ ID NO: 260663 - DNA, 641 bp, Zea mays
ggtggccagcgtcggcgttatgcgcgcactccagccgagcagcgccaagtgaccgtgcaagggtgaagtgttgtcgtgtgaccgccgctaggtcgggcaacgtttcgctggccccaagatcggtccgctcggtctttcccccaagaagatcggagaggacatcgtcaaggagactgccaaggactggaagggccttcgcgtcaccgtcaagctcaccgtccagaaccggcaggccaaggtctccgtcgtcccctccgccgcggcgctcgtcatcaaggcgctcaaggaaccagagagggaccgcaagaaggtcaagaacatcaagcacagcggcaacatcagcctcgacgacgtcatcgagatcgccaggaccatgaggcacaggtccatggccatggaattggccggcaccgtcatggagatcctcggtacctgcgtcagcgtcgggtgcacctgtgtcggtatgtaccccatggacctgcatcatgagattgacgacagtttggtggtttttccgttcgttaattaagtgatgttgtttatatactgtgttttctattgtttcagtaaatattttttttatatcttatatttatttctattaatatttctatgttaaactttataattatttattattt

SEQ ID NO: 260664 - DNA, 399 bp, Zea mays
cgtcaaggagattctcggcacctgcgtcagcgtcggctgcaccgtcgacggcaaggaccccaaggacctccagcaggagattgacgccggcgaggtggagatcccgtccgcttaagaagagggtatcatgagcaaatttctgttgttcggttgtaatattgatgaaccctttcgctttgtcgtttggagctgctgtagcccatacagttaatggatgtactttgttcgcgatcacgtttcctccctttaagcgatgccccggtgattctttttttttcatcaattgctagaatgggccccgcatagctaataagtgtgggtccctgtgttaggtgctgttccatcttcaaaatcgaagcacttagtgtttttcagtgtccacactgaattatgcttcaa

SEQ ID NO: 260665 - DNA, 354 bp, Zea mays
gcgaaccgctgccagtccaaaccctacggccgccgccagcatcaagctccccgaccaaaccctactcgtaccccgccgccgccgcagccgcagccgcggccacaccagcaagcagaactagcagccatgccgcccaaattggacccctctcaggtggtggaggtcttcgtccgcgtgacgggaggcgaggtcggcgcggcgtcgtcgctggcccccaagatcggcccgctcggtctctccccgaagaagatcggcgaggacatcgccaaggagaccgccaaggactggaagggcctccgcgtcaccgtcaagctcaccgtgcagaaccggcaggccaaggtctccgtcgtccct

SEQ ID NO: 260666 - DNA, 456 bp, Zea mays
cccacgcgtccgccgaaacctcgccaagcggcaccaaaaaaacgcagccaatcgaaaccctacgtccgccgccagcttcaagctcccagagaccaaaccttccctccctacacactaacccacaccagccgccggccagcagcagccatgccgcccaagttggacccctcgcaggtggtcgaggtattcgtccgcgtgacgggcggctaggtcggcgcggcgtcgtcgctggcgcccaagatcggcccgctcggcctctccccgaagaagatcggcgaggacatcgccaaggagaccgccagggactggaagggcctgcgcgtcaccgtgaagctcacggtgcagaaccggcaggccaaggtctccgtcgtcccctccgccgccgccctcgtcatcaaggcgctcaaggagcccgagcgggaccggaagaaggtcaagaacatccggcacagcggc

SEQ ID NO: 260667 - DNA, 198 bp, Zea mays
  unsure (1)..(198): unsure at all n locations
cctttttcaagcaacgcgagccatctatttcttttgtctagctatgttagtgatggcttgtgagagacctcaatgttaccaccgtatctttgtctttgttggatggagagatttaagcaccttaccacacctttgttctttgttggatggagagttttaagcatcacctgtttgaagttgaaaaccctaactcaaaan

SEQ ID NO: 260668 - DNA, 1885 bp, Zea mays
acagctaccattccactacctcccaaactcgcgagcgagtcgaggctccaaccccggcacatcacaggaggaggaggacgacgcgcccaccatggccatggcgacggccctccgcaagctctccgccaacgctctgcgccgccagccgctctcccgcatcacgccgctctactacatggcgtcccttccggcgacggaggagagatccggaatcacctggactaagcagttgaacgcgccgctggaagaggtcgaccccgagattgctgacatcatcgagcacgagaaggcccgccaatggaagggtctggagctcatcccgtcggagaatttcacgtcggtgtcagtgatgcaggcagtgggttccgtcatgaccaacaagtacagcgaggggtaccctggcgcaagatactacgggggaaatgagtttattgatatggcagagtccttgtgtcagaaacgtgctttggaggctttccgtttggacccggcgaaatggggagtgaatgtgcaacctctatccggttcgcccgccaacttccatgtatacactgcactcttgaagccacatgaaaggatcatggctttggatcttcctcacggtggacatctttctcatggttaccagactgacactaagaagatatctgcaacttcaatattttttgagacaatgccttacagattggatgaaagcactggattgattgattacgatcagttggagaaaagcgctgttctttttaggccaaagttgatcattgctggtgcaagtgcatatgctcggctatatgattatgaccgtatgcggaagatatgcaacaagcagaaggcaatacttctagcagacatggcacatattagtgggcttgttgcagctggtgttgttccatctccttttgattatgcagatgtagtgactaccactactcacaaatcactccgtgggccacgtggagccatgatcttttacaggaagggagtcaaagaaataaataaacaaggaaaagaggttatgtatgattttgaggacaaaatcaatgctgctgtctttcctggtctgcaaggtgggcctcataaccataccattactggcttggctgttgcgctcaaacaggcaactactccagaatacagagcttaccaagagcaagttatcagtaattgtgctaaatttgcgcagagcctgatttcaaaaggatatgaactcgtctctggtgggactgacaaccatttagttctggtgaatctcaagaataaggggatagatggttcaagggtggagaaggttttagaaagtgtgcatattgcagcaaacaagaacacagttcctggtgatgtttcagctatggtgccaggaggcatcaggatgggaaccccagcccttacgtcgagaggatttgttgaagaagatttcgctaaagttgctgacttcttcgatgcagcagtgaatctggccttgaagattaaggctgcaacgacaggtggaacaaagctgaaggactttgttgccacttggcaatctgatagcatccaagttgagattgcaaagcttcgccatgatgtagaggaatttgcaaaacaattcccaacaattggatttgagaaagagaccatgaaatacaagaactaatatctggatgacaagaagagaatgaggtcactcttcttgcagtaagcattcgaagcaagatgccacgatgattattgggagtttaaccatggtgtaatggcatcttatgttaaagagatgttggcaatttacagcatgtggaactttcgtcaatcatattgtagacacataccgcgagatgctatattgaccggacaattgcatttccataaaacaaaagataagaaaaaaaaggggggcccgccgactagg

SEQ ID NO: 260669 - DNA, 318 bp, Zea mays
ctaccctacccacccctcgaaagaaaacaaacaaagaaagcacgactcatgatccgttcttctgatttgatttgatttgtttttttttttgtgtgcgcgcaggcgtcccttccggcgacggaggagagatccggaatcacctggtctaagcagttgaacgcgccgctggaagaggtcgaccccgagattgctgacatcatcgagcacgagaaggcccgccaatggaagggtctggagctcatcccgtcggagaatttcacgtcggtgtcagtgatgcaggcagtgggttccgtcatgaccaacaagtacagcgagggg

SEQ ID NO: 260670 - DNA, 905 bp, Zea mays
tcgtgggtcgttacaagcctctaagaaaaccgctccaatccggaagctgaaaatagcagaagaatccagaggcgactccaggtttgtcggcgatgctgcgagcgggaggcaggcggctcctcgccccggggctccgtcggctcggcctgggcacaggcgcctccggcgaggcgggccctgccgccgcggcggcgggggtgagggcgtaccacgagcgggtggtggaccactacaacaacccgcggaacgtcggttccttcgacaaggaggaccccaacgtcggtactgggctggtcggcgcgccggcctgcggcgacgtcatgaagttgcagatccgcgtcgacgaggactccggtaaaatcgtcgacgcctgcttcaagacctttggctgcggctccgccatagcgtcctcgtccgtcgctactgaatgggtgaagggaaaaccaatggatgaagttttgacaatcaagaacacggagatcgcgaagcacttgtcccttccaccagtaaagctccattgcagcatgcttgccgaggatgcgattaaagctgctgtaaaagactacgaagccaagaagtcgaagatggggcagaagggtgaagacagcccttcacagaaggctgctgaagcatgaaaggttctgccgtgaagtatattgtgctgatacgtttctcagtccatgactccccgccgcatattgccaaagataaatgcttctgtttgtgaggcgagggattgtgtgtaatgttcacgaactgtggtagtgcggcatgtgactcaactgttttaaggatggtgatgaccaatttcaaataaatttgctgccatcgtagaattagaagtactatgtggatttacaggagctgtttctggaatttgtagtatcatgttactttttttttca

SEQ ID NO: 260671 - DNA, 930 bp, Zea mays
gctacccgcacgttgtatcgcgatgctatgcttttaatgttggcaactccttggcccggtgctggggcgggtctgactgggcaccggcgccttcagtgacgtggacccgggcggcggtgctgtcgggatgagggcgtaccacgagcgggtgatggaccactacaacaacccgtggaacgtcagttccttcgacaaggaggaccccaacgtcggtactgggctggtcggcgcgccgttctgtggcgacgtcatgaagttgcacattcgcgtcaactaggactcccgtaaaatcgtcgacgcctgctttaagacctttggctgctgcttcgtcatagcgtcctcgtgcgttgcttctgaatgggtgaagggaaaaccaatggatgaagtcttgacaatcaagaatactgagattgcaaagcacttgtcccttccaccagtaaagctccattgcagcatgcttgcggaggatgccattaaagctgctgtgaaagactacgaagccaagaaggcgaagatggggcaaaagagtgaagacagtccatcagagaaagctgctgaagcatgaaagtttctgccttttttaagtgtaattgagctgatatgtttctcagtccatgactccccgctgcttcagataaatgcttctgattgcgaggcgaggcgagggaccgcgtgtaatgttcacaaattctggtagtgcggcatgtgccttaactcttttgaggatggtgacaaccaatttcaaataaatttggtgccatcttagaattagaagtactatgtggatatcacatagtggaagtgttttctgtcaactacataattgaattacggccgtcgttgcccggaggctattttaaaatgttgtattgcacccggtatggtttaacttacccccaaaaaaaaaaaaaaaaaagaaaaatataaaaa

SEQ ID NO: 260672 - DNA, 2166 bp, Zea mays
tcgcccacgcgtccgcggacgcgtgggcctccgtgcatcttgaggccaccacacagttcaggaagctgctttctatagagcgtagtcccccaatcgaagaggtgatcagcacaggagtggtgccgcgattcattgagtttcttacacgtgaggaccatccccaactccagtttgaggctgcatgggcactcaccaacattgcatcaggcacatcagagaacactaaggtggtggttgagagtggtgctgtgcccatctttgtcaagctactcaactccctcagcgaggatgttcgtgaacaggctgtatgggctttaggtaatgttgctggtgactccccaaagtgccgtgatctggtacttggtcatggtgggctataccctttgctgcagcagcttaatgagcatgctaagctttcgatgcttaggaatgccacatggactctctccaacttctgtcgggggaagccacaaccaaactttgatcaggtcaaaccagcattgccagcactacagcaccttattcactctcaggatgaggaggtcctaactgatgcctgttgggcgctctcatacttgtctgatgggactaatgataaaatccaagctgttattgaatctggcgtgttccctcgccttgtggaacttctgatgcatccttcggcctctgtactcattccagctcttcgcacggtgggtaacattgtaactggggacgacatgcagactcagtgtgtcattgacaatcaagcacttccatgccttttgaacctactgaccaccaaccacaagaaaagcatcaagaaagaagcatgctggacaatctcaaacatcacagctggtaacagggaacagattcaggccgtgattaatgcaaacataattgcacctctggtgcaacttctgcaaactgctgaatttgacatcaagaaagaagcagcctgggcaatttcaaatgccacttctggtggcacacatgatcagatcaagtaccttgttgcccagggttgcattaagccactctgtgatctgcttgtttgcccggatcccagaatcgtaacagtttgcttggagggtctcgagaacatcctgaaggttggcgaggcagagaaaaaccttggtgcaggtgatgtcaatgtctatgcacagatgattgatgatgctgagggcctggacaagattgagaacctacagagccatgacaacactgagatatatgagaaggctgtcaagatgctcgaatcttactggctagaggaggaagatgatgccatgccctctggcgacaatccccagaatggcttcaactttgggaaccagccctctgttccatcaggtggattcaacttcggctgaagatgcccatttggaatggcggctgtgccattgtgccttggcctagtggttggggctagtcagagttggggtagtggcgtcgtcctccaaaaccttggttcggtcccattggtctggtctcaggtgtttgtcatgtcagtcccagtcagcagggtcagtccttgtgctgcatcaccagtggtgctgcatggaagtggtcagtcttcaaggtcagccggttggatcatttgggctcttgctcccaccgcctctggtggtaggcatgaagtcgcaggtgttgtcgggagttgggttttgcctccaatatagcatgaatgaattatattgttttacctatttgatgaggtagaagaaaagaaccttggaagatagggaatgtgttggtttttgtcaaagcggttcctgtcctgtatgacatgttgcatgagtattgacacaaattataagacataatggcaaataggtttttgggagtctcttgagtctcgagtcttaactcattggctcattgtaggtttgtggttcgttatgtcatcttctctgttgtagtcacttgtgcttcctcacacgcggttttggcaccattgtctcaaagtcgttccaagcttatctaaaccagtccggcccgtgcgttgtctgcggcatttgaggttatggttcctaggttttttttgtggaacctgatttatcgttgtatgatcatgacaaacaattggtagtaaggaaatcaaaaaggggaaatccgtacatgtttgctctgtttcatctgtatcttgcatgttaaatatttaaatataaaaagcattgagtc

SEQ ID NO: 260673 - DNA, 1033 bp, Zea mays
cggacgcgtgggcggacgcgtgggcggacgcgtgggcggacgcgtgggcgagaacatcccgaaggttggcgaggcagagaaaaaccttggtgcaggtgatgtcaatgtctatgcacagatgattgatgatgctgagggcctggacaagattgagaacctgcagagccatgacaacaccgagatatatgagaaggctgtgaagatgctggaatcctactggctggaggaggaagatgatgccatgccctcaggcgacaatccccagaatggcttcaactttgggaaccagccctctgttccatcaggtggattcaactttggctgaagatgcccatttggaatggccgctgtgccattatgccttggctagtgctctgggctagtcagaggtgtggggtagcggcgtcaaccaagtcatggttgagtcccattggtctggtctcagggagttgtcatgtcagtcccagtcagcagggtcagtccttgggctgcattaccagtggtgcagcttggtcggtggtcagtcttgaaggtcagccggttggatcatttgggctcttgctcccaccagcaccacctctggtgggaggcatcaggcatggagtcgcgggtgttgtcgggagttgggttttgcctcctatacagcataaatgaattatattgttttacctgttggtagaaagaaccttgaaagatagggaacgtgtcgttttttgtcaaagcggttcctgtgctgtataacatgttgcatgagtattggcgcaacttataagacaatgtcaaatgggtttttgggagtcccattctggtttcttgagtcttcttcattggtctattgtgtaacatgtacacaggtttgtggttcgtcttgtcttgtctgttgtatttgccaccgttgtctggaagttgttgcatgcttatctagaacagcagtataccagggttaattctgtgacatttatggttcctaacttggtgggatcagattaaaaagttgtatggccatgacgatatcaaagaaataattccgggc

SEQ ID NO: 260674 - DNA, 1039 bp, Zea mays
cagtacggtcggaatccgggtcgacacgcgtccgcgagctgcggacgctggcggaccgtcggttgcgatctaccatcagcagctgtcctagtggactgttcagttcggtgagaaggactacaaattagcagatactgtgattaggggtctgctcaagtactggccagtcacaaactgccagaaggaggtgttgtttctgggggagcttgaagaagtgctcgaggcaacacagcctgcagagttccagcggtgcatggtgccactgttcaagcagattgcccgatgccttaacagttctcacttccaggttgctgaacgtgctttgttcttgtggaacaatgatcatattgtaagcttgatagcacaaaatcgtgttgttatatttccaattatatttgaagctcttgagaggaatatacagagccactggaatcaagcagttcatggtctcactgcaaatgtgcgcaagatgtttttggacatggacagtgaactatttgaagagtgccagcagcagtacatggagaaacaagcgaaagccaaagagatacaggaacaacgagaatcagcatggagacaattggaagctgttgttgctgccaaggctgctggagatgacatggttttggtcaactagatgatagctgctcacttatttcatgagcgtcatgtgcgcttatcgaggcaacaaggtatcggtgctagttgcggtgctcttatatcaacattgttgacttgggactatcagatccatgttccttgcatcagtgcaaaataatgcgggccgagtttgaacacattggtggcagcgacagccaatccatgcagaatttgtgtgtctagagaggtcctgctatggttctgagccgttcctttattcagcccccccttttctgttgcgcttatttatgaacaattggactcttgtattaatccttcattgtttgccctattttcatacccacaattgggaaaatttaagtagcgaaaatgtctcatctagattgtaaggtttcttttatttggtactacttctttt

SEQ ID NO: 260675 - DNA, 360 bp, Zea mays
accgaccattcattcgcaaggccatcaacaatgtgttctaccggttcatctttgaaacgcagcgccacaatggcataggggagctccttgagatccttggaagcatcattaatggctttgccttgccaatgacggaggagcacaagctattccttgcccgtgctctcatccccctgcataagcccaaatctgttgcgatctaccatcagcagctgtcctattgtattgttcagttcgttgagaaggactacaaattagcagatcctgcgattaggggtctgctcaaatactggccagtcacaaactgccagaaagaggtgttgtttctgggggagcttgaagaagtgctcgaggcaacac

SEQ ID NO: 260676 - DNA, 1990 bp, Zea mays
cccacgcgtccgcccacgcgtccgcggacggtgggcaaaaaagctccttggcatcgacgtgaagacgctcaagaagatcgtgcccctggggctcatgttcttctgcatcctcttcaactacaccatcctgcgggataccaaggacgtgctcgtcgtcaccgccaagggcagcagcgccgagatcatcccgttcctcaagacctgggtcaacctgcccatggcagtcggcttcatgctcctctacaccaagctcgccgatgtcctctccaaggaggcgctcttctacgccgtcatcttcccgttcatcgccttcttcggcgccttcgcctacgtgctctaccccatgcgcgacgccatccaccccactgcgctcgctgatcgcctcctcgcctcgctcgggcccagcttcctcggacccgttgccatcctccgcgtctggagcttctgcctcttctacgtcatggccgagctctggggcagtgtcgtcatatccgtccttttctgggggtttgcaaatcagattactacagttgaagaggccaaagagttctacccgctgtttggccttggtgccaatgtggccctcatcttctctgggcgcacggtgaaatatttctcaaacatgaggaagaatttgggtcctggagtggatggttgggcaatttcgttgaaggccatgatgagcatagtggttgtactgggtcttgtcatcaccggtatctattggggagtgaacaagtttgttattgataactcatctgtgcccgtggttgagcggaaaaagaaggacaagccaaagctcagcatgggtgagagcatgaaggttctgttgtcatctcggtatgtgagggatcttgctacattggttgttgcttatggaataagcattaaccttgtcgaggtgacatggaaatcaaaactgaaagcacagttcccaagcccgaatgaatattcttcattcatgggcgatttctcaactgccaccggcatagctacatttacaatgatgttgttaggaagagtgatcctcagaaagtttgggtggggagttgcagctacgatcacgcctgcagtgttactcctcacaggagttgggttcttctcactgattttgtttggtgagccattgactcctcttatgaccaagtttgggatgacacctttgcttgcggcagtctatgttggagcaatgcagaacattttcagtaagagtgcaaaatacagtctgtttgatccttgcaaagagatggcatacattcctttggatgaggatatgaaggtgaaaggtaaagcggctattgatgttgtgtgcaaccccttggggaaatctggaggtgctctgatccagcagttcatgatcctgtcatttggttctctcgcgaactcgacaccctaccttggcggaatactcctggtgattgtccttgcatggctgggtgctgtaaggtccctcgacctgcagttctcttccctggcgaacaagagctcggcagagagaagctgctgaaaacgcaggccgtcgaaacggtcgccgaagtagtcggcactggaaacggttctctccaagaaactctagctagcgagccgtctgcaaatggcgcggccaccaaacagtcgcaagaacctgagagcacagcctcagagaaatcaggccagcagtctcaataagttctcccccccaagaaatttagctagcacgagcctttggaggaaccggaagtttcttatctggagctactgaagaaggcaggaatcatgccagaaataagaaggcctgttcttcttctgttgttgtagtgtttttgtttttaaacttcgccgtatctgtagctgtttgtttcattccataggtatgaactgtttatgttcgttattaaaattttgggaggtctgcttcatcgtaatcttcattagcagctggtccttgttgtgaaaaaaaaatattttgcatggttttgatagtcatgggtaccatatatccaatttattc

SEQ ID NO: 260677 - DNA, 726 bp, Zea mays
gatctatgaaagaatgcatgtaacaagatctccagtctggtactgatgaagagacaggaagagaacacatagccaccatcaatcaagacaaagggaaaactaccattacctcaattggatttctggtttttgggctatcattggatttttggttaactgaaatgtgtaccttgcagtagctctatgtctctatatggcattatggtgtctgaaactggatcattatattttcatttgagtgaaattcttatcaaatgttgaaccttcaggctccagcttgatctgattcatgtttttttctagattaccatagttgatgaagcaaagaaattatacatgttatttgtccttggggctaatgtttccattatcttttctgggctacaatgaagtatttctcaaatttgcgcaagacattgggtcctggaattgatggctgggaaatatctttggaaggaatgatgagcatagtggtacttcttggacttgcatctattggggagtgagcaagtttgttttgaatgatccttcattgtcaaagtcttatcgtaagaagaaaaagtcacgccatgcagatgtcgatccacccgtcaagaacaaggtgcagcggagatctttctcctcgtcgctgcttccttgccatccggagatggttgccgccgcctaatatcacagcggcgggaagccatctcctctagttctgcctgctcgccagcacgacgcgac

SEQ ID NO: 260678 - DNA, 449 bp, Zea mays
cctcctcaccccgagatattacggggggtttactcaccatggcgttcggtcccgccgcaagccaccgtcttctcgttccgcccccctccgcctccgccgggcaccaccacctcatccgccaccgccacgcccacgccccggtggccgctgcgcccctccgcctcagtctcccgcgccacctcccccggtccaccccgctccgcctgcccgccgcgctcccgctccgccactgcctcccgcccctccgcgccgcctccgccgccgccgccgcagtcccagcgcccggggacgacgccgtcgcccaagttcctgggcgtggagacgaagacaatcaagaagatcgtgcccctggggctcatgttcctctgcatcctcttcaactacaccatcctgcgggataccaaggacgtgctcgtcgtcaccgccaagggcagcagcgccgagatcat

SEQ ID NO: 260679 - DNA, 1283 bp, Zea mays
ctcgttggggcccctgccttcaacggcgcgatgcgggtctgggcaccgggttcgcgaaacggagagcggccagcgcgggcggggatgtgccctttcgggcccaggcggcggcctcggcggcggtgccggcgccgcagccggaggagcccacacagaagctgcttgggatcaacttgaagacgctcacgaggatcgcgccgtaggggctcatgtcattctgcatgctgttcaactgcaccatcctgccggacaccaaggacgtgctggtggacactgacaaggggagcagacccgagatcatccctttcctcatgacctgggttaacctgcccatggccatcggattcatgctcctctacaccaagctttcaaacgttctctcgcgggaggcgctcttctacaccgtcggcttcccgttcatcgccttcttcggcgccttcgcctttgtgctctacccgctcagggacgtacttccatcccaccgcgctcgcggacaagctgctcgccgcgctcggcccgagcttccttggtccggtggcgatactgaggagttggagcttctgcttgttctatgttatggctgagctctggggcagcgtcgtcatctctgtgctcttctgggggttcgctaatcagattaccacagttgatgaagcaaaggaattctacccgttatttggccttggggctaatattgctcttatcttttctgggcgtactgtgaagtatttctcaaatttgcgcaagacattgggtcctggaattgatggctgggaagtatctttgaaaggaatgatgagcatagtggtactccttggacttgtcataacttccatctattggggagtgaacaagtttgttttgaatgatccttcacttccaaaggctgatcgtaagaagaaaaaggaaaagcctaaacttggcatgaaagagagtctgaaggttctgctctcctcgaggtatgtgagggatctagctaccctagtggttgcttatggcattagtatcaatcttgtcgaagtcacatggaaatcaaaactcaaggcacagttccctagtccaaatgaatattcatctttcatgggtgatttctcgactgcaactggaattgcaactttcacaatgatgctgttaggccgtattatactacggaaatttggctggggtgtggctgcaaagatcacccccaccgttctgttgctgactggtgttggattcttctctctgattttgtttggacagccactgactcctatgcttgccactatgggtatgacccccct

SEQ ID NO: 260680 - DNA, 1799 bp, Zea mays
gcgtcgcttcgaggggccactttggccacacctgctccgccgtcgtcaagaagggcgagcacaagggccataccgtcgccgtcaagatcatgctccaaagctaagatgacaacggccatttccattgaagatgttcgtagggaggtcaagattttgaaagccctatcagggcacgatgatctcgtcagattctatgatgcatgtgaggacgccctcaatggccacattggcatgggattatgtgaaggtggaaaattgctagacagaattttagcaagaggtgggagatatacagaagaagatgccaaagcgatcattgtacagattttgagcgtagtggccttctgtcatcttcagggagtagtgcatcgtgatttgaagccagagaattttctcttcacaacaagagatgaaagcgctcctatgaagttgattgactttggtctgtcagattttattagaccagatgaaaggctcaatgatattgttggaagtgcttattatgttgctccagaggttctacacagatcatacagtatggaagcagacatttggagtataggtgttataacatacattctgctctgtggcagtcggccattctgggcaaggacagaatctgggatcttccggtccgtattgagggctgatcccaattttgacgattcaccatggccttcagtatcggctgaggctaaggattttgtgaagagatttctgaacaaagattaccgcaaaagaatgactgctgtccaagcactgactcacccttggttacgagatgaacaaaggcaaattccattggacatactcattttcagattagttaagcagtatctccgtgctactcctcttaaacgtttggcattaaaggcactatctaaggctttaagcgaggatgaacttttgtatcttaggttgcagtttaagctgcttgaacccagagatgggttcgtgtcactcgacaactttcggacggctctgacaagatactcaactgacgccatgagagaatcaagggttcttgagtttcagcatgcgttggaaccacttgcgtacagaaagatggactttgaagaattctgtgctgcagcaatcagcccgtaccagctggaagctttggaaaggtgggaagaaattgctggaacagcttttcagcacttcgaacaagagggcaaccgagttatatcagttgaggagttagcacaggaactaaatctcgcgccgacacattactccattgtgcaagactggatcagaaaatcggacggcaagcttaactttcttgggttcaccaaatttttgcacggtgtcacgatacggggttcaaatacaagacgacactaaacagatgcaaactgtattcgcttctaatttgaagcctctcatcgattatatggccctgattgctgttacctcctgcctgccctgcccgagtctggtcaatgaccatccttgtttgtgatgcccctcccgctgttgccgtcgtagcttttgtagagtacatgtaaagatccttgtaatggcgaaatcatatggtttgctcaagaaatatatagtgtcatttgttcttttttttggctcgctaattttggatctttatccgtgggcagtcttttgttgacgttggcgctgaagttgataccgtcgcaggaacctgtaaggatgtaactttgtatgcacatacttgtatattattggcgtaaatttagttgtacactatcaacttataactgggttacaaagaaatgccagatatgtttgggatggaatgaaaaaacaaaaaaaaaaaaaaagaa

SEQ ID NO: 260681 - DNA, 1695 bp, Zea mays
  unsure (1)..(1695): unsure at all n locations
ccctcgcgtccggtcttctccctccctagtcgctccccaaatcggatctccaggccggcagaagttgagcggactgactggtcactgtagttcgatcgaatccgagtagggctgatacagttcgattcggcgggaggcatggcgtccgaaaagcacttcaagtacgtcatcctcggcggcggcgtcgcggcggggtacgcggcgcgggagttcgccaagcagggagttaagcctggggagcttgcaatcatctccaaggaggctgtggctccttacgagcgtcctgccctaagcaaaggttacctctttcctacgaatgctgcaagactcccaggattttatgtatgtgtgggaagtggtggagagaagctattgcctgagtggtactcagagaaaggcattgagctgatccttagtacagaaattgtcaaagctgatctttccaccaagactctgactagtgcagctggagcaaactttacatatgagatcttgctcattgctactggctcctcggtcataaagctcaccgattttggcacacaaggagctgattctaacaacattctatatctaagggaaattgatgatgctgacaagctggttgcagctatccaggcaaagaagggtggcaaggcagtggttgttggaggaggttatatcggcctcgaactgagtgcagccctgaagatcaatgactttgatgtcactatggtgtttcctgaaccttggtgcatgcctcgcctcttcactgccgatattgctgctttctatgaggcttactatactaacaaaggtgtaaagatcttgaagggcacgctagctgttggttttgatgctgatgccaatggtgatgtcactgcagttaagctaaaggatggcacagtacttgaagccgatattgttgttgtcggtgttggaggcagaccattgactactctcttcaagggtcaagttgctgaggagaagggtggaatcaagactgacgcttcctttgaaacaagcgttcctggagtatatgccattggtgatgtggctaccttccctttgaagatgtacaatgagttgaggagagtggaacatgttgaccattctagaaagtctgcagagcaggctgtaaaggcgatcaagggcaaagagtccggtgaaccagttccggagtatgactacctgccatacttctactcccgatcattcgacctggcgtggcaattctacggcgacaacgtgggcgaaaccatcctgtttggcgacagtgaccccacctccagcaagcccaagttcggctcgtactggatcaaggacggcaaggtcttgggcgccttcctggagggcgggtcaccggacgagaacaaggccattgccaaggtggcgaaaacccagccgccggtcgctaacctcgaggagctcaagaaggatggcctccagttcgccagcaagatctgagacgctcccgttccatgtaaaattccgtgtcatcgtgaaggttcttctggagctctggtcatgattgagaaatgttctgctacagatgttatactacatacgtgactacactacatgatatattcggttttctgattgtgatatctgtacgtggctacactcacatgtgagatttgaataagtcctgcagcctcagggctcagctagcacagcacagaccccaaaaaaaaaaataaaaaaaaaanaaaa

SEQ ID NO: 260682 - DNA, 1282 bp, Zea mays
agtcaacattgacagtgggggatcataaactggggtcctcctcattttacccgacaaagctttgatggaaccaactttctgtgaaatgtatgctaatttttgcttccatctggctggtgccttgcctgacttcagtgaagacaatgaaaagatcacattcaaaagattgcttttgaataaatgccaagaggagtttgagagaggtgaaagggaagaagctgaagctgataaaacagaagaggaaggtgagatcaaacagaccaaagaagaaagagaggaaaagagaatccgtgctcgaaggcgcatgctgggaaacattaggttaatcggagagttgttcaaaaagaagatgttgacagaaaggattatgcatgaatgcattaaaaaattgtttggaaatcatgatgatcctgatgaggagaacattgaagcattatgcaaattgatgagtacaattggtgatatgattgatcatgtaaaggcaaaggagcacatggatgcctattttagtatgatgcagataatgtcaacaaatcagaagttgtcttctcgtgtaaggtttatgttgagagattcaatcgacctgaggagaaataaatggcagcaaaggcgtaaagtcgaaggtcccaagaagattgaggaggttcacagagatgcagcacaagaaagacatgcccagtcgagtaggttgggacgtggtccagctgttagttctgttccaagaagagcacatcctatggattatggccctcgtggaccatctgcatcagcatcctcaagttcccaacaagggagcattcgaggaatgcctccacattcgcgtggttcacaagacatccgacatgacgaaaggcaccagtttgacaatagaactgttcttccccagcgggtagtcaaagatgaagccatcactcttgggccacaaggtggccttgctaggggtatgtctataagagggcagtcaccagtatcaaatactgaaattccttctgttattgaccaccggaggatagtatctagttctaatggctataactctgcggctgattggacatcatcatctggaagagaagattctaattcaagacttccagatcgaacctctggccgaattcctgcttctagtcaatctgctgtaacttcgcagaggcctgccagccaggaaggccgttcaagaagtaaatcatattctgaggatgagttgagagaaaaatctgttttccccattcgagaatattacagtgccaaagatgaaaaggaggttgttttgtgtattgaggag

SEQ ID NO: 260683 - DNA, 1224 bp, Zea mays
  unsure (1)..(1224): unsure at all n locations
gtggagggtgctgataattcttcaacagttgatacaactcatgtactgtctgacgaattagaaaaggatcccagtgcatctgccgatgactgtcagaacaaagctgagcttgatgattgggaagatgctgcagacatgtctaccccaaagcagccatcagattctgggaatcaggctagcatcacccacgtgttggattcacacgtaactgaagcaaatagcaggaagaaatactcacgggattttctgttaactttgcaacatcactataccggtcttccttttggatttcagatgaatgaagctcgtcaatgctataatgaataacttggcaggaaagtcttatgttgctgaccgggaaccttaccctagtcctggaaggggtttggaccgcccaacttctcgtggtgaccgccgtggggctgccatggctgacgacaggtggactaagacgggtgttcctctcagtcctggtcgtgatgttcacatggacctgccaaatggaacatcagttgtcaactaccgtagctcaggaggtaatcatggtgttttaaggaatccacgtggccaaccatcaaatcaatatggtggtggtcttcttgcaggacctgtgcattctgttgggcctcaagtacctcgcagcggctctgattctgatagatggcagcaaaagggtctcatgccttcccctgtcacacccatgcaaacaatgcacaaagcagagaggaagtatgttattgggaaagtttctgatgaggaagaggcgaaacagaggcagttgaaagccattcttaacaagctgactccacagaacttcgaaaaactgtttgaacaagttaaggaagtcaacattgacagtgtagcaactcttactggggtcatttcacagatatttgacaaagctttgatggaaccaactttctgtgaaatgtatgctaatttttgcttccatctggctggtgccttgcctgacttcagtgaagacaatgaaaagatcacattcaaaagattgcttttgaataaatgccaagaggagtttgagagaggtgaaagggaagaagctgaagctgataaaacagaagaggaaggtgagatcaaacagaccaaagaagaaagagaggaaaagaggatccgtgctcgaggcgcatgctggaaacattggttaattgggaagtgacaaaagagatgtgacngaaagatatcatgatgcataaaaatgttgga

SEQ ID NO: 260684 - DNA, 646 bp, Zea mays
  unsure (1)..(646): unsure at all n locations
ttctttaactgctgctggtggattgaggaaaattggacttggtgatacctatgaaagtccttcactgattggaatacattatgagggacagttttttgaatttgtaccttggactggaacagtaagctgggacattggactgtggggtctttggaaaatgtctggcgagaacaaaactcatctggtagaaatagaagcaaccactgcagaatcaggaactgctctgcgcgctcctactatcgaggctggactggtaccagcgtgcaaagacacctgctatggagatctaaggctacagttgtgggaaaagaaatacgatggtagcaagggagagatgatactcgacgccacaagcaacatggcagcactagaagttggcggaggcccctggttcaatgggtggaaagggacaactgttgtgaacgaggttgtaaataacattgtgggcacgccagtcgatgtagagagcctcctcccaatcccatttcttaagcccccaggcctataggatcaccaacgaatgtcacaatgaagaagtatcacggatatcaatgttgatcatacagtaaaactgtgcccaggtcaataataattcatgatttttacttggtttttacctangngaaaacaacatgggcttttttct

SEQ ID NO: 260685 - DNA, 1302 bp, Zea mays
tcggtccccccctgccctcccccgtcccactgacggtggcccccaccgcccggccccgctcgtcggcgagcgccccttccccacgctgcaccgctgtcctgggcttcctgcccaagagatccgcccgactccggtcgctcggaggccggcgagccgcgcgtgctgggcgccgggatgcaggcggccggcgccagccggtggctccggatctcgctggcggcgcgtctcggcgagaggagacctctgaactttctgacctcaagtcctcgattctgtcatagatcagacaaataatggaagagttacaagattgcttctcgagaagcctggttgcccttccagggctctttggttctgcgtctctttaggctgtttggccagcaggatcagagttcatggcagaagtacatactagcttactttctgttggtcaggaagggctgctacttctctggggagtcgaagaaacactcagatgtgttccgtgatatctcagaattagatttctttctatatgctacagatttggatagtgaagaacttgaactgaaggagcagaaacccattacgaaggctcaatcaggaggtgattcaagtggcaacagatcgaatgattgctacttccccggccttcatgatgatctgtctcaagactgccttgcttgggcaagcagatcagactacccttccctttcttgtctgaacaaaagattcaatttgttaattaacagtggatatttgtacagactgcgaaggaaatatgacattgttgagcactgggtctatcttgcttgtagcttgatgccctgggaagcatttgatccttcacgaaagcgctggatgaggctaccgagaatgccatgcgacgagtgcttctcctgtgcagacaaggaatcacttgccgtcggaacacagctgcttgtcttcggccgtgaatatactggccttgctatttggatgtacaacttactgactcgcagttggtccccatgcactccaatgaatctgccccgctgcctttttgcctcgggaagctcaggtgagattgctattgttgctggtggatgtgataagaatggacaggtgctgaggtctgctgaattgtacaattcagagattgggcactgggagactatcccagacatgaacctgcccaggcggctctcttcaggtttcttcatggatggcaagttttatgtcattgggggcgtgtccagtcagagggattcattaacttgtggagaggaatataaccttgaaacaaggacctggagaagaatacttgatatgtaccctggtgga

SEQ ID NO: 260686 - DNA, 869 bp, Zea mays
tgtccgacccggcgttgtgattgggggagtatgaagtgctcacaccatctcctgtccattcacatcagagctccacgcctgcgcccctgaattcccaaatgctgcgcgcctctgccccaaccccgctcgtcgactcctctctgccaaacacgtcggaggaatccttctccggaactcgacttcgtcctgtctgtcgggctggcgcggagtggagatccatcaccacgtggataggtctcttcttctgctggctcaacgctgaatctgtccttcaatgccttcacaggctctacccctgaagaagttgcagagttagaagctattgccgcattgttcgttgatgggaacatttctttgggtcatatccagattgaatacgatacatgctcgtccttttgggactggaagagaataagaggcaaaaggaacataaggatagaggagagaaataaacaatggggaagggagatgtggctaccaggtcaaaatctcaaaaatcaccagcaatacagaatgagcagagtacacctgctaacccgcccacagcatatcctgattggtctcagttccaggcatactataatgctgctgggacagctccagtgaccccaccttttttttcatccatctgtagctccaagccatcaggggcacccatatatgtggggtccacagatgatgtctccttatgggacaccaccaccatatgcagcaatgtatgcacaaggttcaccatattaacaggcaccaatgccaccgggttcacacccatacaggccttaacctatgcagttaccaaacgggacagttcaaacttcaacatttggtgcttgtgggacagcgacagattaattaaattaaaaataagc

SEQ ID NO: 260687 - DNA, 1210 bp, Zea mays
cgaatggtcacgccacccagaccctgcagcagcagttaatcgtcacgcccccatccttccccagcaaacacaacacaagcagacggggagagattcagatccacacacatccgcatccctctctcctcggtttcctctcccaccaccaacccccagatcgcagcgatctccgccgccgccctctctgggattccgcgcgacaaagtcaggcgtagaggctccaggaggaggagggaggcgcagcagggcgggtgggggagatgttcctctgggactggttctacggggtgctggcctccctcggcctgtggcagaaggaggccaagatcctcttccttggcctcgacaacgccggcaagaccacgctgctccacatgctcaaggacgagcggttggtgcagcaccagccgacgcagcacccgacgtcggaggagctcagcatcggcaagatcaagttcaaggccttcgacctcggcggccaccagatcgcgcgccgcgtctggaaggattactacgcaaaggttgatgctgtagtatacctggtagatgcttatgataaggagcgatttgctgaatcaaagaaggagcttgatgcgcttcttgcagatgactcccttgcaaacgttcctttcctcatactgggcaacaagattgacatcccatacgcggcttcagaggaggagctgaggtactacctcggcctgagcaacttcacaaccgggaagggcaacgtgaacttggccgactccaatgtccggcccctggagatcttcatgtgcagtgtggtgcgcaagatgggctatggcgaaggcttcaaatggatgtctcagtacatcaagtgagtcgctgctgtcctcttttgtccatggcgctgctgctttcgcaggagggttgaaatcaagtctggtcgtgacatggcagctgcatggaaaggtttatggtagctagtgataggcaaagcttgtaagtcggtgttaatcctagatatgtgatgtggggtctactttctcttctgattgtttcttggggtggtctaaacggttcaaaaaaaaatgcgacttcttcgggtcagctaaaagttatgtaatcacgttacatgaagcagcccattgttcgccagctgctttggtggtggacttctgtcggtaatggtgagcttgcggtttctaaaaaaaaaaaaaaaaaagggcggccgctcgcgatctagaac

SEQ ID NO: 260688 - DNA, 1048 bp, Zea mays
tttgttatgttgatatagaacaagtagacgccgccgcagggtctataatacagcacgcagggcacaaggagaagaagaggggaagaaatattcttcccgtcgaaagacggagagaggaaaagggacaagggcaaggcaagagagaggcgtcgtcgtttgatctgctgccggagtgcgaagaggaagaggaagaggagcgccggagttgtaaagatgttcctggtggactggttctatggggtgctggcatcgcttgggctgtggcagaaggaggctaagatcctcttccttggcctcgacaacgccggcaagaccaccctcctccacatgctgaaggacgagcggctcgtacagcaccagccgacgcagtaccccacgtcagaagagttgagcatcggcaggatcaagttcaaggcgttcgaccttgggggccaccagatcgcccgccgcgtctggaaggactactacgccaaggttgatgctgttgtgtacttggtggatgctgttgacaaggagcgatttgctgaatcaaagaaggagctcgatgctctcctgtctgatgattctttggccaatgttccatttctcatccttggcaacaagattgatatcccatatgctgcctctgaagaggagctacggtatcacctaggccttagcaacttcacaaccgggaagggcaaggtcaaccttggcgactccaatgtccgtccacttgaggtcttcatgtgcagtgttgttcgcaagatgggctacggtgatggtttcaagtgggtctcccagtacatcaagtagggccctcgccgaggcgcatgctcagcccggcgaatttttttgccttgttcgttccggttggttcgtgacgagaacgaacgatggtcgctaggaaagtatcatggagggtatgaagaggaaaaacagtgcttaacattgttgaacatgttgaatctttagcgtcaaaacaatttatgtcgaactctattctttcgcttttccatacaacgtttactaagtacttgcgatgcattataaaattattgctttcttt

SEQ ID NO: 260689 - DNA, 627 bp, Zea mays
ggacgctctcctgtcagatgattccttggcaaatgttccatttctcatccttggcaacaagattgatatcccgtatgctgcctctgaagaggagctgcggtatcacctaggccttagcaacttcacaaccgggaagggcaaggtcaaccttggcgactccaatgtccggccacttgaggttttcatgtgcagtgttgttcgcaagatgggctacggcgatggtttcaagtgggtctcccaatacatcaagtagggcccttgccggggcgcttgctcagcccagcgatttttttgccttgttatttgttctggttggtatttcgtcacgtgaacgatgatcatcatatcatgacagtatcatggaggggtatgaagaggaaaaaacagtgcttaacattggggaacatgttgaatctttagcgtgaaaacattttgttatgtcagtcaaactcctggaattcttttgcttttccgtaggacctttactaaggacttgcctgcgatgcattataagattattgattgcttaaattatgtgttataatatggtggtggattggtactgagtatcggtggttgcgttatcaatgcatgtattcatttgtttgcttaaaaaaaagagaaaaa

SEQ ID NO: 260690 - DNA, 633 bp, Zea mays
cgactcccacgcgtccgcccacgcgtccggagggttctttttgtctttgacggggtgtgtaaacgggacacgggcacggcaagagagaggcgtcgtcgtttgatctgctgccggagtgcgaagaggaagaggagcgccggagttgtaaagatgttcctggtggactggttctatggggtgctggcatcgcttgggctgtggcagaaggaggctaagatcctcttccttggcctcgacaacgccggcaagaccaccctcctccacatgctcaaggacgagcggctcgtgcagcaccagccgacgcagcaccccacgtcggaggagctcagcatcggcaggatcaagttcaaggccttcgactctcggcggccaccagatcgcccgccgcgtctggaaggactactacgccgaggttgatgctgcagtgtacctggtagatgcgtatgatacggagcgattggctggatgagcactggagctggacgctctcctgtcagatgagtccttggcaagaagctccatctactatgctaggcggcaccgaagcaatcccggatgctggctctgaagaggagctgcggtatcacctaagccttagccactttacatccgggaagggcaaggtcaaccttg

SEQ ID NO: 260691 - DNA, 292 bp, Zea mays
cggacgcgtggttcagatccactcgtcacacatccgcgttaccccctctcccttggtttcctctcccaccaccaacccccagcccggttatctccgccgccgcccgctttgggaaggcgcgacgaaggcaggcgagaggctccagccggaccaggaggaaagaggagcagcagggccggacgagagatgttcctgtgggactggttctacggggtgctggcctccctcggcctgtggcagaaggaggcgaagatcctcttcctcggcctcgacaacgccggcaagaccacgc

SEQ ID NO: 260692 - DNA, 707 bp, Zea mays
cccactcgtccgccgccatccgtatcgtctccctagggtttggcactttggccgccgccatggcgtcggcgtcgcgtgcgctcctcatctctcgtgcgctccaggccggcgccgtgtctcgccgcgtccccgccctcctgcgccctgtcgctgctgccgcgagcctcctcccagcggtggcggggccggcaggggccgccctcggcgctagggtgcggtgcttcgcgacccagccggcgacgtcctcgctgcgggactcgtccccgaactggagcaatcgcccgcccaaggagacgatcctcctcgacggctgcgacttcgagcactggctcgtcatcatggagccgccgcctggtgacgcctccaaccccgacatcacacgcgacgagatcatcgatagctatatcaagactctcgcccaagtcgtcgggagtgaggaagaagctaggcaaaagatatactctgtatcgactcgtcattactttggctttggtgctcttgtatctgaggaactttcttacaaactgaaagaaattcccaaggtccgctgggttcttcctgattcatacttggatgtcaaaaacaaggactatggaggcgaacccttcataaatgggcaagctgttccttatgatcctaaatatcattgaacagtgttttagtaactttgtcctttgcattttccataaggggggggggggttaatt

SEQ ID NO: 260693 - DNA, 1176 bp, Zea mays
tctttcacgcgtccggaagaagctaggcaaaagatatactctgtatcgactcgtcattactttggctttggtgctcttgtatctgaggaactttcttacaaactgaaagaaattcccaaggtccgctgggttcttcctgattcatacttggatgtcaaaaacaaggactatggaggcgaacccttcataaatgggcaagctgttccttatgatcctaaatatcatgaggagtgggtgagaaacaatgcccgtgccaatgacagaaaccggcgcaatgataggccccgcaactttgacaggtcaaggaactttgacaggagaagggagaacatgcaaaactaccagaacagagatgggcctcctgcccaaggtttcaatggccctccacctccacctggccagaaccagatgccatcccaccatggtcagggcaacatgcctccgcaaccaccacatgctggtggcggccaaccaaactatcagccccaaatgcaaaacccacagacgggctacaaccctggcggtgctcctcactaccagcaaggtgctgctcctggctaccaaggtggacctccggggtatcaaggtggtaaccaagggaacccaggccctgcctaccaaggtggtaacactggttatcaaggtggcaacccaccacctccctaccaaggaagcaacccaccacctccctaccagggaagcaacccaccacctccttaccagggaggcagcccaccagggccaccacctccctaccgaggaggcagcccaccagggccaccacctccctaccgaggaggcagccccaacgtaccgccatattcgggtggtggcaatcctggctaccctggtggcagccctggctaccagggtcaaggaggcaactcgaacttccagtgaacatgaccacgtggcacccctgtttcagagtagccttctgcaagagatggtgcgccgtagcctagcataaatcgaacccttgttgctatcggattttcatggattgtcgctgtttgcacttaatgttctatatatagtactcaaaactatgcttggtgtctgagtgatgtacgtggaactatggatcagctcttgtgtgcacttgctgaaccagatacccagcagtaagcttttgtttgttcgttttgagtggttggttaaccacatacttgttac

SEQ ID NO: 260694 - DNA, 785 bp, Zea mays
tctttcagggcaacatgtctccgcaaccacgggaggcttgtggtggccaaccgggctatctgccccaaatgcaaaacccacagacgggctacaaccctggcggtgctcctcactaccagcaaggtgctgctcctggctaccaaggtggacctccggggtatcaaggtggttaccaagggaacccaggccctgcctaccaaggtggtaacactggttatcaaggtggcaacccaccacctccctaccaaggaagcaacccaccacctccttaccagggaggcagcccaccagggccaccacctccctaccgaggaggcagcccaccagggccaccacctccctaccgaggaggcaaccccaacgtaccgccatattcgggtggtggcaatcctggctaccctggtggcagccctggctaccagggtcaaggaggcaactccaacttccagtgaacatgaccacgagtactaagttggcacccctgtttcagagtagccttctgcaagagatggtgcgccgtaccctagcataaatcgaaacccttgttgctatcggattttcatggattgtcgctgtttgcacttaatgttctatatatagtactcaaaactatgcttggtgtctgagtgatgtacgtggaattctgaaactatggatcagctcttgtgtgcacttgctgaaccagatacccagcagtaagcttttgtttgttcgttttgagtggttggttaaccacatacttgttacagtcgattctgataaaaaaaaaaaacggacgcgtagaa

SEQ ID NO: 260695 - DNA, 1248 bp, Zea mays
gggtgcttaaaaaaactatttcatgtctaagcatgaaagagaaaaaaaaacgaatgtgatagttttcgcattagccataagaagacatgtatcaataccagcggatcatgtcttccacgacacagataattaaccaaaaaaagggaattttcttgcaaagggtaaaagaaccctctattcccttcaagcaagggtcgcttctgcactcttcccaccctcaccaccattagcagaagatacattgttggcctctgcctcagcaactgcatccatttcctctgcagtggcgtcaacttctccaagcgggcgaacctgctcctcctctggaagtggctcttcaacataatcattctcaaacgcatcagatggtacctcatagatcctcaactgtggctttgctggatctttgacaaacacatacttgccctcttcaaacttcatgcagatgtccacaattgacttgacgattccccacatgtttgcagtgttgaggttgatctgtgcagcaaaatcccttggcttgtatcccatcacagtgagcacagaatggttgtactgatcacgggggttcacccgtgacacatagcccaacttcatcatgtcagcaccagcaagcaaagcctgggcagtccagcgagcaagtttgttggcattgttcttgagctctgtagcaaggacagctcctccctgggtctcaagcttctgcctccagtcaacaccagtaatctttgaatcaaactcatttagggcattgacggtaataaactggcgagtaccacttggatcaacactgacagcatgcacctcacagcgagcaacaaggctgatctcatcattcaacttccaacggcggtagcggtagccaacagatgcagcctcttcaccctcagaagcaaatgggttgggctcgtcaaagttaaccttctcaccattgcggtgcagcacctgctgagagaagttctggttgatgtaggtggcctcaacagcgagcgagtgtgcggagttgatgtcatccttgttctcaggaagctgctcctgcgcagtctcattgacagtgagcaggtcgagctgggagccatcacgcttgtcaaggaacagcttgttgcccacacgctgcacgacaatgtcccacgacaggatgctgcggggcgtgcacatgagagcggcgaggatggcatcagtcgcgaacaccgtggctttgtcctcctcagcgaggcggcggatgacagggtcgtcggtggtggtgac

SEQ ID NO: 260696 - DNA, 1097 bp, Zea mays
cccacgcgtccgcccacgcgtccgcccacgcgtccgaggggggtcaaggacggcgccatggacctcatcaacaaatggcagcaggtggcgccgtccctccccgatgacctcatgatccggatcatggccatggagcaggatgccatgttcgaggccctgtacctgggcacgtgcaaggacctcctcccgctgatggccagccgactcccggagctgggcgtcaaacaggaggactgcaacgagatgccgtggatccagtccgtggccttcatccccatgggcaagtcggccaccgtgatggacctcctcaaccggacgtccaacatcaaggccttcggcaagtacaagtctgactacgtgaaggaccccatcccgagggacgtgtgggagaagatctacacctggctcgccaagcccggggccggggtcatgatcatggacccctacggcgccaggatcagctccatcccgcaggatgcgacgccgtttccgcaccggcagggcgtgctgttcaacatccagtacgtcagctactggttcggcgagggcgacggggcggcgccgacgcagtggagcagggacatgtacgcgttcatggagccgtacgtcagcaagaaccctaggcaggcgtacgccaactacagggacctcgaccttggcgtcaacgaggtggtcggcgacgtctccacctacgacagcggcagggtctggggcgagaagtactacaatggcaacttcgagaggctcgccaggaccaaggccaaggtggacccctgcgactacttcaggaacgagcagagcatcccgccattgctcaagtgatcgatgatacccggtcccatccagatcctttcgaccgcgccaagcaaaaggacgacgagtcgtacatgattctgctgattatattaattagatggatccttgctttgcatgcgttgaagccaggtgctttgcatggcgagttagctacgtagttggcatcagccacatgcatgacattaaaacacaagctgacagccggctacccaaagtaaataagatacgcgacatacacttgcgtgccaattagtatggctggttcttcttttttaatatta

SEQ ID NO: 260697 - DNA, 305 bp, Zea mays
cgattctgtctccctcaggtcgagattcgagagttcccgtgttcgtccatccgcgctgtgaggttctccgatggccgagaagtcacccagctccgcgccgcagggtggttctggtgggaatgaatcattcgataatcttgtaattcaagctccacagcttatgagggaggattacatacagaatgctgtgaagcttctttcacatccgaaagtgaagggttctccagtttttcacaggcgttccttcctggaaaagaaaggccttacaagggaagaaattgatgaggccttttgttaacatcttg

SEQ ID NO: 260698 - DNA, 512 bp, Zea mays
cccacgcgtccggacccacgcgtccgctcgcaattttcaagatgcgagaagatgatctactgcgcgtccaacatatcggtgatgtgattgatattttgcaaacaaccacacatcatctatatgaccctgatgaactcctgacattcgcgtttgacaagattggttcaatgccaacaaatacaatcacaaaggaaaggaaaaagcaggagactgttgtcctggctgagcttgatcaaagaacaagacggctgagttcactcaagatggatggatagtttgtaaaatacaagttcttgaaagctgtagtcttggcctattcggcacctggtcccacagcgtatgcttcactgagcgaaaaatcatgggtctaccgaatactgggagatggaaagctgcagtatgtgtttgttgaacacgagtttttggacttcatattgtgtgcttttgtgtgttcttcctttgtgtttgcaattcatatttacaaaatacgggccatggtgctgatttctctt

SEQ ID NO: 260699 - DNA, 1274 bp, Zea mays
cccacgcgtccgcccacgcgtccgcggacgcgtgtgctcgaccatccctgcaaattaccgcgatggctcccaagatcctagtcatccttgtgttcctcgccgtggcctcaccggctgctctggccgccttcgatgtgatagagatgctggccgacaagcccacgtactccacgttcctgaagctcctgcaggacaccaaggtcgcgggcgaggcgaatcagctccggtcggcgacgctactggtcgtccccgacaaacttgccaagcctctggcgtcgctgcccgccgataaggtgcggccggcggtggagaaccacgtccttctcagttacttcgaccccatcaagctggacgagatgaagacacgcaccgtcatcctccccacgctgctctccgtcaccgacaagaaactcggcgtcctcaactacaccagggccgacgacgggcagatgtacttcggcgctcccggcgccccctgcgtggccaagctcgtcaaggtcgtcgcagcgcggccgtactctgtgtccatcatggagatcagcgagcccattttgccggccgcgttgccctcccccgtcgcggcgcccggccgccgcggcaagggtggtaagcgcaagatcaagccatcagcggcaacccatgaggattccaacatgatcccgcgcaagcccgtcgaagcagtggtggtgggtaagggtaaggtggccaaggataccgtgtccgagtcacctgctccaagccccgcccccgtctccgccccttagttgcgtgttgggcgccgctgcccgccggcccccggccaccatgcgtcgtgtctgcgcgcgcacgcacgcattgaacgggagatagaatatggtatcgttcaatgcagattgccatgctatagctccagagtttatctacctggtagcaccatgacacgatggcccgttcgtattttctggcttgctcgtacttttcagttccatggttttacaacaccttttactcccagcagaaaatacataatatgcatgtactcctctttttttccgtatagtaatataaacaaattttcacatgtgtttaaaaaaaaaaaaaaaaaaaaaaaaaaaaaaaaaaaaaaaaaaaggaaaaaaaaaaaaaagaaagaaaaaaaaaaaaagaaaaaaaaaggacggcggacccaaaggatcaaggcgtacgaaagcgtggaagcagcatcacatgtactgaaaagtggaacggaaaattaattcacaggccgccggtaaagaacttcgtgcagggaaaag

SEQ ID NO: 260700 - DNA, 498 bp, Zea mays
tctgtgtcactaaggagtaaaaggacttgaggactggtgagcagttggatgatctggttttcagtcttttaggacatgtttggatgcagccctggcctggaccgcctgctggcttaggcagctttcccgtgccgccatccaaacatgcccgcccttattttgtcgtcgtaccaatatttcgatgtgattctgcatccgcatctgccagagtgctgttgcaacgttgcatcctatcctggaaggctggaatgtttatttggtgctcggcatctctctgaactttatgtttccccggcgtaccatgctagtgtttttcaatggagccattattgcacttcgctgtgctaatacgtgccttaattactgttactcgttatttgctattcggatggttcatgtaacaaatgtggattgagcaatctgggggtttcaatcaaaatccaaccgtgaccttcatcctgaaatgaaaatagagatgtttttttttcaacaaaacaa

SEQ ID NO: 260701 - DNA, 608 bp, Zea mays
aaaagactctataacaggtacaagccttttgtttgtcagtattcgatcactgggctatagttcctggtgatcccttagataagagtattgtccttcgccctctggagccagcacctatgcagcaccttgcccgtgagttcatggtatagaccaggcgaaggaagggcatgagtgaagatgtgagcatcaataaattcttcgacgaggccatgatgaatgagctggcccaacaggctgctgatatccacttgcaaatgatgtagtcaaaaagcgagatgaagtgcacacgtggaagatgcaaatgccctcagcttcttcataccatacatgctgcagatgggactgccggagttccagtcgcacctttatgctggcatttgcccctacctgtttcgttttgattaacacattatgattgctgggtatcatgtagcgaatgtttaaagtgggtaccgtatgcaaatcatgtatgtactgtactagtttttacaccatctgaccaatcagcacccttgaggacagagactatttttaaatgtctttattgaactctgagcggcaatggcatcttcgccggtgtagacctgtagtaagattttacttatttg

SEQ ID NO: 260702 - DNA, 653 bp, Zea mays
gttccatggagccgatacagctctgctgctctctggatcaagcatgtgtggcgatgtttccgtgaacggcgcaccggtggaagactacgaactgccaccggaagcgtactcccatgcaggagcaaggtctccgggtccgggaacgccgacgggggaggccgtgaagaaggcggaggaggtggtgagcaccatgctggccaggggcttcgtgctgagcaaggacgcgctgcggcgcgcacagtccttcgacggccggcaccagcagctgctgtccacggccacggcgcgggtggcgtcgctggaccgccgcctgggcctcagcgacaagttcagcctcggcacggccgcggcccgcggcgcggcgcgcggcgtcgacgagcgcttccaggtcacggagcgcgcctggggggccttctcggcggccggggaggtcgtggccggcagcccctacgcgtcccgcggcgccgcctgggtgtcggcggccgtcggcgccgtcgcccgggccgcgtccgacgttcgggccaatgacaaggaaaaagtgggcaaggcccaagcagagggggaggcctcggcggcggagcatggtcactacgcgtcgtcccgtgtcgacgtgcacgacggacagggacgtgcagctcagcacggtgaccata

SEQ ID NO: 260703 - DNA, 460 bp, Zea mays
tggaaacggcgtcttatgctattgtcagaatgaagaatcatatgactttgcaactcttaattgttgagggcatcatcaaattgtatgaggttcacaggagctttcttggtgctgagcatatagtcataatgttggagattctatctgccattgcatcacatgcaagtgaagtgaactctgaatctaacttgcacaggaaactacataaagcatgctctattttggaggtacctgagccagcggttatccatttcgagagcgagtcctaccagagctacctcaaacttctccaagctcttcttcatgataacccatctttgtcagaaactatgaatgtggagtcacaaattatgctcgtctgtgagaaaatactgcgaatgtatctgacctgcgcagagcatgaactgtctaatggtgtttctggtaggggtccaactttacaacggatgcctctgggtac

SEQ ID NO: 260704 - DNA, 578 bp, Zea mays
  unsure (1)..(578): unsure at all n locations
cggaattcccgggtcgaccgacgcgtccgcccacgcgtccggtgcatggaatacccacataatgctgtgctcatcctctgttcatcccgcgataagggctgccgtccttacatgtgtggaactagctaccgccactcgaattgcttggatcagttcaagaaagcatacaccaagggggcattgcttgtggaagttcctgcaaatagcgttggctctgatctggattcagcgccattggatgcagaaaaaatcgagtccattgaccttgcatgtccattgtgtcgtggcaaggtgaaagggtggacagtggtagaaccagctcgaagctacctcaatggaaaaaagagaacatgcatgcaagacggttgctcattcgtggggacctacaaggagctccgcaagcatgtcaagttggaacaccctcttgcaaagccaagggaagttgatcctgtccttgagcaaaaatggagattgctcgagattganagagagctgcaagatgcgctcagcacgatcacggcaacaatgggcagagcccgtgtttttcgtgattatgtgctagacttggacgatggaat

SEQ ID NO: 260705 - DNA, 475 bp, Zea mays
tttacgcgtccggtgttctttcccttcctcccctgcgttgcgtccgtggggtgcgtttgttggcctgcgtccgcccgtctttcggcccgtccgacgcccttcgtcaccagcctcctgcctcgcgcccaccgccgggatccggccctcctcgtctgcgcccgcctcggtctagatctctgagaaaatggcgagaagtgcgggaactaggaggcgtgtggctcgccagctcaagtccacacatcccattccttcataccgatggaagtcaaagcccatgaaaaagccgatgaaaaaatccaaccgaaagcaagtgttgccaaccttgcaaaagatggactgggaagatgccaattgctctgtgtgcatggaatacccacataatgctgtgctcatcctctgctcatcccatgataagggttgtcgtccttatatgtgtggaactagctaccgccactctaattgcttggatcagctc

SEQ ID NO: 260706 - DNA, 555 bp, Zea mays
  unsure (1)..(555): unsure at all n locations
ttcttctcttaactctcgcgtctcggtccttttcccttcctcccctccgttgcgtccctccgtccgtccgtcgtccgacgcccttcgtcaccagcctcctccctcgcgcccaccgccgggatccggccctccccgtctgcgcccgcctcggtctagatctctgagaaaatggcgagaagtgcgggagctaggaggcatgtggctcatcggatcaagtccacccatcccattccttcataccgatggaaggcaaaggcaatgaaaaaatccaaccgaaagcaagtgttgccagccttgcaaaagatggactgggaagatgccaattgctctgtgtgcatggaatacccacataatgctgngctcatcctctgttcatcccacgataagggctgccggtcttacatgtgtggaactagctaccgccactcgaattgcttggatcatgtcaagaaagcatacaccaagggggcattgcttgaggaagttcctgcaaatagcgttggcactgatcttgattcagcgccattgtatgcagaaaaaattgaggccattgac

SEQ ID NO: 260707 - DNA, 405 bp, Zea mays
ctcaactctcgcgtgtcgcgtccttaacccttcctcccctccgttgcgtccctccgtccggccgtccgtcgtcaccagcctcctccctcgcgcccaccgccgggatccgtccctcctcgtctgcgcccgcctcgggctagatttctgagaaaatggcgagaagtgccggaactaggaggcgtgtggctcgccagctcaagtccacacatcccattccttcatacccatggaagtcaaagcccatgataaagccgatgaaaaaatccaaccgaaagcaagtgttgccaaccttgcaaaagatggactgggaagatgccaatcgctctgtgtgcatggaatacccacataatgctgtgctcatcccttggtcataccatgataaggggtgtcgtccatatatgtgtg

SEQ ID NO: 260708 - DNA, 737 bp, Zea mays
cagcgatgagcggcggcggcggcgggagcccaataacacggatggcgcttcaaccagaccctccgcaacgtgcaaggaatgcttaaaggacgcagctttcctgggaaggttttgctaacccggcgatccgagcctctctcccctcgctgattattctccaagctttgagagcgagcacgatgaagatgagcgcaaggagggttctcgtcaggagggagaaggtcaagcatctggaaactcatttgacaatgcaagttcaaagaaatcaaatattctgtcaacaagtagttcaaattcattgccagatgctcaggggctagtttctggggctagagctactgattctgcaagaattgctaaattcacaacggaactatctaggccagctgttatattagacaaattgcgtgaactatcttggagtggtgtgcctccatatatgcgacctaatgtatggcggcttcttttgggatatgcaccgcctaataaagatagacgagaaggtgttctaacaaggaaaaggctggagtacgtggaatgtgtttctcaatactatgatattccagatagtgaacgctcagatgaagaaattaccatgcttcgccagattgcagttgattgcccaagaaccggacctgatgttacatttttttagaatcatcaagattcataaatctctttgaacgcatttttgtatacatggggctatttgtcacccaacaaggtgggttaccttc

SEQ ID NO: 260709 - DNA, 1400 bp, Zea mays
  unsure (1)..(1400): unsure at all n locations
ccaaggcgtccgaaatccctgagctcgctgtcatcaaggacctgcatcttaggacggttgatgagctcggtttagataggtcgattgtttcaggtttattggatgaattggagcaacttcttaaaggagttgctatgatgaaagagctgacccttaggacaagagattaccttgtttcctttggtgaatgtatgtcgacaagaatatttgctgcatatttgaacaaacttgggaaaaaagcacgccagtatgatgcatttgatattggctttataaccaccgatgatttcacaaatgcggatattcttgaagccacttaccctgctgttgcgaagaggctacatgaagactggatggatgaccctgctattcctatagtcactggctttcttgggaagggatgtaaatcatgtgctgtcaccactttaggcaggggtggtagtgacttgacagctacaaccattggcaaagccttgggattaagagaaatccaggtttggaaggatgtagatggtgtgttgacatgtgatcctaatatatatgcaaatgcaaaacctgtgccatacttgacatttgatgaggcagctgaacttgcctattttggagcgcaggttttgcatccacaatcaatgcggccagctagagaaggcgatgtacctgtgagggttaagaattcttataaccgtcgagcccctggtacccttatcactaaagcaagagatatgagtaagactgttttgactagcattgttttgaaatcaaatattacaatgcttgatatagtcagcacacgcatgcttggccagtacgggtttttagcaaaggtattctcaatatttgaagacttgggcatctctgtggactgtgtggctaccagtgaagtcagcatctcgttgactctggatccatcgaaactatggagttgtgaattggttcagcacaaaaatgtttgggcatcaatttattcattgttaatttcttgctcatgactatatttcgccaagatttatttttttttcttaatccgcgttaactagataaagatagcactttgcttcaagttttccttgtcttctttttagaaaaaaaactaactgtattattttctcaactgatgttatgtgagcttgacttgaacctatagtagcaccctaggattcacatcctgcccttggtgccctcgtagggacagtttttttttttcttgagcatagaggagagctgtctatcattatattaaagaacatggttaggaaactttacacacacatttggttacaagatcacccttgaagccaaagataactaaacgaccttgactaacaggactttggttacttgtggtattagactgttatttggctgggtcataatccatattcttgcangatggattcatt

SEQ ID NO: 260710 - DNA, 941 bp, Zea mays
tttgcatcctttgacgcgtgggtgacattcgaggaggcttttgaacttgtctcactaggtttttcaggttttgcatccacaagaaatgcggccagctagagaaggcgatgtacctgtgagggttaagaattcttataaccgtcgagcccctggtaccctgtatcactaaagcaagagatatgagtaagactgtttcgactagcattgtgtcgaaatcaaatattacaatgcttgatatagtcagcacacgcatgcttggtcagtacgggtttgtagctaaggttttttcgatatatgaagacttgggcatctctgttgattgtgtggcttccagtgaagtcagcatatctttgacactggatccatcgaaactatggagttgtgaattggttcagcacaaaaatgaacttgatgatgtcattgaagagcttgagaagatagcagttgttcatctactgcagaacaggtcaataatatctttaattggaaatgtgcagaggtcgtctttgattcttgaaaaggctttcaatgttctacgaagaaacggtgtcaatgtccagatgatatcgcaaggggcgtccaaggtgaacatttccttggtggtccatgacagtgaggcaaaacagtgtgttcaagccctccactccgcgttctttgagaatggtttcttgttggaagctgatgagttggatgttctgcatgatggctttacatcgcattccaatggcacaatccacagccattagccgaggatttgatattcatctgtttggctactgtagtgccacttgtgatcaaatcctgatctttggtcgatatctaatgtttttatgaggctacgaaggattcggctttagagctactacccatcagaagtctaggaatttgttcagagccactacttaggattttgtttagagattaatgatactgtttggttt

SEQ ID NO: 260711 - DNA, 708 bp, Zea mays
acccacgcgtccgcccacgcgtccgagattatgaatgccagccaacccaatgggcttgtcgttcctgatgcaacggtgcatcctgttaattcaacatccgatgttattgagttaatgagaataggacatgcaaacagagcagtgggttcgacaatgttgaatgaaagaagcagcagatctcacagtattgttaccatacacattcgaggtgtagatttgaaaacaggagctactctgtgtggtgcactacatcttgttgatcttgctgggagtgagagagtggaccgatcttctgttacaggcaatagacttaaagaagcacaacacataaacaaatctttgtccgctcttggagacgtcatattttctctaccgcagaagaatgctcatgtaccctaccggaacagcaaacttacacaagtcctacagagttctttgggtgcttactattgctgattgttctatatactatttacatgttatcagttatctaatatttttcatctgcaggcggccatgcaaaaaccttgatgtttgtgcagatcaacccagatgtctcatcttattcggagactttaagtactttgaagtttgctgaaagggtttctggagtggagctaggtgccaaggcgaataaagaaagcaaaaatattagagaatttatggaacaggtgataaattattgttttccttttgcccgacccttat

SEQ ID NO: 260712 - DNA, 604 bp, Zea mays
ctcatcgtctcatcctcttcctcctcccgtccaaacgcagccgaagaggaagagagaggcggcgaggatggggcggaagcggaaggagttgctgtcgtcggctccatggaggacgggggaggcggcggaggacgaggacgcggcaaggatgagccgagaggggaaggtcagcgtcaccagcaaccccggggagacgcccaccatgagcgtgccccggagcaagcgccaggacctcgacctcaccgtcgacgacttcgaggaggacgagatcgaccccgagctgcgctactccttccagcggaacagcaggtttctgaagagagtttttagcgtggacacacttgtcaagcctctccctcctgtaatggcatacagtgtatcccgcaatataaacttcttcttccggatcttcacacagttttgggatgaagaaggaattgccaatgcccagaagtcccttggactggggaacgaggacggctcccgccgaatgcgctgatcgtggtcaaaccaagttttctgtaccgggttcagaacttttgcctagaactgagacgtgtatacgcccgaagaatgcagggacgttcttaggtgctgcattttg

SEQ ID NO: 260713 - DNA, 1119 bp, Zea mays
tctttttttttttttattttacagtaccgaaaagaaaccctacccaagggatcagggttcttccccatttgtacaatagtatatgacgagtcaatgttacatacaataccaagcaaacaaaaaagcaaaccttctttttctgtacagactacagagctacgcctgacatgttgtctgcaaatcaccccattacacaataccgacgaagaagaaaaaataaatatatgaacagctctacttacaaacaagggaaatttggatccataccattaaaagatcaccactttagagccataccattactatctcacttacatgggggtccacatgagtcaatgacatatgaggtccatggtatatatctaaagtttggatcttttaatggtatagatccaattgagatttatattaacgaatggattcacaagctgacagcgtcacagaatgtacaagatgggtcttgcctttgagcttttcagagtttgttcacaaatgcaaaccgatccaaggaacaagcacatatgcacaaatgttcaaccacaaacacgcaattcagccttcttcctgcgccttctggtagggtgcttccttttcccgagacaagtgacaagcttcaagccaaccaataatcagcttgtactgccaaggtcgacgtccattgtataatcgtactcaatagtcggtatgactgtcgctatgaatttcaaaaatatgaaaaggtacttgtcaacttctggttccactccccccgacattggaacgtcgatgatctttttcatcacagctgcatgtttgcatgggtgcactgatgcatgcttcccagccaataagtgaggatggtcctcaatagtcaccgtttttcgtgcgtggtcttggctgatgtcttcaaacacaagttcaggcattaatggcattcttgactcgtcatatccagttagccagacacgtggagtttggtagtacttgtcatacgttatgctaacatcatatgttctggtatcaagaatgttgtcctcttccggttcttctgcgataaagtatgatggctcagcagcagccaaattatcccctgtgtcttcataagtatccatgtcaggtatatcttcccccacgcgtccg

SEQ ID NO: 260714 - DNA, 595 bp, Zea mays
gccagctgcggaggtatcgacatcttcagaaagccattattttcatcgactgttcgggtgccagcaagtgtgaggtgcagaaagtggaagcagcttatagacatgcagccgaggttcatcctaaccatccaagtattgaacttatcagaacaaacaccgacggaatggcctcctcctcatctgaccatcccaacacagagcccaggaattgatggctcggtttgtcagatccttccaacccagcagtaggtaaatgtgagttgcttaagtaccaaagagagaggtcctgttcagcaagatgattagaagcattggcaattggcatggcttgttaattagattcgtggttcttagtctaaaatcacattgaagagggagacggacccaagtgatgcagttcatgtgttatctgtatcagtctctgtttttataagctgtcatatattttctcgaaactatcttgtgttgattttgtgtgaagtgtacttttaatggcacgggccattgtgtatttgcttgaaagataaggatggtattatctttgtatttgaactctaaatgctttaatgaagtgatcattctggatggagatacc

SEQ ID NO: 260715 - DNA, 754 bp, Zea mays
caagaaagagacagatctcgttggcatcgaggagtcaagggacaaagtcattaggatgctgtctatggggaccaaagatgatgatgcacatgagtcccatcaggatctaaagatagtgtctatagtcggggttggaggactaggtaagactactctagccaaaacagtgcatgacatgcttaagaagcaattcgactgttcggcttttatttctattggtagaactcctaatctgaataggacattcgagaagatgctattggaactcgatcgtgagtataaacaagttgacatggccagatgggatctagaacaatttataaatgaactggatgaattcttgcccgacaggaggtaaatgtgagttgcttaagtaccagagagagaggtcctgttcagcaagttgattagaagcattggcatggcttgttaattatattcgcggttcttagtctaaaatcacattgaagagggagacggacccaagtgatgcagttcatgtgttatctgtatcagtctctatttttataagctgtcatatattttctcgaaactatcttgtgttgattttgtgtgaagtgtacttttaatggcacgggccatgtatttccttggaaacgaccatgtggacttattttttcccccattttctttcctgagatgggctgtgtatttgcttgaaagataaggagtggtattatctttggatttgaactctagatgcttaaaaaaaaaaaaaaaaaaaagggcggcc

SEQ ID NO: 260716 - DNA, 452 bp, Zea mays
taccgtccgatgcttgatgagcttctgtggcggtgggtcagttggggtgggatgggcaggacctgatcgcgataatgttcataaaagaataatgggaaatttggatccataccattaaaagatcaccactttggatccataccattactatctcacttacatgtgggtccacatgagtcaatgacatgtggggttcatggtatatatctaaagtttggatcttttaatgatatagatccaattgttccaagaataattttaagaataagatggtaaaatcatgtgcaggattgtgatgtggggcccacttattcagcgtgattattgttcttctattgccacttgtgtgcactctactgtacctatttagattgttatctgattcaatagttgacccaaaaaaaaaaaaaaaaaaaaaacggacgcgtggctcgacccgggaattccggacc

SEQ ID NO: 260717 - DNA, 469 bp, Zea mays
ttggatgaagaaggaattgccaatgcccagaggtcccttgcactggggaacgaggacggctcccgccgaatgcgctgatcgtggtcaaaccaagttttctgtaccgggttcagaactcttttgccctagacactggagacgtgttatacgcctcgaaagacatggcatgggacatttttagggaaatttggatccataccattaaaagatcaccactttggatccataccattactatatcacttacatgtggttccacatgagtcaatgacatgtggggtccatggtatatatctaaagtttggatcttttaatggtatagatccaattgttccacatttttaaggttggcttgcaattttgtttatcctagtgtgtctgtttcatgtatgtttgatgtccagatcttgtgcttgcaaaatagaggagtcgaggtggcacatccaactccaggccaatggaacgaaat

SEQ ID NO: 260718 - DNA, 414 bp, Zea mays
gaattgccaatgcccagaagtcccttggactggggaacgaggacggctcccgccgaatgcgctgatcgtggtcaaaccaagttttctgtaccgggttcagaactcttttgccctagacactggagacgtgttgtacgcctcgaaagacatggcatgggacgtttcttaaggttggcttgcaattttgtttatcctggtgtgtctgtttcatgtatgtttgaagtccagatcttgtgcttgcaaaatacaggagtcgaggtggcacatcaaactccaggccaatggaacgaaatgcctacctgttcatttccactttgtatactagtcaaagacgagcttggacatatcttttgctgcttcattcctccttttcctttatgatcattagtattgttatccttttgtatgtctccc

SEQ ID NO: 260719 - DNA, 1019 bp, Zea mays
atcgggctcccccaccatccgtggcccgaggacgcccccgtgttccaagctcctcctcgcgattccaatccacgcacgccatctccgactccgcgttccgcctcgcgcaggacatatattcagtgatggaacacaaggaggccggctgccagcagccggagggcccaatcctatgcatcaataactgtggtttctttggaagcgctgccaccatgaacatgtgctccaagtgccacaaggagatgataatgaagcaggagcaggcccagttggctgcctcctccatcgatagcattgtcaatggcggtgataatgggaaaggacctgcaattgctgcaactgtaggtgtggcagttcctcaagtcgaggagaagactatcgtcgtgcagcctatgcatgtcgctgaaaccagcgaggctgctgctgttatcgcgaaggccaaggaaggcccagaccggtgcgcaacctgtaggaagcgtgttgggttgacgggttttagctgccgatgcgggaacatgtactgttcggtgcaccgctactccgacaaacatgactgtcagttcgactatcggactgcagcaagggacgcgattgccaaggccaatcctgtggtgagggcggagaagctcgacaagatctgaggcgggcattgggggagcgaaatggttgcaatctgcaagaattcaacatgctgtctttgctgcgttatcattgaaacttgccattcttgtctgctgctgcgtcccgtgaggttcaatactgtgatgcacacagcatccaggcagccgcaagaattccatcaaaatggtttcccgtgttggctatgtcgcgtaagcttaattcagttattcatggtggtttcggtcggtattgtggtattcccatttaggtagctctgtaatgtattgctgtctcaagcgtgttacattccaattagtaatagtaatcagcaattgtctgccccatatattttttaaaaaaaaaaaaaaaggggggctgctcgcgatctagaactagtc

SEQ ID NO: 260720 - DNA, 522 bp, Zea mays
gttcgatgcaccgctactccgacaaacacgactgccagttcgactatcgaactgcggctagggacgctatcgccttcgccgacccgggggtgaaggcggagaagcttgacaagatctgaggcgggggcattgggtaacgaaaaatggttgcgatctgcaagaattcagcatgtctctttgctgctttatcattgaacttcccattcttgtcttgctgtcacgtcccctggggttcaatactatgatgcacacagcatcctggcagctgcaagaattcatccccagtcgagtcacgaaaatggtttgcgtgttggctatgtcgtgtaagcttattcagttattcttggtggtttgggtcggtatcgtgtcattccccgtttaggtagctctgtaatctactattctcatgtgtgttgccttccaatcagtaatagtaatcagcaattgtctgccatatctcctacaaaaaataaaaaaaaaaaaataaaataaaaaaataattaaaaaaaaaaaaggggcggc

SEQ ID NO: 260721 - DNA, 364 bp, Zea mays
caagctcctcctcgcgattccaatccacgcacgcctcctccgcttccgcctcgctcaggagattcggatttgattatattaccctgattcgtttaaaaggatgggttgagctgtatttgcgcaacatattttgcgacagtgacttctcttcctaaaaattagggtcttgttccgtctaccacgatccattcttgctaagacggcattgaatgtttaatgtgcagcttatagtcagtgatggaacacaaggaggcgggctgccagcagccggagggcccaatcctatgcatcaataactgcggcttcttcggcagtgctgcgacgatgaacatgtgctccaagtgccacaaggagatgataacga

SEQ ID NO: 260722 - DNA, 1852 bp, Zea mays
ctcgcgggccgatacccgccgcatgtctaggtttcctctctcaccatagcgcccgctctgtcgcccttcgttcacctctccttcctctcgtccctgcctgccagggagaggggaagtcagaggcacggagtggcgcagagcagacgcccgtgaaccattgtagctgtccctgtcgtcgtcgtcgtcaacgaatccacacaaggaaaggatggagaagaagccgaccatcctcatgaacaggtacgagctcgggcgcacgctcgggcagggcaccttcgccaaggtgtaccacggccggaacctcgcgtccggcgagagcgtggccatcaaggtcatcgacaaggagaaggtgatgcgcgtcggcatgatcgaccagatcaagcgcgagatctccgtcatgcgcctcgtccgccaccccaacgtcgtgcagctgcacgaggtgatggccagcaagagcaagatatacttcgccatggagtacgtccggggcggcgagctcttcgcccgcgtcgcccgcggccggctcaaggaggacgccgcgagaaggtacttccaccagctcgtcggcgccgtcgacttctgccacagccgcggcgtctaccaccgcgacctcaagcccgagaacctcctcgtcgacgagcacggcaacctcaaggtctccgacttcggcctcagcgcgctcagggagtgccagaagcaggacggcctgctgcacaccacctgcggcacccccgcgtacgtcgcgccggagatcatcaacaagaagggctacgacggggccaaggccgacatctggtcctgcggcgtcatcctcttcgtgctcctcgccggctacctcccgttccacgacgccaacctggtggagatgtaccgcaagatcagcagagccgacgtcaagtacccgcagtggttctcccctgagctccggcggttgatgcccaagctcctcgaaccgaacccaaacaacaggatcacgatcgagaagctggtcgagcacccctggttcaagaaggggtacaggccggccgtcatgctggcacagccgcacggctccagcagcctcaaggatgtccaggtcgccttcagcaacgccgaccacaaggacagcagcaccaaggtggaacagccggcggacagctccttgaagccggcgagcctgaacgcgttcgacatcatctcccactccagagggttcgacctgtcaagcctgttcgaggtggaccaagagcagaaggccagcaactcgcggttcatgacccagaaaccggcgtcggcgatagtgtcaaagctggagcagatcgctgagacagagcgcttcatggtgaagaaacaggacgggctggtgaagctgcaggggtccaagcaagggaggaaggggcagctcgcgatcgacgccgagatcttcgaggtgacaccggcctttcacgtcgtcgaggtgaagaagtcggcaggcgacacgctggagtatgagatgttctgcagcaagggcctaagaccttcactcagcgacatctgctggagcagccgatctgaggagaacatggctccttcagtggttcagccatcacaattggagccatcctcttagaccgtctccgacagtttactcacccctcttagtcgattgttatttaagtgcagtctcttcggagatgcaattacagtccatcctctctttcttttcccctttctcaaagagctaggaccttgctcgactgagcatcaggctgtagggctctttgtgatcatcttttgccagttttcttcttgtagcagaagttgttgggcatggaactcctgttcctttcaccaatagaagcataatgatcagcactgtgaaacaatttttcca

SEQ ID NO: 260723 - DNA, 393 bp, Zea mays
gatggctgaaccactgaaggagccatgttctcctcagatcggctgctccagcagatgtcgctgagtgaaggtcttaggcccttgctgcagaacatctcatactccagcgtgtcgcctgccgacttcttcacctcgacgacgtgaaaggccggtgtcacctcgaagatctcggcgtcgatcgcgagctgccccttcctcccttgcttggacccctgcagcttcaccagcccgtcctgttttttcaccatgaagcgctctgtctcagccatctgctccagctttgacatcatctcccactccagagggttcgacctgtcaagcctgttcgagctggaccaagagcagaaggccagcaactcgcggttcatgacccagaagccggcgtcggcgatt

SEQ ID NO: 260724 - DNA, 1221 bp, Zea mays
ctcatcagtcgagcctccgtgcacgacgcattcgccttgatctccgatccctaccttcattaggagagagagaggagaggagaggagaggggcagggagatggagagagcggcccccgtgaggagctcccacacctcgacggctggcctgctcgcgtggcctcaccccgatggcgccgggtcgctgccagcacgccggcctaaccagccgacggaggaattcaggaatgtggtgtttggggggcagctcacggagggggccgacggcctcaacaagacgaagaggaagacgggctcctcgcccaaggggaaggagacaacagggaccgggatatccaaggccgagagcgccgtcgccgccgtcgcaactgcctcccgtgatcgtcaggctagccagatcaccttttcccaggacgggaccgttcctaccaggaaggcaacttcagtggctggggtggcaaggcagcgtgagcttagccataccgtcgagagtgagggggacagtaagatgaagaggcaggtgtccagtacgaaatccaaggagctcagtggtcacgacatctttgccgatcacgaagatcccaagcccaacaggtcaaggagatcagactatggcagctctgctgctcagtcaccagtgaaaaatgcaaatgtgagctccttctcgtttggagaggccgacattgacagcacagtgaaaacagcaaagaagaaagggtccagcaacttgtctactgatctgaacggcaagaccatgcccaagaaggattcagcgtctgcagagaaacagcctccgaaccgtgcgaggccgaaaggaatgagtggcagcagcaattttgcagacgggaaggcctcaacctcaacaaccggagatcatgaaggccgtcgtacccggcagcctcctggcggcgacagcagcattttgctgggctagcgtgcatatgaatcttgccctatgccgccgccgcacgggtggttggtccgtcagtctgtggtcttgttttcgtggtcaggccatgtgtcccatctccggtccttcagatgatctggttcgcatctgtcttgtgtatggttttgatatgtgttggttgtgacatgccccatggaacaaccctatcgctatgctgttttgttgtgtacaatggatgacgtgtgctgccgttttgttgtgtgtacaatggatatgtctggttgttgaataagaagaaacttggtatatggt

SEQ ID NO: 260725 - DNA, 433 bp, Zea mays
gtgagaacaatcatatatatattgttgcttaaagagaagagaagagaagagaagatcgacaagagattggcggtaatggactcctcggagctgcacatactggccttgcagagggtgaagcaggtggagccggagaacgcgagcaagatcctcggctgcatcctcctggaggaacccgacaaccaggatatgctgcagctcgcctacggcaacgacgccgaggtgcacgccaagatcagccacgccaaggccatgctggacgccatcgtcgcgtgctgctcctcgccggccttcggctaccactactggccgccggtgcccaataaggcgcaggcagaggagtacgcgttgcagccgcagcactacagtggcggagggtgctactacgcctctgagaacgcgctcatctacaatggcggggggccgccgaggt

SEQ ID NO: 260726 - DNA, 997 bp, Zea mays
ggatgtatccgtcaaaatacacgaagggcaacgagggggggccttttatagaggaaagcaagtgagtgagaaagagagagagaggagggaaaatgctgcgccacgccgcccgccgcctcgtttcccgcgccgtcgctccgcccaccgcgcgccgggcgctcgccacggcggaggtgcccgcggaggccgtcgaggactccacgttcgtcgaggcctggaaaaaggtcgcccccaacatcgagcccccagcgacgcccctctccctcatgcagccgcgcccgcccacgccagctaccatccctaccaagctcaccgtcaacttcgtcctcccctacaagtccgagatcgccaacaaggaggttgacatggtaattgtaccagctacaactggtcagatgggtgttttgccaggccatgttgccacaattgcagagctcaagcctggtgttctctcagtacatgaaggaaacgatgtgagcaagtactttgtgagcagtggatttgctttcgtccatgcaaactccattgctgatattgtggctgttgaggctgtccctgtggatcagatcgacccagcttttgttcagaagggtctcgctgaattcactgccaagcttggttcggcctctactgacctggagaaggctgaggctcagatcggtgtcgatgttcacagtgcgctcaatgctgcattgaccggttaattggtgtcatcttaaattgtctgtcttttagattgagtttaactttgcaaatcctaaataaattatagtccatctaaaacatggacatatgtttcttgttacctgaatcctgcatggatttatttttgtactcgtgaatattttaactctggagctcaaaacccggagttgctttctttttccgttgagttgcggccttggatcagatgaaatcgatgttcctccatagctccagtaaattgttaaatattgttaagtcttctttaagagaaatataaaccacatttgattac

SEQ ID NO: 260727 - DNA, 1088 bp, Zea mays
ctcgtcttcaaatcacccgaaccccagacggccagccgagctccccgccccgtactttgcacggaggcatccgtcaaaatacacgaagggcaacgaggcgaggcctagtatagaggaaaacgagtgagaggggggaaatgctgcgccacgccgcccgccgtctcgtctcccgcaccgccgcggcgcccaccgcccgccgggcgctcgtcacggcagaggtgcctgcggaggccgccgaggactccacgtttgtggaggcgtggaagaaggtcgcccccaacatcgagcccccaacgacgcccctcttcctcatgcagccgcgcccgcccacgccggctaccatccccactaagctcaccgtcaacttcgtcctcccctacaagtccgagatcgccaacaaggaggtggacatggtaattgtaccagctacaactggtcagatgggcgttttgccaggccatgttgccacgattgcagagctcaagcctggtgttctctcagtacatgaggggaacgatgtgaccaagtactttgtgagcagtgggtttgctttcgtccatgcaaactccattgctgatattgtggctgttgaggctatccctgtggatcagatcgacccagcattggttcagaagggtctcgctgaattcactgccaagcttggtgcggcctctactgacctggagaaggctgaggcccagatcggagtcgatgttcacagtgccctcaatgctgcattgaccggttaattggtggcattttaaattgtcttgtctttttcatctacagttttagagtgagtttaagtttgcaaactcatgggcatgggatggagggaatgatcctaaataaattatactccatctaaaacatggacatatgtttcttgtttcctgaatcctgcatggatttctttttgtactggtgaacattttaactctgagctcaagacctggagctgctttctgcccccgttgagtttgggccatggatcagatgaaattgatgttcgtccgtaggttatgttaattggtaaacgccattatgtctatttttaagagaaatataaagtactgctcgggttactg

SEQ ID NO: 260728 - DNA, 527 bp, Zea mays
aaccgagttccccagtactccgcagtccgcacggccgcatccgtcaagatccgcgaagagcaacgaggcgaggcgaggggagggaaaacaagtgagtgagagagagagagagaggagggaaaatgctgcgccacgccgcccgccgcctcgtttcccgcgccgtcgctccgcccaccgcgcgccgggcgctcgccacggcggaggtgcccgcggaggccgtcgaggactccacgttcgtcgaggcctggaaaaaggtcgcccccaacatcgagcccccagcgacgcccctctccctcatgcagccgcgcccgcccacgccagctaccatccctaccaagctcaccgtcaacttcgtcctcccctacaagtccgagatcgccaacaaggaggttgacatggtaattgtaccagctacaactggtcagatgggtgttttgccaggccatgttgccacaattgcagagctcaagcctggtgttctctcagtacatgaaggacacgatgtgagcacgtactttgtgagcagt

SEQ ID NO: 260729 - DNA, 1214 bp, Zea mays
tgcatccgcattccacccggaaccgtggtctgagcgctgatgtggctcagatgtcacctacccggaacaagtgcgtcctaaccgccatgtgagcgcgttcttgtccaccctaacctggtgcctctcacggccgcattcgcaccgcgatgaactacgccgcagccgccactaacgcccccgcggcggcgcccgcggcagcgccggcgtcgggcacagaacacgcccactacccgtattacgctggctattcttatccctacggcgcctatcaccaacctgccccgcccacgtactcctccgccgtggccgccgcctcgtcatcctactactaccccgtccctgccgccgcgtcgtccaccgccgcgcagtacgacccctattcgggttaccagcactacagtcacccggagggaggaggctcggcgggggctggcctggtgggctgctacagcaccgtcggcgaggcgttgcagcaggccgcggtagcatcgacgacgcaggctgctctggaggcgaccacaaaggaggcggggaagcaattcggtttcgatccccagagctacgctcaggcagcagttgccagagcctccaatggaattacacaaccagctgcagccccaggcttgcaccatgcccagtggaatgctcattttgggtatcctgtgccgaaatatgtcttgaggaaacaaatgaagaaaaagccgaagactgtgcaaccagcgccatgtgaggtgtgcaagattcagtgtgatacactagaagttctcctgatccataagcaggggaagaagcacaagaagaatttggagaaattacaagactcaatcacccgtaaaccaattataaagcccccaagcaatgtcatcggtccaagtatgccacctgttgctgtatccaactgtgtggtgccctctgtacagccgaagaagaagagcagctcagcagcaacccgggaagatctggaggtgaagaagaggcgagtccttgaggctggagcagcgcagggcgaagtaaaaatctgccaagtgtgcaatgttgtagtgaacagccaaaaagtgtacgagttccatattgcggggcagaagcaccaggccttggtacgtaagcagcaaccgctacgttttgtcacatgatgcagagccattttgctcgtcgtctttcgtctggcctcatgcttgtccggaagttcctctggaacgagaactcacaacatt

SEQ ID NO: 260730 - DNA, 1165 bp, Zea mays
ggtcgagatcacgggtccacgcacgcgcccgcgcttcgtcttcggttgcaagaaagaaaaaggtcacccctctaacaccacgccgccgccgtttgctgctcggcgcctctcctcacaacccgtacgccaacgtctccaatctcgtatactttcgtgctcagcatcatggacggcttccccaagagcgtcggcggtggcggccctaacattccggcgggatcccaccccgcaggcgggagccaggcggcggcaggaggaggcgcgacgcagcggacgcagtatccgtatgtgactggtaattcagtcattgccttgaaatacaaggatggtgtgatcatggcatgtgacactggagcctcttatggatcaactttgagatacaagagtgtggaacgcattaaggcagttggcaagcatagcatcattggagcaagcggagagttcagtgacttccaggagattttgcgctatttggatgaactaactctgtctgatcatatgtgggatgatggaaactcgctgggccccaaagagatccacagctatttgacaagagtgatgtacaaccggcgcaacaagtttgatcctctctggaactcacttgtacttggtggggtgaaaaagggtccaaagggtgatgagaagtatcttgggatggttaacatgattggtacccacttcgaggaaaaccatgtcgctactggatttggaaatcatatggcaatcccgatactccgtgctgaatggcgcgatgatatgacttttgaagaagctgttaagctggttgagaagtgcttggtggtcttgctgtaccgagacagatcatctatcaacaaattccagattgccaagatcacaagtgaaggatcaaccatctacccaccatattccttgaagacctactggggcttctctcactttgaaaacccagcccagggcgctgtgggatcatggtagatttatgcgccgcgcacgccgcatatcatgccatgaacttaggtgagaccaatctgtgctgctgaaatcaaacacttatgaacgtttgttctgaacatcactggaactctgcatttgcttgtatgacatgcttatggttcagcgagtttaattccaacgtttggtcccatgttgtgaatgtggaaaatggattgtccagttgcgcccc

SEQ ID NO: 260731 - DNA, 1651 bp, Zea mays
tcgttcccctccgctgtctcgcctctcccttggttcctcgcggcgacgactgggcgagcgcctcctcccctccctcactccctccgtgagctcctcgccggcggcgcgcgccgccgcccgtcgccacgtcttctccgctgacgtgggctcaccaggttcaaggcaatatctgtgttaatcttggggaccttcagtagattgctgagagttctccttgatacaggggaataaagatccaaataagtttttgacattgatctgtagccagtactgcaatggctacgaagcttgtggttctcggtatcccctgggatgttgacactgaagggttacgagagtacatggccaagtttggacccctagacgattgtgtcgtcatgaaggagcggtcttctgggcgatctcgcgggtttggctatgtaacattcgcctcagctgacgatgcaaagaatgttcttgattgcgagcatgttcttgggagccgtacattagaagtgaaggtagctactccaaaggaagaaatgaaatcacaaggatcaaagaaagctacaaggatattcgttgctcgaattccgcaatcggtggatgagtcgatgtttcgtagacattttgaagcttttggggaaattcttgatctttacatgccaaaggaacatggttcaaaagggcatcgtggaattgggtttatcacgtttcagagtgcagagtctgtggacaacatcatgcaagagtcacatgagcttgatggtacaacagtagttgttgatcgtgcgactcctaaggatgaagatgtcagataccccccgagtaggccatctcagggtggctatggtgcatataacgcatacatttcagctgctaccaggtatgcaactttgggtgcaccaacgctgtatgaccatcctggatcagcttatggaagagggtactatggatcctctcaagcagtgggcaagaagatatttgttggtagacttccacaagaagcaaacacggatgacctaagacattactttggcagatttggtcgaatcgtagatgcgtatattccaaaggaccccaaaagaagtggccaccgaggttttgggtttgtcaccttcgctgatgatggtgtggcagaacgagtagctcgtagaagccatgaaattctaggccatgaggttgcaatagacacagcggcaccacttgagaatgattcagctggtggtggttacattgatcccatggacctttacggagcttatggttcaatgagatcttttggcaggttctgcggtggtctagattataattacggctatggccccagcagcggaagcagcagatcaaggtcggattggcgataccgaccttactgaacgtgttttagtttacctctagggaaggaaactgaggagatggagaaaagaattacctgtctaagaatgctaagtgaggggggtaccttacgcgtggaatctatcattttgtttcatgttgtgattttggatttgtcgtgattcacattattgacacaagatgaaggcagtccttgtagttactgtatggaagtgctgtatgtgtaataaaaaagtatcatttgcgaaagaagttataacgcctcagacgaggtgcctgcacgtttatatacaaaaaaaaaaaaaaaaaggaa

SEQ ID NO: 260732 - DNA, 513 bp, Zea mays
atccatcggaggtgctctcctcttcggcttccttcggcttcggttgcaagaaagaaaaaggtcacctcttaacaccaggccgccgccattgctgctccctttgttcgtttctcggcaccctcgatcccgagcgtggttaatccacgcatcgaccggcgaacgccaccgtatcccatctcgaatacctccgcgctcagcgtcatggacggcttctccaaaacgatcggcggtggtggccctaacgttccggcgggatcccaccccgcgggcgggagccaggcggcggcagggggaggcgcgacgcagcggacgcagtatccgtatgtgactggtacttcagtcattgccttgaaatacaaggatggtgtgatcatggcatgtgacactggagcctcctacggatcaactttgagatacaagagtgtggaacgcattaaggctgttggcaagcatagcatcattggagcaagcggagagttcagcgatttccaggagatcctgcgctatctggat

SEQ ID NO: 260733 - DNA, 381 bp, Zea mays
gagaatgattcagctgctggtgggtacattgatccaatggatctttacggagcttatggttcaatgagatctttcggcaggttctgtggcggtctagattacaattatggctatggccccagcagcggaagcagccgatcaagatcggattggcgataccgaccttactgaacgtgtccattgtcagtgatgttctagtttacctccagggaaggaaactgaaatggcgaaaagaaacattttaagaatgttaagtgttacgttaagtggcatgttaatcgtaagagggccgtgcggaatctgtcgatttgttcatgttgtaattttggacatggaaatgcttttatgcaatttctttgccgtgattcacattattgaccc

SEQ ID NO: 260734 - DNA, 429 bp, Zea mays
cccacgcgtccgagccctggagtctgacgacctcgtttccctgctgtctcgcctctctttcggttctcacggcgacgactgggcgagcgccgcctcccctccctcgctccgtgaggtcctcgccggcgacgagtgctgccgcccgtttccatgtattttccgccgattagtgtccaccagatctagtgaaggctggtaacttgacgcaaggtgttcaagaaatttaagccacacactcttcatcataggcccaggcaatatttgtgttaatctcagggacctccagtagattgctgagagttatccttgatacaggggaatatagacacagaattttttgaacattgatctgtagccagtgctgcaatggctacaaagcttgtggttctcggtatcccctgggatgttgacactgaagggttacgagag

SEQ ID NO: 260735 - DNA, 539 bp, Zea mays
gtcaccttttttcaccaggccgccgccattgctgctccctttgttcgtttcccacgcgtcgtttaccctcgatcccgagcgcggttaacccacgcatcgaccggcgaacgccaccgtctcccatcgagatctctcccatctagaatacctccgtgctcagcgtcatggacggcttctccaaaacgatcggcggcagtggccctaacgttccggcgggatcccaccccgcgggcgggagccaggcggcggcagggggaggcgcgacgcaccggacgcagtatccgtatgtgactgcgacttcagtcattgccttgaaatacaaggatggtgcgaccatggcatgtgacactggagcatcctatggatcaactttgagatacaagagtgtggaacgcattaaggctagtggcaagcataggatcattggagcaagccgtgagttcagcgatttacaggagatcctgcgctatctggatgaactaactctttctgatcatatgtgggatgatggaaattctctgggccccaagagatccaca

SEQ ID NO: 260736 - DNA, 266 bp, Zea mays
gttggatctgaacccaagctccgagtcgctttcggggtgggcattctcctcttcgtcttcggttgcaagaaagaaaaagcatcatggacggcttccccaagagcgtcggcggtggcggccctaacattccggcgggatcccaccccgcaggcgggagccaggcggcggcaggaggaggcgcgacgcagcggacgcagtatccgtatgtgactggtaattcagtcattgccttgaaatacaaggatggtgtgatcatggatgtgaca

SEQ ID NO: 260737 - DNA, 1080 bp, Zea mays
gacgcgtccgaccacgcgtccgagcgctccccgtccttcggtaggtgcattgcttcggtggtccaccatggcgcagcgagcggtggccacgatgacgactaataagcccctcctcctcctcgccctggcgtccgcgctccttggtgcggcgccggccgccgcgaacgcgcccggcggggcgttcagcaactgggtggcgatgaaccagcagagctacgcgctgtacgcgcagaagtccgtcggggacgggggcaaggagcccctggacaagaagctgtcggaggcggagaagaagaaggtcacgtacgtggtggaccccagcggcaagggcgactacaccaacatcaccgcggcgctggaggatatcccggtgagcaacaccaagcgcgtgatcctggatctcaagcccggcgctcagttccgcgagaagctgttcctgaacatcagcaagccgttcatcacgttccggtcggaccccaagaagcccgccgtcgtggtctggaacgacactgcggccacgaacggcaaggacggcaagccggtgggcacggtggggagcgccacgctggcggtggagtcggactacttcacggcgtacggcgtggtgttccggaacgacgcgccgctggccaagcccggcgccaagggcggccaggcggtggcggtgcggctgttcgggaccaagacgcagatctacaactgcaccatcgacggcggacaggacacgctgtacgaccacaagggcctgcactacttcaagggctgcctcatccggggcagcgtcgacttcatcttcggcttcggccgcagcttctacgaggactgccgcatcgagtcggtggtcaaggaggtggcggtgctgacggcgcagcagcgttccaagtccatcgagggcgccatcgacaccggcttctcgttcaagaactgcagcatcggcggcgtcaagggcggccagatctacctgggccgcgcctggggggactcctcccgggtcgtctactcgtacacgaagatgggggaagaggtggtccccgtgggctgggacggctggcagatcgccaagcgggagagcagcggcat

SEQ ID NO: 260738 - DNA, 414 bp, Zea mays
agccttcgagagccctcccctgccttcggtaggtgcatggctccgggggtccaacatggggcaaccaaccgtgggcaacaatgacgcactaataagcccctcctcctcctcgccctggcgtccggccccccttggtgccggccccggccgccccgaacccccccggccgggcgttcagcaactgggttggcgatgaaccagcagagctacgccctgtacgcgcagaaagtccgtcggggaccggggcaaggagcccctggacaagaagctgtcggaggccgagaagaagaaggtcacgtacgtggtggaccccagcgggcaagggcgactacaccaacatcaccgcggcgctggaggatatcccggtgagcaaacacaagcgcgtgatcctggatctcaagcccggcgctcatt

SEQ ID NO: 260739 - DNA, 1529 bp, Zea mays
acctcaccctggtctggtctcctctgcaagcgggcagcgctcctccaaactgaaccctatcctagcacgagtgcacgtcggtggcagcaggagatggtggggacggcggaaggcggcgcggagagggcggtgcggcggtgggtggacgccgccggcgggcgcctggtcctggacggcgggctggccacggagctcgaggccaacggcgccgacctcaacgacccgctctggagcgccaagtgcctcctctcctccccgcacctcatccgcaaggtccatatggactacctagaagctggggcgaacattataatcacagcatcgtatcaggctactatccaagggtttgaatcaaagggcttttcaaaagaacaaagtgaaaacttgttaacaaagagtgttcagattgcactggaagcccgtgagatgttcttgaaggaacatttggagaaatccactcctatacagcatcctattctggttgcagcagctctagggagttatggggcttatcttgctgatggctctgagtacagtggggattatggtgaagctggtacgaaagagttcctgaaggactttcatcggcggaggcttcaggttcttgctgaagcaggcccggatttgattgcttttgaaacgatccccaacaaattggaagctcaggcatatgttgaactccttgaggaatgtaacatcaatatcccttcatggctttccttcaactcaaaagatggagtgcatgttgtgagtggtgattcgttaattgaatgcgctactattgctgacaagtgtgcaaaggttggtgcagtcgggataaattgcacacctccaagatttattcatggactgatactctccattcgaaaggtcacagacaagcctattctgatatatcccaacagtggtgaaagatatgatggtgaaaaaaaggagtgggtggaatccactggtgtgtcagatggtgattttgtttcgtacgtaaatgaatggtgcaaagatggggctgcgcttatcgggggctgctgcaggacaactccaaacactatcagggccatacacagaactcttaaccaaggctgccacaagcatcagttacctgtaggctgtagcatagatctgtgctccactcctgatgctctcctcccagcagtaccttgagctgtatccccgagattccttaaccagcgcgaaccaatatactgttgcgtgttctcctgcaaatgagatgttctgcacctatgtttgtaatgttgtatttctgggtttttaagctatccaacttggagatacaaccggtgaggaagcagcaacaataggtagttctacttctgagtgaggaaaaacaacttgcggctgagttaatgaagcttagtagctaccaccgttgtatgacagttgctcagagatgttatcttcattaagtgcttatattaccgctagttccctgtgaaatttgttaaaccattatatgtaagttttgtttgacaagactgcatctcctgaaactaagatcttagtttcctgct

SEQ ID NO: 260740 - DNA, 701 bp, Zea mays
aatggaatgaaggtgtgagctcctggtgatggaggggcggttacgggctctaagtgaagaacaattacgacgtaccttacctagcggctgctgcttcggccggcaaattgggttgtgctcgtggtcatggacacccttgtgttcgttaggagggggtcggggtggaacggtgaaaaggaagctgtagatagaaaaggcaggcgtctcatgctcttgttgtctagtctaatttttaattttactcggcttattaatcacggtactgactagctgcctcaaaacctgctcctcccagcagtaccttgagctgtatccccgagattccttaaccagcgcgaaccaatatactgttgcgtgttctcctgcaagtgagatgttctgcacctatgtttgtaatgttgtatttctgggtttttaagctatccaacttggagatacaaccggtgaggaagcagcaacaataggtagttctacttctgagtgaggaaaaacaacttgcggctgagttaatgaagcttagtagctaccaccgttgtatgacagttgctcagaaatgttatcttcattaatggctaatataaccgttagttccttgtgaaaaaaaaaaaaaaaaaggccggccgttttaaagattccaacctaacttacccttccttccaacttattacttttttaatagggtaacttaattcaatttaatt

SEQ ID NO: 260741 - DNA, 467 bp, Zea mays
ctgacgcgtgggcgaataataacctagctctgcacaccgcccagccaccagtggcagcaggagcaggggtcggaacaagatggtggtgacggcggccggcagcgcggaggaggctgtgcggcggtgggtggacgccgccggaggacgcctcgtcctcgacggcgggctggccacggagctcgaggccaacggcgccgacctcaacgacccgctctggagcgctaagtgcctcctctcctccccgcacctcatccgcaaggtccacatggactatctggaagctggcgcaaacattataatcacagcatcgtatcaggccactattcaagggtttgaatcaaagggtttttcaaaagaacagagtgaaaacttactaacaaagagtgtcgagattgcactggaagctcgtgagatgttcttgaaggaacatctggagaagtccactcctatacagcacccggttctgg

SEQ ID NO: 260742 - DNA, 1524 bp, Zea mays
atcaaggacaagcttatattccctttcgtagacctcgatagatttccagggtattctggcagtctatcaaggacaagcttatcctcccatttctggacctggacatcaagtactatgatttggggatactgcaccgtgaagcaactgatgacaaggtcacagtggaggctgcagaggctactctcaagtacaacgtggctattaagtgtgcgaccattactccagatgaaactcgggttaaggagttcaatctgaaacacatgtggaagagcccaaatggcacaattaggaacattataaatggcactgtgttcagagagcctattatatgcaaaaacgttccaagacttgttccaggatggactaagcccatctgcattggaaggcatgccttcggtgatcaataccgagctaccgatgcagttctgaaggggcctgggaagctgaagctagtttttgagggaaaagaagagcaagttgagctggaggtgttcaacttcactggtgctggaggagttgccttatcaatgtacaacactgacgagtccatccatgcctttgctgacgcttctatggccactgcttatgaaaagaaatggccattgtatcttagcaccaaaaacactattttgaagaaatatgatggcaggttcaaggacattttccaggaggtgtatgaagctggttggaaaaccaaatttgaagctgccggcatatggtatgagcaccgccttatcgatgacatggtagcatacgcacttaagagtgaaggagggtatgtctgggcttgcaagaattatgatggagatgtgcagagcgatttcttagctcaaggttttggctcattgggtttgatgacttcggtactggtgtgccctgatggaaagacgatcgaagctgaagctgcccatggtactgttacccgtcattaccgtgttcaccagaaaggaggtgaaaccagtacgaacagtattgcctcaatctttgcgtggacaagaggacttgcccacagggcaaagcttgatgacaatgctagactacttgacttcacccagaagcttgaggctgcctgcgttggagccgtcgagtctgggaagatgaccaaggaccttgcccttctcgttcacggatcttcaaatatcacgaggagccattacctgaacacggaggagttcattgacgctgttgctgatgagctcagatcaaggctggcagccaactcgaacctttgaaatccttgccgaagttgtggtgctttcctgcgcgacgctttcgaaccgtttttattatgtcgccattttctttccctgtgccaccaccctgatgaatgaagaaggcctgagctaggcgaacatctgcaggctgcagcagtatgccaaatcattatcattaccgttaccattaccaattggagattgccgtagatttccgcgattatgggaactcatttacctgattatctgatacgtttgaaataaaaggtcgccattcagaatgaaaaaaaaaaaaaaaagggcggccgca

SEQ ID NO: 260743 - DNA, 527 bp, Zea mays
gctttgtcttccgcccccgccgtcgccgcagacgcagccggccacccaccactcgcgcctcccccaccgcgtcgcgtgtgggccacagctacagctgcctcctcgagcaacccacactcctttcttcccctgcctgccgtctctcttccaccttccaccacaagcgccgccgcagccggtgcctgctccttcccgatccccgaggcaaagctgcgactccgcaaccgccgccatggcgttcgagaagatcaaggtctccaacccaatcgtcgagatggacggtgatgagatgaccagggtattctggcagtctatcaaggacaagcttatcctcccatttctggacctggacatcaagtactatgatttggggatactgcaccgtgaagcaactgatgacaaggtcacagtggaggctgcagaggctactctcaagtacaacgtggctattaagtgtgcgaccattactccagatgaaactagggttaaggctagaagaacctatgaagctagattgttgcatttat

SEQ ID NO: 260744 - DNA, 545 bp, Zea mays
tgtctccacgcgtccgcccacgcgtccggtcatcttctcctcctcagaaacccaccaaccccgtccagccgccggctgtctcggccgccgccgccgccgccgccgccctatcccggtccttcaggcgaaccaggttggtcatggccttcaacaagatcaaggtctccaaccccgtcgtcgagatggacggcgatgagatgaccagggtgttctggaaatctatcaaggacaagcttatattccctttcgtagacctcgacatcaaatattttgacctcgggcttccacaccgtgatgctaccgacgacaaagtcacagtggaggctgcggaggccacactcaagtacaatgtggctatcaagtgtgccaccattacaccagatgaagcaagggtaaatgagtttggcttgaaggctatgtggaagagcccaaatggcacaattaggaatattctgaatggcactgtgttcagagaaccaatcatctgcaaaaacatcccacggcttgttcagggtggacaaaacccattgcatcgggaggcatgc

SEQ ID NO: 260745 - DNA, 523 bp, Zea mays
tccacgcgtccgcccacgcgtccgcccacgcgtccgcccgcgcgtccggaccgtctctcttccaccttccaccacaagcgccgccgcagccggtgcctgctccttcccgatccccgaggcaaagctgcgactccgcaaccgccgccatggcgttcgagaagatcaaggtctccaacccaatcgtcgagatggacggtgatgagatgaccagggtattctggcagtctatcaaggacaagcttatcctcccatttctggacctggacatcaagtactatgatttggggatactgcaccgtgaagcaactgatgacaaggtcacagtggaggctgcagaggctactctcaagtacaacgtggctattaagtgtgcgaccattactccagatgaaactcgggttaaggagttcaatctgaaacacatgtggaagagcccaaatggcacaattaggaacattataaatggcactgtgttcagagagcctattatatgcaaaaacgttccaagacttgttccaggatg

SEQ ID NO: 260746 - DNA, 606 bp, Zea mays
  unsure (1)..(606): unsure at all n locations
gcttaccacccgnccgaggacgcgagggcggacggggggtttgccccganggaaccgccatttcacctgaagccgcccatggcacgggtacccggcatttccgtggccaccagaaaggaggcgaaaccagcacgaacagcattgcttcgatctttgcatggacaagaggacttgcccacagggcaaagctcgacgacaacgctagactactcgacttcgctctcaaactcgaggctgcttgcgttgagaccgtggagtccgggaagatgactaaagatctggcgattcttgtccatggatcttccagcgtcacgagaagccattacctgaacaccgaggagttcatcgacgcagtcgctactgagctccgatcaagactgggagccaactgagcctacaagaaactttgcatggcgactttgaatgcttcgtcaccgtcaccgatctgctagtcgtcttttctgttatgaagaagtgaatgtgcgtcaccgcagtttcgatgcaagctaattatagatgtggtgtcacgtgagcgctcaaaataaaggatacacatgattaaattgtttttatgtcagtactaagctcagtcatcccccccccccc

SEQ ID NO: 260747 - DNA, 464 bp, Zea mays
cgctggtcctactcggacctcgtcctcaacaccatcattttcaacttcttcgtcttctgccaggttttcaacgaggtgagctcgagggagatggagagggtgaacgtgctccgaggcatcctagacaacaacgtgttcgccatggtgctcggcagcaccgtggtgttccagttcgtgatcgtccagtgcctgggcagcttcgccaacacgacccctctcagcgtcgcgcagtggggcgcctgcgtcgccatcgggttcgtcggcatgcccgtcgccgtggcggtgaagatggtgccggtggagtaggcgggcctctcgatctctctcggagttgagaaactggaggcaggcaggcgggcagtagttgttggcttgaaatgtctataacagcagtattcttttttttttttgtggtaagaacagaacagaacagaacaggctttatccatctgtgattctactac

SEQ ID NO: 260748 - DNA, 450 bp, Zea mays
gtcgcctgctgttgcttgcggttgtggccagtccttcccctctcatcccgggccccggggaaaattttgccccctgaaaccctagcgcgtcggatcacaagcaagggcaaaattttctgcgactccggctgaaggacgctgcggcacctatgtcggacgacactggccgcactatacccaagttcggcgaatgggacgtgaacaacccggcctctgccgacgggttcacggtgatcttcagcaaggccagggatgagaagaaagccccggcccaaggccacatcagggacaggtcggcgtcggtcgacagcaaggactccaggtccagggatgagaagatgacctcctacagctccaggaccaacgcatcgaagaaatggttctgctgtgtctcgcccagtcccacacagtcttgagggagctaatgagccgtgcagtgctgcattttct

SEQ ID NO: 260749 - DNA, 2362 bp, Zea mays
tgattcatcccgttcttgggttcttctccccctctttctctgctcgttcctgaacgcgaattcgggcgacggagttgcggttctgatccacagctctcgattccggaaggagttggtcaagaactgcggatcctgagttgaatatgatatcaaatccggtggactggtatagtttcggacccggatagaattggtagggatgccagattggagggtgcgtgagtttgaaggtcaattcactgatgagtttgcccacagtaacaacaacaaacatgaaagtggagttgaggctcctggtgtcactagtagtaagaagttgaagcatacagttgccggtgagaaaattcaaggtgtcatccctggaataaatagctcagatccacagaaatgtaattcagagaacatccaacatgagaacaggatagtatcccagaatataaacagtgctggtgactgcattggagactgcaaagacagctccaacgccttctcttcaagggaagaaaatacaatcgctgaaaccagatgtccaacggatgactggaactcctgtcagtttgcactgagcaatggttcatccattctcaataaccacagtgctccacaggatagcctcacttatggagataatgatctaaactacattgattggcctggcattgacaattttgaggatgttgacacattattcaggagttctgattccacatatggtccgcagcagctggagaatgcagatgggttatcttggcttccttcttcagatgctgtttactcttccgatgttgctttgcagcaagggtttgactcgtcttattccgattatgatattctggatgatctctcagcattccaatgtgcagaagataaatcactaccctcagttggtccttcatcggatttatgtgataatcaattcaatgatacctatctgttcagtgagcagaagaatgtgaatgcatatggtgaacagatataccaagaggatttgatggagttgttgcccactgaccagatatgcagcggacatgaaaacattgatatgttgcaggttggaaaccagtatccatctgaaaatgcaattcaaggtaccgaagacaagaaattctctatagcgtcaacttcccagctgagttctcagaatttactgaatcaaagacaccacttagattccagttcaccaagcaatattacttctgagtcctatccaggaaagttcggtccatctagcggttcttctgcacaaagaaactcaaaagctggtgtgacacttaagtgcgcaaatgcagtgcagaagaaaactgtcaacatacaaccaagacagccagcaaatgctaatgttatgaacacaagcagagcttctttcccttgtgagaactatgaaactgaaagaagaggattagggaaaagaactctgggggatcctcaagttacaatgggtagttcaatggtagtggatggctcatttgtatcatctatgtcctctgataactcagtcgaagaaagcagctttcaacaactgcaggatgctgttagtcagctggatgtgcaaaccaaattgtgcatcagggatggtttataccgattggcacgaagtgcgcagcacaggcaagttattccaaatatgatgagcagcaatgaagacaacccggatataaaggatctgcagaatgcagaaactttgcgcaagttcgtcgatcctcggagcatcgagacacagacaaacccgatcgaccggtctatcgctctgctacttttccaccagtcatcggaccatgcggctgtggctgtcgacgatgcctcatcacttaaaccccctgctggtagcaaacaacaccagggccctgctgctaaccaaaaccaaggcctgatgccagattcatcggtgtattcccctggagatggggcccccaaggatgtacagtccctggacaagttctgaatttatgtccctgctctccatgggcacgttcggttcccggggaatggtcgtctggaacgaatcctggtcggattgcttctctaattgatataagctttgatcggttggaacgattcttggtggaatttcgggataaatgaacaggccctaatgcgtctccgtgacctggttaaggcggcataatacggctttcacatgatgtttctaggcagatgtaaaaaacaagtatattgtgtacccaatagtctgtagcctgttccaatcacattggttttgacatgcgtgtatcctatgggtaggcggccgttgtgctctctagtggcgttgactcacatctgtgtaatctaaaaaaaattctttctttccgtggatctctaactatacctttgaactgatatacgggagtggatggattcggcc

SEQ ID NO: 260750 - DNA, 504 bp, Zea mays
  unsure (1)..(504): unsure at all n locations
atacaattcaaggtattgaagacaagaaattttctatagcatcaacttctcagctgagcgcctctcagaatttactgaagcaaaggcaccacttagattccaattcaccaagcaacattacttatgaggcctatgaagaaaagttcggtccatctagtggttcttttgcacaaaggaattcaaaagtgcagaagaaaactatgaacatgcaaccaacacagccgacaaatgataatgtcatgaacagacatcctcaaacattgacaagaagtgcttcttatccttgtgagaacaatgaatctgaaagaagaggattagggaaaagaactctgggggatcctcaagttacaatgggtacttcaatggtagtggatggctcatttgtatcatccatgtcctctgatatctctggtgaagaaagcagctttcgacaactgcagaatgctgttagtcagctggatgtgcanaccaaattgtgcattaagaggtttataccgattggca

SEQ ID NO: 260751 - DNA, 742 bp, Zea mays
cggacgcgtggtcttgtcgcgtggggcgagtgaaaaaaaaagaatagtctcagaaccatctagagacagcggcccgtggagcggacagctgagcgagcaagcctgcgcccccgcctgcgccctcccgaagtagaagctgttctgatccacagctctcgattccggaaggagttggtcaagaactggggatcctgagttgaatatgatatcaaatccggtggactggtatagtttcggacccggatagaattggtagggatgccagattggagggtgcgtgagtttgaaggtaaattcactgatgagtttgcccacagtaacaacaacaaacatgaaagtggagttgaggctcctggtgtcactagtagtaagaagttgaagcatgcagttgccggtgagaaaatccaaggtgtcatccccggtacagatagctcaggttcactgaaatgtaattcagagaacatccaacatgcgaacggggtattatcccagaatataagctgcgctggtgactgcaaaaatggctccattgcctttcctttgagagaagaaaatacaataactgagaccagatgtccagctgataactggaactcctgtcagtttgcactgagcaatggttcgtccattctcaataaccacagtgctccccaggatagcctcacttatggagataatgatctaaactacatcgaatggcctggcattgacaattttgaggatgtcgatacattattcagga

SEQ ID NO: 260752 - DNA, 521 bp, Zea mays
aacaaaacgagaaaaaaaaaagtcttgctgctgctggtggtggagcgagaaaggaaaaaaaaagaaggggtaatctctggaaccatctagagacagcggcgcggcggtacgtggactggactggagcgagcaagcctgcgccggcgccgccgtcctcccgaagcagaagctgtagtctggtcaagaactggggatcctgagttgaatatgatctcaaatccggtggactggtatagtttcggacccggatagaattggtagggatgcaagattggagggtgcgtgagttcgaaggtaaattcactgatgagtttgcccacagcagtcgcaacgaacataaaggtggagttgaggctttttgtgtcattagtagtaagaagttgtagcatgcagttgctaatgagaaaatacaaggtgccatacccggtacaaatagcttaggtttactgaaacgttattaacataacatgcaacatgcgaacggggtattatgccataatataagctgcgctggagactac

SEQ ID NO: 260753 - DNA, 375 bp, Zea mays
  unsure (1)..(375): unsure at all n locations
attaactttcggacggcgacgcaaacanncggcgagggttattaagaagnccctcccgtatccaccgnngataaaataaataactaccgttacttggtccttcatcggatttatgtgataaccaattcaatgatacctatctgttcagtgagcagaagaatgcgaatgcatatggtgaacagatataccaagaggatgggatggagttgttgcccactgaccagatatgcagtgacatgaaaacattgatatggggattgagatgctgtcattgggatcatttaaaaccggagccattctctcgttatggtcagtgtggctaaatcttttgatgctctgataaagcttctgttttctactgcggatgatgcacgg

SEQ ID NO: 260754 - DNA, 564 bp, Zea mays
  unsure (1)..(564): unsure at all n locations
agcgtcaacttcccagctgagttctcagaatttactgagtcatagacaccacttagattccagttcaccaagcaatattacttcggagtcctatccaggaaagttcggtccatctagctgttcttctgcacaaagaaactcaaaagcgcaaatgctttgcagaagaaaactgtcaacatacaaccgagacggccagcaaatgataatgttatgaacacaagcagagcttcttacccttgtgagaactatgaaactgaaagaagaggattagggaaaagaactctgggggatcctcaagttacaatgggtagttcaatggtagtggatggctcatttgtatcatctatgtcctctgataactcagtcgaagaaagcagctttcaacaactgcaggatgctgttagtcaggtatcatgggttactagttttctttttgatttcttttaatttcccatatagcataaactctagcctacagcagtacagccccttcattntggtattgcaaatccatgctgtgtttgtagtttctttttttttcctttggggttttttgatctctct

SEQ ID NO: 260755 - DNA, 1662 bp, Zea mays
  unsure (1)..(1662): unsure at all n locations
ttgggtcttcaccctacgtgaacacaatgctgtcgcaagcgggcgcattgccttgaatgctattcaacgtcgtcaggcaaaggtttcagctggggattctgttactgttagcagttttgtcccccctgatgatttcaagttggctttgctcactttggagctagagaattgccaaggcaagagccaaccgccggcacgagctggatgctgctgtgcttgcccaacaactccgtaagaggtttctggatcaggtcatgaccttggggcaaagggtgccatttgaatttcatggaacaaactatgtattcaccgtcaatcaagctttgctagagggtcaagagagttctacaccattggatagaggattcttgtcaagtgatacatacatcatatttgaggctgctcctaattcaggaattaaggtgatcaaccaaaaggaagctgctagcagcaaacttttcaaacataaagagtttaacctggaaaaattggggataggtgggttaagtgctgaattcactgacatatttcgtagggcattcgcttcaagagtctttcctcctcaagttgtcagtaagttgggcatcaaacatgtaaaaggtatactgctatatggacctcctggtactggcaagactcttatggcacgacaaattggaaaattattgaacggaaaagatcccaagattgtgaatggacctgaagttctgagcaagtttgttggagaaaccgagaagaatgtgagagatttgtttgctgatgctgaaaatgagcagagaacacgaggtgatcagagtgacctccatgttatcatattcgatgaaattgatgccatctgcaagtctagaggatctacccgtgatggtacaggtgtacatgatagcattgtaaaccagctgcttacaaagatagatggtgttgaggcgttgaataacgtattgcttattggaatgaccaatcgtaaagatttgcttgacgaagctttattgagacctggacgattggaagttcacatcgagataaacctgcctgatgaaaatggtcgtttccaaattcttcagattcatacaaataagatgaaagagaattctttcctatctccagatattaatcttcttgagctagccgcaaggacaaagaactacagtggagcagagttggaaggtgttgtcaaaagtgctgtctcgtatgctttgaaccggcagataaccatggatgacctcactaaacctttggatgaggaaagcattaaggttaccatggatgactttgtgaatgcacttcatgaaattacccctgcatttggtgcttccaccgatgatctcgaaagatgcagattgcgcggtattgttgattgtggcaaggcacataagcacatttatcaaagagctatgctcctcgtagagcaagttaaagttagcaaaggtagcccactcgtgacttgcctattggaaggtcctgctggaagtgggaaaacggctatggcagcaagtgttggcattgacagtgattttgcatatgtgaaaattatatcagcagaaacaatgattggtttcagtgaaagcagcaaatgcgcacagatttgcaaggtttttgaggacgcatacaagtctcagttcagcatgataattcttgatgatatcganaggttactggagtatg

SEQ ID NO: 260756 - DNA, 1063 bp, Zea mays
ccgggcgcactatataatggtggattaaccctaggaacctgttgggtccgcgcaatcgtcgactgctgctgcgttctgttccgttcggaagatgttcttggagagcttccgggtggagagcccgcgggtgaagtacggcgacggcgagatccagtcggagtaccgctacgacaccaccgaagtcgtcccgccggggaatggcggcggcgcggggtgggtggtgcgcccaaagtccgtcacctacaacttcaagaccagcaccaacgtcccaaagctgggggtgatgctcgtcggatggggcggcaacaacgggacgacgctcacggccggggtgatcgccaacagggaagggatttcgtgggagacgaaagagaaggttcacaaggccaactacttcggctccctgacgcaggcttccaccatcagggtcggctcccacaacggggaggaggtctacgcgcctttcaagagcctcgtgcctatggttgaccccaactctatcgtgtttggtggatgggacatcagcaagctgaacatggccgacgccatggccagggccaaggtcctagactttcacctccagaagcagctcaggccctacatggaatccatgctgccactccctggcattttcaacccagacttcgtcgccgcaaaccaaggtgcccgtgctgacaatgtcatcaagggcaccaagaaagagcaggtggagcagatcaagaaggacatcaaggagttcaaggaaaaaaacaaggtggacaaggtagtcgtgctgtggacggcgaacaccgagaggtacagcaacgtggttgcagggcttaacgacaccatggacaagctcctggcttcgttggacaagaacgaagcagagatctcgccatccaccttgtatgcgatacctgtgtcctcgagggtgtcccgttcgtcaatggaagccctcagaacaccttcgtgcctgggctgatggagcttgccataaaacagaattcggtgataggaggtgaaagtctaggaccttggccctggccatggagtcggccatgttcagcttgctgatgtcaca

SEQ ID NO: 260757 - DNA, 382 bp, Zea mays
ggggaaattgacaaagacgagtttaggaaagtgatgacactgatgcgatcctataatagacaaggagctgcccatagggatggtttacgctttggacgcaaggttggtcagccagtggaaaatggtggactggtcgaatacttctttggcaaggatgggaatgaacatctacactatgataagttctctagttttttgaagaaattgcatgatgagattgtccgcttggagtttagtcactacgatgtgaaatcatccaacacaatacctgttaaggcctttgcgttatccatggttgcttctgctgatatgatttacatagacaagttactggatagagttgaggatttggacgacaatcttgacctcaaggatctgcgta

SEQ ID NO: 260758 - DNA, 1103 bp, Zea mays
gaaaacgtttttatggtagttcgtgttcatgtccgatctgaaatggcttcagcgacttcgcgtgcttgattgaaacgcacccagtccccgctcctgtttcgatctcccgaatcccgatcccgctaccggaggcggaggcgatggcggcggcgccggcggtaaggttcccggtcttcgggctcgtgcggctgctgggcttggccgccgcggcggcgatcctcttctgggccgtccacttccgaggcggcatggcgctctccaccgaagaggagagcaagctccccctcttcaacgttcacccagtgttaatgctgattggtttggtggccttgaatggcgaagctcttttggcttataaaactgtgccaggaaccaagaaactgaaaaagcttgtgcaccttgccgtgcagttccttgccatgtttctgagtctaattggtctgtgggctgtctggaagttccatgatgaaagaaaaattgaccatttatatacacttcactcgtggttgggccttacttgcttcatcttcttcagcttgcagtgggctgctgggttttggaccttttggtaccccggtggatcaagaagtggccgtgcatttttgcttccctggcatgtcttctttgagtgtcttcatccatgttcttgctgtcgccacaagtgtgactggactcctggagaagtcaatctttatgcagagcgccaaaatgattgagcgcttctccacagaagccatgtttatgaactccctgggaatgctgctggtgttgttgagcagccttgttattcttgcactcgttagtcctggacccagcatgatcgacacatacagaggctcttctgagtgagaggaaatgattacagcctagtttcttaagctacatttttaatcagtagctgagcaatttttgtgtacatgtacccagaattatgcttttcttcttttgacatggagttagtcagtgttgaggataatttcctccctgttagagtggcttcattcaagtcgcagtaataaaattgtggatgaggctgacaatgaaattacagctgagaatatgactgaagtaacaattcctgggatgaaattcggacgcgtggg

SEQ ID NO: 260759 - DNA, 637 bp, Zea mays
cggacgcttggggaaatgctgaggtcaagaggctctttcaaaaatggtacacttgctgatccttgtgctcccagaggatattcacgcaatgaaggtgcttcaaggtcaacattagagaaccagtatgttaataatgggactggaaactttacagagtgcatatcttcttcacaacttttactgcaaaaaggaaaggaaaagtgccagtatcaacaatgtcacctgggatctacttttgtacctgagctgcgtggatacttcttgggaactgaaaatttctattttacttcaaagttctttggacttaagaagtcttcatcactatctgatttcatgtttgctggagaacaattttgcaatcagcatttgtcgagtcttagaaaaaagcatcctaataggtcagatgaggatttttcacggtattgcttctcgatggcatacattgtggctctactgcatgacagtcttggtgtaccactggatgacaagaggattgagtattcaaaccaggttggagacatttaggttgaatgggctctaggagctttcattacactgatgcaaaaaacgagtttaagccattcacaccaacgcagaatcaaccatagcaatagaccattgtttgtgggctggaatg

SEQ ID NO: 260760 - DNA, 813 bp, Zea mays
tcggttagggataagattggcggcgccgctagggaggcggatgtgcggctcatggccaccgcagggctgcgcctgctcgaggagcgcgcccaggaggcgatcttagcgtcttgcagggacgttctacgagcctctgggttccggttcgaggacgcgtgggccaaggtgatcccaggctcggatgaaggtgtctatgcttgggttgcggcagagtatgctcttggaagacttggaggggatcctaacaaaaccgttggaataattgaacttgggggcgcttcagctcagcttacctttgtttctgatgaagtacttccacccaaactgtcatataattatacttttggtgaaacaacatacactctctataccaacagctttttaaactttggtcaaaatgcagctcaagactcattccatgaaatgctgaggtcaagaggctctttcaaaaatggtacacttgctgatccttgtgctcccagaggatattcacgcaatgaaggtgcttcaaggtcaacattagagaaccagtatgttaataatgggactggaaactttacagagtgcatatcttcttcacaacttttactgcaaaaaggaaaggattagtgccacatgtatctcatataaatgcagaaaagtgccagtatcaacaatgtcacctgggatctacttttgtacctgaactgcgtggatacttcttgggaactgaaaatttctattttacttcaaagctctttggacttaagaagtcttcatcactatcttaattcatgtatgctggagaacaattttgcaatcagcatttgtcga

SEQ ID NO: 260761 - DNA, 849 bp, Zea mays
tgagaaatgatgctgcttgggttcatatctctgcttctggctgcgacgtcaagaatcatttcggggatctgcatcgactccaagtactacaacagcagattctccccgtgcaccaaagaagaggtccaagaatcgataaatgcagagcatgccattgctcacgcgcgcaagcatctactggaggtcatcctgcaccattcaccgaggagaaatctgaaaactagttaccataaccatgaaggctgccgtgagggatatgagtcatttgtttcgcatgaaggtttggagcagctgcaccggtttatatttgtaatggctgtgactcatgtgacttatagctgcctgacgatgttactagcaatactcaagatccataaatggagaaaatgggaggatgaagcattcagggataatcatgaatcattttctcagatcgcatatgagtcagcaactagaaggcaaccagcacttaccaaatcctattcattccgctcttggagccaaaataatgtggtcatgtggcttgtttgctttattgcgcaatttggtcagtctgttgttcgagcagactatcttatcctccgcaagggttttataatgacccacaatcttccgccaacatatgatttccacaattacatgatacgctcaatggaagaggagtttgagaagattgtcggagtgagtggactgttgtggggctttcgtggttgcttttatgttatttaatgtagacggatccaacctgtacttttggatagcaattcttcctgtaactcttgttcttctggtgggtgcaaagctgcagcatgtgattgcgactctaacagcagagggcgcaaagatgag

SEQ ID NO: 260762 - DNA, 2645 bp, Zea mays
gggagagtttcttggcgaccaagtggacaactgcaaaacggttcggtcttgaaggtgctgagactctgatccctggcatgaaggagatgtttgacagggcagctcatcttggtgtagagagtattgtcattgggatgccacacagaggcaggttaaatgtcttgggaaatgttgtgaggaagcccttgcgacagatatttagcgagttcagtggtggcaccaagcctgtcaatgaaggcgaggggttgtatacagggactggtgatgtcaagtaccatcttggaacttcatatgataggcctaccaggggtgggaaacatatccatctgtcactggttgcaaacccgagtcatttggaagcagttgatcctgttgttgctgggaaaacaagagcgaagcagtactattctaatgaccgtgacaggaccaagaatttgggagtgttgctgcatggtgatggtagtttctcagggcagggcgttgtgtatgagacgctgcatctcagtgcccttgaaaactacaccactggtgggacaatacatatcgtggtcaataatcaggttgctttcactactgatccaaggtcagggagatcctcacaatattgcacagatgtagcaaaagcattggatgctcctattttccatgttaacggtgatgatttggaggctgttgttcatgtctgtgagctcgccgcagaatggcgtcagacatttcattcagatgtagtggtggacattgtatgctaccggcgatttggccataatgaaattgatgagccgtccttcacccaacctaagatgtacaaggtgattaggaaccatccaagtgcgctagagatttatcaaaggaagttgttagagtctgggaagatctcaaaggaagatattgataggttaaacaaaaaggtcagcactatacttaatgaggaatttcagaacagcaaagactatgttcccaacaagagggactggctttcagcttactggactgggttcaagtcaccagagcagatttcgcgtatccgaaacaccggtgtcaagccagagattctaaaacgtgttggagaagccatgactactctgccagaaaatttcaagcctcacagggctgtgaagaagatttttgatctacggcgtcagatgatcgagactggagaaggcattgattgggcagttggtgaagcacttgcttttgctactcttataattgaggggaaccatgtcaggttaagtggtcaggatgttgagaggggtacatttagccatcgacactctgtcatccatgaccaagaaactggagagcagtactgcccgctggatcatcttgttatgaaccaagatgcggagctttttactgtgagcaacagttccctgtcagaatttgctgttttgggctttgaattgggttactccatggagaacccaaactcattggtcttatgggaagctcagtttggtgatttttcaaatggagctcaagtgatatttgatcagttcctgagtagtggggagtcaaaatggctccgccagactggccttgtcgtttgccttcctcatggatatgatggtcaggggcctgaacattctagtgcaagattggaacgctttcttcagatgagtgatgacaacccttatgttatacccgagatggatccaacactgcggaagcaaatccagcagtgcaattggcaggtcgttaatgtaacaactcctgcaaattatttccatgttctgcgtcgccagatacaccgggacttcaggaagcctttgattgtgatgtccccaaagaacctccttcgccacaaggactgcaagtcgaacctatctgaatttgatgatcttgcgggccaccctggattcgacaaacaggggacacgcttcaagcgtctcattaaggaccagaataatcacaaggacctcgaggagggaatcaaccgcctagttctttgctctggaaaggtgtactatgaactggatgaagaaagaaggaagtcggagcgcactgatgttgctatatgtagagttgagcagctctgcccgttcccctatgacctcatccagcgcgagttgaagagatatccaaatgccgagatcgtgtggtgccaagaggagccgatgaacatgggagcatacagctacatcaacccgcggttgctgacggcgatgaaggttctgggccggggtggcatcgaggacatcaagtacgtcggcagggccccgtcggctgctaccgcgacgggcttctactcggtgcacgtgcaggagcagacggagctggtgcagaaggcgctgcagcgcgaccccctcaactaccctttctgaaagaaacgaggcccctgtagattcttggaattggggaccttttgaatttgatataataccaatatagagagaacatgccttaaattttatctgtgcagccatttggtgaaataattgtttcgactctgcagtaccgcatgaaacaaaccgttgtaagtttggaaaaactccatctcgcagcgttgattttgtgttcctaaatgctggaaagtttgtatggctgaaagcctgaaacaccgcctgccgcaattttcttgcgttgaattgcaaagtctataaaagcaatgaactgatatgtcattaaaaaaaaaaaaataaaaa

SEQ ID NO: 260763 - DNA, 1284 bp, Zea mays
gactagttctagatcgagaaccagcatgtcgatgctcttgaggttcttctccagggactctctggtgtcccgaaagagcgttttagggtgcatgagctcggccgtaaaagtgggcccaggcgtaggtgttgtcccatcggaggttcgtttgttgtgtgacttagctcagcccacaccatcctggaccataagacatgttggtggtgccatgagaggtgctggtgcggagcaaatctcagttctggttcgtacagttgtggagagcaaagctagcaagaacgtcttgcactacttctacaccctagggtacaagctagaccatgaactcttgaagagcggttttgcatttcgtttccaccgaggtgcccaaatcactgtcactgttacatctgctaacaagatgtcaaggctccatgcaaccgatgaagctacgccagtcactcctgccatacagctagtggaaatcacagctcctgctgctgctgataattacaatgatgttgtttcagctgtcactgcgttctgtgaatatcttgccccgctgctgcatctgtcaaaaccaggacactcgacaggaatcgttccaacagcagccgctgctgctgcctcactcatgtcaagtggcggtggcaaaaccttgtaatgctgctaggacagccaaagtccgttcttgctgctgggtcggcctgagtccgttctttgagatgagtgggcgtggctaatgaggtggccttcttcgtgccgagcatttgagcagtcagttttgcctgctagtgttgtccatgtctgacacatcgttgtgccaaccttgctcttggtttgactggttgcatgattgctgatgggtaatgccctgccttgtagttgcagggtgtaacactctaatattggtaatactagagaggctctgggccgtggtggcatcgaggacatcaagtacgtcggcagggccccgtcggctgctactgctacgggcttctactcggtgcacgtgcaggattagacggagctggtgcaaaaggccctgcagcgcgaccccatcaactacccgttctgaaagaaacgagacccctgtaaattcttggaaaattgggcaccttttgattttgatatacctctatagagagagcaggccttatggtatgcctgtgctgctgtgcagccatttgttgaaataatcgtttcggactctacagtaccgcattatatagtatataatttcatgataaatattgtataagtaattattgattaattaatattaaaaaaaaaaaaataaaaata

SEQ ID NO: 260764 - DNA, 591 bp, Zea mays
cccacgcgtccgcgagcgaggatgaggcgaaggcgtgcttggcgaaagaagccagcgtcgactccattggacgtcgccagtgtcgaggagtacaagcagaaggcgggcttggtgtcgaagcggggccggaggtcgacaggcagcaactaactaccgtgaccatcgtcaccgttgtggtggttcttcgccctccgtgccttcttccccctgtccgatatccgacgccggtgcgagatctactccccaccatcctcgcttcaacgagcgcctttctttaatcggttagatggtgcgcatacgtcgtcctcagttgctataatgggctccaagtgatgggaggcatgcaacatgctgaagtgatacatgctcgtattttgaaaccagatagctgcaaaaccaagtcaataaagcagagtgttcgagatcggatgctcaaaatagctgtcagtccagagccagagaagtttctcgattgaaaaatagagcacttcctgcaatagtgatatgattatgtaggaatacatgctcatattatagtagtacgatgttgaaaacacaatgtagcatttgaagacgaagcctaagcgtaag

SEQ ID NO: 260765 - DNA, 368 bp, Zea mays
cccacgcgtccggtagcgattgcttgtaacccgagcgggggcaataaggtagtgtggatgtcaattgtggtgcatgtgcttgggtctagtgctacaaactgtggagcacccattccaagttgtgtagtgggtttcgggtgccttggcgaatgcctttgcatcctaacacctaaagtggcggacattgcgtgaggctggcttcacagagcagcgagtaccgcccgccaccagaggtggaaggataatgagccgctatgctctaggccaattagggaacatgtgccctctatggtagaccactatctttttgctatttttcttatctacttttgttcctatgtaaccattacgagtatcacgtttttgtt

SEQ ID NO: 260766 - DNA, 876 bp, Zea mays
caaattttacccctacagtgcgtaattctgcacagaagaagaacagtagtaaaacaggtgtaattgttggggttgtggttggtgcagcagttttaggagtactagcacttgctggaatctgtatgttgaggcagaaaaggagaaaactattattggagcaacaagagctttacagtattgttggaagacccaatgtatttgtttatggtgagctaaggaccgctactgaaaattttagttccaataaccttcttggtgaaggaggatatgggtcagtttataagggtaaattagctgatgggagggtggtggctgtaaaacagttatctgaaacatctcatcagggaaaacagcaatttgcagccgaaatagaaactatttctcgagtgcaacaccgtaatcttgtgaagttgtatggttgctgtcttgaaggaaataaaccactgttagtttatgagtacctagagaatggaagccttgataaagcattgtttggaaacgggaaactgaacctagactggccaacacgctttgagatatgcttaggcattgcaagaggcctcgcttatctccatgaagagtctagcatccgtgttgtgcatagggacataaaggctagcaatgtcttgcttgatgcaaatctcaaccctaagatctcggatttcgggctcgccaaactttacgatgacaagaagactcatgtcagcaccaaagttgcgggtacatttggttatcttgcacccgagtacgccatgaggggtcatatgaccgagaaagttgatgtgtttgcatttggagtggtcatattggagactctagctggaaggccaaactttgacaatacgcttgatgaagacaaggtttacattttagaat

SEQ ID NO: 260767 - DNA, 1031 bp, Zea mays
tcttatacatgaagaaacttgaagagtggtctgtaactgtggaggagagccaggtagtattaccttgtttgaagtcactgcagatacagtggtgtcctaaactgaaagctctaccagaaggcctgaagcatgtagcgctgtgtgaacttcatgtggagggtgcacatagcctaactgaaatcaaggacctgccaaaactatctgacgagctccatctcaaagataataaggtgctacagaggatctccaacctgcccatgcttcgttccctcattatcgatgactgctcaaagttgaagcatgtggcaggtcttgatgcgctgcagcacctcagacttgtctttcctccgtccaccgagacattttatttcgaagagctagtaattttctggagcgttgccttcccacggtggctggagctactgattcagaagtgcaaaggcctgcgacggtttgagttgcagtgtggtctgtcattgctcaggagctgcctcgacggtggcaagaactggcatctcgtgcagcagatccccgaggtgcgcatcataagctgcgatggcaagagatactttcggtataacaagagccgccgcatctacgaaactaatgcacagtcagaagaatgaagccatttctgaaaaccttggcacgacactggtttgttttgggtcagccacacgtttcagttgtcgctgtccctactttgttccgggagtattgagagcttgtgttctgttcacgattgattcaggtgttttcctttgttttgcgtgttttttttcttcttctttttatcgctgagccgatatatatgcactggttctcctctgaatatgggtgtccttcaccaggactcaatatgtgtaattcttttctgtttcctggtcatgattgtctgtaaattgtaaacattgggtttgatggatatcgaccctggagtgtaaagtgttggcggttaaatacacggccctctttcctggctcagcaaaaaaaaaaaaaaagggagagaaaagaagggcgggacccaggac

SEQ ID NO: 260768 - DNA, 438 bp, Zea mays
gctccccgcactccacgctatctgtggcggcaacagtaccccctccaagcgttcaccggtgcacgctccctcctcctcaaccgcgcgtgtagcttctctctcacactacatggagagtgagtgccgggagacgctaccattggcaggcgccgctctccctctctccactcccgcgcgtgaagactccagaggtgccgagttgctcggtgcgactccttcgtcgccgtccacggaagcggaggccggcgaccaacctccccgcgcggcgaagggtacaggcggccggatccgttgggcctcacgcgaggagagccacgcgaacggattcgacgaccgatgagtccggatcgaagcttccactggccgacttcatcgccgccgtcgccgttcaaccctgtccgtcggcgattcaacgaggctccttccccggctgggtgt

SEQ ID NO: 260769 - DNA, 1040 bp, Zea mays
cccacccgtccgcccacgcgtccccaaaaatccgccaaactcggctcgagagagatcgcatcttgcctgcccacccaagcttccctttcgttcctcctcgccccagcgacgcggcctcccgtagaccgagcaaggcaacccaccactgagaggcacgcagaggagcaggaagccggagaccaagatgtcgtcggtgttcagcggcgatgagacggcccccttcttcggtttcctcggcgccgccgccgccctcgtcttctcatgcatgggcgcagcgtacgggaccgcgaagagcggcgtcggcgtggcgtcgatgggtgtgatgcggccggagctcgtcatgaagtccatcgtgcccgtggtcatggctggtgtgctcggtatctacgggctcatcatcgccgtcatcatcagcactgggatcaaccccaaggccaagccctactacctttttgatggctacgctcacctttcgtccgggcttgcctgtggccttgctgggcttgcagctggcatggccatcggcattgttggtgatgctggagtcagggcgaatgcacaacagccgaagctttttgtgggcatgatcctcatcctcattttcgcagaagcgcttgctctgtacggtctcattgttggaattatcctttcatcccgtgctggtcaatcccgagcagattaagtgcactaccattctgcgattaccgtactgtttattatgctattctaagagaattgaaactctatgcccttgtctagtttattcttgttaccatgtattaatgaaacaatttgtagctgaaggaaggtgacacttccagccatgttggttttggcggtgttaagcagaggttatttattgggttaaggttggagggatgtgggttaagattggatggatgctcctgggctaagtggatttaatttttatccttggtgaataatgaacacggaggtgtagccaaataataacgtgatatatatatttctttgcccctttaaaaaacccaaaaaaaaaaaaaaaaaaaaaaaataataaa

SEQ ID NO: 260770 - DNA, 1081 bp, Zea mays
ctctctcgtcttcgtgggttccccgccccaccaggtacccacgcgttcctcagatcagatcggcaaggccaatccgaaatctcgagcgttcgcgccggcgaccacagcaaagaggaggccacagcacgacagcgccccagggttcctactctcgtcgcagcggcagcagtgaggggaagatgtcgtcggtgttcagcggcgatgagaccgcccccttcttcggcttccttggcgccgccgccgctctcgttttctcatgcatgggggcggcgtacgggacggccaagagtggcgtcggcgtggcgtccatgggtgtcatgcgcccagagctcgtcatgaagtccatcgtgcccgtggtcatggctggtgtgctcggtatctacggcctcatcatcgccgtcatcatcagcactgggatcaaccccaaggccaagccatactacctctttgacggctatgcccacctgtcgtctggccttgcctgtggtcttgctgggcttgctgcaggcatggccattggcatcgttggtgatgctggtgtcagggcgaacgctcagcagccgaagttgtttgtgggcatgatcctcatccttatttttgctgaagcgcttgccctctacggtctcatcgtcggcattatcctctcgtcccgtgccggccagtcccgcgcagattagaggcacgtttcagatgtcaacaccgtgccgccgacagttgcctggtcgtagctgggtcatgttctatatccatgagacaagaagctggagcactttgagaggcttacttttatgctgtctagttttccatcttctgttgagtcgagaaaacaagaaaggctgtgtagccaagggatgacttttacccttgtgccattcttttccctgtcgtggtggggggtgggttgcggttgatgcttatttatgcacagtttttgcttgggtcggggctggggctgggacgttggtgtaatgtggtgaataagcgagtgcatgcaacgcaattggaacttaagacacttgtggtaaaatactctttcgtattctgttctctgttctatgaatattggtaatatgcgtggctc

SEQ ID NO: 260771 - DNA, 1116 bp, Zea mays
agtacttgtcccgccccacgtcgcaccgccgtgtccctctcgccttcttccccaccccaccctaccctggcacccacgcgctcttcagatcagatcggcaaggccaatcccgagcagtggtgcgaaacctcgagcgctcgcgccggtgaccataacaaagaggaagccgcggtagcactggtagcggcagcagtaagggggagatgtcgtcggcgttcagcggcgatgagaccgcccctttcttcggcttccttggcgcctccgctgcgctcgtcttctcatgcatgggggcggcgtacgggacagccaagagtggcgtcggcgtggcgtccatgggtgtcatgcgcccagagctcgtcatgaagtccatcgtgcccgtggtcatggctggtgtgctcggtatctacggcctcatcatcgccgtcatcatcagcactgggatcaaccccaaggccaagccatactacctttttgacggctatgcccacctgtcgtctggccttgcctgtggtcttgctgggcttgctgcaggcatggccattggcatcgttggtgatgctggtgtcagggcgaacgctcagcagccaaagctgtttgtgggcatgatcctcatcctcatcttcgccgaagcgctcgccctatacggtctcatcgtcggcatcatcctttcatcccgcgccggccagtctcgtgcggactaggcacgttccacatgtctccgccacctggtcgtaaccgggtcgtgttttgtatcggtgatgagccgacaagctggagcacttaatttttttttatgctgtctagttttttgaacttgcgttgagtcgagaaaacaaaatagaacttgtgtagccgaggggtgacctttttcccttgtggccattcttttccctgtcgtggtgggtggtgggctgtggctgatgcttctttctgcacactttttttttttgcttgggctgggggcgttggtgtaatctggtgaataagcgagtgcgtccagtgcaatgggagctcaggactcttttgttcaaatccgccttgtttcgtcgttgtcctgttctgtgttctatatgaatattgtcgtgtgggaaatacatgcgtggctcatgattcatg

SEQ ID NO: 260772 - DNA, 762 bp, Zea mays
ctgacctgcaagtttatatgcttgatggtatgaagggataaatctcctcttcttcatctgcacaagaggagatttatcccttcataccatcaagcatatcccacgcgtccggctcggtatctacgggctcatcatcgccgtcatcatcagcacggggatcaaccccaaggccaagccctacaacctctttgatggctacgcccacctttcgtccgggcttgcctgtggtctcgctgggcttgcagctggcatggccatcggcattgtcggtgatgctggagtcagggcaaatgcgcaacagccaaagcttttcgttggcatgatctcatcctcattttcgcagaagcgcttgctctctatggtctaattgttggaactatcccctagaacacaactggtcaataccgggcggattaagtgcccccccattctgtgattcccgccccgtttattatgctattctgagaggattggacctctattccctggtctagtttattctggttcccatgtattaatgtaccaatctgtagctgatggaaggtgccttccagtcatgttttggttttggtggtgtcgaccagaggttatttatttttgggttaaggtcggagtcggacggatgctcttgggctaagtggatttaattttatccctgctgaataaagaacccggaattgtagccaaataagaacgtgatatataaatatttctttcccaaaaaaaaaaaaaaaaaaagggcggccgctcgcgatctagaac

SEQ ID NO: 260773 - DNA, 994 bp, Zea mays
caacaagaaatcagttatcccaaaaaaagaaaaggaccgcagctgagcaatcacaactcaggagctgctgctgactgcatatcaaaaccaagtcgtgactgttgaaatcttgcaacaacacttccacaaaacacatcgaaacgataggatgtcacatcaaaaccgacatgtaacacatactcaggtgatccaacagcataatccagcacagttcagtccatcggttgctacaggtgcataatgacaaatacgatgatcacagatcagcgacgctcttatttcacgatgtctccgaatgttcaggctcgtctgctggggacggcaggagacggacctctcaggcacccccaagtccggcgatcgttttcagccctggagtccaatgatcccacaagcaacacggccaccggcgtttccagtgctcttgctgagctcgtgcccaccctttccaagatcatcaggatcagcgtgaacaacaacagctctgccaatgattgagtttggcccagtcagtgggatctggctgtcggtgacattgatattagcaacaccatctgctccagctgtcacgtttccaagatcaccagcatggcggttctcatcttctggtgccccatgctccttgctcgcaggattgtagtgtggtccagttgacatgcatccattggtggtgtcaccaagtgcatgtacatggaacccatggaggccaggcttgaggccagagacacttccggtgacagcggtagggccatctccctcttgggtgaaaaagatggtgcccttgacaccatcgctgctaccaagcacagcaacagccttcaccattgtttatgtgatctcaggcgacccccgcggcgaggaagaatgggaaggcgacggcctttagagtcttgcgcttctggaaggttccttccgaggctgggggtagttgggggctgcagacctggggcctgcgacgagcggacgcgtggccggacgcgtggcggacgcgtgg

SEQ ID NO: 260774 - DNA, 770 bp, Zea mays
gtgacacatgctcaggcgaaccagcattttagccaacagtccaacacagttcagctcatcggttgccacaggtgcttaatggcgagtacaccactgatcacatatcaggcgctcttattattattatttcacgatgtcttcgggatgttattctagcctgctggtgacggcactcccaggcgcccccgaagtccaacgaccatttgtttcagttcagccctggagtccgatgatcccacaagcaacacggccgccagcgtttccggtgctcttcctgagctcgtgtccaccctttccaagatcatcgggatcagcgtgaacaacaacagctctgccaatgattgagtttggcccagtcagtgggatctggctgtcggtaacattaatgtttgcaacaccatctgctccagctgtcacatttccaagatcaccggcatggcggttctcatcttctggtgctccatgttccttgctcgcaggattgtagtgtggtccagttgacatgcagccattggtggtgtcaccaagtgcatgcacatggaacccatggaggccaggcttgaggccagagacacttccggtgacagtggtagggccatctccctcttgggtgaagaagatggtgcccttgacaccatcgctgctaccaagcacagcaacagccttcaccattgtttatgtgatcaccgatctgagatccaactgcaactcgtccggggtacagagtgaggcgatcgaaatgccagggatccgtgagggttttggtagga

SEQ ID NO: 260775 - DNA, 796 bp, Zea mays
  unsure (1)..(796): unsure at all n locations
gaggtatgctacctaccaaaaccctcacggatccctggcatttcgatcgcctcactctgtaccccggacgagttgcagttggatctcagatcggtgatcacataaacaatggtgaaagctgttgctgtgcttggtagcagcgaaggtgtcaagggcaccatcttcttcacccaagagggagatggccctaccactgtcactggaagtgtctctggcctcaagcctggcctccatgggttccatgtgcatgcacttggtgacaccaccaatggctgcatgtcaactggaccacactacaatcctgcgagcaaggaacatggagcaccagaagatgagaaccgccatgccggtgatcttggaaatgtgacagctggagcagacggtgttgcaaacattaatgttaccgacagccagatcccactgactgggccaaactcaatcattggcagagctgttgttgttcacgctgatcccgatgatcttggaaagggtggacacgagctcagcaagagcaccggaaacgctggcggccgtgttgcttgtgggatcatcggactccagggctgaactgaaacaaatggtcgctggacttcgggggcgcctgagagtgccgtcaccagcaggctagaataacatcccgaagacatcgtgaaataataataagagcgcctgatatgtgatcagtggtgtacttgccattaagcacccgatgagctgaactgtgttggactgttggctaaaatgctggttcgcctgagcatctgttaaaaaaaaaaaaaaaaaaaaaaaaaanaaa

SEQ ID NO: 260776 - DNA, 815 bp, Zea mays
gagctgaactgtgttggactgttggataatgctggttcgcctcatcggttgccacaggtgcttaatggcgagtacaccactgatcacatatcaggcgctcttattattattatttcacgatgtctcgggatgttattctagcctgctggtgagtggtgacggcactcccaggcgcccccgaagtccagcgaccattcgtttcagttcagccctggagtccgatgatcccacaagcaacacggccgccagcgtttccggtgctcttgctgagctcgtgtacaccctttccaagatcatcggcgtcagcgtgaacaacaacagctctgccaatgattgagtttggcccagtcagtgggatctggctgtcggtgacattgatgtttgcaacaccatctgctccagctgtcacgtttccaagatcaccagcatggcggttctcatcttctggtgccccatgctccttgctcgcaggattgtagtgtggtccagttgacatgcatccattggtggtgtcaccaagtgcatgtacatggaacccatggaggccaggcttgaggccagagacacttccggtgacagcggtagggccatctccctcttgggtgaaaaagatggtgcccttgacaccatcgctgctaccaagcacagcaacagccttcaccattgtttatgtgatctcaggcgacccccgcggcgaggaagaatgggaaggtgacggccttagagtcttgcgcttctggaaggttccttccgaggctgggggtagttgggggctgcagacccggacgcgtgggcggacgcgtggtcggacgcgt

SEQ ID NO: 260777 - DNA, 537 bp, Zea mays
gccaatgattgagtttggctcagtcagtgggatctggctgtcggtgacattgatattagcaactcctgctgctccagctgtcacgtttccaagatcaccagcatggcggtgctcatcttctggtgccccatgctccttgctcgcaggattgtagtgtggtccagttgacatgcatccattggtggtgtcaccaagtgcatgtacatggaacccatggaggccaggcttgaggccagagacacttccggtgacagcggtagggccatctccctcttgggtgaaaaagatggtgcccttgacaccatcgctgctaccaagcacagcaacagccttcaccattgtttatgtgatctcaggcgacccccgcgccgaggaagaatgggaaggcgacggcctttagagtcttgcgcttctggaaggttccttccgaggctgggggtagttgggggctgcagcccggacgcgtgggcgtgcgcgcgcgcggtgtgttggtgcgttggatttgtaggcgcacccacgcgtccgcccacgcgtccg

SEQ ID NO: 260778 - DNA, 606 bp, Zea mays
gtcggtgacattgatattagcaacaccatctgctccagctgtcacgtttccaagatcaccagcatggcggttctcatcttctggtgccccatgctccttgctcgcaggattgtagtgtggtccttgatttcaccaacaagtagaaagttcaatgactgatattaacttagcacacaccccggtcacataagcaagccaaagaaaaagaaaattaaacaccagttgacatgcatccattggtggtgtcaccaagtgcatgtacatggaacccatggaggccaggcttgaggccagagacacttccggtgacagcggtagggccatctccctcttgggtgaaaaagatggtgcccttgacaccatcgctgctaccaagcacagcaacagccttcaccattgtttatgtgatctcaggcgacccccgcggcgaggaagaatgggaaggcgacggcctttggagtcttgcgcttctggatggttccttccgagactgggggtagttggggggaccttggcggctgccacgaggtgcagcagcgggatgcgccgtgcgcgcctgtgtgctggatttgtaggcgcagccggacagagcagtcaagttgcgtt

SEQ ID NO: 260779 - DNA, 556 bp, Zea mays
  unsure (1)..(556): unsure at all n locations
actacgcgtccgcccacgcgtccgcccacgggtgggtgcttcgtataacctgggctgcgaaatccgaataccccgtagcagctgcggttggatctcagatcggtgctgcggtccctcttttaatttgtttcccctccgcttccgttagcgccgactgatcgtcgagtcagatcttacaccctatatatagtctcatctagccgtcactagtgagactcgatttgattcgttccactggattaagcgctttgagcgcgctagatacgtgtcatatcacataaacaatggtgaacgctcgtgctgtgcttggtagcagcgatggtgtcaagggcaccatctttttcacccaagtgggagaatggccctaccgctgtcaccggaagtgtctctggcctcaagcctggcctccatgggttccatgtgcatgcacttggtgacaccaccaatggctgcatgtcaactggaccacactacaatcctgcgagctaggagcatggggcaccagaagatgagaaaagccatgacggtgatcttgganatgtgacagcaggagcag

SEQ ID NO: 260780 - DNA, 376 bp, Zea mays
  unsure (1)..(376): unsure at all n locations
atttccaagatcaccggcatggcggttatcatcttctggtgctccatgttccgggctcgcaggatggtagtgtggtccagttgccatgcagccatgggtggggtcaccaagggcaggcccatgatacccatgcaggccaggcttgaggccagagccccttccggtgacagtggtagggccctctcccacttgggtgaaaaagattggtgcccttgaccaccatctgctgctacccagcacagcaacagccttcaccattgtttatgtgatcccagccgaccccccgggccaagaacgggatggattcgaacgcgacggctttggagtcttgcgcttctggatagttctcttccgagactgngggtagttggggccg

SEQ ID NO: 260781 - DNA, 1939 bp, Zea mays
  unsure (1)..(1939): unsure at all n locations
cccacgcgtccgcccacgcgtccgcgtcttcatttctctctctcccctcatctccacctctcctccggctagggtgttcacgcctgccgcggcgaagcttctgccctccccggcgtcgcgctctggtcgtcgtcggccgggaagatggctggcggcttcagggtacttcatctggtcaggccctttctggctttcttgccagaggtgcagagcgcggataggaagataccattcagagaaaaagttatctacactgttatttctctcttcatttttctggtgtgcagccagctcccactctatggcattcattcgacgactggagctgatcctttctactggatgcgtgttatcctcgcatcaaaccgtggcactgtgatggagttgggtattactccaattgtgacctctggtatggtaatgcaacttcttgtcggatcgaagatcattgaagttgacaacagtgtgagagaggatcgtgctctgctgaatggtgcacaaaagttgcttggtatcttgatcgctattggggaagctgtggcatatgtcctgtctggaatgtatggcagtgtaagccaacttggaacagggaatgctattctcattatacttcagcttttctttgctggcatcattgtcatctgtttggatgaacttctccagaaaggttatggtttgggatctggtatttctctgttcattgctaccaatatctgtgagaatatcatctggaaggcatttagccccacaaccatcaacagtggtcgtggtgctgaattcgaaggggctgtcattgcactgttccatctgttgattacgagaaccgataaagtccgtgctcttcgtgaggctttctaccgccagaaccttccaaatgtgaccaatttgcttgccactgtcttggtattcctcatagttatctatttccaaggcttccgtgttgtgcttccagtgagatcaaagaatgctcgtggccagcaaggctcatatccaattaagctgttctacacttcaaacatgcccatcattcttcactctgcgctgattaccaacctctattttatatcccagcttctctacaggaagtacagtggaaacttccttgttaaccttcttgggaagtggaaggagtctgaatactctggccattctattcctgttggtggtcttgcttactatgtaactgccccatcaagtttggctgatgtccttgcaaatccattccatgcactgttttatgtggtcttcatgctgtcagcctgtgctctgttctcaaagacatggattgaagtttctggttcatcagcaaaggatgttgctaagcagctcaaggaacaacaaatggtgatgccaggccatcgtgagtcgaacttgcagaaggaacttaaccgatacatccccactgctgctgcatttggtggtgtatgcattggcgcattgaccgtcctggctgatttcatgggtgcgattggttcaggaactggtatattgctcgctgtgacaatcatataccaatacttcgaaacctttgagaaggaaagggcgactgagcttggtttctttggtttttgattagtagctgtggaaccttaacttggctatagctgaattttcttgtaagtccctgtagtgcttagccagttgtaacttaaagagttctgtttaggttgccttcttgcggccacaatcatgtagcagaatgtgcgtgtgtttcaggttagcgtgggggtatgtgcatctgtccaaagagagtctgcaatttggcaaccggatattttgttatcaatttcagttacttcgaactgagcatgttctcattcccactttctgtttcggtctgttactaatttcccagaacattagatgctcacaggcgctttattctaatgtctctatttcatgacgagatatgaacatctctgaatctgattgcttcana

SEQ ID NO: 260782 - DNA, 2017 bp, Zea mays
ctctcttctcctcgcctcgccttggtgttcacgccgtcgctagcgcctgccgcggcgaacttctgtcctccccggcgccgggctcgggtcgtcgtcggccaggaagatggctggcggcttcagggtactgcatctggtcaggccttttctggctttcttgccagaggtgcagagcgcggataggaagataccgttcagagaaaaagttatatacactgttatttccctcttcattttcctggtctgcagccagctcccactctatggcattcattcaacaactggagctgatcctttctactggatgcgtgttatcctcgcatcaaaccgtggcactgtgatggagttgggtattactccaattgtgacatctgggatggtaatgcaacttcttgttggatcgaagatcattgaagttgacaacagtgtgagagaggatcgtgctctgctgaatggtgcacaaaagttgcttggtatcctgattgctattggggaagctgtggcatatgtcctgtctggaatgtatggcagtgtaagccaacttggaacagggaatgctatcctcattatacttcagcttttctttgctggcatcattgtcatctgtctggatgaacttctccagaaaggttatggcttgggatctggcatttctctgttcattgctaccaatatctgcgagaatatcatctggaaggcatttagccccacaaccatcaacagtggtcgtggtgctgaatttgaaggggctgtcattgcactgtttcatctgttgattacgagaaccgataaagtccgtgctcttcgtgaggctttctaccgccagaaccttccaaatgtgaccaatttgcttgccacagtcttggtcttcctcatagttatctatttccaaggcttccgtgttgtgcttccagtgagatcaaagaatgctcgtggccagcaaggctcatatccaattaagctattctacacttcaaacatgcccatcattctgcactctgcactgattaccaacctctatttcatatcccagcttctctacaggaagtacagtggaaacttccttgttaaccttcttgggatgtggaaggagtctgaatactctggccattctgttcctgttggtggtcttgcttactatgtaactgccccatcaagtttggctgatgtccttgcaaatccattccatgcactgttttatgtggtcttcatgctgtcagcttgcgctctgttctcaaaaacgtggattgaagtttctggttcatcagcaaaggatgttgctaagcagctcaaggaacaacaaatggtgatgccaggacatcgtgagtcaaacttgcagaaggaactgaaccgatacatccccactgctgctgcatttggtggagtatgcatcggcgcattgactgtcctggctgatttcatgggtgcaattggttcaggaactggaatactgctggctgtgacaatcatataccaatacttcgaaaccttcgagaaggaaagggcaacggagcttggtttctttggtttttgattagtagctgtggaaccttgaaccgatagctgaattttcttgtaaggccctgtttggaagcaacccggttttttagaaaccagtttttatattttagctaggagaggccagcttcttggtttttaagaaactgagaatctaatttctataaacttagtcataaactagtatgtttggaaccacctcaatttctataaaccagtttcttaaaaactgggtgtttccaaacagggcctaagtcactgtagtgcttagccagttgtaacttaagagagttctgttaggttgccttgtggccacaatcatgtagcagaatctgtccaaagagcgtgctcatcccatccacaatcagtaatccgcactctacagtttgctcataggttaccctggcaactggatgttctgtgttcaatttcagttacttttgaactgtaaggtctgttattactagtttcccagaacttagatgctcacgtgcgcttt

SEQ ID NO: 260783 - DNA, 1840 bp, Zea mays
accctctctctcgtggttctcccgtgctctgtgtccctagcggcgacgactgggcgatcgccgccgccttaagccaggtgctcaggtctgccacttggcacttcgccggcgacgagcacctaacagagagatggctggtggttttcgagtactgcatcttgtgaggccatttctggctttcttgccagaagtacagagtgctgataggaaaataccattcagagagaaagtgatctacacggtcatttctctcttcatttttctggtctgcagccagctcccactctatggcattcattcaactactggcgctgaccctttctactggatgcgtgttattcttgcatcaaaccgtggtactgttatggaactgggtatcactccaattgtaacatctggaatggtgatgcaacttctagtgggatcaaagattattgaagttgacaacagtgtgagggaggatcgtgctctgctaaatggtgcgcagaagttgcttggtatccttattgccattggagaagccgtggcgtatgttctctctggaatgtatggcagtgtgagccaacttggaactgggaatgctatcctcattatacttcagcttttctttgctggtatcattgtcatctgtctagatgaactcctacagaaaggctatggtttgggatctggcatctctctgttcattgctacgaatatctgtgagaatatcatctggaaggcgtttagcccaacaaccatcaacagtgggcgtggtgctgaatttgaaggggcagtcattgcattgttccatctattgattactcgcacagataaagtccgtgctctacgcgaggctttctaccgtcagaatcttccaaatgtgaccaatttacttgctactgtattggtcttcctcatagttatctatttccaaggtttccgtgttgtacttccagtgaggtcaaagaatgcccgtggtcaacaaggctcatacccaatcaagctgttttatacatccaacatgcctatcattctgcactctgcactaattaccaacctctatttcatatcccagcttctctacaggaaatacagtggaaatttccttgttaatcttcttgggaaatggaaggaatctgagtactctggccattctgttccggttggtggtcttgcttactatgtgactgcgccatcaagcttggctgatgttctggcaaatccagtccatgcattgttctatgtggtctttatgctgtcagcctgtgctctcttctcaaagacatggattgaagtttctggttcatcagcgaaggacgttgctaagcagctgaaggagcaacaaatggtgatgccaggccatcgtgagtcaaacctgcaaagggaactgaacagatacatcccaaccgctgcagcatttggaggagtgtgcattggcgcgctaactgtcctagctgatttcatgggcgcaattggctcaggaactggcattctgctcgctgtcactatcatataccagtactttgagacattcgagaaggaaagggcaaccgagcttggtttctttggtttctaatcttcgtcgctggggtaaaagactgaatcttcctgcaagtgacagtaaatgcttggccggctgtttatgtttgtaattggagagcttatagtcagtttaggttgcgggctaatttacactgggaaatttgtagcaggttctgcatgcgtttttggggccagtatgggcattaagttgtgctcaattataaccacggtcatcatctcttgggattttccgttctcctgtattgactatagaattttggatcaattttgccgtcttgaactgaatacttattcc

SEQ ID NO: 260784 - DNA, 547 bp, Zea mays
cccacgcgtccgcccacgcgtccgcccacgcgtccgcccacgcgtccgcccacgcgtccgcggacgcgtccgcgcctcgccttggtgttcacgccgtcgctagcgcctgccgcggcgaagcttctgccctccccggcgccaggctcgggtcgtcgtcggccaggcagctgctacgcgtgaacacggtcacaccagtacggcagtaccacgcgacgtgaacggtgaactcgtgaagaacagagccgccactgaggaaaccctagcgacggcggcgtgctaccggtgacattgtccccctcggcccctccatccctgacgcagcggcgccagcctgcaggaagccagcccctattcgagacaaggtcgatctttgctgccttggcgagcttcagccgaatcaaggtcgagcatggcggcaggccagtaaatagagcaacacaaaacccttcaaattaatggagacctctgcagcaaccccgacccggccgccacaccaggcggccacttccccatcgccatcgccctcgtcgtcgctgaggctgtggag

SEQ ID NO: 260785 - DNA, 831 bp, Zea mays
  unsure (1)..(831): unsure at all n locations
ctccttggtgtccgtgttcacgccgtcgctagcgcctgccgcggcgaacttctgccctccccggcgccgggctcgggtcgtcgtcggccaggaagcctattcgagacaaggtcgatctttgctgccttggcgagcttcagccgaatcaaggtcgagcatggcggcaggccagtaaatagagcaacacaaaacccttcaaatcaatggagacctctgcagcaaccccgacccggccgccacaccaggcggccacttccccatcgccatcgccctcgtcgtcgctgaggctgtggaggccagcggcgcagcgcaacatgcgcaatcagtggtcccatctgagcgccgccaatgagcagtggctggccgccgttgctgactgccgtgcccacgcctccgcgctcgtcaacgtccacctctcctgcaggaacattgccggcgatggatttgggggtgctcaaggatatgccggggatccgcgataaggcgaactccaagttggcgcttagagaggagcaatacagcggcatgcttctgtcggcctacaaggagatgttttctgaccgccaagataatttgaatgattcaggggatggtggaggagccccagtattcaaatggttctccgtattagaatttgagagtcttgcccaggagcttgttcagatgtttgtttcagagcaaaagttgaagaggctgctactcttggaatttctctcgattgctttaaaggaaggtgtagaactccagacatcattaaattggggtgatgaactatatgatggtgaatcanataaacttcagagtatnggccttcagtcaggagatgcctac

SEQ ID NO: 260786 - DNA, 551 bp, Zea mays
tcgttctgtgagaccaaagaatgctcgtggccagcaaggctcatattcaattaagctgttctacacttcaaacatgcccatcatccttcactctgcgctgattaccaacctctattttatatcccagcttctctacaggaagtacagtggaaacttccttgttaaccttcttgggaagtggaaggagtctgaatactctggccattctattcctgttggtggtcttgcttactatgtaactgccccatcagggtgaaaagctagttccttcagtggggactggggaggccttctcgccatgatcatttttgttgtttttgttattcaataattaggtattcttttgactaacaatagcacattggaaaccacgcagtttggctgatgtccttgcaaatccattccatgcactgttttatgtggtcttcatgctgtcagcctgtgctctgttctcaaagacatggattgaagtattgggttcatcagcaaaggatgttgctaagcagctcaaggtacggacaaatatacacatctttttatgttaaatttta

SEQ ID NO: 260787 - DNA, 539 bp, Zea mays
catggatgacagagttgtgtggggttggctgtcaggaacatgccgacgatggatttgggggtgctcaaggatatgccggggatccgcgataaggcgaactccaagttggcgcttagagaggagcaatacagcggcatgcttctgtcggcctacaaggagatggtccgtcagctgtcctacttggttgaagcttcccattctatgcgccgtttttctaaagcggctccaaattgccccatcacacagttttctgaccgccaagataatttgaatgattcaggggatggtggaggagccccagtattcaaatggttctctgtattagaatttgagagtcttgcccaggagcttgttcagatgtttgtttcagagcaaaagttgaagaggctgctactcttggaatttctctcgattgctttaaaggaaggtgtagaactccagacatcattaaattggggtgatgaactatatgatggtgaatcaaataaacttcagagtattggccttcagtcaggagatgcctactcaccgcctgaaaa

SEQ ID NO: 260788 - DNA, 1123 bp, Zea mays
caagaataagatcgattactgccgcctccatggcatcgagatcgtccacaacctcgcgcaccttgacaacgagctcgccggatactgggccaaattgccgctgctccgccgcctcatgctctcccacccggaggtcgagtggatctggtggatggacagcgacgcgctcttcaccgacatgtcgttcgagctgcccctgtcacgcgtacgacggccacaacctcatcatccacggctaccaggacctcctcttcgagaagcactcctggattgcactcaacaccggcagcttcctcttcaggaattgccagtggtcgcttgacctcctggacgcgtgggcgcccatgggacccaaggggttcatccgcgatcaggcgggcaaggtactcacggcaaacctcaagggccggccagcatttgaggccgacgaccagtcggcactgatttacctcttgctctcgcaaaaggccaagtggatggacaaggtgttcattgagaattcctactacttgcatggcttctgggctgggttggtggataagtatgaggagatgatggagaatcaccacccaggcctcggcgacgagcggtggcctttcgtgactcactttgttgggtgcaagccatgtgggagctatggggattacccagtggagcgctgcctcaggagcatggagcgagcgtttaattttgccgacaaccaggtgcttcggctatatggtttctcacacaaggggctggaaagccccaagatcaagagattcagggatcagacaactagaccaattaatgatgtggagaacttagatatgaaggccaaaatatctacaatttcctgaaagttcagatgagagttggtggtttggcaattgcatacttgctttggctatcaacaaggtcagagcattttgtgatatgggggacatggttgttctagtttccactctcttgctctctctctttttctttttcgttcaccaatctttattgttatgtgacagctagagattgcaagctttgtttattatcgtggttgaacatgataaaagctcaaatctgatggaaaaaaaaaaaaaaaaaaaaaaaaaaaaaaaaaaaaaaaaaaaaaaaaaagggcggccgc

SEQ ID NO: 260789 - DNA, 531 bp, Zea mays
aaaccctctcctctcgagaagcagagcggcggagatccggagagaagccatcggcagccgggaagcccgtcgcgtgcctttcttcctcgacgtgccatgattaacggaatatttgagcactgggacctggagcgacagtgaagtgtgacccaggagagttctggtgccatgtttcacaggctattccattattcccaaaagcagatgatttccagtgatggggatgaatgtgagaggtcaaatgaagaagatgaagactccaaaggacctctgctcgaaagtgaagtagcattcatggactatgttagggacgttcgttattaggcaactgaattgtgggtttgcgtttactgctacaaacgggctctaaggcagcatcaccatgtccgatgcgtatttgcttattgcgggttgttggaaagttgctgttttttctgctcaacagaatgtgtagttgagacacaccctaaattattacatagctcttttgcagcgtgtattgataaaaaaaaaaaaaaaaaaagggcgaaa

SEQ ID NO: 260790 - DNA, 1680 bp, Zea mays
ctggattcttttaaagccacccaacccgtccgattaagtccgccgcccctctccctcagtaaacccctctcttcttcccgcggtctgctcgttcgatctgtgcagcagatctgaggtcccgggcgaccgtgaagcagcttcaatcgtcggcatggcgctcgtattgcatagtggggctggaaacaagaatgccttcaaagcacttattgctgcagaatacagtgggatcaaggttgagttgaccaaggattttgagatgggtgtctccaacaagacccctgagtttcttaagatgaacccccttgggaaggttcctgttctggagactcctgatggccctgtttttgagagtaatgctatcgcacgctatgttgctcgcttgaaggatgacaaccctctttttgggtcttcccgtattgaacaagcccacgttgagcaatggatggattttgccgcaacagaagttgatcctggtgttgcatggtacttgtatccaaggcttgggtacctcccttatgttagcacaactgaggaaacagctatttcttcattgaagaggtcgcttggtgctctgaacacacaccttgcttcaaacacataccttgttgggcatgctgttactctagctgacattgtaatgacatgcaacctctaccatggaattgcacggatcttgaccaagaccttcacgtctgatttccctcatgtcgagaggtatttctggaccatggttaaccagcctaacttcaagaaggtcattggtgaggtcaagcaggcagagtctgcacctcctattccgaaaaaggctgctccttctaaggagccaaaggcaaaggatgtcaagaaggaggctccaaaggaggcccccaagccaaaggtggttgaggcaccagcagaagaggaagcaccaaagccaaagccaaagaatcctcttgacttgctgccaccaagcaagatggtccttgatgactggaagaggctatactcaaacacaaagactaacttccgggaggttgccatcaaaggtttctgggacatgtacgacccagagggctactctttgtggttctgtgactacaagtacaatgatgagaacaccgtctcctttgtgaccctgaacaaggttggtggattcctgcagcggatggacctgtgccgcaagtacgcctttgggaagatgctcgtgataggctctgagccacccttcaagctgaagggcctttggctcttccgtggccaggatgttcccaagtttgtaatggacgaggtctatgacatggagctctacgagtggaccaaggtggacatctctgatgaggcccagaaggagcgtgtcaatgcgatgattgaggaccaggagccctttgagggcgaggccttgcttgacgcgaaatgcttcaagtgagtgtgcttgcctggagacagaactgtttagcccttgaatttgcctatggaagagtttgcccttttactagtgtcgatgttgatctggtataccttgctatgaactggttaaagtttgtgctggtttgggattttttgtgcatcttgtgatacctcaagtcttcatcatttaaatgtttagccgtaataatctggttataaaaaaaaaaaaaaaaaaaaaaaaaaaaaaaaaaaaaaaaaaaaaaaaaaaaaaaaaaaaaaaaaaaaaaaggggcg

SEQ ID NO: 260791 - DNA, 1658 bp, Zea mays
ctcgtcggcaacgctagggttttaggcgagtccgcctccgctctcgcccctgctgcgcgctactcgcccgatctcgcgctgccggcagcgatctgagatcgagcgaactaagctttttcatcgagatggtgcttgtactgcatgctaacagtggtaacaaaaatgcattcaaaacactaattgccgcagaatacagcggtgtcaaggttgagttggtgaaggactttcaaatgggtgtctccaacaaaactccagagttcctcaagatgaaccctattgggaagattcctgtcctggagactcctgatggtcctgtttttgagagcaatgcaattgcaagatatgttactcgcttgaaggctgataacccactttatggatcttcactgattgattatgcccatattgagcaatggattgactttgctgcaacagagattgatgcaaacattggaaagtggttgtacccacggatggggttttatccccatgctggtgtggcagaagaatcaactattgctgccttgaagagagcattgggttctctgagcacccatcttgcatcaaacacattccttgttgggcattcagtgacacttgcggatattgtgctgacatgcaatctttatatgggctttagccgtatcttgactaagagttttacctcagagttccctcatattgagaggtacttctggaccatggttaaccagccaaacttcaaaaaggtcattggtgacgtgaagcaggcagaagctgtgccacttgttccaaagaagattgctccggccaaagagcagaagcctaaggaagccaaaaaggaggccccgaagcctaaggaagctgagaaaccagcagaggaagaggaggctccaaagcctaagccaaagaatccccttgatttgcttcctccgagcaagttgattcttgacgattggaagaggctgtattctaacacgaaaaccaacttccgtgaggttgctattaaaggtttctgggatatgtacgacccagagggctactccctgtggttctgtgactacaagtacaatgatgagaacacagtgtcgtttgtgaccatgaacaaggttggtggcttcctgcagcggatggacctgtgccgcaaatacgcctttggcaagatgcttgtggtaggctctgagccccctttcaaggtcaaggggctctggctcttcaggggctcagaaattcccaagtttgtcatggacgaagtctatgacatggagctttatgagtggaccaaggttgacctctctgatgaggcacagaaggagcgggtcaatgccatgattgaggaccaggagccattcgagggcgaggccttgctggatgcaaaatgcttcaagtgaggaaagagtttttgggtccaattctaaaacagccatggatgatagcttttgatatggcgtgctggttatgattatgctgtggagttttggccatgttaacgggaggtcgtgctcgcgaaaccttctgcattatcgcatcggaatcgtttgtcatgtgcatcctagtgaatagatatattatgaaaatatatctcctgaaatttaatgatatttatttcattttaacacggcttaaaccttttatttaatatatatattaggcaaaaaaaaaaaaaaaaaaagggcggc

SEQ ID NO: 260792 - DNA, 511 bp, Zea mays
cctatgcttccgcccacgcgtccgtccacgcgtccgaggcgttttttctgattcaagttgaaccgtaggaccgctggaaaaggatatttccaatgtccttcgtcttctgcataaacattgtgctgggaaatgtcagcttgcgctacatcccagtctccttcatgcagacaatcaaatctttcactcctgcaaccacagttattctgcagtggctagtctggagcaagcatttcgagtggcgcatatgggcttcgctggtccctatagttggcggaatactcctgacttcggtgacagagcttagcttcaacattttcggtttctgtgctgccatggttggctgcctggctacgtctacaaagaccatcttggcagagtccctactccatggatacaagtttgacagcattaacacggtgtactacatggcaccctttgccaccatgatactggctctaccagcgatggtgcttgaaggaagaggtgtaatgaactggttctacacacatga

SEQ ID NO: 260793 - DNA, 959 bp, Zea mays
tgaaacttgtaattaatcagtaaggtctgttctatttcgtcaggcattaacacggtgtgctacatggcaccctatgccaccatgatactggctctaccagcgatggtgcttgaaggaggaggtgtaatgaactggttctacacacatgattccatcgttcctgcgctgactatcatcctaggttcgggggtgcttgcgttctgccttaacttctgcatcttctacgtcatccattcaacaacagcagtgacgttcaacgttgcaggcaaccttaaagtaagatcccgtaccctactccctccgctgctgctcgacattgattgacgtagcatcttaaaatgtaggtcgcggtggcagtgttagtgtacgtggactcgtggcttccggaatccaatctctgcaatgaatgcaatcgggtgtggaatcaccctggttggttgcactttctatggctacgtgaggcatctgatctcgcagcggcaggctgcagccccagggagtctaggaacagcgcaagcaaggaatcagacggagatgattccccttgttgtggacgagaagcaagaaaaggtttagcaatggtgctaggccttctcttcacttgttgaagagagaattatatatgtactcgtgcgtgcgtgtgtggtgagggtagtaaactggaacttcgtacaagcatcgtttcctccttccatttgtgacactaatcgccagcatcagaatgtgaaattgaattaagcgcacgccaggaggattgggtttggatgctggggcttaactcccggcaacttgccggcgtgggcacaggactcccaggccaccggcggccgactctccgtgctccactcgtctggaactgtgaggaagtgcttgctcatgaacttcctgaacctcttcttgtaatccctgggggaaatcaccgttggcgattcattcttgggcaccaccagagacgcttt

SEQ ID NO: 260794 - DNA, 733 bp, Zea mays
ctctctcacacacacattgtcgatgtcgcctgccttcccttccttccccagttgagttccccccgcggccccgcccccggtccccttccaccgacccaccatgtcggcgatgaggtgaggttgaggccaggtctactctccgcgaccgtcgccgacgccatcgccaacgagcagtttgctccatcttcgccatctcgcacacgaatacaatacactagttttggtagagatggaggacggcggcaaggcgccggccggcctgggcaccctgcgcgcggtgctcgccatcctccagtggtggggcttcaacgtcaccgtcatcatcatgaacaagtggatcttccagaaactggatttcaagttccctctcaccgtgtcctgcgtccacttcatctgctcttccattggagcttacattgcaatccatgtcctcaaggcgaaacccctgattcaagttgaaccggaggaccgctggaaaaggatatttccaatgtccttcgtcttctgcataaacattgtgctgggaaatgtcagcttgcgctacatcccagtctccttcatgcagacaatcaaatctttcactcctgcaaccacagttattctgcagtggctagtctggagcaagcatttcgagtggcgcatatgggcttcgctggtccctatagttggcggaatactcctgacttcggtgacagagcttagcttcaacattttcggtttctgtgctgccatg

SEQ ID NO: 260795 - DNA, 745 bp, Zea mays
  unsure (1)..(745): unsure at all n locations
taccggttccggaattcccgggtgctagccactcgtctcgtccacgtcgtccggcaagatggtccttngatgacctggaagaggctatactcaaacacagggactaacttccgggaggttgccatcaaaggtttctgggacatgtacgacccagagggctactctttgtggttctgtgactacaagtacaatgatgagaacaccgtctcctttgtgaccctgaacaaggttggtggattcctgcagcggatggacctgtgccgcaagtacgcctttgggaagatgctcgtgataggctctgagccccctttcaaggtcaaggggctctggctcttccgtggccccgaaatccccaagtttgtcatggatgaggtctatgacatggagctctatgagtggaccaaggtcgacctctctgatgaggcccagaaggagcgggtcaatgccatgatcgaggaccaggagccttttgagggcgaggccttgctagatgcaaaatgcttcaagtgagcctcatctctttggagtgctgctcaggaaagagttgtttaggtttttgggtctaattctaaaacagctatgaatgttagttttgatctggggttattttctgtgctgtgttgagacttttggtcatggtaagggaatcggggaaaggttttaggcgcgtgcaatcttatggattatcgcattggaatcgtgacatgtccatcctttacccttctcataaacgtcccatttatat

SEQ ID NO: 260796 - DNA, 460 bp, Zea mays
tgtgccgcaagtacgccttggcaagatgctcgtggtaggttctgagccacccttcaagttgaagggcctttggctcttccgtggccaggaggttcccaagtttgtaatggatgaggtctatgacatggagctctacgagtggaccaaggtggacatctctgatgaggcccagaaggagcgtgtcaatgccatgatcgaggaccaggaacccttcgagggcgaggccttgcttgacgcgaaatgcttcaagtgagtgtgctgtatccagagctgtttagccctctaattggatgtctatgttgatctggtatatcttgctatgaactggttaaagtttgtgctggtttgagaatttttgtttaccttgtcatcatttaagtgtttcgccgttacaattttggtccaaaaaaaaaaaaaaaaaaaaaaaaaaaaaaaaaaaaaaaaaaaaaaagggcggccg

SEQ ID NO: 260797 - DNA, 460 bp, Zea mays
cacgcgtccgtccgtggccaggaggttcccaagcttgtaatggatgaggtctatgacatggagctctacgagtggaccaaggtcgacatctctgatgaggcccagaaggagcgtgtcaatgccatgatcgaggaccaggaaccctttgagggcgaggccttgcttgacgcgaaatgcttcaagtgagtgtgctgtatccagagctgtttagccctctaattggatgtctatgttgatctggtatatcttgctatgaactggttaaagtttgtgctggtttgagaatttttgtttaccttgtcatcatttaagtgtttcgccgtaacaattttggtcatgtttttgaaagcctgtttgtattcgcgtcgtagttggggctatttatgcagactattcgatttaagtagattcaagtggcattattctctaaaaaaaaaaaaaaaaaaaaaaaaaaaaataa

SEQ ID NO: 260798 - DNA, 451 bp, Zea mays
ggtgctctgaacacacatcttgccttgaacacataccttgttggacattctgttactctagctgacattgtattgacatgcaacctctaccatggaattgcacggatcttgaccaaaagcttcacttctgatttccctcatgttgagaggtatttctggaccatggttaaccaacctaatttcaagaaggtcattggtgaggtcaagcaggcagagtctgtacctcctgttcttaaaaagggtgttcctcctaaggagtcaaaggcaaaggatgtgaagaaagaaactccaaaggaggcccccaagccaaaggtgcttccgcttccgctggtacctctcaaggcgaaacccctgattcaagttgaaccggaggaccgctggaaaaggatatttccaatgtccttcgtcttctgcataaacattgtgctgggaaatgtcagcttgcgctaca

SEQ ID NO: 260799 - DNA, 380 bp, Zea mays
gactatcatcctaggttcgggggtgcttgcgttctgccttaacttctccatcttgtacgtcatccattcaacaacagcagtgacgttcaacgttgcaggcaaccttaaagtcgcggtggcagtgttagtgtcgtggtcgatcttccggaatccaatctctgcaatgaatgcaatcgggtgtggaatcaccctggttggttgcactttctatggctacgtgaggcatctgatctcgcagcggcaggctgcagccccagggagtctaggaacagcgcaggcaaggaatcagacggagatgcttccccttgttgtggacgagaagcaagaaaaggtttagcaatggtgctaggccttctcttcacttggtgaagagagaatta

SEQ ID NO: 260800 - DNA, 394 bp, Zea mays
cgcggcgccgccagcccgccatcacataacttcggcttctatcccttcgtaaacccttctctcttcttcccgcggcctgctcgttcgatctgtcgcagcagacctgaggtcccgggcggccgggaaccagcggcaaccgtcggcatggcgctcgtattgcattcagtggggctggaaacaagaatgccttcaaggcacttattgctgcagaatacagtggggtcaaggttgagttgaccaaggactttgagatggggggcgcccaccaggcccccgcgagtcttcagcggacagcccccccgaaggttcctgttctggagactcctgatggccctgtttttgagagtaatgctatcgcacgctatgttgctcgcttgaaggatgacaaccctct

SEQ ID NO: 260801 - DNA, 322 bp, Zea mays
aaacacacgtccgcggacgcgtgggaagtggtcgagacgcgtggcgcggtctgctcgttcgatcatgtgcagcagatctgaggtcccgggcgttaccgtgaagcagcttcaatcgtcggcccatggcgctcgtattgcatagtggggctggaaacaagaatgccttcaaagcacttattgctgcagaatacagtgggatcaaggctgagttgaccaaggattttgagatgggtgtctccaacaagacccctgagtttcttaagatgaacccccttgggaaggttcctgttctggagactcctgatggccctgtttttgagag

SEQ ID NO: 260802 - DNA, 377 bp, Zea mays
  unsure (1)..(377): unsure at all n locations
gtcgccgagaggaggtcggacttgtcggaatggtcgtctaattggggagatttgatgtgttattggtgccgccggatctcgccgacatgtggaagcaatttatcggaaagctatcgtggaagtcaatgaaatccagctctggcagcggggggtcgccgccggcgccactatcgtcgccgcgggataatggagcctcaccgcgggagaatggggccacggggaagcctaacgtctcgcctcggtctcccgcggctggcgccggagccggagccggagccggagccgaagtgaggtccagggaggacgcctttgtccagaaagttaacatttgctgcgcggtgtacgacttctncgaccgaagcaaggactcgccggag

SEQ ID NO: 260803 - DNA, 3366 bp, Zea mays
ctcctcccgttgtcagccgccgtgcctgttctctctgcctttctaaaagtgcggcgactggttgggctgccgccgactgccggggccttcgccgacctcttcgccggcgaagaggtcccatcaggagaaggagtagatcgtcgacccagaaccctcgctgatggcgactttcgcgaaacctgagaacgcgctgaagagagccgaagaattaatccatgttggtcaaaagcagtcagccctgcaggctttacatgatctcattacctcgaaaaggtacaggtcatggcagaagcctctcgaaaagatcatgatgaagtatgtagaactctgtgttgacctgaggaaaggcagatttgcaaaagatggtcttattcagtataggattgtctgccagcaagtaaacgtgtcatccttggaggatgtcataaagcacttcatgcagctttcaaatgagaaagctgaacaagctaagagtcaggtcgaagcactggaagatgctctggatgttgaagatcttgaagcagacaagcgtcccgaggacctcatgctcagttttgtcagtggggagaaaggaaaggaccgatcagataaagaggttgtaactccatggtttaagttcctctgggagacatacaggactgttctagagatactgaggaacaattcaaagcttgaagcgttatatgctatgactgctcatagggcttttcaattctgtaaacagtataagagaacaactgaattccgtaggttgtgtgagatcatcagaaatcatcttgctaatctcaacaaatatcgcgatcaaagagatcgtcctgatctgactgcacctgaaagtttacaactgtatcttgatacacgtgttgagcagcttaaagttgctacagagctctgcctttggcaggaagccttccgatcggtggaagatatccatggtctgatgaccatggtgaagaaaatgccaaaaccatctatcctggtggtctattatgcaaagctgaccgagatcttctggatatctgatagccacctttatcatgcgtatgcgtggctcaagcttttcaacctgcagaagagctacaataaaaacttgtctcagaaggatctacagttaatagcatcttctgttttacttgctgcactatccgtgtcaccttatgacaaaaaatatggtgcatttgagacagagaatgagaaagagcgcaacatgcgtctgtccaaccttgttaacttttcgcttgataacaagcgtgaaaacagggaaatgccttcaagaccatatcttctatcagagttggcctccaaaggagtcctttcatgtgcttcccaagaagtgcgagatttgtacaaccttttggaacatgagtttctacctctggatcttgcatcaaaagtgcagccacttcttttgaagatttcaaagattggagggaagctttcatcagcttcttctgttcctgaggtcaagttatctcagtacatttcagcattggagaagctgacaacattgagagtgctacaacaggcctcttgtatttttaaatccataaagattgatatgctctcaagaatgattccattctttgacttctctgtcgtggagaagatttctgttgatgctgccaaacaaaattttgttgctataaaagttgaccatttatcgggagttgttcagtttggtactgtggacatagaatctgatggcttaagtgatcaccttagtgttcttgctgattcattaaataaagcaaggattcatatctgtccaccagtgaaaaagccatctaaactcggtgaaagtctcattagtttggctgcaatagtggagaatgaacataagaggctgcttgcaaggaagtccatcattgaaaaacgtaaagaagagcttgagcgtcaaatattggagaaggaaaaagaagaagaaaaaaagagaatgagcagtcaaaagaaaactgtggatgaggaaagggtgaggcttctcaatgaacagaggcagagggagcaggaccggattcgtagagagatagaggaaaaaaataaagcagaagcaaaaaagttgctagaagatttgaataaggcagggaaaaaacatgtcgttgttgaaggggagcttactaaggaggccatcatggaattggcacggaatgaacagttaaaggagcgccacgaaatggagaaaaaactgcagaagtttgcaaaaacaatggattatctggaaagggcaaaaaggcaggaagaggcaccactgattgagcaagcttttcaaaaacgtcttgaggaagagaagatccttcacgagcaagagcagcttcgggagattgaactcagcaagcaacaccatgccagcgacttgcaagagaaaaatagactttcacggatgttggagcacaagaatgctttacaggagagaatcatccaagaacgtgcagctgagtttggccgtctgaagaaagagagagatgaacggatgaatcggttgatatcttcaagaaagcatgaaagggagacagtaaggaagttgatgttttatctgaacctggaggaacagcggattgaaatgcttcgtgaggaagaggaagctagaaaacgtgaagcggaagagaggaggaagagagaggaggctgaaaggaaagctaaacttgatgccatcgctgaaaagcagcgattgagagagatagagctggaggagaaggcaaaggcaacaagggagaagctcttaaagggatccgaggctgtgcgcgctccagattctgcacctgttgcacagccacctcgagagtcagcagcagcgcctgcagctgctgcggcggcggctgctcctgctcctgctcctagtaaatatattcccaagtttaaacgcggtggtgatagcagcagcatcccttctggcagccgcgatgaagatcgctggggttcacgtggtccgctcaggcaagatggtcctcctgcacgactggatgcaccctcatcacggcaagatactgatcgctggcgtggatcaagatttccctctaactcaacgtcctcttcatcaacctggagccgttcacggaactgatcctatgctgcaggacttttttctagccatgtgtcgacctccgtgcacaatgtctaatcgtacctttccaggcactgcactacatgcatattattgctgttttgtacttttgtagtaatactctacaatccatgattattgtccctgtttgttagtaatgctgttttgtctgtgcatgaaacactctatacctacatatagccaagaattgcaggactatgtatgcatgtaaaactcttgcaagattatcaattttttatgagctataaaaaaaaaaaaaaacaaaaaaaaaaaaaaaagggcggccg

SEQ ID NO: 260804 - DNA, 645 bp, Zea mays
  unsure (1)..(645): unsure at all n locations
cccccgcctctcctctcctcccggtgccagccgccgtgcgcgctctcttcgccctacggaaggtgcggaggtgccgagatcttgctcgatctcttcggcggcgaagagcgccaaccagatccgccctgtttgttggtgtggcgccggagcaggagtaggtcgcggccacagaaccctaggagcgaccatggcgactttcgcgaagcctgagaacgcgctcaagagagccgaagaattaatccatgttgggcaaaagcaggcagcactgcaggctttacatgatctcattacctcaaaaaggtacaggtcatggcagaagcctctcgaaaagatcatgatgaagtatgtagaactctgtgttgacctgaggaaaggcagatttgcaaaagatggccttattcagtataggattgtctgccagcaagtaaacgtgtcatccttggaggatgtcataaagcacttcatgcagctttcaaatgagaaagctgaacaagctaagagtcaggtcgaagcactggaagatgctctggatgtcgaagatcttgaagcagacaagcgtcccgaggacctcatgctcagttttgtcatacatgtaggagagaggaaaggagacgaagcangaagaggaggaaggaagaagagggg

SEQ ID NO: 260805 - DNA, 368 bp, Zea mays
ttcagggcttgacctgcttgatgcagatttcaacaagaacagaagactttattgtggacactcttaagctacgcatatacattggtctctatttgcaagagcctttcaaagatccaacaaagagaaaggtaatgcatggtgcggatcgtgatataatgtggactccagcgggacttccacatctatgtgtgcaatctttttgacacaggacaggcttcaagggtcttacagatggagagaaacagccttgagcacctattgcttcatttttgtggagtaacagcaaagaaggagtatcaaaatgcagactggaggtcgagaccacttcctgatgaaatgatcaagtatgctagagaagatacacacta

SEQ ID NO: 260806 - DNA, 739 bp, Zea mays
cagcacactcgtctttttcctctacggccgccaccatcgcctcgcggccgcctgccgctccgctcgaaagtttttagtgaagattttttgaagccgagaagatggtgctgaagacggaactctgccgcttcagtggccagaagatctatcctgggaaaggcatccgatttatccgtgctgattctcaggttttcctttttgccaactcgaaatgcaagcgctacttccacaaccgcctgaagcctgcaaagcttacctggacagcaatgtacaggaagcagcacaagaaggatatccatgctgaagctgtcaagaagaggcgccgcgccaccaagaagccatactcgaggtccattgtgggtgcttccttggaagtgatccagaagaagagagctgagaagccagaggtccgcgatgctgctagagaagctgctcttcgtgagatcaaggagcgcatcaagaagaccaaggatgagaagaaggcgaagaaggctgaggtgaccaagtcccagaaggcgcagacgaagggtgcggtccagaagggttccaagggccccaagttgggtggcggcggtggcaagcgctgaaaaggaacctaagtgtattccagactcatcaaggccacttggagaccctgggtatttggattttttcaagtacttggacttaatttgcttttatttatggggatgacgcgtcgtatagattcccatttgttttaaccgaaagtgctgtgtct

SEQ ID NO: 260807 - DNA, 864 bp, Zea mays
cggacggtgggcggacgcgtgggcggacgcgtgccccgccgccaacgtcgcctggcggccgtctgcagctccgcgcctctgctcggaagttggtgaaggtttcttgaagctgagaagatggtgctgaagacagaactctgccgcttcagcggccagaagatttatcctgggaaaggcatccgatttatccgtgctgattctcaggttttcctttttgccaactcaaaatgcaagcgctacttccacaaccgcctgaagcctgcaaagcttacctggacagcaatgtacaggaagcagcacaagaaggatatccatgctgaggctgtcaagaagaggcgccgcgccaccaagaagccatactcgaggtccattgtgggtgcttccctagaggtgatccagaagaagagggctgagaagcccgaggtccgcgatgctgctagagaagctgctcttcgtgagatcaaggagcgcatcaagaagaccaaggatgagaagaaggcgaaaaaggctgaggtgaccaagtcccagaaggcacagacgaagggagcggtccagaagggttccaagggccccaagttgggtggtggcggtggcaagcgctgaaagaacctaagtgtcgttccttgaccttgcaattgctcctccatagcccaccttgttgcaccaacgccacttttgtagtacctcggttaattttgcattttctttcagagttgtttgtgggttttgagttccatctcaagagagttgagtttatttatctttatattgggtgaaatgttcatatgctttcctcagcttggatgatggtttgctttgtttccaaaaaaaaaaaaaaaaaaaaaaaaaaaaagggcggccgca

SEQ ID NO: 260808 - DNA, 820 bp, Zea mays
actctctgctccccccactccctcccgcgccgccgccggcgttgtcaccgccgcatcgccgctgccgacggctgcgctccgaagaattctgtgaggatttaagctgagaagatggtgctgaagacagagctttgccgttttagtggccagaagatatatccagggaagggcatgcgctttattcgtgctgattcacaggtcttcctttttgcaaactcaaaatgcaagcgctacttccacaaccgcctgaagcctgcaaagcttacctggacagccatgtacaggaagcagcacaagaaggatatccatgctgaagctgtcaagaagaggcgccgcgccaccaagaagccatactccaggtcaattgtgggtgcttccttggaagtaatccagaagaagagagctgagaagccagaggtccgcgatgctgctagagaagctgctcttcgtgagatcaaggagcgcatcaagaagaccaaggatgagaagaaagcgaagaaggcggaggtgagcaagtcccagaagacgcagacaaagggtgcggtccagaagggttccaagggccccaagttgggcggcggtggtgggaagcgctgaaagaacttagtgtcgtttctcgacattgcagtcgttccttagccaaagccactttcgtagaacctgtgttgaatttgcaagacttattcaagcgttgcttgtgcgtgctaaataccatggcaagagaacggatttatatttatgcctgaaaaaaaatgaccgttcatattcttaaaaaaaaaaaaaaagggccgcgctcgcgatctagaaccggacgcgtggg

SEQ ID NO: 260809 - DNA, 739 bp, Zea mays
aaccctctagactgagtcctattaaaatcctccggatttccttaatttggtttgtgtgaaatacacagttttgggggaaaattttttgaagctgaaaaaatggtgctgaaaacggaactcggccgcttcattggccacaagatctaccctgggaaaggcatccggtttattcgtgctgattctcaggttttcctttttgccaactctaaatgcaagcgctacttccacaaccgcctgaagcctgcaaagcttacctggacagcaatgtacaggaagcagcacatgacggacatccatgctgaagctgtcaagaagatgcgccgtgccaccatgaagccatactcgaggtccattgtgggtgcttccttggaagtgatccagaagaagagagctgagaagcctgaagtccgagatgctgctagagaagctgctcttcgtgagatcaaggagcgcatcaagaagaccaaggatgagaagaaggcgaagaaggctgaggtgtccaagtcccagaaggcgcagacgaagggtgctgttcagaagggttccaaaggccccaagttgggtggcggcggtggcaaacgctgaaaaggaactaagtgtcattccgagacctcatcaaagccacctttgtagtaccttggttaattttgtattttctttcagagttacttgtgactcttaattttgcatctttatatattgggagaaatgatcgccgttggttcatatgatttccccc

SEQ ID NO: 260810 - DNA, 444 bp, Zea mays
gcacgaactgattaagaaatcctttcgggccactaacacagtcgcctccttcctgcgccgccgccgtcgccgccgctaccaccgcctcgcgctcgcctgcggctccgcgtttccgcacggaagttggtgaaggtttcttgaggctgagaacatggtgctgaagacggaactttgccgtttcagcggccagaagatttatcctgggaaaggcattagatttatccgtgctgattctcaggtcttcctttttgccaactcgaaatgcaagcgcttcttcctcaaccgcctgaagcctgcaaagcttacctggacagctatgtacaggtagctgcacacaagaaggtatgtgatatttcccagtcaactttaagaatgtcatccattcacttctcttgtgattccatgcttttttggttatatattagctacagcttttcttgtatg

SEQ ID NO: 260811 - DNA, 545 bp, Zea mays
tcgtaggacgacacaacaccctaaagtgacgtcgtattagacgaccaaggatgagaagaaagcgaagaaggcggaggtgagcaagtcccagaagacgcagacaaagggtgcggtccagaagggttccaagggccccaagttgggcggcggtggtgggaagcgctgaaagaacttaaggcctgtttggaggctgacgtcgagcgccacaccccgcctaagatgcggcggccaatttggccgccacaactgcggcgcgtggcgtgtggcgcggcgtggtgtttgcggcagcgatccaaacacgcccttagtgtcgtttctcgacattgcagtcgttccttagccaaagccactttcgtagaacctgtgttgaatttgcaagacttattcaagcgttgcttgtgcgtgctaaataccatggcaagagaacggatttatatttatgcctggaaaaaatggccgttcctattcttaataacccatcttgggtaagggcttgttttgtttcaaaaaaaaaaaaaaaaaaagggcggccgctagcgatctag

SEQ ID NO: 260812 - DNA, 614 bp, Zea mays
  unsure (1)..(614): unsure at all n locations
acgcgtccgcccacgcgtgtgtggactanaaggctgaagctgttatttcccggcgccgcgctaccaagaagccatactcgaggtccattgtgggtgcttccttggaagtgatccagaagaagagagctgagaagcctgaagtccgtgatgctgctagagaagctgctcttcggtaatgtttacatcccaccatttatatgcctatgacagcggctaaccatctgtttggtgttgccaataaaatctgttttgctctcgagtgttactgtacaaacgtgcaatacatttgaactgccgctgaccttacagtgagatcaaggagcgcatcaagaagaccaaggatgagaagaaggcgaagaaggctgaggtgtccaagtcccagaaggcgcagacgaagggtgctgttcagaagggttccaaaggccccaagttgggtggcggcggtggcaaacgctgaaaaggaacgaagtgtcattccgagacctcatcaaagccacctttgtagtaccttggttaattttgtattttctttcagagttacttgtgactcttaattttgcatctttatatattgggagaaatgatcgaaaaaaaaaaaaaaacccacgcgtccg

SEQ ID NO: 260813 - DNA, 310 bp, Zea mays
gtacgtgtgaatgtgcatcaaacgaataaattatatttcgtttcggtaaggctacatgccatactttgcagatttgtggccatggtgtttggtattcattataaactgccatctttatttgtgtcgggatcataggaatgtggatagcaagaataatgacagggttgtcgtacctgaagggttaaaggatatcgaagattcaggttattttgtaacatatctacaccattatgttaagtatttacaccttgacattgcccgaagaccagttgatgttttggagaaacctgatgtcttcttagagcatatt

SEQ ID NO: 260814 - DNA, 695 bp, Zea mays
cccacgcgtccgtctgcacgctactctctcccttctcactaccccgcccgtcaaagcgagagcgccgtatcaccggtctatccatcccttcaccgctgcctcgatccgcgccgaaagatacctttcccccccttcctctcgcgccgccgttttggtgcgaccatggcggcggagggggaggccaagaacccgtccggcggtggcgaagggggtaacccccagcaccagcaggcagtgcaggctgcgccgccggagccgccaacggcacaggggggagcggcgcaggaggctggagcgcatgtgacggaacaagagccggagggggagaaggcgaatcgagatggggagggcggcgcgggggagaaggacgcacgcgcgtgcagagatctggttctggttgaggatccggaggtgctcgccgtcgaggatccggaggaagctgcagcaaccgcggcactccaggaagaaatgaaagcgctcgtggcatccgtccctgacggtgctggggcagcattcacagccatgcagcttcaggagctagagcagcagtcccgggtttatcagtacatggctgcccgagtacctgtgcctactcacctcgtcgtccccgtatggcagagtgtaaccggcgcatcctctgaaggcgcccacgagtaccctactttgctgggcttagcagcactctgcttggactt

SEQ ID NO: 260815 - DNA, 581 bp, Zea mays
agcacgcacctctccttctccctagtccctccccctacccccgcccgtcaaagcgagagcgccgtatcacctgtccctccgtccaccgccgtctcgatccgcgcccaaagatacctttcccccaccccttcctcgcgccgccgttttggtgcgaccatgacagcggagggggaggccaagaacccgtcggccggtggcggaggggataacccccagcaccagcaggctgcgccggcgccggcgccagcacagggggaagtggcgcaggaggctgcagtgcaggggacgggacaagagcaggagcgggacaaggcggatcgagaggtgcagggcggcgcgggggagatgggacgacggcgcgtgcagagatctggtcctggtcgaggatccggaggtcctcgccgtcgaggatccggaggaagctgcagcaaccgcagcactccaggaagaaatgaaagcgcttgtggcttcgatccctgatggtgctggagcagcattcacagtcatgcagcttcaggagctagagcagcagttcatggtgtaccagtacatggctgccctaatacctgtgcctactcacc

SEQ ID NO: 260816 - DNA, 987 bp, Zea mays
atagcattacgctgatatgactgaagatcaatttgactgccactcttattgcttgcggaagatgacacttcgagcatatgtttctatgctgaagtttcaggatcgtttgcatgctcatgaatacttccacaaggctgctgctggagctatcaggtgctatatgaaactacatgattctccaacaaaatcttctaaggaagagaatgatgagatatcaaaactgccacctgctcagaggaagaagttgaggcaaaagcagaagaaagcagaagcgcgtgctaaaagggaggctgaagagaaacaagaggatgaaacagcttcatctaacagttcaaaatctggcaagaaacaacatgcaagaccagttgatctggatccacatggtgaaaaattaatccagattgaagacccgcttgcagaagccacaaaatacttgaagcttctgcagaataactcgtcagactcattagagacccatatactttcatttgagctaagcatgagaaagcaaaaggttttacttgctttccaggcagttaaacagctcattaaattggatgaagataatccagacagtcaccgttgtttgataaagttcttccacaagataaacagtcttcctggacctgtgactgattctgagaagctaatttggaatgttctggaagctgaacgacctgacatgaggcaattacatggaaagtccctcgttgaagtaaacagaagtttccttgaaaaacacaatgcttccttgatgcaccgagcagctggtgctgaaatgatgtatctcttagagccaaataagaagatggaggcaattaatttaattgaagattcaacaaatattacatcatcagggcatagtttgcttggccctgtaaaaacatggcaaattcaagattgtattgatgttcataaattgctggagacagtctttggtgatcagaatgttgcaaataagtggaaagcacggtgcgcggaatattt

SEQ ID NO: 260817 - DNA, 1197 bp, Zea mays
gccggaatttcgtgtcgtcccacgcgattagtactcttccgcccacgcgcccgcagacggggagatgcttttttggaatgttctggaagctgcacgacctgacatgaggcaataacatggaaagtccctcgatgaagtaaacagaagtttccttgaaaaacacaatgcttccttgatgcaccgagcagctggtgctgaaatgatgtatctcttagagccaaataagaagatggaggcaattaatttaattgaagattcaacaaatattacatcatcagggcatagtttgcttggtcctgtaaaaacatggcaaattcaagattgtattgatgttcataaattgctggagacagtctttggtgatcagaatgttgcaaataggtggaaggcacggtgcgcggaatattttccgtactcgacgtactttgaaggcatcaagagcgctatttcaacctatgccattgaccatagtctcgagagcccaccagaaaatggaattgcttcaaaccctcatctgaaatcaaaagatggagaacaagggagtttgaatgggactctgcatattgtagatgatttgagcagcctaagcattcggtaatgcacgaacaagttgctgaatggtcacaactggaacacaacattttagaactggagccagtacccaattaaccaaagcgtacacgaacaaggggaacaaagtgctctggtgcaagtagttgtcggcacatcacatatgaagagtatattattgattgggagctgaggtgtccagtcaggttattgtcttggttccagcctgtacctttttgttgccattttgtagacagggaaagaaaaaaaatcttccgtctcaattacggtgaagttgtgacagcgtttgttgcctagcgatatcagggtgtgaccattcgtttgaaacagtgctccctctctttttggactacaaaattttggcacaaagcaggtgtacaaggttaaaccttttaaaactttcatctatttgtttcgggatagtttggtgtgtgggggggtttgtcttgatcctttgtgctactgcaacatttggtcctcgacattgtaaattagttaatcttaaacatagaaactgtattccagttgtcatgacaaataatgatcaatgttaaccctgggtgtttgatctaaaaaaaaaaaaaaaaaaaaagggcggccgctcgc

SEQ ID NO: 260818 - DNA, 333 bp, Zea mays
cccaccaccaatcaccgtcgctctcgaagccaaccggctccgtcggggcgtactctcagacctcgtcgccgccgctggggggtaccaggcggcgctgtacctcgaggcgctctcgcgcttcgtgttgtccatgcacgaccccgaggtgctccgccgcttcgaccagtgtcgcgcctcgcctcgtagctagttacccttcttgttctcaaggcatctttgggaagcatgagatgggctagcaagtggctgaggcagtgcgaaacagaacaaaaccaagacgacgagtggccagttgggcgattaggtggtggtgagcgactcgaaaacgtagca

SEQ ID NO: 260819 - DNA, 1050 bp, Zea mays
ggtccacgcacgcgtccgcttcgcatcgaagactgattggcgtgtcagagccatctctgccacaaacttgtatcttcgtgtaaatcacatttatgtcaattctgatgatataaaggagactggctacacttacattatgccaaagaacatattgaagaaattcatatgcatagcagatctgcggacacaaatcgctggattcttgtatgggctgagtccacaggacaatcctcaagtcaaagagattaggtgtatagccatccctccgcagcatggaacacaccagatggtgactctgccatcaaatcttcctgaacatgagttccttaatgatcttgaacccttgggatggatgcatacacagccaaatgaagctccacagctatcgccacaggacctgacatcacatgccaagattctggagaacaacaaacaatgggatggtgagaagtgcatcattctgacatgcagcttcaccccaggatcttgctcgttgactgcttacaagctgacaccaagtggttatgagtggggacgcagcaacaaggacaacggaagcaacccacatggatacctcccaactcattacgagaaggtccagatgcttctgagcgaccgcttccttggtttctacatgattccggataacaccccttggaacttcaacttcatgggagtgaagcacgacccacagatgaagtacaacatgaagctgggcatgccccgggacttctatcacgaggaccacaggccgacacacttccttgagttcagcaacatcgaggagggagaggtcgctgaaggtgatagggaggacacattcacgtagggcgctgggcgcctgttttagaaactgtatctcaaacgcactttagctctgttctgaatggcaatgtgtgaaagctgtaacctgactcgactggtgtcatctgttttttggcttaatcctgtatcataccttgttgtaagacagccctggagaggggtaaaaattgtacaagtgcacgccatggcaacagtaaagattttacttagtagctatgctattct

SEQ ID NO: 260820 - DNA, 1978 bp, Zea mays
cccacgcgtccgacaagaagctgacatatgcacaacgttctggtctcaatcaaatccccaatcgaagatttaccctgtggtggtcaccaaccatcaatcgtgcaaacgtgtatgttggtttccaggtccagctagatcttacggggatattcatgcatgggaaaatcccgacattgaagatttctctgatccagatcttccgtgcacatctgtggcagaagatccatgaaagtgttgttatggatctttgccaagttttagaccaggagttggatgcacttgagattgagactgtgcagaaggagacaatacatcccaggaagagttacaagatgaacagctcctgtgctgatatccttctctttgctgctcatagatggcagatgtccaaaccaagcttagtttctgagtcgaaggatgtatttgatcagaaagcaagtaacaagtattggattgatgtgcaactgcgttggggagactatgattcacatgacatagaacgttatacaagagccaagttcatggattacacaacagacaatatgtccatatacccatcgccaactggtgtgatgattggaatcgatctagcatataatttgcactctgcttttggtaactggtttcctggatcaaagccactacttcagcaggcaatgaacaagatcatgaagtcaaatcctgccctgtatgtcctgagggagagaataaggaagggtctgcagttgtactcttctgaacccactgaaccatacctgtcttcacagaactatggagagatattcagcaatcaaatcatatggttcgtggatgatacaaatgtgtatcgagtcactattcacaaaacatttgagggtaacttgaccaccaaaccaattaatggtgctattttcattttcaatccaagaacgggtcaactttttcttaaggttatccacacaagtgtatgggcggggcaaaagcgtcttgggcagctggccaagtggaaaaccgctgaggaggttgctgcattggttcgatctcttcctgtagaagagcagccaaagcaaattattgtgacaaggaagggcatgttggatcccttggaggtccatctacttgacttccctaacattgttattaagggcagcgagctgcagcttcctttccaggcttgcttgaagattgagaagtttggtgatcttatactgaaggcaactgaaccacagatggttctttataatatatatgatgattggttgaaaagtatatcatcatacacagcattctctcgcattgtgcttattctacgtgcacttcatgtgaataatgagaaggcaaagatgttgctcaaacctgacaaaacaattgttactgaaccacatcatatatggccatctctgaatgatgaacagtggttgaaggttgagtgtgcactaagggacctcattctttccgattatgcaaagaaaaacaatgttaatacttctgcactgacacaatctgaaatgcgagatatcattcttggcgctgaaattgctccaccatcacagcagaggcaacagattgctgaaattgagaaacagtcaagagagactactcagttaactgctgtaaccacaaggacgacgaatgtgcacggagatgaactcattatcacaaccacaagtccatatgagcaacaagcattcgcatcgaagactgattggcgtgtcagagccatctctgccacaaacttgtatctacgtgtaaatcacatttatgtcaattctgatgatataaaggaaactggctacacttacattatgccaaagaacatattgaagaaattcatatgcatagcagatctgcgtacacaaatcgctggattcttatatgggctgagtccacaggacaatcctcaagtcaaagagattaggtgtatagccatccctccgcagcatggaacacaccagatggtgactcttgcattaatcttcctgacatgagttcttaatga

SEQ ID NO: 260821 - DNA, 474 bp, Zea mays
tcgacccacgcgtgcggaagtgcatcattctgacatgcagcttcaccccaggatcttgctcgttgactgcatacaaggtgacgccaagcggttacgagtggggacgcagcaacaaggacaacggaagcaatccacatggataccttccaactcactacgagaaggtccagatgcttctgagcgaccgcttccttggattctacatggttccggataacgctccttggaacttcaacttcatgggagtgaagcacgacccacagatgaagtacaacatgaagctgggcatgccccgggacttctatcacgaggaccacaggccaacacacttcctcgagttcagcaacatcgaggagggtgaggccgctgaaggcgatagggaggacacattcacgtaggcgcctgttagaaactgctctgttttaacggcagtgtgtgtagctgtaacctgacttgacgggtgtcatctgttcg

SEQ ID NO: 260822 - DNA, 560 bp, Zea mays
  unsure (1)..(560): unsure at all n locations
attccggtcgacccacgcgttcgcgaccacatgctcagccttggattttcgaagtctctttcagaatggatcggcagtaacttgaagaaggacaacgatcatgtgacctgggctttcaatcttcaggctgccatagacatgtttagttcttatagggaaagggactattggtcggtgctggaacacccacctaaggatttggagattgcaatagtgcaagcagagcacagtgatcgatgggtccctgatgacgttcaaaggctaaaagcattagccgggagagagtccaagcctgatgtaggaaaagtgtcacttcacgttctccctaactctggccactgggttcatgtggacaatccgaaagggctactcgagatcatggtacctaactttctatcagcagttcaaaattgagtggtaccttcaatcagaaccttcatttattgtgacatattgagtttgacaacccatgggataacgtttcctctctcatattgntgcccaacaagaattctttgcttcttttctgaggaaatagtgcacccttctgttaataatcg

SEQ ID NO: 260823 - DNA, 1567 bp, Zea mays
cggacggcaaagcttgtggttatggttctcaagtactcagtggagataacaccaaataaagccagtatactttccaagatcctatctgttacagtgaggtccattcagaaagatgctgaggaaaagaaagcttcatttaatcctcgaccatacttccgattgtttataaattggctctatgatcttactactaccgatggtcaccatgatagttctaattttcaggttttgactgcatttgcaaatgcattccacatgctacaacccttgagagttcctgcctggagctttgcttggcttgagctggtgagtcacaggagcttcatgccaaaactgctgatgtgcaattcacagaaaggttggccattttttcagcgactgcttgttgctcttctcaagttcatggaaccatatctgagaaatgctgaactcccagaggcgatggaccttttatacaagggaactatgcgagttctgcttgtactactgcatgactttcctgaatttctttgtgattatcacttcagtttctgcgatgtgattccttcaagttgcattcaaatgcgcaatgtcattcttagtgcttttccacgtaacatgagactgccagacccttctacccctaatctaaagattgatttgttggctgaaatttcaatagcaccacgaatcatgtcggatgttgatggtgcccttaaatcaaagcagttgaagactgaggttgatgaatatctcaagaggccggaaggctcttcctttttaagtgacctgaaccaaaaattgctgctgcctcagaatgaagcaagtgttgctgggacacgctacaacgtgcctctgatcaattcacttgttttttatgttggcatccaagctgtgcaacaactgcaactgaacaaggctaatccgtctgcatcagtacagcagattaaccatatatctccgatggacattttccagattggaacagctaccgatatattcaggagtcttataacaagtttggatacagagggccgctaccttctgttgaatgcaatcgctaaccaactgcgctatccaaatagccatacacactactactccttcatcactctgtatctattttccgaggctacccaggaaattacccaggagcaaatcacaagggttcttctggagcgtctcatagtgaaccgcccccatccttgggggttacttattactttcattgaattgataaagaatccgcgttacaacttttggagccggtcttttacacactgtgcacctgagatagagaaactgttcgagtcggtggcaaggtcatgtggcgcaaaagttgtggacgaaggaatcagcgtgcaggatggcagccactaaagccatctgctttgttcaagtgttgtttttgtgctatttcttctctggcactggaaattttctgtgcttgtacagatcgtctgtatagtaaagctgttagtcacacgtgtcggtgcactgccaaaccttagcaggtgcctgggagaatgcttttgtttgtatgaattttagtcagcaatatggatggtttgcaatatcgctcgctgct

SEQ ID NO: 260824 - DNA, 704 bp, Zea mays
cttctgcgctatccaaatagccatacacactactactccttcatcattctgcatctatttgctgaggctacccaggagattatccaggagcaaataacaagggttcttctggagcgtctaatagtgaaccgcccccatccttgggggttacttattacttccattgaattgataaagaatccgcgttacaacttttggaaccggtcttttacacatagtgcacctgagattgagaaactgtttgagtcagtggctaggtcctgcggcgcaaaagctgtagatgaaggaatcagtgtgcaggatggcagtcactaataaagtaatttgctttgttagtgctgtttttgtgctatttcgcactgtaaattgtgtgctaccctatctgggcttgtacagaccacggaaatacatagtgcgtcacgtcagctatttgggtgcctgtgctttgcctggtagctaggaattactattgatcgccagatgctccaggtgcaaatttttccgtggactggttcacttatttgattcaactatgtcagaatggtagatggtgcgaacttcagcttagatagtgagttgagttgcaggcatgtttgtaaattatatttttgatgccattctgttttctcatagaacggaacatttcaagatcagtctatactcctacgccgttttagaatggcacaccaaatgggattgcaagt

SEQ ID NO: 260825 - DNA, 400 bp, Zea mays
cggacgcgtgggctggcgttggccacggagccccacaacgacgagctcatgaagaggactcccgtcggaaggaaaggcaactgcgatcagcaacaccatgtggaggaacatcatggggcaggccctctaccagttcctcgtcatctggtacctgcagtctagggggaaacggctcttctggatcgacgagggcgccgccgacgccgacctggtcctgaacacggtcatcttcaactgcttcgtgttctgccaggttttcaacgaggtgaactcgagggagatggagagggtgaacgtgttccgaggcatcctggacaacaacgtgttcgtcatggtcctcggcagcaccgtcgagttccagttcgtgatcgtgcagtgcctgcgtagcttcgccaacacg

SEQ ID NO: 260826 - DNA, 780 bp, Zea mays
cgaacaaagtacaggtccatttctagcctatcgagctcctcaggtagtaaaaccctacctacacctcgtgccgcctccgtcgccggctcgcctccccatcgacgcgcaggcagccctgcgtttgctccccgtcggtcgggaaaggggcgcgccggcgctgcctccagcaatcaactcgccgcatccaatcacggcgcctccctcctcgattggctcctcggtggttggttgttataggcaggcgggaaggatgttctcgctgagccagatcgagcacgacctcccgatgccgccgcacctgctgagccgcccccttcccgacgccatcaaggccgagctcgagaggctcttcttggacaaggtaatcacaaaacttgggctgtgcgtgtctgtctatgatatccgatccattgaaggcggttccatccatccaggggagggctgctcgacttataaagtttcatttcgtttgctgatgttcaagccttttaatggggagattcttgttgggaggattactggatatgacgataagggattgcaggtttcacttgaattcttcagtgacatttgcatacctggacacttgatgcagtttggcacagtaaggggaccagatggtaggtggatgctgaagactgaattaggcgatgagctttatctagatctagatgacgagataaggttcttggtttctagcacaaaatacccgcctataccaattgattaaaatgaggatgacccaccatttgctccaatgcagattgttggaagtattaa

SEQ ID NO: 260827 - DNA, 466 bp, Zea mays
gcccgtcatcgcgttcaccctagttctttctttcctggcagcgacaactgcgcacggcgccgccaccggacgtcagatctccgttgggtgtttgatggcgatgagcacctgtcaggtactctaaggccactttctctcattaaggtagtactgagttcattgcatgactatgacttctgaagatggagacattttggctcttctgtctgagccaagcctaaaggaagagcaacttgaggcttctgaatctgatgctatgttttctgcaattatgaaagccattgaatcaaataagaatgtagttgaagtttcacctgaggaagctgcctgggcagattcatgcttcgtgacatcttctgaactgtcatatgatgatctgcggatcgatgacgaatatgctgcttgatgctctcgaaaatccaacagaaagtcacaatgataactcagaaagtgcacataatgcaat

SEQ ID NO: 260828 - DNA, 867 bp, Zea mays
tctttcacacttcatataccactccctaggaggacccagcaacacacacagccgagctttgcttaggcaagatgaacaggaagccaggagactgggactgcagggcgtgccagcacctcaacttcagccgccgagacatatgccagcgctgcagcgagccacgtggagttgctgatcgtggcggcggaggaggaggaggcgactacgccagcttcggtggccgcggtggctcctccttcggcggcggctttggcgctgctggctccgacgtccgccctggtgactggtactgctcctgcggcgcgcacaacttcgccagccgctccagctgcttcaagtgctccgcctacaaggaggaggccgctgtgaacagtggcgctggcggctttgacggcgacatgtcacgctcacggggctacggcttcggcagcggtgctgctggtgctggtgctggcgctgcccgtactaccaaccgccccggttggaagtccggagactggatctgcaccagatccggatgcaacgagcacaacttcgccagcaggatggagtgcttcaggtgcaacgcaccgcgggactctggtagcgctgccatgacctacgaaaactacttgcactgaggtgtaggatcgagcaagttaaaaagtctgcagcgccgaagaaagcgacgacaagaggagtcctcatcacgtcgtaacgtaagagagagagaggagtgagagagagtagtggatttgcaaaaaaaaaaaaaagacggccgcgatcgctctgttactagcagctagttttgttcaaccacccctctgccgtctcttttttttattagatttggttggttctcatagccccttaataccatttgagacc

SEQ ID NO: 260829 - DNA, 1210 bp, Zea mays
aattcccgggtcgacgcacgcgtccggtgtttgtttgcagctgcagctggatgaaaatggcagccgaacgtcgcagccaaagcaatctcaagtgaatcaaaccgccagacttcgcagtcctcctccccactaccagagcatgcgcgttgccgcgacccgagccgccgccgccgctcaccctccgagcgccttcctgctcctcctgttactcctcggttgcgcgtccctcgcgatcggaggagcagccatggccggccacgtcctcggcggcgtgaaggagaacccagccgcggccaacagcgccgagtccgacgggctcggccgcttcgccgtcgatgagcacaacaggcgcgagaacgcgctgctggagttcgtgcgcgtggtggaggccaaggagcaggtggtggccggcacgctgcaccacctcacgctcgaggccgtcgaggccgggaggaagaagctctacgaggccaaggtctgggtcaagccatggctcgacttcaaggagctccaggaattcagccacaagggggacgccaccgccttcaccaacgccgacctcggcgccaagcaaggtggacatgagcctggttggcgtgaggttccagtagaggatcctgtggtcaaagatgctgcacaccatgctgtgaaatcgatccaagagaggtccaactccctgtttccctacgaacttctcgagatccttcgtgcccatgcacaggttgtggaagactttgcaaaatttgacattctgatgaaactgaagagaggcagcaaggaggagaagatcaaagccgaggtccataagagcctggaaggggcctttgtgctaaaccagcatcagccggcggagcatgatgagtcgagcagccagtgaactgacgtaactgtgtgagctgtagtagtaacgtacttcgtgttacgtagaagaataaggagaaaacgaccaatccggttttatctggatgtcatgtatggtcgacggtcgttgctggcttggcttccgaacgcagcaggcatactggtgctggaagacggtacctgctgtcgcacttgccgttataataggcattggaacttgtcgatttcgggagctgatctgtttgtaccgtattgtttatttataatatgatggatcgtatgttgataaaaaaaaaagaaaaaaaaaaaaaaaaaaaaaaaaaactacaaaaaacaaaaacaacacaaa

SEQ ID NO: 260830 - DNA, 498 bp, Zea mays
cccacgcgtccgcggacgcgtgggcggacacgtgggcggacgcgtccgcttgcggagacgagacgagacgaggcgacgcgagtcgcgaggagtcgaggaggatcggggctcaggcaagatgaacaggaagccaggagactgggactgcagggcgtgccagcacctcaacttcagccgccgagacatatgccagcgctgcagcgagccacgtggagttgctgatcgtggcggcgcggcggaggaggaggaggaggcgactacgccagcttcggtggccgcggtggctcctccttcggcggcggctttggcgctgctggctctgacgtccggcctggtgactggtactgctcctgcggcgcgcacaacttcgccagccgctccagctgcttcaagtgctccgcctacaaggaggaggccgctgtgaacagtggcgctggcggctttgacggcgacatgtcacgctcacggcgctacggcttctgcagcggtgctgctggt

SEQ ID NO: 260831 - DNA, 953 bp, Zea mays
cccacgcgtccgcccacgcgtccggctccatagcacttgttccagctagctaggagagagagctttgtttaggcggcggcaagatgaacaggaagccaggagactgggactgcagggcgtgccagcacctcaacttcagccgtcgggatgcatgccagcgctgcagtgaaccacgtggagttggtgatcgtagcggcggtggtggcgacttgggtgggcgtggtggttcctccttcggcggtggctttggtgctggctctgatgtccgccctggtgactggtactgctcctgcggcgcacacaacttcgccagccgctccaactgcttcaggtgctctgcctacaaggaggaggctgccggcgcctttgatagtgacatgtcacgctcacggggctacgccggcttcggcagcggcgctgccgcccgtaccaaccgccccggttggaagtctggagactggatctgcaccaggtccggttgcaacgagcacaacttcgctagcaggatggaatgtttcaggtgcaacgcgccacgggactccggtagcgctgccacgacgacctacgaaaactacttgcactgaggtgtaggtagagcaaagtttacagctatagcgcgcgtcgacgaagcaggagcagcagcagcagcatgaaatgaagaggagtcctcatcatcacatcataagggagcagcagtagatttaattgcaaaattaaagacacccgcgatgcatgccctatcactagttttgttccaccggtacccctaccgcgcgtttcttttaagatttggttccccatttatctggggacagtagaccccagatgagacctatgtttgctgtttcattttcagttacgttcgtctccgcatgcatgtttgcgcttggatctgatgtaaccccaaaacgcttgcttcccaagtactattaactagttctgttgccttcctc

SEQ ID NO: 260832 - DNA, 663 bp, Zea mays
gtgaagcgtacatgatcgcatgggcctaggcaaactgaagaacccagacgcggacaagagcgccgagtccgacgggctcggacgattcgacgtcgatgagcacaacaggcgcgagaacgcgctgctggagttcgtgcgcgtggtggaggccaaggagcaggtggtggccggcacgctgcaccacctcacgctcgaggccgtcgaggccgggaggaagaagctctacgaggccaaggtctgggtcaagccatggctcgacttcaaggagctccaggaattcagccacaagggggacgccaccgccttcaccaacgccgacctcggcgccaagcaaggtggacatgagcctggttggcgtgaggttccagtagaggatcctgtggtcaaagatgctgcacaccatgctgtgaaatcgatccaagagacgtccaacttcctgcttccctactaacttctgtagatgctttgatgtcatgcacggggactggtacagtttctgcaatgcacacaacttatgaagccgatccaactgattcaggtgctctagctacaaggaggaggctgtcggagcctttgatagtgacatgtcacgctcacgcggctacgccggcttcggcagcggagctgccgaccgtaccaaccgacccggttggaagtctggaa

SEQ ID NO: 260833 - DNA, 678 bp, Zea mays
cgcgacgcgatgaaggatgcgcgtccagatccagcggcctcacccagtcaccatcaccacccgcaccacacacgagcatacgcgacgactgacaaggcgaggggagcactcggcggcgatgggcggcggcggcgcacatggcggcaccacctacaagggctacaccatcccgcacaacaagcgctggcacaccgtcgccggcaagggcctctgcgccgtgatgtggttctgggttttctacagggctaagcaggatggtgctacgctcttgggtttgcgtcatccttgggatggacatgatgaccactctcatggtcatggacacgggcatgaggcatcatcatcgtcatcttcacattaagttccttactggctgcggacgatgcttggcatgttccaacagctaaagtttgagttaataaattctatcaccctgcatgggactcatgttgtttgcaactggtttagcacgaactggtcttgttactattgtgctaatgtatttgtttcgaagtttcagttaatatgctgtggaaaagaatctggtgcacgttgatgttctttatgatctgttgttcagtacattgctctgcttcgttgctacgttaagaatatatatatactaacatcagaaaaatgtatgtattttatgggcttaatagattcagaactgggaag

SEQ ID NO: 260834 - DNA, 430 bp, Zea mays
caggaggtacacgcgtcgactgacaaggcgaggggagcagtcggcgggcgatggtcggcggcggcgcacatggcggcaccacctacaaaggctacaccatcccacacaacaagcgctggcacaccgtcgccggcaagggcctgtgcgctgtgatgtggttctgggtcttctacagggctaagcaggatggtgctacgctcttgggtttgcgtcatccttgggatgggcatgatgaccactctcatggtcatggacatgggaatgaggcatcgtgacattaagttgcctactctcggcggacggtgatttgatgctttgcatgtcacaacaactaaagattgagttaataaattctaccacccttcatggtactcatggtgtatgtactcatgttgtatgcaactggtttagcacaaactggggtcgttac

SEQ ID NO: 260835 - DNA, 588 bp, Zea mays
  unsure (1)..(588): unsure at all n locations
ggaannnccgggtagacccacgcgtccgctgacgaggacgagcaagcggaggagagaggagaagaagaagaagaatgagaacaaagaggaggagaacggcggcgcacatggcggcaccacctacaaaggctacaccatcccgcacaacaagcgctggcacaccgtcgccggcaagggcctctgcgccgagatgaggttctgggttttctacagggctaagcaagatggagctacgctcttgggtttgcagtcatccttgggagggacatgatgaccactctcatggtcatggacacgggcatgaggcatcatcatcgtcatcttcacattaagttccttactggctgcggacgatgcttggcatgttccaacagctaaagtttgagttaataaattctatcaccctgcatgggactcatgttgtttgcaactggtttagcacgaactggtcttgttactattgtgctaatgtatttgtttcgaagtttcagttaatatgctgtggaaaagaatctggtgcacgttgatgttctttaaaaaaaaaaaaaaaaaaaaaaaagaaaaaaaaaggaaaaaaagaagggcggc

SEQ ID NO: 260836 - DNA, 856 bp, Zea mays
ggacggggcaccactgcctgtcgccctcaagaagccccaccatccccaccgccagcagatcgattcgcgaaagagacgaccgccgccgcatcggaccgtgcccgagccccccttctcctcgctgactcggctcccctcctccgccgtcgccggaggcgaagcaagtggggaccacagaagcattagctgggtgaacccactcaaagggggcagggaattgtgtgctagtttgaatggctgctacaaagcttcaggccctttggaaccacccggctggccccaaaaccattcatttctgggcgccaacattcaaatggggcatcagcattgccaacatagccgactttgctaaaccacctgaaaagatatcttaccctcagcaagttgctgttgcatgcactggactcatttggtcaaggtacagcttggttatcacaccgaaaaactggaaccttttcagtgttaacgttgcaatggcgggtacaggcctgtatcagctttcacggaagattaggcaagattacttgtctggtgagaaggatgctgctccacaactgcaagaatagataatgacaacacacaaagaataactgattgagaagtctgcggcctagggatcttactcttgatttttctgggcaggcaaggatatgtctcgatccaggacgggtcatgtttgttttcttgttcttctgaaatcatgagcaggttaatgtgaaaatctcctgccaaaaaaagaagcccatgaagtaatattttgtgcatttttgtgggaaaaaagtcatgccaggacatgattcgtatattgtccttttgttcactctatctcgtatttgtgaactctaaattgtttgcc

SEQ ID NO: 260837 - DNA, 953 bp, Zea mays
ccactgcccgatgccccctcctcgctgacttggctcctccgccgtggccggagggaagccagtgtaacccagcccaccctcctccccgtctcctctccctccccatgcgctgttttgttctgtattgggttgtgcgcgggggacaggacgcctcctgcgccgaccgttccgttcgtgtttgtgcctgcctgtgccttcggttgttcctctgagcgacggcgagtcggcgaccgaggtggggttccgagcgccccagcccgtggtggaattcgtttggtctggttattgcgggggaccacagacgcattagctgggtgaactctttcaaaaggggcaggtgcgctagtttgaatggctgctacaaagcttcaggccttttggaaccaccctgctggccccaaaaccattcatttctgggcgccaacattcaaatggggtatcagcattgccaacatagccgactttgcaaagccgcctgaaaagatatcttaccctcagcaagttgctgttgcatgcactggactcatttggtcaaggtacagcttggttatcacaccgagaaactggaaccttttcagtgttaacgttgcaatggcgggtacaggcctgtatcagctttcacggaagatcaggcaagattacttatccgatgagaaagatgctgcttcacaactggaagcatagataatgacaacaggcaaagaataacggattggaaagcctgcatcctaggagtctactcttgattttttttttctgggcaagcaaagaataacggatgggtcatgtttgttttcctgttattctgaaatcgtgagcaggctaatgtgaaaatcttccgccaaaaaagaaaaccaatgaagtgatgttttgagcattttttttgtgggaacaagtcatgaaagtacatggtttatctgtaaaacaaaaaaaaaatccttttataatatatt

SEQ ID NO: 260838 - DNA, 671 bp, Zea mays
agactagttcttagatcgcggaccccagcggatcgatcattcgatccccaccactgcccgaggccccctcctcgctgacttggctcctccgccgtggccggagcgaaaagtggggaccacagaagcattagctgggtgaactctttcaaaaggggcaggtgcgctagtttgaatggctgctacaaagcttcaggccttttggaaccaccctgctggccccaaaaccattcatttctgggcgccaacattcaaatggggtatcagcattgccaacatagccgactttgctaaaccacctgaaaagatatcttaccctcagcaagttgctgttgcatgcactggactcatttggtcaaggtacagcttggttatcacaccgagaaactggaaccttttcagtgttaacgttgcaatggcgggtacaggcctgtatcagctttcacggaagatcaggcaagattacttatccgatgagaaagatgctgcttaacacctggaggcttaattaatgacaacaggcaaagattaccggatgggaaagcctgcatcctaggagtctactctggatttttttttcctggccagccaaggattaccgattggtcaaggttggtttcccggtaatcctaaattcggaaccagcctaattggaaaatcttccgccaaaaagg

SEQ ID NO: 260839 - DNA, 1824 bp, Zea mays
acttctctttctctcccagccgccagccgccccccgcgccgcgtgccctagagccgccgccgcagccaaaaaaaaaacccctaaacccccaatccatggcgtcgagcagcactgaccttgccgacgacggcttcgcggcgccgcgacttttctcgcagggtgtatcctacacatacgacgacgttatcttcctcccgggctacatcggcttccccgccgacgccgtcgacctctccacccgcctctcccgccgcataccgctatccatcccctgcgtcgcgtctccgatggacactgtctccgaggccgctatggccgcggccatggcatcactcggcgccgccgccgtcgtgcactgcaacaccgatccccacgcccaggccgccatcgtccgcgctgccaagtcccgccgccttcccttcgtttcctccgtgcccttcttctccccgtcctccgccccgacgctcaacgatttcgctggcagcgagtacgccctcgtcaccgagcgcggagattcgctctccaggctcgtcggcgtcgctgtcgcggccgatgctgcctcccgcgaggttcccgtctctgtctcggagtacatgcgaccgacgccgcgctcagcctccgccgccttcgactttgaggaagcagcaaccttccttgccgatgagggtctggattacgcccctctcgtatcagatgatggtgaggttgttgatctaatcaccgccaaggacgtggagcgcatccggagctatcccaagctgggcaagccgtctcttggagccaacgggaagtttgtagttgcggcttccattgggactcgtgaagatgacaagggaagactggagcaactagttaaggcgggggcaaatgctatcgtgattgatagttcacaggggaactccatataccagctcgatatgataaagtttgcgaagaagatgtatccggaggtggatttgatcggtggtaatgtggtgacaattgcacaggcccagaatttgattcaagctggtgtggatggattgcgtgttggaatgggatcgggctcaatttgtaccacccaagaggtttgtgctgttggaagaggacaggcaacagcagtgtataaggtttcatcttatgccaaggatcacaatgtaccggttattgctgatggtggaatttcaaactctgggcatattgtgaaagctctgtcgctgggggcatccactgttatgatgggcagctttttagctggtagtcatgaagctcctggtacttatgagtataaggacggccgccgagtcaaaaaatacagaggcatgggctctcttgaagccatgacaaaagggagtgatgcaaggtaccttggtgatacactcaagctcaaagtcgcgcagggcgttgttggagcagtagctgacaaaggttctgtactgaggtttattccttacacaatgcaagcagttaagcaaggattacaagatcttggtgcagattctctccagtcagctcatgatcttttgcggtcagagacactcagattagaggtgagaaccggtgctgcccaggctgaaggaggtatccatggactggtttcatacgagaagaaggcattctaggtccataactaaacaaagaagtattggaacgatagtggttagctgcatgatatggaagggggcgatgctcatttatcctacctggcaaaagctcagcagcttgtcagcaaagcttgtcgagttgggcagcaagtgtaccatctgcttggcgtcatataataataaacctctggcatcggaactgttgtataagctcacagcttgtcatctaaacatttttccc

SEQ ID NO: 260840 - DNA, 1612 bp, Zea mays
tactgttcttgctacttctagatagaggaacaagagagagaaggccaccgacatcgcctcttaacccgacaagccccattgcccaggagaaccccgtgccggggagcgagccgcgcgcattccccgtcccgtgccaccggaccaggggaaggaggacacacatgtcgtcgtctctctctccagcggcggcagccgcgcccctggatctggacggcaactccgtcgcgcccctcaccatctgcatgattggcgccggcggcttcatcggctcccacctctgcgagaagctcatggccgagacgcgccatgtcgtcctcgccgtcgacgtatactgcgataagatccgccacctcgtcgaccccgcgccgccgcacctcgcggggcgcatctccttccaccgcctcaacatcaagaatgactccaggctcgagggcctcatcaagatggccgatctgaccatcaacctggcggctatctgcacgccggcggactacaacacgcgccccctcgacaccatctacagcaacttcatcgatgcactcccagtggtcaagtactgctccgagaacagcaagcgtctcatccacttctccacgtgcgaggtctatggcaagaccatcggcagcttcctccccaaagaccacccgctccgcaaggaacctgaattttatgttctgaaagaagatgagtcaccctgtatttttggtccaatcgtgaaacaacgatggtcctatgcttgcgcgaagcaacttattgagaggcttgtatttgctgaaggtgcagaaaatggccttgatttcacaatcgtgagacctttcaattggattggaccaaggatggacttcattcctggtgttgatggtcctagtgaaggtgtgcctcgggttttggcttgcttcagtaacaatctgctccggagagagcccttgaagcttgttgatgggggtcagtctcagagaacctttgtctacatcaaggatgccatcgaagctgtagtgctgatgattgaaaatcctgctcgagccaatggccacatcttcaatgttgggaatccgaacaatgaagttaccgttagggagttggcccaaatgatgacagaggtctacgcaaatgtctcaggagaggcaccgctggatgagcctatgattgacgtgagttcgagtcagttctacggtgaaggatacgatgacagtgataagagaattcctgacatgactataatcaacaagcagctaggttggaacccaaagacacctctcaaggatctgctggagacaacattgacgtaccagcacaagacatacaaagaagctgtgaagaggcaaatgtcgcaggcttcagcaacaagttaagttggcgctggctggggacggctcctcgtttagagccctagtcgcagcagctgtttcgcaagtcagaatacatatacgccggtaatcgttctgtttgaggccctagacgcgcccatgttttgtctgctaccaagggatgttatcctattgtgatataactactacctgtgtttggttgctcctagttttttttcttgcaattatatgtatttatattgaaaaactatatattatttagaaaggaggaaaaaaaaggagaa

SEQ ID NO: 260841 - DNA, 718 bp, Zea mays
aatggttttgcagaatctgctccggagagagcccttgaagcttgttgatgggggtcagtctcagagaaccttggtctacttcaaggatgccttcgaacctgtagggctgatgattgtatgttgctgcgtttatctctggctcctctgtttttatgcactaatccaatgaggctgaactcttgttgtcaattgcaaaaggaaaatcctgctcgagccaacggccacatcttcaatgttgggaatccgaacaatgaagttaccgttagggagttggcccaaatgatgacagaggtatgccatatattgttgaccctgactggtgtacttgttacttgtttctattgtaagccatctattgtgatcttgtcacgaggttctagtattttcgcaacggacaaaagagttggagagtactacctagattcgaaaggtcttgatgtttgccaaattgatggtagtagtgttaaatcggaatacaggaggaggcaagtcaaatgcagttgtttgtgacagtatgttactattttactttacaatatcttcatgagaaaaagatgaaccctgtttggctgtatactttaggcttttaatgaatgctcatattgttactttcatacatgtttgcgtgaatgggaatttggcatgtgatcggataacatgtactcagttgcatcttaactgcaaattgtttaaggcacattttagattgcaagttctg

SEQ ID NO: 260842 - DNA, 381 bp, Zea mays
gtgacgatcattatcttaattatttatgttccatgttcaaaatgctcttgcgggggggaatctgctccggagagagcccttgaagcttgttgctgggggtcagtctcagagaacctttgtctacatcaaggatgccatcgaagctgtagtgctgatgattgaaaatcctgctcgagccaacggccacatcttcaatgttgggaatccgaacaatgaagttaccgctagggagttggcccaaatgatgacagaggcatgccatatattgttgaccctgactggtgtacttgttacttgtttctattgtaagtcatctattgtgatcttgtcacgaggttctagtcttttcgctacggacaaaagagtttgagagtactacct

SEQ ID NO: 260843 - DNA, 588 bp, Zea mays
gagagagggagcacccttccgaagccacgccaccgacatcgcctcgtgacccgacgcacgggatagaatcccattccccccgaacactgcgccggggacccagccagctagctacatccactgatccacgcgcattccccgtaccaccgccaccgcgccgcgtcacggaaggaggaggatgtcgtcgtctccctcgccggcggccacccgcctggatctggatggcaaccccatcgcgcccctcaccatctgcatgatcggcgccggcggcttcatcggctcccacctctgcgagaagctaatggccgagacgcaccacaccgtcctcgctgttgacgtctactgcgacaagatccgccacctcgtcgaccccgcgccgccgcacctcgccgggcgcatctcattccaccgccttaacataaaaaacgactccaggctagaggggctcatcaagatggccgatctgaccataaacctggccgcgatctgcacgccggccgactacaacactcgcccacttgacaccatctacagcaacttcatcgacgcactcccaggggtcaagtactgctccgagaacagcaagcg

SEQ ID NO: 260844 - DNA, 637 bp, Zea mays
  unsure (1)..(637): unsure at all n locations
tttcccaaccctcctcgtatcctgaggggctgttatttaaaaaggcggctctacccaatggtcacgggttcaattttggnaatcctgacaatgaggttacggttagggagttggcccaaatgatgacagatgtctatgcaaacgtctcaggataggcgccgcttgatgagcctatgatcgacgtgagttcgagtcagttctacggtgaaggatacatgacagtgataagagaattcctgacatgactataatcaacaagcagctaggttggaacccatagacacctttcaaggatctgctgatgacaacattgacgtaccagcacatgacatacaaagaagctgtgaaaaggcaaatgtcgcaggcttcagcgtcgacttagatagcgtgcccctggctctcgtctagagcctagtcgcagctgttaagttgtttcggaagcgcaggtcacacatacgctagtgatctttttttttgaggccctagatgtccgtgttgttagataaccaagggatgctgtatcagtatgatatatttgtggcagagttgatgtatccccccgttcgccgtactagttgggttgattgccgagagctgttatatattgctgtttgagtgtagaactagttgctcagtt

SEQ ID NO: 260845 - DNA, 2104 bp, Zea mays
acggatttataagagtctgcctgggaaggcgtgcaagtttgccgcggagaacctggcttcccccggttccaccacgaaagatctgttccatgctgtccggatcagtggcgcgcttggatgcgctgttgatgccagcgtgtacgacggtgttgtggcgaggctcaaggcagtgagtcaggatactaattccctgttggaattatactatcctgtgggagggttgcttggcatcaaggaacaaggccataatgttgttctgtctgatgcagaaggtacattccatgccactaaggcacttagccaaagtgacgggagatggcgttatgacactgacagtgctgagtctagcacatttgctgctggtattgcactagaagcattagcaggtattgtttcactggcagatgcagcggttgacccatccatgatgggagtggttaaaaatgacgtcgtgaagctgtttgacaccatcaagagctacaatgatgggaccttctactttgatgaaaagcatgttgatgctactgaatacaagggccctataatcacatctgcttcagtggtgcggggtgtcacctcttttgcagctgttgtttctggaaaattgaatatccctgccgagaaaatacttggcctggcaaaattcttccttggtattgggctcccaggtagcgcaaaggattgctttaatcagattgagtctttgtcattcttggagaacaatagggtcttcgttccgttgatactatcacttccttccaaagtattctcattgactgcgaaagatcagctcaaggttgaagttacctcagtgtttggatctgctgcaccttcactcaaagtgaatcttgtgcaagtgttgggatctgactctaaagtcatcaccaatgggaacagggagcttcaatatgaccttgacaaaaatgtccattacttggacattgctccattgaaaattgatgttgggaaatactcgatagtttttgagatttcacttcaggaaccagagcaggagactgtttatgctactggagggagaaacactgaaagtgtaattgtcacaggactgatcaaagttgacaaggcagaaataggaatctctgacaatgatgctggggccgtggagtctgtccaaaagttagatcttctgaaagatacaaaagtgtctctttctgcaaaccatctgcagaaactgtgtttatcttttcaactaaccacaccgcttgggcacacatttaaacctcaccaggtgttcttgaaattgaggcatgagagtaaggttgaacacttattcgtggtacctggctctgcaaggcagttcaaaattgttcttgacttcctaggtttggtggagaaattttactacctttctggaagatatgaccttgagcttaccgttggtgatgctgtaatggaaaattcatttctacgacctcttggccatttggagttggacctgccagatgccccagaaaaagccccacgtcctcctgcacaagctgttgacccattctcaaaatttgggccaaaggcagagatatcacatatattccgcgcaccagagaagaggccacccaaggagctctcgctagcgttcacgggtctcacgcttctgccgtttattggattcttgatagggctcgttcgtcttggagtgaacttgaagaacttcccgtccttgccaggaccggccgcatttgcctcacttttccatgctgggataggagcagtcctgatgctctacgttctcttctggatcaagttggaccttttcacaactctcaagtacctcggcttcctcggcatcttccttgtgtttgtgggccatagggctctatcctacctttcctcggtgtcgacaaaacagaagacggcatgagtggacagagttttttccgaccatccattttttgagggggggccattccaggccactgggtgtctttgcttggtactctgaccgcaccctagtttttctttagctaacatgcattttgagggaggactcggtttatttcagttgtctttgacgaatactgatactaggacaagtaacaggacctcacatcacagtttctgaatagaatggatgtttaatcatagc

SEQ ID NO: 260846 - DNA, 503 bp, Zea mays
  unsure (1)..(503): unsure at all n locations
cccacgcgtccgcggacgcgtgggcggacgcttttgcctcacttttccatgctgggataggagcagtcctgatgctctacgttctcttctggatcaagttggaccttttcacaactctcaagtacctcggcttcctcggcatcttccttgtgtttgtgggccatagggctctatcctacctttcctcggtgtcgacaaaacagaagacggcatgagtggacagagttttttccgaccatccatttcttgagggggggccattgcaggcccttgggtgtcttatgagggagggctcggtttatttcagttggctttgcagaatactgataactagaaaaagtagtaggacctcaccttcgtgtattatgatgatgcacatacaattttctgagtagaatggatgttgaatcatagaactaatgaataatatgaacactcgccttcgccccaagtgctagtttgggaacccaaaaaaaaaaaaaaaaaaaaaaaaaaagaanaaa

SEQ ID NO: 260847 - DNA, 319 bp, Zea mays
ttcctcggcatcttcctcgtgtttgtgggccataggaccctgtcctacctttcctcggggtcagcaaaacaaaagccggcatgagtggacagtgcaagcagagctttcccgatcatcaattcgttttttgaggtggccattccaggcccctgggggtctttgcttggtactctgaccgccccccagtttttctttagctaacatgcattttgagggagggctcggtttatttcagttggctttgacgcattctgatactagggcaagtaacagggcctcccatcacagtttctgaatagaatggatgtttcatcatagc

SEQ ID NO: 260848 - DNA, 1058 bp, Zea mays
aagagtgccagcgtctcacccctgaggccgcgcagagccactgcttgcgtctctgtctctctgtctgctcgtttttctccttctgcgactcgtaggagggtgaggtcttgcttgcctcgcggaatggcggcggccggggcatggctggcccgtgcgacggcgacggcggtgctgggtttcgtcctggcggtggcgtcagctgaggcggcatcgggggacgtggagatggtgttcctcaaggccgcggtggccaaaggcgcagtgtgcttggacggcagcccaccggtgtaccatttctctcccggctccggttctggcgccaataactgggtcgtccacatggagggaggagggtggtgcaggaatcctgatgagtgtgcggtccgcaagggcaacttcaggggctcctccaaattcatgaagccactctcgttttcagggatattaggcggcaaccaaaaatccaatcctgatttctacaactggaatagagtaaagatcagatactgtgatggttcatcatttactggtgacgttgaggctgtggacactgtgaaagatctccgttacagagggttcagagtctggcgtgccgtcatcgatgatctacttactgtgaggggaatgagcaaggcgcaaaatgctcttctttctggatgctcagccggaggtctagcagcaatactacactgtgacagattccatgatctgtttccagcgaaaacaaaggtcaagtgtttttctgatgctggatattttttcgatgggaaggatatctccgggaacttttacgctaggtcaatctataagagcgttgtgaatctacatggatcagccaaaaatttaccagcttcatgtacctcaaagccaaagcaatcacctgagctgtgtatgttcccacagtatgttgtcccgacaatgcgcacaccattgttcatacttaatgcagcctacgattcgtggcaggtcaagaacgtcctagcacctagtccagctgatccgaagaagacttgggcccaatgcaagcttgatatccagagctgctccggcagccaact

SEQ ID NO: 260849 - DNA, 822 bp, Zea mays
ctccgacttctaatgggccacaggcctcaggattgggaacccggattcggaaaacgttggggagtccagggtggggccatggattctccggaccaaggccccaaggtggcacgagcagctgcagtgctggtgcctcaatttcaggggcagggtgacagtcgcatctgtgaagaacttccagctcgttgctgccacgcagcccgctgctggagcaccaaccccatcacaggctaccccagtgccgcccgagcacgagaaggtgatcctgcaatttgggaaggtggctaaggacatgttcaccatggactaccgttacccactgtcagccttccaggccttcgcgatctgcctgagcagcttcgacaccaagctggcctgcgaatgaagccaccagtcatggctcaaagtcaaggacgatctgtctgtttcacgaagacggtggccccaaattttgctgggccaccattctgttgtatgttgttgatgccttcttaacttacctaggaagctgcgtttagacattttgcacctgatctacagctgctgctgtgtttctgtcctgatcgcattgttttccatagctttgctctgtggagcggcaacttgatctgccctgcccttaactagccggcaggtttattaatttggttttccatactatggttgtattaactgagaagagactccgacactttcgttgtgcctacctaagttctgtctgcctttgccctctgggatatgcaaatgtgcatcttgtaaaatttctgaattgcttttgtggcaagtcatagtaataaaagaactagcttccattcgattgcc

SEQ ID NO: 260850 - DNA, 1014 bp, Zea mays
gcttcgagatgtgattgagaggttggaggccagtgaagccacatggcctaacaggaagagtgtagtctcttgtgcagctgtttgtcggacctggagagaaatctgcaaagagatcgttaagaatccagagttctctggaaaaatcacttttcctgtgtccttaaagcagcctgggcctcgagatgtaaccatccagtgcttcatcaaaagggataaatctactcaaacctactacttgtatctgtgccttagcacagctgtgcttgttgaaagtggcaagttcctcctatgtgcgaaacggacctcccgcccaacctgtacagaatatacaatatttatgaattctgaaaatttatctaggtcaagcaaaatgtacattggaaagctgaggtcgaatctcctcggcacaaagtttgcaatatatgatacccagcccccatgcaatgcagcagaacccgggaaaacaagccgtcggttctactcccggaaggtgtcgccaaaggtctcctccagcacctacaacatagcgcaggtttcatatgagctgaatgtcttgggtactcggggccctaggcggatgaactgtgttatgcactccatccctacctcgtgccttgaggctggtggcactgttcccagccagctggacagcatccttgctcgctctactgatgagtcatttggcagcatttccttctccaagtcatctgttgtggaccggtctatgcgtttcagcagctcaagattctccgacatctcaatgagcagcagccgcaggattggagacacggcatcgggagacaatgatgagtgcaaggagaggccattgattctccggaacaaggccccaaggtggcacgagcagctgcagtgctggtgcctcaatttcaggggcagggtgacagtcgcatctgtgaagaacttccagctcgttgctgccacgcagcccgctgctggagcaccaaccccatcacaggctaccccagtgccgccgcccgagcacgagaaggtgat

SEQ ID NO: 260851 - DNA, 438 bp, Zea mays
ttcatacctactacttgtatctgtgccttagcacagctgtgcttgttgaaagtggcaagttcctcctatgtgcgaaacggacctcccgcccaacctgtacagaatatacaatatttatgaattctgaaaatttatctaggtcaagcaaaatgtacattggaaagctgaggtactaactcatgcattggccattattttaggaattacataattctctagtatttgtgtatcactaacaaaggcctggtgcagtggtgagaactatctcactgagtcaccaggtcgtgagttcgaagcaacctcttcgcatttgcggggagagggcttgccttggtttattccttccccagactccactcatgtgggagcttccggcactgggtctgcccctttttatgtatcactaatagatctatggcattgaacatctataggtcg

SEQ ID NO: 260852 - DNA, 465 bp, Zea mays
agaagaccacacagacttctagatttattctcaaagcttgcaagaagagctgatgcagaggatccaatagaaaaggctcttcttggtcttccaacggatggccttcgcgtgcttcttgaatacgtccgtgaatggaatacgaagcccaagttctgtcatgttgcacagtttgtgctttttcgggtattgaggagtttctctcccactgatatcctggagatcaagggcatcagtgagctccttgagggccttattccgtattcgcagaggcatttcagccgagtcgatagactagtccgaagcacgtttctgttggactatacgctgatgcgaatgtccgtggtagatccagatgtagatgcgggaacaatcaaagatgaaatgaacggttcgtctgtggagaacggtgaacttgcagacctcggcctgcttcacctgtaccacagaagtcaagcaagaagagaa

SEQ ID NO: 260853 - DNA, 978 bp, Zea mays
ttaaagatcaaccaacccgtccgcgacgataaggaggtcgcccgcgtctgcgccggcgtggagtccacccccgaggacgagatcgcctccaccctcgctgacatgaccgtggacttcaacgagccactcctagccgcggtcctccttgctgctgatcaatgctcctgtaagaagctgatttccctgttcaactatgccgcgaagaataaccccgcttccaagagcctctcgaatcttgaggttctcgtgagcaagctagctgattctgctgagatagacaaggcagacgcttacttgctttgggattcgattaaggaaataggctctgtgccaggatcagtgagtacaccgttgttgaatgaaatgattgccatattttggaagcttgagaagtcgaaagcagcgttggaggtgttctccaagttcgatgagtttggttgcactccggacagtgacagctattatcttgtgattgaagcagcacgaaagaagtccttgttccgctctgcttgtgaagtctgtgagaagatgattggctctgcctgcttccctaatggtgagaaggttggcaggattttgatttacctttgtgaggggaagaaggtgaagatggcacactcattataccgtgcagtgaaggaaaaaaagattccagtcccaaaactagccttggatttccttgttggtgctttggcaaggaatgatgagaccattggtactgctctggagctgctggaagagtatcaaggggagtcgcttaagcatgcaggcaagtcctttgccacagttgtacatgctttgtgtacggtaaacaaaatggacgatgcaaataattcgctgatgaggatggtgcagcttgaagagtacaaaggggaatctcttaagaatgcaggcaagacatttgccacagttatacatggtttgtgtaagaaaaagaaattggaggatgcaaaagcctctgtgatgaggatggtaaat

SEQ ID NO: 260854 - DNA, 620 bp, Zea mays
agcaggtgttccgtgagcaccacgacggcggcggcggcggcgacgacggcggcaacccgttcgcggcgcagctgatggaggtgatggagctgctgcacggcaacctggaggccaagtcgcggctgtacaaggacccgtcgctgagcaacatcttcctgatgaacaacgggcggtacatgctgcagaagatccgcgggtcggcggagaccaacgcgatgctgggcgaggcgtgggcgcggaagcagtcgaccaacctgcggcagtaccacaagaactaccagcgggacgcgtggagccgcgtgctggggctgctccgcgacgacggcgtgctgacggtgaagggccacgtgcagaagccggtgctcaaggagcggttcaagcagttcaacgccgccatggacgagatccaccggacgcagggcgcatgggtcgtcagcgacgagcagctgcagtcggagctgcgcgtctccatcgccgccgtcgtcgtgccggcctaccgctccttcctcggccgcttcgcgcagcacttcagcgccgggagacagacggagaagtacgtcaagctcagcgctgaggacgtggagaccatcatcgacgagctcttcgacggcaacgccacg

SEQ ID NO: 260855 - DNA, 723 bp, Zea mays
cgcaactacatgatcctcgtcggcgcgggggcagtcgtcgtctgcgtcgcgctgtggaggatcatgttcggcatcgccagcaccttcgtcggcctctccgagggcatggccaagtacggcttcctcgccctagccaccgcccttgtcgcctttgccggtatgtatgcccgggcaaggttaaccataaaccctgacaaggtttaccggctggctatgacaaaactcaatacatctgctgccatccttgaagttatgggtgcgcccctaactggtactgatgtcagagcatatgttatgtctggaggaggcccgaaactgaaggacttcaaatttaagcttggcagtaaacggtgcttcctcattttccccatcaaaggatcagaaagaaggggccttgtaagtgttgaggccaagaagaaaaatggacagtatgacatgaagctactagctgttgacataccaatggcatcaagtactgaccagtggctgttcctcgtcagtgatgaacaagagtacaacgtgggcggaggcttgatatctgagctgagagacccgatcgtaaaagctattgccgctgataaggagtttgactatcttgaagaggaagcggaagcattgatgcgccaggaggaaaggctgcgccaggcgggtgaagagcgtatgcggcgcgaggaagctgatagcctggataaagctacgtgacacgacgtactgtactgactt

SEQ ID NO: 260856 - DNA, 785 bp, Zea mays
actgttcccccttttgggctctcaggtgcaagttcacaacgaggctcagtaatggacaggtattcgtatgggctttcgggtccgactggaaccttggtcctcagatttgaccagcaaaagtgcaaccgatttcttgagtccggtggagcctacaacctatctacggcctaactttttggatcctactagtcgtttcttcctggcgccttcgacgaagacatcacctgtgtctaccaatacagaagtgtagacttcaattcctacaaatacagaagtgtaggcttcaatcctattgtttgctctggatttctgtttatgagcgtatttacaagagtatgtttggtctatgttagtatattaggaatacaattccaaaaccgttgtaccgtgccaaagtttaatactatacgtttgggtctgtccatgagaaaaaaggacgagtgggtgagaaaatgctgccctccccagaactcgatcaggccggttcctctgcgcgtcctgctatgagaggctaacctgagcccgacagaaccggcttggtcgatttgggacctggtaggccggtattttttttattgaagtctacctttctaaattaggtcttgttggtttgcgttggattgcgcccgcacccctttcaagtttatataacctttttgtaatccttagtgttttttgtaatccttattggttttctaaattaggtcttattggtttaagtgagaaacaatccggttagaaatcgtttcgatccactaatcctaaacaatggattgacaccttaa

SEQ ID NO: 260857 - DNA, 690 bp, Zea mays
gctagtatggtcccactagcttgtgggtcactactgccaggaggaacggcatatgatgaagtgcattcggacatatactcatgagcatcatcacgtgctcgcgttggcctaccatgtccaactgatctgccatctggtctataacgtgcatgattacaacgaggctcagtattggacaggtattcgtatgggctttcgggtccgactggaacacagcgctcagctattgacaggtatgcgccgtccctcgatggaacgaacacaacaagatcgaggagctccttgcctgagcagtacccgttcggacaacctggctcttccggtggcgggtggcctcatcactgatcgctggaacttggtcctcagatttgaccagcaaaagtgcaaccgatttcttgagtccggtggagcctacaacctatctacggcctaactttttggatcctactagtcgtttcttcctggcgccttcgacgaagacatcacctgtgtctaccaatacagaagtgtagacttcaattcctacaaatacagaagtgtaggcttcaatcctattgtttgctctggatttctgtttatgagcgtatttacaagagtatgtttggtctatgttagtatattaggaatacaattccaaaaccgttgtaccgtgccaaagtttaatactatacgtttgggtctgtcgatgag

SEQ ID NO: 260858 - DNA, 380 bp, Zea mays
aacagattcaagactgcatggtggaacggttgctgataattacctctcggcaagatactcccttggatcttcaggtgctcgcgttagccaaccagctccaactgttcccccttttgggctctcaggtgcaagttcacaacgaggctcagtaatggacaggtattcgtatgggctttcgggtccgactggaacacagcgctcagttattgacaggtatgcgccgtccctcgatggaacgaacacaacaagatcgaggagctccttgcctgagcagtacccgttcggacaacctggctcttccggtggcgggtggcctcatcactgatcgctggaacttggtcctcagatttgaccagcaaaagtgcaaccgatttcttgag

SEQ ID NO: 260859 - DNA, 789 bp, Zea mays
  unsure (1)..(789): unsure at all n locations
aaaacagacccacttcctctgatcctcttcaacccacccaccgtgggttcgtccagccttccggccttcccccccggtggtcatcacatctcccccaatttcgccgccccctccgatctcgccgttctcgtctccttccgttggattagggctcttcatctgttcgccgcacttcgtcagtcgcccatggcggatgaggaggtcactgatccaaaggcgctcctagaggatcgttcaaaggctaagtgtgtgtcgcagtggtatgattatcagaaatgtgttaaaaggattgaggacgatgagactgggcacaagcactgtaccggtcagtactttgattactggaaatgtgttgacaagaatgttgcagagaaactctttgagatgttaaaatgacaaattttccctccatttatccacctaaagttggtaataattgtatcacttgtgaggcctatagactattaaggcacttaatatttgtcagagaacttttgcctcttgggtaacacaaattttccactgccagtttgcatttcatttctgctactagtattgaaccagcaaggtttcctccattgctggataaaaatcaatggaatattcccaagattgtggctgagcattaaatgctgtattgtaccttaattgcttttatggtgtattttgacgaggacatagctaatcattcaggtccataagggcttgttcggttagctctcaatccatgtggattgagcnggattggatgggtttgaattccaaacaactcaaatttttcataatttt

SEQ ID NO: 260860 - DNA, 564 bp, Zea mays
ttcacgcgtccggatgagactgggcacaagcactgtaccggtcagtactttgattactggaaatgtgttgacaagaatgttgcagagaaactctttgagatgttaaaatgacaatttttccctccatttatccacttaaagttggtaataattgtatcacttgtgaggcctatagactattaaggcacttaatatttgtcagagaacttttgcctcttgggtaacacaaattttccactgccagtctgcatttcatttctgcgtgctagtattgaaccagcacggtttcctccattgctggataaaaatcaatggaatattcccaagattgtggctgagcgttaaatgctatatatgtaccttaattgcttctatgggctattttgacgaggacataccttaatcattcaggtccataacttggatgagatgcaataacatgcgcacattacttctagctggcggtaatgatgtgtcatgagatgtatggagtttcatcggaatgaaacatcgtcacgatctgactcatattacagaaactactctatatgcttctttgatttc

SEQ ID NO: 260861 - DNA, 567 bp, Zea mays
cccacgcgtccgagacccacttcctctgatcctcttcaacccacccaccgtgggttcgtccagccttccggccttcccccccggtggtcatcacatctcccccaattcgccgccccctccgacctcgccgtactcctctcgctccgggttaatcgctgctgtcttctgcagttgaagtagcctcttcatctgctcgccgcagttcgtccgttgcccatggcggatgaggaggtaactgatccaaaggcgttcctagaggaacgttcaaaggctaagtgtgtgtcgcagtggtatgaatatcagaaatgtgttaagaggattgagaatgacgagactgggcacaaacactgtaccggccagtactttgattactggaaatgtgttgacaagaatgttgcagaaaaactctttgagatgttaaaatgacaagaaaagttttccctacttcagttatccacccaaagttggtaataattgtatcacttgtgcgacctatagactattaaggcgctcaatatttgttagagaagttttgccacttgggtaacacaaattttcactgccagt

SEQ ID NO: 260862 - DNA, 747 bp, Zea mays
cccacgcgtccgcccacgcggcaacgcccaggcacacacgacacgaaccaggcagctgcggagggaggaaccctagcggaacaggtgacggcggcgcgctaccggtgacgggggatacggcggcatcgtcccctcctccatccccggcgcggcggcgccagcagccggcctgcaggctgtttgaagagctcgccatttaatctcaatggaagccaagtttttccgtttcctgaagctcgttggggtcggcttcaaagcgaggtcagagagccaaggccgtgagttgttccttaaactgggcttcagccatgaggtgcagttcaccgctcctccagctgtccgtgtcttctgcttcaaacccaacataatctgctgcaccggcatcgataaggacagggtgcaccagttcgccggcgccatccggagctctaaggctccagaggtgtacaaggggaaggggatcctgtacattgacgaggttatcaagctgaagcccggaaagaagcgaaaaaataagtgacgatccgaaggcgttacaactttgtctctgtcttttaaccccatgcttcgcatttgtagtgatctggatctggggtctgctgtgttgtgttgtgtacttgcgttgtgctacacagatcaccattatcttacctttacctcagctgcatgtaggaccatgagtgggaataagttaccagtttgttgatatgagctggaaaaaaaaaaaaaaaaaaaaagggcggccgc

SEQ ID NO: 260863 - DNA, 1191 bp, Zea mays
agggacttttcttccttcgcctctacaggtttggaatcggcgctgtccgtcttcgctcttctcgccagggcaaattaaagctacaatgcaggctgcctactatgcaaaggatcttttggtttgaagtccagttgaccgaagttggaaaatacttctgatacttacagatttcacagaggtcttgtttattttctactattttccttcaagcacgtggaatagtacgtttgacaaacaatttgctgacgaggttttcgaacacggctgaacacgcgcgcaaggcgtgcacagtacacgcgcgcatggggaggaggagaacaagaggatggtgaaggcaaggcccaagccaacgccggtcaaggcggccccagaagtgatcttcgacccaatggcctctggtgcccggaagccccgccgcccaggggcgccgtcagccagcaaagaatggcacagcttcatgggatcgagtctgtcggatatgtatcggaagccagttttggagaaatctgctgacacatctgatgaggagcctgacattgatatcatgaagctgctgaaagatgttgagatcattggtgcccctacatttaaggggcgaaagcaaatcgagaaccgcagagtagttgagttgggtggaaagtccgttaagaagcaccgcacaccattaagtgttgcgaaccagctctgaagaatcagaagaaacgagaacagaagaaaatggaagaggaaaaactacttgggatctttaggaagagggacaaggacaccaaacctcacaagacaaggccagaggaccgagtgcttagggccacagaagggcgctttaggaacggtatactgaacgtcaagcatcttctggcgccaccgaaaccatcaggcaaggacatgtcggaaccgaagatgaggaaggacaagcacaaggggaagggtaagcagaaggggggcagaaggaagagacgttgaagaaagcacacttctgtaacctggtttgctattaagaatttaagatagatggttgatgaaacgtttaaatgacaacacctttttgtgtccgtcctgaaattaagacgtttccttgctctgctggaatctttgaagtgatccttgaaacgatgtaattctccaccttgaaacgaaacgatgtaattctccagaataaggttcaggaagaggattaattcgtccaatttt

SEQ ID NO: 260864 - DNA, 468 bp, Zea mays
  unsure (1)..(468): unsure at all n locations
gtctagaattcgcgggtcgaccgacncgtgcgcccacacgtccgggccgttgatgctctccctgagaagctacgagctgctgctatggtacctgacatgacaccgttccctgcaaaccggtacatggcgacactcacaccaccaattgaaggatatattgaaaaagtgcgggaagcggccaagaagcactctgtgaaggagaaacttcgctgagaattcaagagaggaaactgtttccgtaaggtgaataaatattcaacctaatgtacaagaacagctttggcacaaactgcaattgccatatttggtgatctagtcaggcatcccaatttgctgagcagccattatctagtgaaatcctttttgccatttttatgcaactctacaggatttttttttgcagttgcccctagactgtcatttccaaaaaaaaaaaaaaaaaaaaaaaaaaaaaaaagggcggccgct

SEQ ID NO: 260865 - DNA, 1242 bp, Zea mays
ttcgttgaggtaagagccaaccgagcaacgaacgcgcagccacacacgagacacgacacgaaccaggcaaccagctgccgagggaggaaccctagcggaacactgtgcaggtgacggcggcgcgctaccggtgacgggggatacggcggcatcgtccccctcggcccctcctccatccccggcgcggcggcgccagcagcacggcctgcaggtttccacgtcgtccatggcgctcgtcgtgatgtgtgggcagccgtgcagcggtaaaacagcagccgccgcttgccttgctgtggcgctgcactcctcctcgcctgaccttactgtccgaatcatcgatgagtcatccctccatctcaggcgcaacgatagctacaaagatatggttgtggagaaaaacttgagagggcttcttagatcagaagttgacaggtctgtgtcacgcgacagcataattattgtcgactcgttgaataatattaaggggtaccgctatgagttgtggtgtcttgcgcgtgcatctggtgtaagatattgtgtgaagtggaccattgtaaggaatggaacagcaaccgccaggagaaaggagaaccagcatatgatactaatatatttgaagatcttgtaagtagatttgagaagccagatagacgcaatcgttgggattcccctctttgtgaattattcccatctagagatgaattagtggaaacagctcctgttattgctgaagctgtgtcatatttgacaaaaaaagtggattccaaaacaagagatgtaaaagttctccagcctacaatagccactcagacggtgcgaacaacagaggctaattccctctatgagatggacaaggcaacacaggaggtggtcaatgcaattgttgaagcacagtcatgcggtcttgggcttgctgtgaataagatctccattgggcccaacttgccaactatcaagcttgagagatctgttggcctacctgagctcagaagcctgcggagaactttcatcaagctggcagggcagtacagtctgagtgggccaccaccaccgacagatgctgacagcgcaaagaggatgtttgtcgactacttaaaccgtgaacttggtgcatgataattttcattcgcctgcgttgcatgaacactatgtagcatgtggttaacttgggggaatagataattgaagccaacttgattaaacatggaccttgtatgaagcaacccttatatgtctatctta

SEQ ID NO: 260866 - DNA, 1277 bp, Zea mays
cccacgcgcgcccgcccaggcacacacgacacgaaccaggcaaccagctgcggacggaggaaccctagcggaacactgtgccggtgacggcggcgcgctaccggtgacgggggatacggcggcatcggcccctcctccatccccggcgcggcggcgcagcagccggcctgcaggtagtttaatggcttcaagtgcacgggacattatgtttcggcgtctcaaaacattaactataagcccggcactggcatctggtgtgatcagacagcgttaccagcttcaacagcatgcaccagtgagtggcacatccaaaggaaaggctaagctcaaagcaggtcagcctttgaagcgttccaccattggagcaaagaaaggggcaccttccgctgctggtggcggcggtggtcgtggtcgtcgtgaggccattgagcgcatcattcagatttccgagtcatgtctcaatgcatctactccgttgcggcacttgcccctcaaggagcgtcttcgtgaggccaaacgtgaggaactgggtcttgtctccaaggagaggcaacgagagcttgatatagccaaagccaaatctaaagccaaatctaaaggtcctggtggagatgatggagaccgtgtgcttatgggtccaccgggccttgactatatcagtcttgggctagttgatgaggaggcaatccccaagtatgaactcacagtcgaggatggtcggcgacttgctaaagaatacagtcgtgtactaatgcggcggcaccgtgcaaggcaaacagcagagtcaatgcttctaaccctaaaaaaggaggccgttgatgctctccctgagaagctacgagctgctgctatggtacctgacatgacaccgttccctgcaaaccggtacatggcgacactcacaccaaccaattgaaggatatattgaaaaagtgcgggaagcggccaagaagcactctgtgaaggagaaacttcgctgagaattcaagagaggaaactgtttccgtaaggggaataaatattcaacctaatgtacaagaacagctttggcacaaactgcaattgccatatttggtgatctagtcagacatcccaatttgccgagcagccattatctagtgaaatcctttttgccatttttatgcaactctacaggattgatttttttttttttgcagttgtcgctagactgtcattccattttctgtttttgctcatttaggatgtttgctgttgagaggcgtgcctggtgcaatggttaaagcccccttgttatc

SEQ ID NO: 260867 - DNA, 1661 bp, Zea mays
tgtgccaacagagcaacgcccaggcacacacgacgcggaccaggcaaccagctgccgagggaggaaccctagcggaacactgtgcaggtgacggcggcgcgctaccggtgacggcggcgcgctaccggtgacgggggatacggtggcatcgtccccctcggcccctcttccatccccggcgcggcggcgccagcagccggcctgcagggcttatattttacggtgagcacattcttttgctgatggagaccactgaacctctacaggatatcatgtgtgagtttcgtgctggtaagatgtctcatgagggaacacgagtggttccagacacgcgcaagggtcttgtccgcgttggtaggggtgaagagggattagtccattttcagtggcttgaccgtggacagaacatagttgaagatgatcaaatcatctttcctgatgaggcggtctttgagaaggtgacagaatctcctggaagggtttacatcttgaagtttaagcaagacagcagaaaattcttcttctggatgcaggaaccaaatgctgatggggactcccagacttgcatgcaagttaatgcctacataaatcgatcattagatgctgaggctgatcttcgagtacctattgaagcagaaatgtctgaagatacggctgatgatgatatctcttccagagctgggaatctagttgagagcatgaccgctgatttggctggtgaagtgacgtctgctgctggacctgtacgcttggaggatctgcagagaattctgagtgcaatacagtcatcaggtgctgcagctgaccctgatgctggagtaggactaggagacatcttgaagcctgatctggtcttgccattaattgaggacttgcccattgaacaattggcatcacatcttccggagggtggctcatggagtcctggtgatatcgttgagcttctccaaagtcctcctttgcgccaacaattagatgcattcacccacgttctgcggactgggcagatagatcttgctcaatttggagttgaccctgacaaatataagttcacggtggtgtcgttcctggaggcattggaagactcggttggaagaggtgcttctgaagctggagacaaggatgcagaggtcgagcgaggcagtggaaatgatgccatggacgagagttgatatccgtgtactaggtgtctgaattcatacgtgacaagtcttgtgttgttgttttgggtagaacgctagctcatagtattttgggcttctggcacacagaaagcaagtttctggacaagttttggacattattgctgctgtgagatgtagtgctaggcaacagatggtctggttggtggatcatggattccatggcattgagaagcttgcaaggctagattgattgtgttctgcgggggtaaatcttgcgtggcgttttgaacgtggattggtaaacagaatagcatcttttgaacgtcggttgttccatgtccacagctgatggtggtggcctcgaatgtcgtactgtacgtccatgtcgatgattccgtcgcaggagcctactactactatatccctgttctatgtaagatatgtgtactccagtacagacagtatatggacagctcacgatttttttatattggtctacacatacatctttagatg

SEQ ID NO: 260868 - DNA, 565 bp, Zea mays
  unsure (1)..(565): unsure at all n locations
ttctgtaagcattccggctctgcatctggcccagctctgggttgcgcgaacagtcggaaccctaattccctccccggcgccggcgccggcgccccctagctgcgcccccacgaccagcagaatccagatcgaagttttgctcttgccgcggccccgcctaaactccaaaagtgcgaaccccctaactcatcgatcccagcctgcctccgcctacgcgcctcgtgacggcgtggacccctcccctatctgcgtgctgcgcgcatccgcctgcggtctgtcccgtgcaggcgtgcctcctccgcgcacatctccagggtctagccgagagcagaccgccgtgacgccaccactcgcgctcgcgctcctgacatcgatgtctgccttctctgtctaagatcagagcagagctccatcgaaagcgtcgcccgcctgcttggatgatcaatcaccacgaaatagtgcagtttgggaagctgtacaatagagacatggaatcagctcctgctcataccnctgctatacatggtcttcctgatgaggagctcttatttgtttgcaagagttc

SEQ ID NO: 260869 - DNA, 519 bp, Zea mays
  unsure (1)..(519): unsure at all n locations
cgttatgaaccaggcaaccagctgccgagggaggaaccctagcggaacactgtgcaggtgacagcggcgcgctaccggtgacgggggatacggcggcattcgtccccctcggcccctcctccgtccccggcgcggcggcgccagcagccggcctgcagaaccatagcaacactttggtgcgcttaagatgtccatcctccgaccctttctcccaatagtagccaagatcaaatggttgggagatgcttttctactgggattccttctgatatgatagcggatcttaattagggaaatggagtcagtatttggcgaacctccatcatccagtcctttgggctcaagtccgtccccccagcagccagtggaggattcaccactagtgcttacccatactgatagcagcggacaggccaatatggttgacgtctctcccaaagaagacagtaagagagtcgctatagctagctgcagggttttgctaggccancaggtgttcaatttggggcatctaacgag

SEQ ID NO: 260870 - DNA, 414 bp, Zea mays
tcggtcaaccagctgcggagggaggaaccctagcggaacactgtgcaggtgacggcggcgcgctaccggtcacgggggatacggcggcatcgtcccctcctccatccccggcgcggcggcgccagcagccggcctgcagggacggtctccagtctccagaatccagattcagagcttgtccctgttttgtggtgtgctctgttgtactgtagcctgtagccagggcaaattaaagctacaatgcaggctgcctactatgcaaaggatcttttggtttgaagtccagttgaccgaagttggaaaatacttctgatacttacagatttcacagaggtcttgtttattttctactattttccttcaagcacgtggaatagtacgtttgacaaacaatttgctgacgagcacaggttt

SEQ ID NO: 260871 - DNA, 399 bp, Zea mays
taacagagcaacgcccaggaacacacgacacgaatcaggcaaccagctgccgagggaggggccccagcggaacaggtgacggcggcccgccaccggtgacgggggatacggcggcatcggcctcctcggccccccctccatccccggcgtggcggcgccagcagccggcctgcagaagatcaaaggagccccaggagccccaaccttcggaggacgacccagctgccttcaaagttcaaaatcaaaatgacggtggtgagggtggacgagaaccctgcgccggatggagagaactctcccctagacgatgagtacgtctcggccgacgatgaacacgttgatgatgaagacaaggagaccgatagcatcgacgactatgaaaaccccagcgggacgccc

SEQ ID NO: 260872 - DNA, 429 bp, Zea mays
ttccttcgcctctacaggtttggggtgggtgcttttcgtcttcgctctgctcgccagggcataattaaagctacaatgcaggctgcctactatgcaaaggatcttttggtttgaagtccagttgaccgaagttggaaaatacttctgatacttacagatttcacagaggcagcgattcgcacataatttaattgggtcttccttgggattacaattatgttctgtccactgagtttacgtattgcatttcttgctttaggtcttggttattttctactattttccttcaagcacgtggaatagtacgtttgacaaacaatttgctgacgaggtaattgctacttgctttcatctgttatccattcccgctattggtatactacatgatgggcactggttacaatttcatttcgtgcactgaggtcaagt

SEQ ID NO: 260873 - DNA, 474 bp, Zea mays
ttccttcgcctctacaggtttggaatcggcgctgtccgtcttcgctcttctcgccagggcaaattaaagctacaatgcaggctgcctactatgcaaaggatcttttggtttgaagtccagttgaccgaagttggaaaatacttctgatacttacagatttcacagaggttttcgaacacggctgaacacgcgcgcacacgcgtccgcacagtacacgcgcacgcaaccaggcgaggaccagctgccgagggaggaaccctagcggaacaggtgacggcggcgcgctaccggtgacgggggatacggcggcatcgtccccctcggcccctcctccatccccggcgcggcggcgccagcagccggcctgcagtttttcagctttataatggatcccaacatgaagcagcttcaagaggctctggttgatattgagaccgatgcagaaaaagttcttctggctagacatcagttggt

SEQ ID NO: 260874 - DNA, 757 bp, Zea mays
agccaacagagcaacgcccaggcacacacgacgcggaccaggcaaccagctgccgagggaggaaccctagcggaacactgtgcaggtgacggcggcgcgctaccggtgacggcggcgcgctaccggtgacgggggatacggtggcatcgtccccctcggcccctcttccatccccggcgcggcggcgccagcagccggcctgcaggtatgaatcatagttcatagtaacaccaacaaacatataggatcaagactacccagccaggatatcatgtgtgagtttcgtgctggtaagatgtctcatgagggaacacgagtggttccagagacgcgcaagggtcttgtccgcgttggtaggggtgaagagggattagtccattttcagtggctcgaccgtggacagaacatagttgaagatgatcaaatcatttttcctgatgaggcggtctttgagaaggtgacagaatctcctgcaagggtttacatcttgaagtttaagcaagacagcagaaaattcttcttctggatgcaggaaccaaatgctgatgggggatccaagacttgcatgcaagttaatgcctacataaatcgatcattagatgctgaggctgatcttcgagtacctattgaagcagaaatgtctgaagatacggctgatgatgatatctcttccaggttaatgattccattgttgttttacccccccaccctatcaacctgtctgtccatggcaatagaaactgcatgtattaataca

SEQ ID NO: 260875 - DNA, 463 bp, Zea mays
cccacgcgtccgcaacagagcaacgccagccacacacgacacgaaccaggtaaccagctgccgagggaggaaccctagcggaacactgtgcaggtgacggcggcgcgctaccggtgacgggggatacggcggcatcgtccccctcggcccctcctccatccccggcgcggcggcgcaggcagccagcctgcagggttttctgactcagattacttgttcactgtggggtgcaagcttaatcggccaccatggatgttgataagcaagaaacaatggaggagaccatccttgttggtgatgatctcatgcgtgggccgccatcccctgtcataccgaaagagatcgcatcacatgtccttgaagatgttgagctttgtgatggtatactcaagaaccttttcttatgcctacagatcaatgatattgagccattctgccaagatgaaattgtgctatatcgaca

SEQ ID NO: 260876 - DNA, 340 bp, Zea mays
accggaatcggaattcccggggcgacccacgcgttcggaggaaccctatcgtaacactgtgcatgttacggcggcgcgctaccggtgacgggggatgcggcggcatcgtccccctcggcccctcctccatccccggcgcggcggcgcagcagccggcctgcagctttataatggatcccaacatgaagcagcttcaagaggctctggttgatattgagactgatgcagaaaaagttcttctggctagacatcagttggtggaaaatgataagataagaaatggtaacagggaggctctgacagcccttcggacacaagctacgacgtccaagactagcgt

SEQ ID NO: 260877 - DNA, 268 bp, Zea mays
cccacgcgtccgcaaccagctgccgagggaggaacccgggcggaacactgtgcaggtgacggcggcgcgctaccggtgacgggggatacggcggcatcgtccccctcggcccctcctccatccccggcgcggcggcgccagcagccggcctgcaggttttgcaggtttcacacttcttatcatggatgataagaacaaagtcaagaaggaaatagatggcccccttggacccccacctcgcaaggggggacttaaattcgcaccaaaa

SEQ ID NO: 260878 - DNA, 919 bp, Zea mays
  unsure (1)..(919): unsure at all n locations
cctgacgcgcggaactggcggtggcgatctcatctaatggccatccatgccccgctccgcctctgcctccgcctccatgcgaggaaggtagccagacgcgtataaagggcagccagaaattcagatccacctgtatgcgtctccgttcgttcacgccacaggcaaggcacagaggcttgtgagggagagcgaggagcggaggaggacatggtgcacgggacgctggaggtgctgctcgttggggccaagggcctcgagaacaccgattacctctgtaacatggatccgtatgcaattctcaagtgccgttcacaggagcagaagagcagtattgcaactggaaaaggaactacccctgagtggaatgaaaactttatcttcactgtgtctgaccggacaacagacttggtaatcaagattatggacagtgatacaggcacagcagatgactttgttggtgaagcaacgattccattggaagcagtgtatactgaaaggagcattccaccaacactctataatgttgtgaaaggtgaaaaatactgcggggaaatcaaagttggtctcacattcactcctgaggatactcgccagcggggtctcccagaggaccttcgtggatggaagcaatcatcttagagctagatgctntaagggtgcaccagagcacagcgacaattcatgcgcttggagccttcagccgtcgagtacttcatgctaatgcagaattcattcgatttggcttcttttgattgtttcagaagacgtgttattagtgagtttcaacaaaaaatagctccatattgctctatatcccgtattggaaattctaaggcccgttgtgattactgcttacaacaagaagttttgcttctagttcccactacgcttttttttttggagttttgagtggaacatc

SEQ ID NO: 260879 - DNA, 591 bp, Zea mays
  unsure (1)..(591): unsure at all n locations
cccacgcgtccgcccacgcgtccgctaaagagggcagggcaggcgaatcgaaggaaaagtagtcaggagaggcgtttccctcgcaatcgaccatcacagatcaaatcgctgcaactagctagggtttcgtcgcctcatctctcgtcgatccatcgatggcgtccgagggcgaaaacaagaggatgatcacgctcaggagctccgacttagaggagttcgaggtggaggaagcggtggccatggagtcgcagactctccgccacatgatcgaggacgactgcgccgacaacggcatcccgctccccaacgtcaactccaggatcctctctaaggtcatcgagtactgcaacagtcacgtccacgccgccgccaaacccgctgactccgctgcctccgagggcggcgaggacctcaagagctgggacgcgaagttcgtcaaggtggaccaggctacgctcttcgacctcatcctggctgccaactatctgaacatcaagggattgctggacctgacctgccagacggttgctgacatgatcaagggcangactcccgaggagatccgcatgacattcagcatcaagaacgact

SEQ ID NO: 260880 - DNA, 832 bp, Zea mays
cccacgcgtccgcctccccaaaggccctaacctatcgcccgtacgagactgcgccgccgttgccgtctcctcctccgacccatcactctctgctcgcgcactctcacctgcccgcgccgtcttcgaccgccaccaagatgaacaaggagaggctcatgaagatggccggcgccgtccgcaccggcggcaagggcaccatgcgcaggaagaagaaggctgtacacaagacggtcaccacggacgacaagaggctgcagggcactctcaagagagtaggggtcaacaccatccctgcaatcgaggaggtgaacatattcaaggacgatctcgtcatccagttcttgaaccccaaagtgcaagcttccatcgcagcaaacacatgggtggtcagtggatctccacagacgaaaaagctacaggatgttctccctggtatcattaaccagcttggccctgacaacatggagcacctgaagaggattgccgaggagatgcagaagcaggtggctgctgccggtgcggcagcacaggtcaaggaagacaacgatgacgatgttccagagcttgttcctggagagacttttgaagaagtagctcaggagacaaaagcctgatcataggctctaaatagtgaaatgttactgcaccaatgctgtgaggtcatggttttcgtgtgatggcactcttcttcctcccctcctaggccagccccagccactctttgtgttcgctgttggaaacttttactttccccatctcaagcttttccctaaggatgaacaaaaaaaaaaaaaaaaaaaaaaaaaaaaaaaaaaggccgcgccgccccggg

SEQ ID NO: 260881 - DNA, 541 bp, Zea mays
accggtccggaatttccgggttggaccaacccgtccgacaacatggagcacctgaagaggattgccgaggagatgcagaagcaggtggctgctgccggtgcggcagcacaggtcaaggaagacagcgatgacgatgttccagagcttgttcctggagagacttttgaagaagtagctcaggagacaaaagcctgatcataggctctaaatagtgaaatgttactgcaccaatgctgtgaggtcatggttttcgtgtgatggcactcttcttcctcccctcctaggccagccccagccactctttgtgttcgctgttggaaacttttagtttctccatctcaagcttttacctaaggttgtgcatgttgagatgccatggaaatccattttgctgattatttggtttgtggtcggttcacaacattacatgagcaccaggttttgctgggttatcactatataatgtttgtgtagtctagaaaaaaaaaaaaaaatacatgacaataaatactgtaattgctttacaacttagcttgagaat

SEQ ID NO: 260882 - DNA, 1686 bp, Zea mays
aaaacagaactcccatcacgatagtatgacatcaaacagaatgggaatcgggacaccaacactatcatacaaaatctgattcgaagtaaacaagctacagtcacatgctaaattttataaagagtaaggcctttaaactgttctgtattagacgaccattttcttcacaaactgtatagttcaggtgcgcctctgcaaccgatcaaaaccagcgccctccctaaattacactgaacagtcacttgggtccagctttcccgaacgaatcacggagggtaacagttctgttgaacacgagtttctcaggtgtggagtcagtatccacggcgaagtaaccaagccgctcaaactggaacttgtcacccagaaccgcagtggcaagtgatggtacagcataagcatcctttatcacctctttcgagtgtgggttaagatcgccaagccaatcttccaattcagcaggattctctgacatgaacaatttctcgaataatcttacttccaccttcaatggctctacaccaggtgctggctcagcaatccagtgaagaacacccttcagtttagaagtcttcaaaggatcatattcagctcgaatttcaacaatatcatcaggactatcaccagagataacatctgtgcattttatggggaacgcataccttagcatgacagatttaccaggggctagcccatagtagtcttttgagtcctttaggcgaaaatcagttttctcaatgtagacagttcttgagaacggaaccttatagtgggaggaagcatcagtatcagaagcatcaggccacattttgccatcaaggtctagtacttttccttcttccaagttagttattaccacctttagagggtcgcaaaacaaccatggttcgaggggctgttttgttaagctcttccctgatgtgatattctagacgatcaacacgaattaagctgttgtcacttcttgttatcccgattccacgaataaaggaatttattgcagttgatgatactccccgtcgccggagaccagccagtgtcaacaagcggggatcatcccacccatctacccacttctctgtcacaagtcgattcaactttcttttagacatcacagtatttgatatgtttagcctcgaatattcccacacatatggttgataaaggcccaaggcaacaagtagccagtagtatgaagggcggcgtatgtcaaactcaagtgtgcacagcgaatgtgtgatgttttcaagagaatccaccatgcaatgagcgtagtcatagctcggatagacacaccaattatcaccagcatgtggatgaggggtgaattttattctatatgctattaagtcagacatatttttgttctcattttgcatatcctgcttcattcggagagttgctgcaccctctgcaatcaacccacgcctcatgtcttcaaataatttcagagactcttcaattggcctacccctccatggactatccatcttcttttccctgtattccttgatttcttctgcagtctggtgatccacatatgctagccctttctgtattaactcaacggcatgctcatacaaagcttggaaatagtcactcgtgtatgttactttgtagggttcccatcccatccaatggacaatttcttttcagcttccggatttgtgtcgtcaaacctgttgt

SEQ ID NO: 260883 - DNA, 541 bp, Zea mays
ctatccatcttcttttccctgtattccttgatttcttctgcagtctggtgatccacatgtgctagccctttctgtattaactcaacggcatgttcatacaaagcttggaaatagtcactcgtgtatgttactttgtagggctcccatcccatccaatggacgatttcctgaatgtgatctatgtattctttcttttcagcttctggatttgtgtcatcaaatctaaggtagcaatggccatttcgctccttagccagaccaaaatcgataaacatagccttggcatgaccaatatgaagatatccattaggttctggtggaaaacgggtcatcacttttcctccagttgctttaagatgtttttctaaaatttcctttgtgttatgcgctctccatatgttcccatcactgaaaaatatttctgtatgaaccttgaagttttcctctggttggggaaatatagtgtacgggttcaattcctcctcagatggtggggcatcagtgacaactgctactttttgctcgtcaatttttgctggtt

SEQ ID NO: 260884 - DNA, 396 bp, Zea mays
tttaatgtaaagtatattattctacactgtttttttttattacatataatagtttcttagttttatttatttattatgaatcgggacactaacactatcatacaaaatctgattcgaagtaaacaaggggtacaaatgaacacatcaccaaaactgagggcaccagattaaaaaaccctaaattttataaagagtaaggcctttaaactgttctgtattagacgaccattttcttcacaaactgtatagttcaggtgcgcctctgcaaccgatcaaaaccagcgccctccctaaattacactgaacagtcacttgggtccagctttcccgaacgaatcacggagggtaacagttctgttgaacacgagtttctcaggtgtggagtcagtatccacg

SEQ ID NO: 260885 - DNA, 627 bp, Zea mays
agctgaagctggaagaaggacaggacgtcacagcactcgctctagaccaagaaaacaccacgcttctggtttcgacagctgataagcagctaatagtctacacgggtccggctccaagtaccccgtaggtcaatccattagctccccggtgcttggttggaaaattgtaatggagatcagcgctagctatcttgacggcccaactgacagtgagctcggagacgacagtacagataatgcacgttaggcgacgggcttctcttgccgtgagcatggcgctgctgtacgtagaggctccaatggattgtgctgtaatacaagactgagactggaacctgaaatgggcgacatgtgctccaaaaggtgaagagcccgtgcgctgctggaaacctctcctgaacagggacctcgttgacattttccatgtagtcgtagtgaaacctgccacgctgcggccaaaataattgttagaagcagcaatccgaatgtaattattgccagtgcctcgtacaagtcgcgttagcttcttgttaaccgtgtgcaacggcgagccggcacgcaaagatttgttagcttgttgtcattgcatctgtgtacaaagtctcgtccaagaaattgattcccttt

SEQ ID NO: 260886 - DNA, 1156 bp, Zea mays
ggaaagagttttttgtgattggtattcagtgggcttcaatatatcatcctgcactgtggtgtgccttttctctaatcttttcgttgcttcttgtaccacaagttttagcagtggtattcaaagatcggttcacatataaatctctatgcgcatatggtgggcagaggacactgttgaagtctctagttggtggtttcatctgttgttttgttgaactcgccaggctggttcttgtatggttattgctactgttatatgctatctatttagtttttataccttggttattcggtcaccctattactgaagatggtagcctgacttacatgacacataaaggctggattctgaaaggacccagtagtagcaacgaagtagtccatgctgggattccagatgtcatggtcattgttctacctcacctttgctttgtgttagtacccaccattgtgattttagctgccatggctgctgagagaacagcatatcgagagcattatctttctcgatcaggaaagaagaaagatgactaccgtaagagcaggagacagatagaacatgaaaacttttggaacggtcgctggattagcaaatttctgtgtcttctctgcgtggtggttctatgcaaacattggaagctttgcagagcgctcgtgaacgcttatgctatgaaccccttgctccatgcgccagtacttttcttcttcgttcctttactcatggtgtttgccatctacaagacacggtccatttagctgttcgggagttctgaagatgtgctgcactggactgtccaataaatggtgcttcaactgtgaagactgaagactaacccacaactgaaggtgtgctacttcgatttgtcactttctctctctttcagagagcagatttgttagattgtttaacaggcatgtatagctttcagcgttgtgctccgtataaatgagggactgcacggcatttcattagaatggaatggttaggatttgaaccaaggaagaagagactaaactgctcaatatagtttttcctctttcttttgagaaagttctttttccctcctctgtttttgacctgccggttttgtttttgtacatttatccttcttgtgagactttgaccatctacagtataatagcactgtggcttgcgg

SEQ ID NO: 260887 - DNA, 1391 bp, Zea mays
cccacgcgtccggtcttcagagccatccgctggaggagatctatttgcacagcaattctcgctattgactacagacaagaagttagaattgtctgagcaaaagagctatacttccgtagcaaatggtatgtctggtgtgctcgagctttcagaggcatcgattgaatcatctggtgcaaaagctgctgcatgtggaactctttcggttctttcctcaatgtcaaataaagtttacaatgaccaaggaactccagcagcattcagagttcctgcaggtgctgtgattccttttggatccatggaggacgccttgaagaaaagtggatcaatcaaatcctacactaatcttctagagaggatcgaaacagctcaaattgaaaatggtgaacttgatagcctatcctcgaagcttcaagcaactgtttcacttctttctccatcggaagaaatcattgaatctttgaagaaaacatttgatcagaatgttcgactaattgtgagatctactgctaatgtggaggatttggctggaatgtctgctgctggactctatgaatcaattcctaatgtcagtctctctgaccctagatcctttggagctgcggttggacaggtttgggcatcattatacacaaggagagcaatccttagccgtcgagcagccggtgtacctcagagagacgcatagatggcggttctcgtgcaggaaatgctgcagccagatctctcttttgtgcatcagacaattagcccagttgaccatgatcccaaattagtagaggctgaggttgcccctggtcttggagaaaccctcgcttctggtacccgtggcactccatggagactctcatgtcacaagcttgatggcaaagtcacaactctagcttttgcgaatttcagtgaagagcttatggtgctcaactctggccctaccgatggtgaaatgagtcgtaggaccgtagactacagcaagaagccgttatctgttgatgcaacctttagggagcagtttggtcagcgccttgccgccattggacagtatctggaacagaagtttggaagtgcccaagatgtggaaggttgcctggttggccccgatatatttatagttcagagcaggccccaaccccaataaacaaaaagttttgtgtggttacctggctagctgaataaaaatggatactggcagaagaaatatatggacttcgtagcacgcgtaggagtgatcgagtcttttttaatatgctatctcaggtaaaataataatttattggcacaggtttagccattcactaacttgtatcaattttgtgaactaaagaacttactattacatgtgggagccacatgctattctatttcgatggtacctattttttcagactgtttgg

SEQ ID NO: 260888 - DNA, 1053 bp, Zea mays
gggatatctttgaagatgcaagtgggaaattgaatcgaactttggtttgccctggtataggaggtgtggatgatatgcttgttggttgtctctggcagaatgatcatctcgtgacagtctctcttggtgggacatttaatgtgttctctgcaagcaacccagaccaagaaccagttacatttgcaggacatttgaagactgttagttctttggtcttctttcctcaaagtagcccaagaactatactatctactagctatgatggtgtcatcatgaggtggatattgggtgttgggtttggtgggagactgatgcgcaaaaacaacactcaaataaaatgctttgctgcagtagaagaagagcttgttacctcaggttatgataataagatcttcaggattcctcttaatggaaaccagtgtggagatgctgagtcagttgatgtaggtggtcagccaaatgctttgaaccttgcacttcaaaaacctgaatttgcactggtcactactgattctgggattgtattgctgcacaactcaaaagtcatttctacaaccaaagttaactataccatcacttcatcttcggtgtctcctgatgggacagaagctgttgtgggtgctcaagatgggaaactgcgaatctattccatcagtggtgatacacttacagaagaagctctgcttgagaagcaccggggtgctatcacttccatacattattcaccagatgtttctatgtttgcttctgctgatgccaacagggaagctgttgtgtgggatcgggcaagtagagagatcaaactgaagaacatgttgtaccacacagctaggataaactccctggcttggtcaccggacagtcgattggttgccactggctcactggacacctgtgcaattgtctacgagatagacaagccagtagccactcgcgtcactatcaagggagctcatctgggtggcgttcatggtttaaccttcctggagaatgatactctggtgactgccggcgaggatgcttgcattcgtgtttggaaggtggtggagtaat

SEQ ID NO: 260889 - DNA, 1124 bp, Zea mays
cccacgcgtccgcccacgcgtcattgactgtcggattccccactcgccggcgacaaccgccgcgcccgatccgtctgctaggtcttgcacctccgggctctgggcatggctgccgaagctggcccaatctccaaggtcctcatcgtcgtagcgatgcagacggaggcgatgccgctcgtccacaagttcaagctcgtcgaggcgcccgcccacgaatccacatttcctaaaggtgccccatgggttaggtaccatggcaactacaaaggcctccacattgaccttgtattgcctggaaaggatgctgttttaggagtcgacagtgttggtacggtatcagcagctcttttgactagtttttccattcaaacattgaagccagaccttatcattaatgctggcactgctggtggcttcaaggccaaaggggcaagcattggagatgtattcctggcatcagatgtttcattccatgacaggaggataccaatacctgtttttgacatgtatggaattggagcacggaaaacttctgcagttcctaatatcttgaaggaactcaatttgaagattggcaaattgtcgactggggattctctggatatgtctccccaggatgagaaggtgatactgagcaatgatgctacagtaaaggatatggagggagctgctgtggcatatgtcgccgacatgttttcaacgccagcgatctttgtgaaagctgtgactgatatcgtggatggggagaagccaacatctgaggagtttctgcagaacctgattgccgtgacggcggcactggacctggcagtcaccaaagtggtggatttcatcagcgggaaacgcatctctgatctttgaaggctgtcatgaaatccgacacccccactgctctgatgcacgatgctaggctacgaacaatacaacattgggtcaacgattttttgtgaggtgttttctatgtgaggttaaaccttcttaaccctgtgtacaaaattcctgccaattgctatgggccggccatagcgtggaattttgtagaataatttgcaaaatgtattttgtggtgcaaatatcgatatataataatatgctgggggacgggatccccgtgggattagatg

SEQ ID NO: 260890 - DNA, 463 bp, Zea mays
gaaccactcaagcaagctgagctgaaagcagttagaaacgagataaaaccagatcctatgtccacgatgagggcaccccaagttccttccatgctaccttttaacaatcttgcttttggcgcaacatttggtggtccagctagtctgaagcccatgacaatggctccaatgccaatggccatgcctatgtcaccagctcctctcacaaagaagccaactccagcagcagcaactcctctttgtggtaaaagtgataccgataacttgaagatggctaaacaggtgctgaatgaagatatctcaaagttgcaatctcaggttaataaactgaaacaaaaatgtgatgcccaagaagagcaactgcagaaagcggaaaggagagctgaacattctgcctctacagctgcagaagagtcttcaaggcgtaatggtgtcttggagttcattaggttccttgacaatg

SEQ ID NO: 260891 - DNA, 450 bp, Zea mays
gtgcaaaccagaaccccttcgccattttcaccaactccctccgatcccggccatggcgggggaggactgccgctccggcgcggaaatggacgcgctcgtacgacgcttgaagctccaccagccgtccccatccccctacgaccccgatccggccgcggcccccgtccccgccaccgccggcgacggcgagctgttccggccgcggagagctgccgtgcttgtctgcctcttccgggagagacggcggcgagctccgcgtcatcctcactaagcgctcgtcctccctctccacccactccggggaagtttcattgccaggaggaaaggtcgaggagggtgatgctgatgatgtagcgaccgcgttaagagagtcaaaagaggagatcggacttgatccagctctggtaactggggttgcctctctggaacacttcttggccaagcatcttc

SEQ ID NO: 260892 - DNA, 571 bp, Zea mays
cgacacgtcgtccagcccggagcagaagccgttgttgatcgccgagtgtcacgccggcgatgcggtcgtgctcaccgacgcctgcgaccggcccgccacgctggagcggctcagttcgttctggcttcccgagctccggcgactccagctgaaggccccagttatcgtggtggggtgcaagctggacctgagggacgaacaacaagttagccttgagcaggttatggcgcccatcatgcagtccttccgcgagattgagacctgcattgagtgctccgctcttcgccagatacaggtgcctgaggttttctactatgcccagaaggcagtacttcaccctactgcccccctttttgatcaagaattacaatctctgaagcctcgatgtgtgagagcgttgaagcggatattcattatatgtgataatgacaaggatggtgctctcagtgatgtggagctcaatgaattccaggtccgatgctttaatgctccactccagcctactgaaatttcaggagttaagaagagcgttcaggagaagatgcctgaaggcgtaaatgaaagcgggctt

SEQ ID NO: 260893 - DNA, 879 bp, Zea mays
atctctgcggagtaggtcgcctgacgaactcacaaatcacaaggatccgccgagacgcgcgtctcgcttctcccttcctcagctgctggcccgctgcctgcagccattgcccgctcctcgaggtcaaatggcccctgcccccgctctcaccgccacatccgtcctgaagcgttcccacctacccggcgtccactcgttggcctgtcgccggcagccgggggcggaccgcgtctcggtgctttctccagcgatcccgccgccccgcgtttcatggcagcaaggatctggagtggttgctaagaggctcctctgggcgagtgcgagtggttccttcgagaaagataacatcggggaggacgcggtgttgccttctcagatagcggtggagaataaagtagattttttgaagattttaaagagtgccaactccattattccccatatagtgctggggagtacaattctcgccctggtgtacccgccttcgtttacatggttcactaccaggtattatgcaccagctttggggttcttgatgtttgctgttggtgtaaactcaagtgccaaggattttattgaagcaataaagaggccagatgctattgctgcgggctatatcggacagtttgtcatcaagcctttgtttggattcctttttggcactcttgcggttgcagttcttaacctcccagctgctctaggcgctggcataatgttggtttcatgcgtgagcggagcacaactttcaaactatgcaactttcttgacggatccacatatggctcctctcagcattgttatgacatcattgtcaacagctactgcagtttttgtcaccccaacattatcttactttcttattggccagaaattacctgt

SEQ ID NO: 260894 - DNA, 775 bp, Zea mays
gtctgagagagagagcgagcgagcgagagtggtggtggtgtgtgcgcgagcgcaacatggagagggagagcgtatttcttcttcctcaccctcctcgaggaagagagagggcagctccggagccgcacgggcgcgagcgaggcaggcagtggctcctcccccctcctttcgatatcagctcatcgattcgtcctatcacacacatatcattaccgctcctcttcctctcctatgcttgtcctctaactcattggcagaagagaaaaaaaaagtccttgttgagttgttgtatcgggttctggtggtgactgttactggggtttccttgtccggttcttgattcgcgcaaggacagatttgccgtcctctcgggttccgccgtgcggtgctgaatcctccttccctgttcccttcccttaggtttggatcggggatagggatggaagtggacagaaagaagaatttgcagattggatccaaggggaaggaggttcagagcaagaatccgaggcgggaggagccgctggcatcgtcggaggtggacatggatgagccagacgctcctgagagcggtgacatgattgttgatggcaacaatggcagctccagagagagccccttgcagcccatggattccaagaattccacggctgtgcggtcaagaagccaacatcggtgagctcagacttcgctgaggagctggacttggaccttggtggggagagagtgggacgcaacaggagaggaagctctcaagcaggaccggtttgagctt

SEQ ID NO: 260895 - DNA, 973 bp, Zea mays
gccggaaccgctgcggagttccaggcgtgcccaagcagccagtcgcccgcacgactctttcccggctacccacaccgcgcgagatctccgatccccgcccaaatcccacgacgccggcggcggccatgggcggcaaggacctgacggaggaccagatcgcctcgatgcgggaggccttctcgctgttcgacacggacggggacggccgcatcgcgccctcggagctgggcgtcctcatgcgctcccttggcgggaaccccacgcaggcgcagctccgggacatcgcggcgcaggagaagctcaccgcacccttcgacttcccgcgcttcctcgacctcatgcgcgcccacctcaagcccgagcccttcgaccgcccgctccgcgacgccttccgcgtcctcgacaaggacggctccggcaccgtcgccgtcgccgacctccgccacgtcctcacctccatcggcgagaagctcgaggcccacgagttcgacgagtggatccgcgaggtcgacgtcgcgcccgacggcaccatccgctacgacgacttcatcctccgcatcgtcgccaaatgatcccgtcccttctccctcgagtctccgattcgccgatccaccgcccccgcgctcttcgtctgtaatgacttcgtctcccgtccgccgtgatttcattttgtttacccgctagctcatttgaattcagtttggcctcttcgttccgggactgcaacctagggtctggataaacacataatggttggtgtgtgagtgtgtgtgtctgtgtgattatcgcccaaacaatggatcgattaattaatggatctggctagtgatgttgcttttgcttagctacctgtaatgtactactactactactgcaatgtaaagtgtggatctgctttctttcactgcttatggcttgccttataagaatcacttcatgacctgcactgggtatgtattcatgatgatctagc

SEQ ID NO: 260896 - DNA, 752 bp, Zea mays
agttgcccttgcccacacggccacacgccgcgccgctccttttctccttcccccttcaggctccccgatccgacgaccccagcggcggcgatgggcggcaaggacctgacagaggagcagatcgcctcgatgcgggaggccttcacgctgttcgacacggacggggacggccgcatcgctcccacggagctgggcgtcctcatgcgctccctcggcgggaacccaacccaggcgcagctccgggacatcgccgcgcaggagaagctcacggcgcccttcgacttcccacgcttcctcggcctcatgcgcgcccacctcaggcccgagcccttcgaccgcccgctccgcgacgccttccgcgtcctcgacaaggacggctccggcaccgtcgccgtcgccgacctccgccacgtcctcacgtgcatcggagagaagctcgaggtgcacgagttcgacgagtggatccgcgaggtcgacgtcgcgcccgacggcaccatccgctacgacgacttcatccgccgcatcgtcgccaaatgatcccgtcccctccgagtctccattccgccgatccaccctcgcgcgctcttcgtctgtaataacttcgtctcccatccccgtgatttcattttggttcccttctatggctggctcatttgaattcaatctggcctccccttcgttcccagactgctcggataaaacggataatggttgctgtgtgattatcaacccttcaacgattaattattagt

SEQ ID NO: 260897 - DNA, 1829 bp, Zea mays
gcgggtcgtccccattccagtcttttcagaacgagattgcatcgaggaaactacagaaaagggaccaaatcgaatccgtggtgcactgcccctccccctccctcacaagccgccgccgccgtgaggactccggcgaatggcgtcccgcgtcgcctcgggcctcctccgccgccgcgccgtcgccactctagggctactaaggagtcatacacatgtcagaaactacagcagtcaactttcagctttgattccagctacttctcaatgctcaaatctgacaagaagacgctattacttacctaatccatctctgtaccaagtttggagtaggtcatttgcctcagacagcggagacaagttcgaggctgttgtgcccttcatgggtgaatctgtaactgatggaactcttgctaacttcttaaagaagcctggagacagagtcgaggccgatgaacccatagcgcagattgaaactgataaggtcactatagatgtcgcaagtcctgaagctggtgttattgaaaagctcattgctagtgaaggcgacacagttactccaggcactaaagttgcaatcatatccaagtctgctcaacctgctgaaacacatgttgctccatctgaggaagcaacttcaaaagggtcttctccgccgaaagttgaagagaaatcaagggtagaggaaaaagccccgaaagtagaacctcccaagatgcaagcaccgaagccaactgcaccattaaaaacgtccccttcagaaccacaactccctccaaaagaacgggagcggcgggtgccgatgccaaggctcaggaagcgtattgcaaaccgtcttaaggattctcagaacacctttgcaatgctgagtacatttaatgaagttgacatgaccaatttgatgaagcttcgttctgattataaagatgaatttgtcacaaagcatggtgtaaaattgggtcttatgtcttgctttgtcaaggctgctgtttctgcacttcaaaaccagccaattgtcaatgctgtcattgatggtgatgacatcatatacagagactacgtagacatcagtgttgctgttggcacttccaagggccttgtggttcctgttatccgagatgctgataccatgaactttgctgacattgagaaagggataaacaaccttgcaaagaaagcaactgagggggcgctctcgattgatgacatggcaggaggaacattcactatctccaatggtggtgtctatggaagcctcctcagcacacctatcatcaaccctccacagtcgtctattctggggatgcattccattgtgcaacgccctgtggttgtgaatggtgacatccttgcgaggccaatgatgtaccttgcgctgacttacgaccacaggttgatcgatggcagagaggctgtcttcttcctgcggcgcatcaaggatgttgtcgaggaccccaggaggttgctgcttgacatataaattcatgcaccagcgctgcgctgccctgccggactgttttgtgcaattgtgcttatctggaaataatgccatggaaatttttgactgatgaaaaagaattacttcctcagaaagacgaaatctgagctgaggataccgaggtttttctctatataatcgtagaagagcaaactcaactcaacatgaggtcatgtttaattttcggatctgagatgttccattacgggatgcagttcccacaaacagtcattttatttaatatgcaagagcaatagagctgctgcatttttgtttgttggttcacaatttcgcctccagctggccagtctgcgactcaaaaaagttgccctgc

SEQ ID NO: 260898 - DNA, 606 bp, Zea mays
tttttgcaaagaagggaaatgcgggggcgctcgagctaggtgacatgccacgaggaacattcactatctccaatggtggtgattatggaagaactacttagaatagctcttatcaaacgagcacagagaacaattctggggatgcattccatagggcaacgccctgtggttgtgaatggtgacattctcgcaaggccaatgatgttccttgcgctgacatatgaccacaggctgatcgatggcagagaggctgtattcttcctccgtcgcatcaaggatgtcgttgaggaccccaggaggttgctgcttgacatataaagttacttaccagtgctttcccgccgactgttttgtgctttctggaaataataccatgcaaatttttgactgatgaaaaagaattgcttcctcggaaagacgaattctgagctgaggatacagtgaggtttttctctataatcgtagaagagagcagcaaactcaactcaatgtgaggtcatgtttcattttcgggtataagatgctccatttcgggatgcagttcccagtaattttatttgccatgcaagagcaatagaagttgctgcatttccgtttgttggttcc

SEQ ID NO: 260899 - DNA, 410 bp, Zea mays
tcctcacgcgttcgcccacgcgtacagccacgggtgcgtccacgcggccggcatcgccgaaactacagaaaagggaccaaatcgaatccggggtgcactgcccctccccctccctcacaagccgccgccgccctgaggactccggcgaatggcgttccgcgtcgcctcgggcctcctccgccgccgcgccgtcgtcactctagggctactaaggagtcatacacacggtcagaaactacagcagccaactttcagctttgattccagctacttctcaatgctcatatctgacaaggtaattatcagatagcatgctctaggtgatgaataccgatgccattattaacctaatgcctaatattttttaatgtctccttcccttggtatacatgcatgaatgcattacatta

SEQ ID NO: 260900 - DNA, 368 bp, Zea mays
ttgtgagatgccagagtttgaggcctcccacttcttgagaagaatgcaggatataaaaatcgcataaaagggcgattctctagggaggcagatgtttcagtcgatgatgtgtgtggtcactggtggaaaggagaggctggatgtagaagatattggcgcacagtatggctttgtgttagcgccgggtgcaaaaaggccagacggctgggcctaccggttcccgagcaccaacacaacaattctataccactggtcatcaacgctctgtgatttggagcccctgaacccatcataccgagcgaccagttatgccatgcacctggaccgcccgcctgcttttctgaagagcaacctccacaggctccatg

SEQ ID NO: 260901 - DNA, 422 bp, Zea mays
cttactggctggatcgacccacgcgttcgtggacgcgtgggcggacgcgtgggttaggaatggttatacaagatacactcctaatgctgggactttggagctgaggaaggctatttgtactaaactccaggaggagaacggggtatcctacctcccacatctggtgctggtgggcactggagcttacctgtgcatcacacaagctgcgcttgcggtgggctcacctggtgatcaggttttgattccagccccatattgggtcagttatcctgagatggctagactggctgatgcgactccagtgattcttcctacaaacatatcagagaatttcttgttcaggccagagttgcttaccgacgagatcaatgagaaatcgaggctcttaattctctgctctccatctaattcaacaaggtggg

SEQ ID NO: 260902 - DNA, 533 bp, Zea mays
agacccccaccagctagcagccgcctcctcgtcaggcccttcttccttcaccctcgccaaacccgcctcctgcggtccgaactccgtctgcttcatctgagcgtccgggaggacaaaacacgcggcgaggaccaggatggcgattgtgcgggaggaggcagtggacacgtccatcagcccaagggtgagcgcgctgcggccgtccaaaaccatggccatcaccgatcaggccatggcgctgcggcaggccggcgtgccggttatcggtctagccgcgggggagccagacttcgacacgccgcccgcgatcgcggaggccgggatggatgcaattaggaatggttatacaagatacactcctaatgctgggactttggagctgaggaaggctatactgtactaaactccaggagggaacggggtatcctacctcccagatgaggtgctggtgagcaatggagctaagcaatgcatcacataagctgtgcttgcagtttgctcacctggtgatgaggttttgattccagccccat

SEQ ID NO: 260903 - DNA, 791 bp, Zea mays
ggggaggcgaggaaggacacgaggccggcgcgttcgtgcgtgcccttctcactgcacgccggtgagaattgagatcccagcaccgagacgacgacacaagtctcacctccatcctcctttactcctcatcccagatccccctctccgaaccccgccgcctgccgcagatccgagggtcatcggcagccatgatctcgtccagcaagctcaagtccgtcgacttctacaggaaaatacctagggatttgaccgaggcatcactatctggcgctggattatccattgtagcagcattagcaatggtttttttgtttggaatggagttgagcagttacttagcagtcaatactaccacatctgtgatcgttgataggagttcagatggggagtttttacggatagatttcaatatgagctttcctgcgctttcatgtgaatttgcatcagttgatgttagtgacgtgctgggaacaaacagattgaacataacgaaaactgttcgaaagtattcaattgatcggaatttagtaccaactggatcagaattccaccctggccctatccccattctcaataagcatggagatgatgttgaagaggatcacgtggatggtgcattttcattgtcatctcgcaattttgatagcttttcacaccaatatcctgttttggttgtcaacttctatgctccctggtgttactggagcaatcgactgaaaccctcatgggagaagacagcaaatagggtgggggacctaagatgagatctctagcagtgctgctggagtgat

SEQ ID NO: 260904 - DNA, 1443 bp, Zea mays
cggacgcgtgggcaaacatattgaacataatttaaactgttcgaaagtattcaattgatcgggatttagtaccaactggatcagaattccaccctgggcctatccccattctcaataagcatggagatgatgtcgaagaggatcacgtggatggtgcattttcattgtcatctcgcaattttgatagcttttcacaccattatcctgttttggttgtcaacttctatgctccctggtgttactggagcaatcgactgaaaccttcatgggagaagacagcaaaaataatgagggagagatatgaccctgaaatggatggtagaatccttctaggcaaggttgactgcactgaggaagttgaattgtgtaggagaaaccacatacaaggatacccatccattcgtgttttccgtaaagggtctgatataaaggagaatcagggtcaccatgatcatgaatcatactatggggaacgtgatactgagagtttagtcgcggcaatggaaacatatgttgcaaacatcccaaaagaggctcatgctttggaagacaaatccaataagactgttgatcctgcaaagcgccctgctccaatggccagtgggtgcagaatagaaggctttgtgcgtgtcaaaagggttccagggagtgttgttatctcagctcgatctggatctcactcgtttgatccatcccagataaatgtttcgcactatgtgacacagttctcatttggcaaaagactttccccaaggatgctgcatgaattcataagacttactccctatcttcgtggataccatgatagactagctggccagtcttatactgttaagcatggtgaggttaacgccaatgttactattgagcactacctacaagttgtaaagactgagcttgtaacacagaggtcctcaaaggaactgaaagtgcttgaggaatacgaatacacagcacacagcagccttggtgcacagcttctatgttcctgttgtgaaattccattttgagccttctcccatgcaggtcttggtaactgaagtcccgaaatccttctcccatttcatcacaaatgtctgcgctatcatcggtggggtcttcacggttgctggaatactggattccatctttcacaacacactcaggatggtgaagaagattgagctaggaaagaacatttaaatttcgacgccgctgcaagtttaggcggatgcactaggtagccattgttttgttataactaggtaatgactcatgaaaatcggtatatgaaagatggcgtgctgaattgacggttgaaattcggggggtcatgaaatcatcatataataactagggatctcactgtttcgctaaaccactcacaataagacagtggattgctgctagtgtgccactgtgataagtaaccgagttggataatatattcagtatattatctaa

SEQ ID NO: 260905 - DNA, 666 bp, Zea mays
cagaccctcatcaccaactcccctccatctcgctcccggtcctcactctcctctccgcctcctccctcctctccctttcgaaaccccatcttcgttggcgtagggctcgggggttggagtttgggctcgggggttagagtttggaggaagcattcgtgaagactctgtggcgacttctccagatcggcagatccgtctttctgggcgatttggagcgaacccccaagtagtttgttacagaaagcagcggcttttgcgtcgctcctgcgtcagtgtacctgttgcgttcgtcgttcctggccccggccttcggatcatatatatccagctaggaaaatggggcactttgcatttattctttggccccttcggagatcgccctcgtcaagatttggtgggaacccaattcgctgggattccctgtggaaaggcgccgctttggttcctgtttccccacagctcccaactctatatattccaatctcttcttcacctactcgcctaactttcgtttacttcgatccgccagtttgtgcttcccacccctcggcattcggctgtttgttactttgttgctttgtcgcaagtcagatcaatctgtggccgggagttgttgtgttttgtcctgttcttgcccggagacggagacgggagacatggccgcgg

SEQ ID NO: 260906 - DNA, 304 bp, Zea mays
ccaattcgctgggattccctgtggaaaggcgccgctttggttcctgtttccccacagctcccaactctctatatctcaatctcttgggcatctaccgtttcttgctttgacgcaaaccacatcaatctgtggccgttgtttccatcggagctgttgaggtttgtcttcttctcggccgaagacatggcggcggcgaacggagctgccggtgcggtgctgttcagcgaggaggacctgatggaggtgagtggggtgcgctggggagaggacttcgtggaggtgacgtgcggatgcaccagccacc

SEQ ID NO: 260907 - DNA, 1009 bp, Zea mays
cggtcgaatccgtccgcccacgcgtccggaaccgcagaagtgcagcagaacgatcggatctagcagaattctctcgacctcatcggcgttggcggagcgcgtgttgaccggagatggcgccgagcgggtggaggaggagcgcggcggcgcgggtcgcctggcgcccggccacggtttgcctgtggctcgcgctcgccgccgccgcactgacgctcgcccaggctaagaaggacctgacggaggttacccacaaggtctacttcgacatcgagatcgacggcaagcccgcaggccggattgtcatggggctttttgggaagactgttcctaagacggcagagaacttccgagctctttgcacaggagagaaaggggttggcaagagtggcaaagccctccactacaagggaagtaagttccacagaatcatccccagcttcatgctccaaggaggtgacttcactctcggggacgggaggggtggtgaatctatctacggcttgaagtttgcggatgagaacttcaagatcaagcacactggtccaggccttctgtccatggccaatgccgggagagatacaaacggatcccagtttttcatcaccacagtgacaacaagttggttggacgggaagcatgtggtgtttggcaaggtgttgtctggaatggatgttgtgtacaaggtcgaagctgaaggccggcagagtggggagccgaagagcaaggttgtgatagcagatagcggcgagctgccgatgtgacggcgtgctgaattgatgttccatcccgaaacatgatgataagaagtttctggtggccgtctgtcgttctagaactgttaggccctctttggaatcttactgtttttacagttttgaaggaatactatggtttaaaaagtcaaaatctgtttgcttgtataaggtaaaacgcagtttcgaataccatggtctatctaaagcgtagtatttttacagttttgaaaacttcccttggacttaagttttcc

SEQ ID NO: 260908 - DNA, 664 bp, Zea mays
gcaaaaccatcagatctagcagaactctctcgacctcatcggcgttggcggagcgcgtgttgaccggagatggcgccgagcgggtggaggaggagcgcggcggcgcgggtcgcctggcgcccggccacggtttgcctgtggctcgcgctcgccgccgccgcactgacgctcgcccaggtgctcgtcaacctcgctaagaaggacctgacggaggttacccacaaggtctacttcgacatcgagatcgacggcaagcccgcaggccggattgtcatggggctttttgggaagactgttcctaagacggcagagaacttccgagctctttgcacaggagagaaaggggttggcaagagtggcaaagcccttcactacaagggaagtaagttccacagaatcatccccagcttcatggtccaaggaggtgacttcactctcggcgaccggaggggtggtgaatctatctaccgcttgaagtttgcggatgagaacttcaagatcaagcacactgctccaggcctcctgtccatgtacaatgccgtgagagatacacacggatcgcagtccgtcatgaccacagtgtcaccctttccgatggacccgacggatgttgcggacttcctgacgtcgtcggctggcgatacgttccggatcgtgaaatctt

SEQ ID NO: 260909 - DNA, 797 bp, Zea mays
agcccacgcgtccgcccacgcgtccgcccacgcgtccgcttccgagctctttgcacaggagagaaaggggtcggcaagagtggcaaagccctccactacaagggaagtaagttccacagaatcatccccagcttcatgctccaaggaggtgacttcactctcggggacgggaggggtggtgaatctatctacggcttgaagtttgcggatgagaacttcaagatcaagcacactggtccaggccttctgtccatggccaatgctgggagagatacaaacggatctcagtttttcatcaccaccgtgacaacaagctggttggacgggaagcatgttgtgtttggcaaggtgttgtctggaatggatgttgtgtacaaggtggaagctgagggccggcagagcgggcaaccaaagagcaaggttgtcatagcagatagcggcgagctgccgatgtgatgagctgaactgatgttctatctggaaggatgttaagaagttgctggtgaccatttgtcgttctggaacttttattagtgcctgaaattggactgaaccagtttcttctgtttgctacagtgactttcttatttacttattagttgaaaaggttttaaaaggttgagctaatcagtggtctcgcgcttctgcatcgttttcagtttcatcttctagaatctagaataggtttttggttgccatgtgggagtcttttagtcccaaataagaccttgtttgttattccaattccatgtaaattggatgagatcgaaaaatttataaaagattttcacttgttt

SEQ ID NO: 260910 - DNA, 368 bp, Zea mays
cggacgcgtgggcggactcgtgggcggactcgtgggcggacgcgtggtgagccgaatagggaggttgtgatagcagatagcggcgagctgccgatgtgaccgccagcttaactgatgttccatcccgaagcatgatgataagaagttgctggtggccgtctgtcgttctagaactggtaggccctggttggaatcttagtaatttttcccgttttgaagcaatgctatggtattggatgatactatggtatagaaagtcaaaatctggttgtttgtatcgggtaaaacgctgtttcgaatactatggtgtccctgccaggctacaatcccgagtatttttacagtattgaaaacttcacttggacttc

SEQ ID NO: 260911 - DNA, 569 bp, Zea mays
  unsure (1)..(569): unsure at all n locations
ngttgtcgtgtgcgactacttccagagggctaggcgaggggccgtttacagaagactgcagcaaaaccatcagatctagcagaactctctagacctcatcggcattggcggagcgcgtgttgaccgcagaaggcacccagcggatggaggaggagcgcggcagaacgggtcgactggcgcccggacacggcttgcctgtggctcgcgctcgcctacgtcagactgacgctagcccaggctaagaaggacctgacggaggttacccacaaggtctacttcgacatcgagatcgacggcaaacccgcaggccggattgtcatggggctttgtgggaagactgttcctaagacggcaggtatttcgaacttgctattaacaattcagaactatcttctcatgaggcaagagaatactaatggaccctacttattgcttacctacagataacttccgagctctttgcacatgagagcaaggggtcggcaagagtggcataccctccactacagtggaagtaagtgccacagaatcacccgagcttcatctcctaggcagtgacttcactctcg

SEQ ID NO: 260912 - DNA, 1145 bp, Zea mays
cccacgcgtccgagacaaaggagggcctgaagcactctcagtcggagactggcaccaaacgagccaaacaacaatgtgctcagagatctcgtgtccggaagctccagtatattgcagagcttgagagaagagttcagtccttacagacagagggaatagaagtaactgctgaaatggattttctcggtcagcaaaatatcatgttagacttggaaaataaagccttgaagcaacggcttgagagtctatctcaggagcatctcattaaacgttatcagcaggagatgtttgagagggaaattggccgccttagaacattgttccagcagcagcaacagcaacaacatgtgccgcagcagcaggctcctacccatagccgcagtaacagtagagacctggattcgcaatttgcaaacctgtctctgaaacacagtgatcccagttcagggcgcgacgctttctctggcctccgcatttaagatccctttggtccagcttttggatccctgagctttgcagaacctgctgcccctttatgccactctttgtggttgttagtagcatcatgagaggagcagcaccggtgaaccgggaatctcatcccacggtgaataaagctggaaaggttaataactgtggatctggtccttagttctttcagaatgtgcacctggcggtcatcgttagcttctgtccattattgatgcttgaccagtcggaggtgtttaggatctgtttgcagattgatgacttccatggatccttgtatcagtttgaatctagaacactaaggttctaatccattcctttttagtcgattctctgtcgagtttaggcgccatggcccttgtattagtgtggcacacgaatggaatgtgagctggtcctctttaggttatgccacatcctggaaaaccgttgcgtgaggagttgtcgggccatgtccattgtcctaataagatggtgaggttgaagggctggtgcagttcagtttcattttatttgtgatgtgcacagcaagatattggatactttgggttcttacatttatttgagcactgtatttttatcgcattgtgatgacagtatattccaagttcattttagctgccaaaaaaaaaaaaaaaagggcggccgctcgcgat

SEQ ID NO: 260913 - DNA, 869 bp, Zea mays
cccacgcgttcgcccacgcgtccgcaggaaagctggagatggaagcgaggaggaattaaagaggacaataaacaaagcagaaaaccatacaggcaatgacaggttgtgcgaggggttgtgtacttgtgtgagaggctgccgcggacgtgtggaacttagcgggtgttgtcatagttcataaacaattcgtggagaaccaatctagcaagctagtagcctaaaagtggagatagccgatgaggtcttaagatgcaactgaagcaaaagaggctactacatcaaggagcagttcaaccactcatttgatggcatagtccatttgatgaggtcttagatgcaactgaacccactccaaggggtttgctcaggaacattgacttgaatttagatccaactgatgaagaagatgagattacagtgccaccccaagcccagtcgatccagcgattagttccgttgcagccactgcgggaccatctgttgcactttctgggtgcttgggaactgcctgacatgaacaatatggagatgggccctgtccagtttgctttgtaaaaaaaaatccagattggagagaatgggtattatgccaatcaagcctagctctgcccttatagctttcagagtggataagtaggatagcaggccaggtgtaggttcatcttaactctttaaagattctcatgtatcatgtgtatcatagccgccaaagctgcagatgcagcttataatgtgccaaaggtttaaggttggctggctagttgactgtaacgttccaaagctaaattcgctcaacacgtagtgctttggcatgtagtaccagttgtacttgtacactcctgtctccagttgctctccagtttgatgtt

SEQ ID NO: 260914 - DNA, 574 bp, Zea mays
agcttcgatccggactagctgcccctgccttaaatacaagtatgttgcttagttggatcatcttgatacaagtactgtgtgttgaagggcgggcctggtgcagcggtagagcctaccgtttgtaactggaaggtcccgggttcgagccccagcctctgcatattatgcgggtaaggcttggcgcttaaagatacccttccccagaccccgcacagtgcgggaagcctacggcactgggtacgcccttttttcaccatcaaataactatgctgttacgcaatcatcttatttagctaacaaagtgcatacttcatttctaatataattcccagtgtaagtaaactggcagtaaattgcccttttaaaaaaatatcatagtttgatgattcaaacctttctgctgaatctgccaagcaccacagatacaataaaatctattgaatagtttgtagtatacaaacaagtgaatcaagcatactgcatgctctcaagtcttgctcaacacagtgttttcttcaatctcaactggaagatatgtaagaagataagatgtgtgcacaatgtatgtagtatc

SEQ ID NO: 260915 - DNA, 1251 bp, Zea mays
agcttcgatccggactagctgcccctgccttaaatacaagtatgttgcttagttggatcatcttgatacaagtactgtgtgttgaagggcgggcctggtgcagcggtagagcctaccgtttgtaactggaaggtcccgggttcgagccccagcctctgcatattatgcgggtaaggcttggcgtttaaagatacccttccccagataccgcacagtgcgggaagcctacggcactgggtacgcccttagttagcacaagggtatttttattattgaagtccttacaaggtcatgtcgttctagtgtttctatttctttgctaccagtaggaccctctcctgatatacagcgtatcttggcaggcatagcatacaattggccaattcttcttggtggacaagctcactggacagttggacttgtagcaaccttgatggctattagtagcatcattgctgctgatacatctgctttcctttgtggaagggcatttggtcgtacccctttgactaacataagccctaagaagaccttggagggtgctttagctggcctagctggctgcgtactgaccactgtgctgctgtcgactgccttacgctggccaaggtcgcttttgagtgccacagcttatggaatcctgatcttcctgggttcgttattcggggatcttgttgaatctctgatcaagcgcgacgctggtgtgaaggactccggatcgctcattcctggtcatggtgggattcttgaccgagttgacagctacgttttcacgggggcactttgctactcttttgtcagagtggctctacccctgtacggggtctgattagagcaccggccttcttgttgttttgcctttctccttccatcagcaatgcggtcagtcaccatacattttaacatgcaacgatgagtatttgctgggatgccctagatcagttcttcatctcaagacaacgtggtcttccctccaagcgaatttggtggccactagctcgtcatcgacattgcttcttgctttgggtttgagatggcctttccagctcaaccagtttcttgcaagccttgtaactctgtgtgtacatagtttattttttcatatagagagagagtaaaaaggaaaggctaattattcatcacaaaagctgttaacagtgcattgaggcagcttatgtcaatatgtaccaaactacacttgttttaataattcaaggcactaaaatccctatcaaaaaaaaaaaaaaacaa

SEQ ID NO: 260916 - DNA, 602 bp, Zea mays
gctgaattgtcatcaggaaagctggagatggaagcgaggaggaattaaagaggacagtaaacgcctgatcgcagcggtagagcctaccgtctgtaaccggaaggtcccgggttcgagccccagcctctgcatattatgcgggtaacgcttggcgcttaaagatacccttccccagaccccgcacagtgcgggaagcctacgacactggaaagcagaaaaccatacaggcaatgacaggttgtgcgaggggttgtgtacttgtgtgagaggctgccgcggacgtgtggaacttagcgggtgttgtcatagttcataaacacttcgtggagaaccaatctagcaagctagtagcctaaaagtggagatagccgatgaggtcttaagatgcaactgaagcaaaagatgctactacatcaaggagcagctcaaccactcatttgatggcatagtccattgaatgaaggcttaaatccacctgacccaattcaagggggttggttcagaaccattacctggaattaaattccacttaataataagatgacatttccggtgccaccccaaagccagttcattcaaccaattagtccgattgaagccat

SEQ ID NO: 260917 - DNA, 687 bp, Zea mays
ctcgggagtacttcgagctcgtccgcagcactgccagcggaggcgggagcccgccggcgcgatacgtgtcccgcgcgtgctccgccatctgcgctctcatgcccatccttacgctgtactatggacgcatggatgttactgtggcattttctgcattcgttattgccatagcattgcttttacaaagaggaaatcctcgttttgctcagctaaccagttcagtttttgggttattttactgtggctatctaccttctttctgggttaagctccggtcaggattagctgcccctgccttggatacaagtcatagcatgccgggggccaattcttctgggtggacaagctcactggacagttggacttgtagcaaccttgatggctattagtagcatcattgctgctgatacatctgctttcctttgtggaaagggcatttggtcgtacccctttgactaacataagccctaagaagaccttggagggtgctttagctggcctagctggctgcgtactgaccactgtgctgctgtcgactgccttacgctggccaaggtcgcttttgagtgccacagcttatgggatcctgatcttcctgggttcgttattcggagatcttgttgaatctctgatcaagcgcgacgctggtgtgaaggactccggatcgctcattcctggtcatggtgg

SEQ ID NO: 260918 - DNA, 1045 bp, Zea mays
atatacaaaccctcttcaaaagccgccagatttactctctccgcctccaccgcgcctgcccacgataacccagaggcctcgagaagggctggaagcaccgagagcgctccagagatgtcggcggatgagttgcggttggagctggacgagctgcggcggctggagagcctcgccaagcacccccgcgtccagatcctcctcgccaacgagatccgcaacgttgaagcgaagttggcgaaggcaactgaaccgtcaccggagccactagcggcggcttccgcgcccgcggcggcggcgcgttctgatttgagctacgccacgttgggctcgttcagctgggaacaggacaacgagaagatcaggatatatattccccttgagggagtcgaacaagggaaggtggaggctactttcaagccaacatcagtagatgtaaagtttcatgatgtcaaaggcaagaattaccggtgtgccataccaaagctgaacaaggaaattgttcctgagaaatgtaaggttgtggtgaaaccaaccagggttgttgttactcttttcaagggttctaaaggcaactggttagacttgcacttcaaggaagacaagttcaagccaaacatggacaaggaaaaagatccgatgtcaggaattatggacttaatgaagaacatgtacgaggagggcgacgaggatatgaagcgcacaatagccaaagcttggtctgatgccaggtctgggaagacgactgattcgatgagcggattacgttgagctggtataatcagttgatgggcttaagttttctgcgctagcccctgcagccgaagtgtttctgatggttcaaatagcgttgcagtgccttgttggtgttagtccttgtttatcttacatttgtgagtgaagttggacgtgccaaacatatttaaatatatcctcttgaacgggggaaagatcatatcaagtccaaaaggttttgtgcttttgtggaatttccacggcgtttctgtttgccccccaaccatggtagttacccccccagccttgccag

SEQ ID NO: 260919 - DNA, 524 bp, Zea mays
cgataacccagagacctcgagaacggctggaagaaccgagagcgctccggaaatgtcggcgggtgagctgcggttggagctggacgagctgcggcggctggagagcctcgccaagcacccccgcgtccagatcctcctcgccaacgaaatccgcaacgttgaagcgaagttggcgaaggcaaccgaaccatcgcctgagccactggcggcggcttctgcgccagcgcccgcgcccgctgcgcgtcctgttttaagctacgtcactcttgggtcgttcagctgggagcaggacaacgagaagattaggatatatgtttcccttgagggagttgagcaagagaaggtggagactactttcaagccaacatcagtggatataaagtttcatgatgtcaaaggcaagaattaccggtgtgctataccaaagctgaacaaggaaattgttcctgagaaatgtaaggttgtggtgaaaccaaccagggttgttgttactcttttcaagggttctaaaggcaactggttag

SEQ ID NO: 260920 - DNA, 1567 bp, Zea mays
cccacgcgtccgcccacgcgtccgcccacgcgtccgctcctctgctctcccccacctcccggtccggcagcagagagcgggggtgcagagagatcgagatccggaggccgcgagtgggagcgccaccaccagcgactgcggcaatggcgggcacggtgacggtcccggggtcgtcgaccccctccacgccgctgctcaaggacgagctcgacatcgtgatcccgacgatccgcaacctcgacttcctggagatgtggcggcccttcttccagccctaccacctcatcatcgtgcaggacggcgacccgaccaagaccatcaaggtgcccgagggcttcgactacgagctctacaaccgcaacgacatcaaccgcatcctcgggcccaaggcctcctgcatctccttcaaggactccgcctgccgctgcttcggctacatggtctccaagaagaagtacatctacaccatcgacgacgactgcttcgttgccaaggacccatctggcaaggatatcaatgctcttgagcagcacatcaagaacctcctcagcccatccaccccgttcttcttcaacaccctgtacgacccctaccgtgagggtgctgactttgtgcgtggataccccttcagcctcagggagggtgctcacaccgccgtctcccacggcctgtggctgaacatccctgactatgatgctcccacacagctggtcaagcccaaggagaggaatgagaggtatgttgatgctgtcatgacaatccccaagggaaccttgttccccatgtgtggcatgaaccttgccttcgacagggatctcattggccctgctatgtactttggtctcatgggtgatggccagcccatcggtcgctacgacgacatgtgggcaggatggtgtgtgaaggtcatctgcgaccacctgagcctgggagtcaagactggcctgccatacatctggcacagcaaggctagcaaccccttcgttaacttgaagaaggaatacaagggcatcttctggcaggaggacatcatccccttcttccagaacgtgaccatccccaaggactgcgacaccgtccaaaagtgctacatctacctctctggacaagtgaaggagaagctgggcacgattgacccctactttgccaagctcggtgacgccatggtcacctggatcgaggcctgggatgagctgaacccggctggccccgcggctgggaaagacaaggccaagtagatgggagtccctgggggtgcattcacttccctgctgaagtgaaaagaaagtatgattgggtccagcctaggctcccccatagatatagctctttttgagagggaagagggattaattcagcagcaggttctttttataaattctttgttgttatgaagcaggcggtacttttgtagttgatgaaggggatttgtcgccactgtcatttacataattcggacaataatttatattgtgtaatcttgagaatcaaagcactgtttgtgttaaaaaaaaaaaaagaaaaaaaaaaaaaagggcgccccccgcaaatgggccccttcaccccg

SEQ ID NO: 260921 - DNA, 677 bp, Zea mays
gggtgatggccagcccatcggtcgctacgacgacatgtgggcaggatggtgtgtgaaggtcatctgcgaccacctgagcctgggagtcaagactggcctgccatacatctggcacagcaaggctagcaaccccttcgttaacttgaagaaggaatacaagggcatcttctggcaggaggacatcatccccttcttccagaacgtgaccatccccaaggactgcgacaccgtccaaaagtgctacatctacctctctggacaagtgaaggagaagctgggcacgattgacccctactttgtcaagctcggtgacgccatggtcacctggatcgaggcctgggatgagctgaacccgtcgacccctgccgccgcaaatggcaaggccaagtagatgtgccatcacttcggcactggagtgaaaaagaaagtatgattgggtcctgcctaggccccatagatatagctcttttttgagaaggaagagagattaattcagcagcagcttttataaattctttgttgtcatgaagcaggtggttcttttgtagttgatgaaagggatttgtcgtcgctatcgtttacataattcagacaataattttatattgtgtaattctgagaatcaaagcactgtttgtgttatagcatatctaagaatgagcattgctgttgtttcc

SEQ ID NO: 260922 - DNA, 1150 bp, Zea mays
gcagcacatcaagaacctcctcagtccatccaccccgttcttcttcaacaccctggacgacccctaccgtgagggtgctgactttgtgcgtggataccccttcagcctcagggagggtgctcacaccgccgtctcccacggcctgtggctgaacatccctgactatgatgctcccacacagctggtcaagcccaaggagaggaatgagaggtattgcattttgctctcgtcttttatctgacattctagcaactgccctgctgctgcatgaagggttgggtctaactcccttttttttcaggtatgttgatgctgtcatgacaatccccaagggaaccttgttccccatgtgtggcatgaaccttgccttcgacagggatctcattggccctgctatgtactttggtctcatgggtgatggccagcccatcggtcgctacgacgacatgtgggcaggatggtgtgtgaaggtgtgtggtttctctgatcttgcttctacagctgtttactttgttcccgaaacataatgtacattggcctgatgatgatcttacgactgaaacaataacttaggtcatctgcgaccacctgagcctgggagtcaagactggcctgccatacatctggcacagcaaggctagcaaccccttcgttaacttgaagaaggaatacaagggcatcttctggcaggaggacatcatccccttcttccagaacgtgaccatccccaaggactgcgacaccgtccaatagtgctacatctacctctctgcacaagggaaggagaagctgggcaccattgacccctactttggcaagctcggtgacgccatggtcacctggatcgaggcctgggatgagctgaacccgtcgacccctgccgccgcaaatggcaaggccaagtagatgtgccatctcttgggcagtgtagttaaaaagacagtatgattcggtcccgcttagcccccatacagatagctcttttttgacaaccaacagagattaatccatcaccagcttgcatacactctctgttgtcctaacgacgctgagttctgtagtagttcatgccatgcatctgtggccgctctcgtttaaatgactcagtgcataatttgatattatgtaactctgataatcgaaaatatac

SEQ ID NO: 260923 - DNA, 614 bp, Zea mays
  unsure (1)..(614): unsure at all n locations
ccccttcgttaacttgaaggggttgctagccttgctgtgccagatgtatggcaggccagtcttgactcccaggctcaggtggtcgcagatgaccttcgttaacttgaagaaggaatacaagggcatcttctggcaggaggacatcatccccttcttccagaacgtgaccatccccaaggactgcgacaccgtccaaaagtgctacatctacctctctggacaagtgaaggagaagctgggcacgattgacccctacttggtcaagctcggtgacgccatggtcacctggatcaaggcctgggatgagctgaacccgtcgacccctgccgccgctaatggcaaggccaagtagatgtgccatcacttcggcactggagtgaaaaagaaagtatatttgggtcctgcctaggccccatagatatagctcttttttgagaaggaagagggattaattcagcagcagcttttataaattctttgttgtcatgaagcaggtggttcttttgtagttgatcaaaaggattagtcgggggtgtcgttttcatcagtcacccccttattttatattgagtaacccccagaaaaaaaaaaaaaaaaaaaaaataaatnaaaaa

SEQ ID NO: 260924 - DNA, 1775 bp, Zea mays
tccaaatgtggggaagagttcgttcatgaacaaggttacaagggcagatgtggatgtccagccatatgcctttacaacaaaatccctgtttgttggccacacagattacaagtacctgcgctaccaagtgattgacacaccaggtatacttgaccggccttttgaagataggaacatcatagatatgtgtagcatcactgcgctggcacacttgagggctgcggtgttgttcgtgctggacatttctggatcttgtgggtacagtatcgctcagcaagctgcactcttccacagtataaagtctctgtttatgaataagcctttggtcattgtgtgcaacaagactgacttgcagccacttgaagggctttctgaggatgacatgaagctagtcatggagatgaaggcagaggctttgaagactataatccaagctggtggtcctaatgatgagggtgttttgttgactatgagcactttaactgatgatggtgtaatggctgtcaaaaatgctgcatgcgagaggcttcttgaacagagggtggatgtaaagatgaagtcaaaaaagatgatggattgcttgaatagatttcatgttgctctgccaaagcctcgtgacaacaaggagaggcctgtttgcatccctctggctgttctggaagctagggctaatgctgctgcaaaggaaaagaagcttgagaaggacattgagaatgagaatggaggtgctggggtctattctgcaagtctcaagaaacattatattttggccaatgatgaatggaaggaggatattcttccagagatactggatggtcacaatgttgccgattttctggatccagatatccttgtaaggtgtgaagagttggaaagggaggaagggcttcgtctggaagaacaagctgcagaagatgctttccagattgatggtcatgaactaactcaggaacagaaggagattttggctcagattaggaagaagaaggcattacttatccaagaacatagaatgaagaagagaactgcagaaagccgtcctattgtccctagaaagtttgacaaagataggaaattcacaactgataggatgggacgccagctttcatccatgggtatggatcctagtgctgccatgaatagaattcgcagtcagtctaggggtcgcaagcgtgagaggtcagtgagcagagctgcagcggatggtgacggtatggagatagatggccagcaaagcaacaagaaattgcgtcggacatcaaggtctaggtctaggtctaggtcacgtgctcctgaggaagtccttcctggagaaggattcaaggactctgagcagaagaaaaaggctatcaagaaagcaaaggccgctactaggaacaggaacaaggaagctcgtcgtggagaggctgaccgtgttattcccactttaaaaccaaagcatttgttttctgggaaacgcactcttggaaagacaagcaggcgataagctcagtacctcactggatctggtagtaaaggactggtgcaattttggtgtgagcaatttgatgaaacgggagcttttatgtctagcacttatgtatgctacttatttatgaaatgtcttgctgttgctgtatcatggtcctctttaagacagttttactagtttatacatgtattacttcgaattggttgggttactatatattagctttctggtgtttgattctcttaatgggaccgaagtattcaactctcctacttaaaaatgtttgcaatgcatctgttggatc

SEQ ID NO: 260925 - DNA, 398 bp, Zea mays
caaggactctgagcagaagaagaaggctatcaagaaagcggaggcctctacaaggaacaggaacaaggatgctcgccgtggagaggctgaccgtgttattcctactttgaaaccaaagcatctgttctctgggaaacgcactcttggaaagacaagcaggcgataagctcagcacctcactgcatctggtaataaaggactggtgcactgttggtttgatcaatttgatgaaacgggtgttttttttgtgttcagccagcacttatttatgctactatttacgaaatttgtcttgatgtctctggtcctcttgatatatagttttagtgtttaattctgttgaatggtacaaagttatccatgtcccctactcaacatgtttgtagtttgcccatgag

SEQ ID NO: 260926 - DNA, 1683 bp, Zea mays
cccacgcgtccgcccacgcgtccgccgaatcccgagcacaggccgccgctcgctcgctcgctgcagctacgcacgcacgcgcctgctcctccccttagcttccacaaggctcgactcggccggcggcgatggcgcggaagaagatccgggagtacgactccaagcgcctcctccgggagcacctcaagcgcctcgccggcatcgacctccagatcctctccgcgcaggtcacacagtcaacggatttcactgagcttgcaaaccaggagccgtggctctcatctatgaagttggttgtgaaacctgacatgctctttgggaaacgtgggaagagtgggcttgtggccctcaacctagatcttgcccaagttcgccaatttgtcaaggagcggttgggagttgaggtcgagatgggtggctgcaaagctccaattacaaccttcatagttgagccatttgtgccacatgaccaagagtactacctttcgattgtctcagagaggttgggcagcaccatcagcttctcagagtgtggagggattgagatcgaggagaactgggacaaggttaagactattttccttcctactgagaagccaatgacgtctgattcatgtgctcctttgattgcaacccttccattggaggcacgcggaaaaattggtgacttcattaaaggagtgtttgccgtcttcctagacttggatttctcatttcttgagatgaatccgttcaccatggtcaatggggagccatatcctctggacatgagaggagaactagatgacacagcagctttcaagaacttcaagaagtggggaggtatagaatttcctctaccttttggaagagtactcagccctacagaaagtttcatccatgaactagatgagaagacaagtgcctctctgaagttcacggttttgaacccgaaaggtcgcatctggaccatggtcgctggtggtggtgctagtgtcatttatgctgatacagttggagacttgggatatgcatcagagcttggaaactatgcagagtatagtggtgctcctaatgaggaggaggttctgaattattctagagttgttcttgattgtgcaactgctgatcctgatggccgtaagagagcccttctaatcggaggaggaatcgctaacttcacagatgttgcttctacatttagtggcatcattcgggctttaagagagaaggagtccaaattaaaggctgcaaggatgaacatttatgtccggagaggtggtccgaactaccaaactggactcgccaaaatgcgcaccctaggcgccgaacttggcgttccaattgaggtctatggaccagaggcgaccatgactgggatctgcaaagaagccattgattgcatcatggccgcgtaaatcacaaatgtggttgttccatttgaagtcacatccgttttgtactagacgttccttgtacgtgattgctctggtaaaacagagaacgatcattgtcatgagtaaactcggcctttgtaacacagttacgcaagtaataattaagatcttggtttggtgctctgccacccttctagggtgggccggtgaggtgaatgtacaaataacaatgcactttgtgatccaccagattgcagtgctctggtatttctagggtcttgtactgcctgtgctgttttgtgttgtt

SEQ ID NO: 260927 - DNA, 1359 bp, Zea mays
cggacgcgtgggcataaacaaaaaccagtcctttgttcttcttcccccggcacgcccagcgccagtcaccaaccttccactccctccctccgtcgccatggcgcgcaagaagatccgggagtacgactccaagcgcctcctcagggagcacctcaagcgcctcgcgggcatcgacctcaccatcctctccgcccagatcacgcaatcaacggacttcgcagagcttgtgagccagcagccatggctgtcaaccatgaagctagtggtgaagcccgatatgctgttcgggaagcgtgggaagagcggcctcgtggctctcaacttggatttcgatcaagtcaaggagtttgtcaaggagcggctgggggttgaggttgagatgggtggctgcaaggctccaatcacgaccttcatcgtcgagccatttgtgccacatgatcaagagtactacctttcgattgtatctgaaaggcttggcaacaccattagtttctcagaatgtggaggtattgagatcgaggagaactgggacaaggttaagactatctttcttcccacagagaagcaaatgacacctgacgcatgtgctccattgattgccaccctgccattggaggtccgcacaaagataggtggtttcattagagctgtattttctgttttccaagacttggatttctcatttcttgagatgaacccattcaccttggtaaatggtgaaccgtatcctctggatatgagaggagaactagatgacacagctgctttcaaaaacttcaataagtggggcaatattgtgtttcccctaccatttggaagagttctcagtccctccgaaagttttatccatgaactggatgagaagacaagtgcttctctgaaattcacggtactgaacccaaaaggacgcatctggacaatggttgcaggtggtggtgctagtgtcatatacgcagacactgttggtgatttgggatatgcttcggtgctaggatattatgcagagttcagctgagcttccatggtgtatgtggtttttctttaatttatttttcttcttttttctctattcttaatttctttctcttttttcttttcttctcttttattcttttttttaacttttttcttacattttcttttattctattttttttcctttctttctttatctattttcttttacttctttttctttcctcttccactcttttatattttccttttcatattcatttttttatatattattattttttatattctcttctatcctcattttttcattcctcctttttactatttcctctcttttcttatttattctttttttttttcttattttaaatttatattcac

SEQ ID NO: 260928 - DNA, 757 bp, Zea mays
agctgtgcccctgcggtcccggtccccgggtcgacgccacgcgtacgcttcgctttggcggacgcgtggggtggtgctagtgtcagttatgctgatacagttggagacttgggatatgcatcagagcttggaaactatgcacagtatagtggtgctcctaatgaggaggaggttctgaattattctagagttgttcttgattgcgcaactgctgatcctgatggccgcaagagagcccttctcattggaggcggcatagctaacttcactgatgttgctaccacattcaatggcatcatccgagccttaagggagaaggaatccaagttgaaggcttcaagaatgcacatttatgtccgccgaggtggtccaaattaccaatctggactggctaaaatgcgtaagcttggtgcagaactcggcgttccaattgaggtgtatgggccagaagcgactatgactggaatctgcaaacaagcaattgaatgcatcatggctgcagcgtaatcagagcgtagctctgggtagtttgggatctgcaaacacgcaattgaatgtgtcatggactcagcataaatgagagatggatagtagttgcattatatagttcacacatggtgtttctgttttttgtttcagatatgttgtagcgtgttgtttgaacgaaaccttcacagatcattactgcaaagaaattgctgtgtgttaaaataaattcaaagtctagtttgaaaaaaaaaaaagtcgagactagttc

SEQ ID NO: 260929 - DNA, 1312 bp, Zea mays
ctaggtattgcagaggacactgaagaaagtctcaaggagcatatggctgcagctttgcgttctaatgctgatataatcattacttctggtggtgtttccatgggcgacagagatcttgtcaaaccttgcctggcaaagatgggtaaaattcactttgagaagatccagatgaaaccaggaaagccgttaacctttgctgagatcaccacacaagacacgccaaagccatctaaaacagttcttgcatttggtttgcctggaaatccagcgagctgcattgtttgctttaatctttttgctgctcctgcaatccgccttctctctggctggtcaaaccctcatctgcaaagagtgcatgtgcgcatatcacatcctttaagagcagacccacatcgtacagagtttcaccgtgcagcaattagatgggtgcttgatgatggatctggtcgacctggttttgttgctgagagtactggccatcaggctagtagccgtcttcttagtatgaaatctgctaatgccctgctggaaataccatccactggacaaatattggcagctgggacatctatccaagccatacttatttcagacataataacttcttcagataaactgcctactccttcaaatccgtatccatcttcgtggtccttctgcaaaaagtatttccgcagatgtatctcagattgcatctccacaggatgctgaagttaaagtcgcaattctgactgtaagtgacactgtttcatcaggtgctggccctgataggagtggcccaagagctgtatctgtagtgaattcttcatcagagaaactgggtggtgcaactgtggttgccactgcagttgttcctgatgaagtggacaagatcaagggcattctggtacaatggagtgatattgaccatgttaacctcattctgacattaggtgggactggcttcacacccagagatgtcacaccggaagcaacaaaaatggtgatacagaaagaagcgcctggtctcacatttgttatgcttcaagaaagtttgaagattacaccattcgcaatgctatcccgggccacagctggaatcagaggatcaacacttatcatcaacatgcctggcaacccaaatgctgtggcagaatgcctggaagcactcctcccagcgctcaagcacgccctgaagcagatcaagggtgacaagagggagatgcaccctcgccacactccacatgccgcagcggcgcctgtggaccagtgggagcggagcttcataaccgcatcatcttgtagtggtgggtgctcatgttatcccctgaag

SEQ ID NO: 260930 - DNA, 534 bp, Zea mays
cgggaagcgtgggaagagcggcctcgtggctctcaacttggatttctcatttcttgagatgaatccgttcaccatggtcaatggggagccatatcctctggacatgagaggagaactagatgacacagcagctttcaagaacttcaagaagtggggaggtatagaatttcctctaccttttggaagagtactcagccctacagaaagtttcatccatgaactagatgagaagacaagtgcctctctgaagttcacggttctgaacccaaaaggacgcatctggacaatggttgcaggtggtggtgctagagtatatatacgcacacactgttggtgatttcagacgagttacacatggaggtcacaatgcctggcctgtaccgcgttgtacacgggattaatttgttcgaccccaaattcaacattttgtcttctggcgcggacctgttcattttcttaccgtacaccgagtcgtacaagaagcttgacctcccttcacccggagattgatgagcttcttttcagtcaaaccga

SEQ ID NO: 260931 - DNA, 1754 bp, Zea mays
tggtcgcgtgggctgaccgccagacccaagccaacaagcaagagcattactacttctgcttccgaccgaaacctttcttcgaacgcaaaaagaaccccaccccgaccgacctaccctaatcggcgatggcgacggtggcgatggacatctcgaagcccacgccagtggcgtccggcgacgaggccgcggcggcggccaaggggaggagcggcggagggggcgaggggctgcggcagtactacctgcagcacatccacgacctgcagctccagatccggcagaagacccacaacctcaaccgtctcgaggcccagcgcaatgacctcaactcccgagttagaatgctcagggaagagttgcagttgcttcaagagcctggctcatatgttggtgaggtggtgaaggtcatggggaaatcaaaggttctggtgaaggtacaccccgaaggcaaatatgttgttgatatagataagagcattgatatcacaaagatcacaccttcaacaagagtcgctcttcgtaatgacagctatatgctccatctgatcctaccaagcaaagttgatccattggtcaatctcatgaaagttgagaaggttccggattctacctatgatatgattggaggccttgaccagcaaattaaagagatcaaagaggtcattgagcttccaatcaaacatccggaactatttgagagccttggaattgcacaaccaaagggtgtccttctttatggacctccaggcacaggaaagacattgctggcacgtgcggttgctcatcacactgactgcaccttcatcagggtgtctggttctgagttggttcagaagtatattggtgaaggctcccggatggttcgggaactctttgttatggccagggaacatgcaccatccattatatttatggatgaaattgactctatcggatctgctagaatggagtctggaactggcaacggtgacagtgaagttcagcgtactatgcttgaacttctaaaccagcttgatggttttgaagcatcaaacaaaattaaggttttgatggcaacgaacagaatagacattttggatcaagcccttctgaggcctggccgcatagacaggaagattgaatttccaaatcctaacgaggattcacgtttcgatatcttgaagatccattcaagaaaaatgaacttgatgcgtggcattgatctgaaaaagatcgcggaaaagatgaatggggcctcaggagctgagctcaaggccgtctgcacagaggctggaatgtttgctcttcgtgagagaagggtgcacgttacccaggaggacttcgagatggcagtggccaaggtgatgaagaaagacacggagaagaacatgtccctgcgcaagctctggaagtgaggctcgtgcccacctttcacggcctccccgaagctagtggcagtgccttcatatccatatcttttaccaaagcagtggaatggtgtaacggcatgctctggacaatgttatctcaagttgcgccgcgcatgcttatgtttaaaattttccttataacgtctgtagtgtgttgttgcaaagttgattggctttatcagatcagctagattacggtactaatacattgctagctcgcgatgtggacactgcataatggttacttgctcggatatccacattctcgtgtgtcacatgcattgcaataaaaaaaaccattcaatatctcatatttttaaaaaaaaaaaaaaaaagggcggccgc

SEQ ID NO: 260932 - DNA, 960 bp, Zea mays
tggacgcgtgggcggacgcgtgggcggacgcgtgggcgggcacaggaaagacattgttggcacgtgcggttgctcatcacactgactgcaccttcatcagggtgtctggttctgagttggttcagaagtatattggtgagggctcccggatggttagggaactctttgttatggccagggaacatgcaccatccattatatttatggatgaaattgactctatcggatctgctagaatggagtctggaactggcaacggtgacagtgaagttcagcgtactatgcttgaacttctaaaccagctcgatggttttgaagcatcaaacaaaattaaggttttgatggcaacgaacagaatagacattttggatcaagcccttctgaggcctggccgcatagacaggaagattgaatttccaaatcctaacgaggactcacgtttcgatattctgaagatccattcaaggaaaatgaacttgatgcgtggtatcgatctgaaaaagatcgcagaaaagatgaatggggcctcaggagctgagctcaaggccgtctgtacagaggctggaatgtttgctctccgtgagagaagggtgcacgttacacaggaggacttcgagatggcagtggccaaggtgatgaagaaagacacggagaagaacatgtccctgcgcaagctctggaagtgaggctcatgccttgatgtacccaccgccacctttcacggcctctccctgaacggtgtaacggcatgctacggaccttttgcgacgtgccttgcatgcctgtgtttaaaggtttccttataacggttctaatatgttgttgccaagttgaattcatcagatcagctaggttacggtgaaccctgcataatagttactgctctaaaaaaaaaaaaaaaaaaaaaaaaaaaaaaaaaaaaaaaaaaaaaaagggcggccgctcgcgatctagaactag

SEQ ID NO: 260933 - DNA, 550 bp, Zea mays
  unsure (1)..(550): unsure at all n locations
ccctcgcgtccgcccacgcgtacgcccacgcgtgcggcctctcgtccgtaagaaccccacccgacgtaccgcgagccggcgtatggtcgacggtggcgatggacatctccacagcccacgccggcagcgtccggtgacgaggcagcggcggcggcgaaggggaggagcggcggtggcggcgaggggctgcggcagtactacctgcagcacatccatgacctgcagctccagatccggcagaagacccataacctcaaccgcctcgaggcccagcgcaacgacctcaactcccgagttagaatgctcagggaagagttgcagttgcttcaagagcctggctcatatgttggtgaggtgtgccataggtcatgggcggaaagcaaaggttctggtgaaggtacatcccgaaggctcatatggggtggatatagattagagcattgattgcacttagatcacacctttaacaagagttgctcttcggaatgacagctttatgctccatctgatcctaccaagcaaagttgatccatcggncaatctcatgaaa

SEQ ID NO: 260934 - DNA, 407 bp, Zea mays
cggcatgctacggacccttttgcgacgtgccttgcatgcctgtgtttaaaggtttccttataacggttctaatatgttgttgccaagttgaattcatcagatcagctaggttacggtgaaccctgcataatagttactgctctcgtgtgtagcatgcattgcgatgtcgtggcccacacccaaattctcgtgtgtagcgaggggatggtgatagattttgccctcgagtggagccttgccggcaacgcgaatagaggaaaaagagagcgcgccccggtagctcaggttttgaacggtcaccagttgctcgccctttgcttgaatgattgatagcaaaaagatagattttttgaaatgtatgcaaacccagtttgccaaaactccctgaaaactaaaattttttttcc

SEQ ID NO: 260935 - DNA, 380 bp, Zea mays
agaaccgttataaggaaacctttaaacacaggcatgcaaggcacgtcgcaaaaggtccgtagcatgccgttacacgttacacaggaggacttcgagatggcagtggccaaggtgatgaagaaagacacggagaagaacatgtccctgcgtcaagctctggaagtgaggctcatgccttgatgtacccaccgccacctttcacggcctctccctgaacggtgtaacggcatgctacggaccttttgcgacgtgccttgcatgcctgtgtttaaaggtttccttataacggttctaatatgttgttgccaagttgaattcaaaaaaaaaaaaaaaaaaaaaaaaaaaaaaaaaaaaacaaaaaaaagaaaggaaaaaaataa

SEQ ID NO: 260936 - DNA, 513 bp, Zea mays
gcgggatgaggtcatccggaagaaggaggaggagatcgagaccagagacaaggagcaggagcgtctccaggccgagctcaggaaggcgcaacgcgccaaggagttcaagcctaccgtgagcttccccctcgtcaagtcgttgctggagaaagagcaagaagcagacgacaagggaaagaagaagaaggggaagggcggccacgagaggaagaagccgtgcccggcgtacgtgctctggctcaaggaccagtggaccgaggtcaagaaggagaaccctgaggccgacttcaaggaggtgtccaacacgctgggcgccaagtggaaggctctgggcgccgaggagaagcagccctatgaggagcggtaccgccaggagaaggaggcctacctgcaggtggttggccaggagaagcgcgaggccgaggcgatgaagcttctcgaggagcagcagatgcagtggaccgccaaggagctgctggatcagtacctcaagttcaggcaggaggccgagga

SEQ ID NO: 260937 - DNA, 448 bp, Zea mays
ctgttgtagtcatttcgtcattttgtgttctggtgtctgcggaagggcgtcctggatggagtccgccgacggggcggtgtggagtgctcatcggtgcgaatgttgctgtcttcctgctgtggcgtgtggccgatccagggttcatgaggaagcatttcatgatttcactggacaatttcaagagtggacggttgcacaccttgctcacgagtgctttcagccatgcagagtttaatcacctctttgccaatatgtttggcctcttcttctttgggagcagtattacgaatgtgtttggtcctgcctttctattgaagttgtatgttggtggagcacttactggatcagtattcttcttgctggagaaggcttttctagcctatcggaaacaggattatgtaggatgggatacttcaagagctgctgaacttggtgcaagtgctgcagt

SEQ ID NO: 260938 - DNA, 656 bp, Zea mays
gcgcgaggtgcggcgcctccaccggctcgtcggaaacgccgtggtcgatggataccatgtgatcgtcgggactgggtccacgcagctgttccaggccgtgctatacgcgatctcgcctgcaagtgacggcacgcccatcgacgtcgtctcgccggcgccttactactcgtgttacccagttgcgtcgagctttctaaactctgggctctaccgttggggtggtgacgccaatacatttgccggcgacgacaccagctgtgttgaggtcgtctgctcgccaaacaaccctgacggtggcatccgacatgccgtcgtcaagtccaaatccagcaaggcgatctatgacttcgcctactactggccgcagtacacgcccatcaccgaggcggctgcccatgatgtcatgctgttcaccttctccaaatcctccggccatgccggtactaggctggggtgggcactggtgaaggacactgaggtggccaagaagatgaccaagttcatggagctcaccacgattggcgtgtccaaggactctcagcttcgtgccgctaagattcttggggcgatctgtaacggctatgagcagctgccatcccccgcgggccaaacaagaagccacctcttccattttgctcgggagaaaatggcggcac

SEQ ID NO: 260939 - DNA, 467 bp, Zea mays
ccacgcgtccgaccacacgtccggccacttcagtgcttgcgatcgcgtcggccacgatctcttgcgaaaaagcttaccctgtgtctgtctgtccgaccgtcagtccgtctaacaatcgatttccatgacgacgtccccgcgcgtgtggctgctcgccatggcactggcgctcgcctgcgtgctgctcgtgaggtccgccgacgctgctgccgaggcgtccccgactccaggcggctccacctacgggtgcaacccggccacggacaagtcgtgcaagcccgagggcgtgggggtggtgctgccgggcggcggcatcgacctcgacggcgacggtgacgaggacgagctgccgcagttccagccccacctcatgatcctcggccatggccactgatgagtgtaaatggttggttggttggtcgtcctcagccgatctactggacgacacgatggcggtcacatttgcg

SEQ ID NO: 260940 - DNA, 1070 bp, Zea mays
gcaatttgacgagctgtgtgaggctttatgggagcaagctcctgactccagttaaagaagtgctgacacattctggcatgaagatcgatgacatctatgctgtagaactaataggaggagctacccgggttccaaaactgcaggctaagctgcaggaatttctgggtaggcgtggcctggataaacatcttgatgctgatgaagcaattgttctcggagcttcacttcatgctgctaacctgagtgacgggattaagttgaaccgtaagttgggaatgattgatggctctacttatgcttttgtacttgagatagatggcctagattatgtcaaggatgaaagtattgaccaaattttggttccaagaatgaagaaaatgccaataaagatgtttagatccatcagacatacaaaggacttcgatgtctctctcaactatgacaaagcttatgaactgcctccaggcattccatcacacaagtttgcagagtattccgtatcaggactgacagatgccagtgaaaagtatgcaaaccgtaatttatctgcacccatcaaagcaaatctacatttttctttgagtagaagtggaattattgctcttgatagagcagaagcagtaattgagataactgaatgggttgaagttccaaagaagatattgactctagagagtaacatcaccaatcagaattcttcttctgaagtaggagcagctaatagcacaacagatagtaaggaaaatctgagttctggcagtaatactaattcgagcactcccattgatgagagtaatgctcaaaaaattattacagagaaggtgctaaagaaaagaacttttagggttccattgaaggttgtggaaaaaacaactggtgctggaacaattctttcgaaggagttgtattctgaagcaaaaaataggttagaggcactcgataagaaggatgcggagcggaggagaactgctgaacttaagaataccctagagtcatacatatattctatgaaggagaagctggaagaaagcgcaggtagtgtgactgtctcaactgaacaggagagggat

SEQ ID NO: 260941 - DNA, 412 bp, Zea mays
ttctcatacatcacagacaatgaataccaagaagaatgttgttctttgctgccttcttttcgtgctcgttctgcatgcagatcacgctctagccaagtgtggctatacaactcctttaattccattctgcaaagcgtggatgtgcaaggcggagtgttggacggaggctaagttaactggaggcaaagtcacgcaacagaagtgcatgagaggtgggatcaagggctggtgttactgcgaattctgcatttaattttgcaaaggagaaggatcaccatttctttgcttggtcttgccttggtcaataacttagtgtaataatgctagttaagtctctaggcagactaggctagatcgagttgtttgttgctggtagctaggcattgctagcgtctgctattggtttaagata

SEQ ID NO: 260942 - DNA, 423 bp, Zea mays
tgcacggaccggtcctgaatggcccggtcgacccacgcgtgcgatgcacatagcgatgctgaccttcctgggtggtgttcgtggctttcgcgtgtggcctctcggggggcacgatggcgcagaaccggggcatctccagcatcaagttcacctcggccactttcgcctccgcgacaaccaacctcctcccggcgtgtaccttcgtcatcgccctcgtctttcgctacgagaagttcgccatgcgcagcctgtccagccaggccaaggtcgccgggaccctgctgggcgtcggcggggccatgctgctcaccttctacaagggcgtcgacatcacgccctggcacagcaacctcaaccttcgtcggcacgctgacccaacaccaccatcacaccaccaccaccaccaccaactacgccatgggg

SEQ ID NO: 260943 - DNA, 1128 bp, Zea mays
cccacgcgtccgattttcttccattttcttatgggactaaactactcagataagctttaggaaggtggcttacaacgggaccttttcttgccatttattgacaccttgaaagaaagatgcatcgtgcatgccattggatctgcggtggactatcgtcaactgggttctgctgaacaaggtttctattttgtcggaaaacattacagtacgcttctgaaacagaagctccagtctttaattggagatgagaaacccagcccacaaactgttgaagtaattatgggaaggaaattacaggttcccctaggagcaaatggttgtgcatattttccttttgaagacctttgtgataaacctttaggtgcagcagattactttggactctttaaaaaatttcacaccctggcacttgatggtattccaaagcttgggtctagtaacagaacagcagcttatcggttcgtcacactgattgatgttatgtacgagaacaaagcaaggctgttatgtacagccgaggctggaccagtagaactgtttgagaatatcatgactcttgctgaagcacagaaggtttcaccaagatcttcgcgctcacagaaaagtgacgaccctgacctatgtgtggacaatgagcttggatttgccaaggatcgtacgattagcaggttgacagagatcaacagcagagaatatttggaggacttcgaaatgagattagggcaacagcagctgctgcccttgcaagctctagataatggtggtgatgttgtactagcataataagcagaaggcttctgggcctcatttgaaattcttgtattcgcacccacctggcttacataggcaactgagaagctatgcttttctagcagtggtgcatgtaaatgtccaataaagctatgtaagggcatttttgctaacaggtgagtgatctataaaatggcccaacctgggggaggggggataccaaatcgttttttttagtggatcccatatttccaaacctttagagaggcctcctaaggctcaaaaacagcatgagttaccctgcataaagccatatataggctgaaagctttcgctgaactttgtgaattgagggaaaaaaagtctaacaattgttcc

SEQ ID NO: 260944 - DNA, 786 bp, Zea mays
tgagaggagaatagcatcaggagacctagtagatggcgatactttcaggttgatacaattcaacaattacaagggctctatgaggagttgattgagaatggagaagactgccagctggatagatataagtcatctgagaaatcaggacggagtcgatggctatggtcccgcctcattactcagccttctagctttgctccagttaagggcctttacctctatggtggtgttggtacagggaagacgatgcttatggacttgttctatgaacagctgccatctaattggagaaaaaaacgtattcactttcatgatttcatgttgaacgtacatagtcgtcttcagatgcataaaggtgtttcagatccccttgatgttgtagcagctgagatttcagatgaggccatcatattatgtcttgatgagtttatggtaactgatgttgctgatgctatgattctgaaccggctgttcagacaattgttcagcaaaggcgttattcttgtttcaacttctaaccgtgctccagataagctttatgaaggtggcttacaacgggaccttttcttgccatttattgacaccttgaaagaaaggtgcatcgtgcaccccattgcatctgcggtggactatcgtcaactgggttctgctgaacaaggattctattttgtcggaaagcattacagtacgcttctgaaacagaagcttcagtctttaattggagaagaggaacccagcccacaaactgttgaagtatattatgggtaggaaattacatgttttttt

SEQ ID NO: 260945 - DNA, 978 bp, Zea mays
gcctttgaaagaagctagcatcaggttcgacgtacaagaggcttggactatctaccagtgcgtgtgctcatccgtgcacgccggcaatggtgtcctccgcccgtgcgctcatcggcctcctcgtcgccgcggcctccctcgccgtcgcgctctcggatggcggcgggatggcggcgccggtgtacgggtacgcggcggggagccccaacgggccggagaactgggggaagctgagccccgcgtacaagctgtgcggggaggggaagcagcagtccccgatcgacatcgtcaccaagcaggccgtccccgccgccaccctcgacaccctcaaccgcacctacggcgccaccaacgccacgctcatcaacgacggccacgacatcacgctggcgctcgagggcaaggttgggacggtgacggtgaacggcaaggcgtacagcttcgagaagctgcactggcactcgccctccgaccacaccatcaacggccagaggttcccgctggagctgcacctggtccacaggagcgccgacggcgcgctggccgtcatcgggatcctctaccagctgggcgccccggactccttctactaccagctgaagcggcagctgggcgagatggcccaggaccggtgcgacttcgccgaggaggaggagtcgcgggtggaggccggcctcatccacctgcgctcgctgcagaagcgcaccggcagctacttccgctacacgggctccctcaccgtgccgccatgcaccgagaacgtcgtctggagcgtcctcggcaaggtgcgccagatcagccaggaccagctgcagctgctcaaggcgccgctgcccgggagcgacgcgcgccccacgcagccgctcaacggcaggaccgtccaattctacaacccgtccaacagcaccatctacttccagatctaacactaaagagtactttggaatctttaatatagcggaactctgtttatgatta

SEQ ID NO: 260946 - DNA, 731 bp, Zea mays
cgacaacaacggacacacacatcgtctatcagtgctcatccaacaatccgtgcgcgaccaaggcaataatggtgtcgtcctcccgtgctgtcgtcgtcgtcgtcggcctcctcgtcgccgcgtcctccctcgccgtcgctgcctccgatggcggtgggccgacgtacgggtacacggcggggagccccgacgggccggagaactggggcaagctgagccccgcgtacaagctgtgcgggcaggggaagcagcagtccccgatcgacatcgtcaccaagcaggccgtccccaacgccaacctcgacaccctcaaccgcacctacgccgccaccgccgccacgctcatcaacgacggccacgacatcacgatgacgttcgagggcaaggtcgggacggtaatggtgaacggcaaggcgtacagcttcgagaagatgcactggcactcgccgtccgaccacaccatcaacggccagaggttcccgctggagctgcacctggtccacaggagcgccgacggcgcgctggccgtcatcgggatcctctaccagctgggcgccccggactccttctactaccagctgaagcggcagctgggcgacatggccaaggaccggtgcagcttcggcgaggaggagtcgcacgagggcgtcgccctcatccacctgcgctcgctgcagaagcgcaccggcagctacttccggtacacgggctccctcaccgtgccgccctgc

SEQ ID NO: 260947 - DNA, 598 bp, Zea mays
gcttttgtttatcttgtccttgttcacctatttgggttgggttatttcggtttagctttatgctagtgctccgcattaatcaatgaacatgatgagattatctatgatacgctgttttcccttttgattatgatgatgtgtacttgtggcctttaagggggctcgagctgtttctcgagtgcctctccgtaaggacctgttcgttggatgaccgcccgggaaaacagtgcaaccatgagggtggaatgggacgcccttagctgaataattagaggaactggggtgtagttcgcttcgccgtcgtgccgttaatggggctcggtgtatgcggctcgctctgccaaggttggttcgccccttggggaggagtgcggtgcatttaggaaacctaacgggtggctacagccctagagaatctttgtaaaggctacgtagtgagaccctgcctgctcaccttggtagtgtttaagggtttgatcggcccgaggcaagagggaatcacggcttgtgggtaaagtgcgcaacctctgcagagtattatgaaactgatatatcagccgtgctcgcggttatgagcgttcaagggagcttcattgat

SEQ ID NO: 260948 - DNA, 744 bp, Zea mays
ctgaaaggagaacataaaagaggagaggctagggttttggcgtccgagaccaaaccaagctctctccggcgacggtgagggctcgatatcggagtccagtaggcggctcctgctgcttcggcggtccctaatccctctctcggcagtgtacagatggcgtccggcggtccggcgctcgagccgctcgtcgaccaggtcatctccgtcatcaccaacgatggccgcaacatcgtgggtacgctcaggggattcgatcaggccaccaacattatactcgacgagtcccatgagagggtctattctagaaaggagggagtccaacaacttgttcttggtctgtacattatcaggggtgacaacataagcgttgtgggcgaggttgatgaagagctggattcaagattggatatgtcgaagctaagggcgcacccactgaagcctgttattcactgaggtccgagtatgtctttgggtaatatgtggactggatggatgggtcactgttgaatgcaggatgtagcatcatcatggtgaggggactgagtaatatggacatgtatcttgcgtattgtgcaatgaatgtgttggctgttgggtcgcttgcctacgcattctgtaagattgcagttaccattaggaactgaactcaactcgactgaattaatatcatttggctctactcgtaaaaacagtatgcttgatttaaaaaaaaaaaaagggcggccgctcgcgatctagaactag

SEQ ID NO: 260949 - DNA, 665 bp, Zea mays
agaaaactgagtcagagaggtgcagatcaatgcggcggtggtggtgcgccgccggcggcctcgcccgctgcgtcctctcgtcctccacctccgccatagcatcccatgcccgcccgctgccggcacccctgatgcccaaatctccctcctttaccgtccctttctccttgtcctgtcgcaggcaccactctctccagggattcttccacctggtcatcgcttcttccttccgccctccgtcggcgcatcatcagcaagtgcggcactacgccaagaaggagaggtcgcgcgctccgctcacgcccactaaatccaaagtcaagaaatacaagatgaaggccccctcgtccatgaagttcagattcagaaccatgaaagacggacaggtccgcaggtggagggccggcaagcgccacaatgcacacctcaagtctaaggaggccaaacggagacttcggaagcctgctttggtgcatttggcctacgccaaggttataaagaagctcaacttctgtgggtagcaaatcaataaagacatagcggagtttggcatgggaaactagttaactgatactcgaccgccaaccgctgcatctcagttgtaaacgctggagcctctccttggaccaaatacttgctttttgtcacatgatgcattatctcgt

SEQ ID NO: 260950 - DNA, 1338 bp, Zea mays
cccacgcgtccgcaacggcaatttgcgccattttattagaaattgcggtggcgcaattaaatatatcgcggctgcccctgtcgcccccgcccgtccgcctccttcgtcagctggcagctgctataataaggaaggcagaagataacggagggcaaggaaactcgctcccactttactcctatccactgcggcctggacgcgtgcgagagacttgaccaagcagcagcagcagggatggcgcctctgaagctgtacgggatgccgctgtcccccaacgtggtgcgcgtggccaccgtgctcaacgagaagggcctcgacttcgagatcgtccccgtcgacctcaccaccggcgcccacaagcagcccgacttcctcgccctcaaccctttcggccagatcccggctctcgtcgacggagacgaagtcctcttcgagtcccgtgcgatcaaccggtacatcgccagcaagtacgcgtcggagggcacggacctgctccccgcgacggcgtcggcggcgaagctggaggtgtggctagaggtggagtcgcaccacttctacccgaacgcgtcgccgctggtgttccagctgctcgtgaggccgctcctgggcggcgcccccgacgcggcggtggtggacaagcacgcggagcagctcgccaaggtgctcgacgtgtacgaggcgcacctcgcccgcaacaagtacctcgccggggacgagttcacgctcgccgacgccaaccacgcgtcctacctgctctacctcagcaagacccccaaggccgggctcgtcgccgcccgcccccacgtcaaggcctggtgggaggccatcgtcgcccgccccgcgttccagaagaccgtcgccgccatccccttgcccccgccgccctcctcctcggcttgacctcgccttgcgttgcgccgttgcctgggtcgcggatgcgtcggagccccgagtcgaataaaagaggcagcatcctgtcttgcatttgctgctgcgccatgtgttaacagcctgtgtaataaacactgttgctttcgtgtgtgttcattgccttttggttggtctttgcatatcctactagtgctgatctttttgtgaagcttggattggatggacgcgttttcttcaccgtaattcccttcttcctgagcgacgtgactgttgattcgaacaacaacaaaaatgtcggcccacaaccgcaagggccattcctacgactcacctgttgggtcttgggttacagttaaggccttgctcggggatgaaagggcatgaaatccgggcttggattgagcgaattcgtactgcattcccattgcatggtacagttaaatccat

SEQ ID NO: 260951 - DNA, 332 bp, Zea mays
cgcgtgcgagagacttgaccaagcagcagcagcagggatggcgcctctgaagctgtacgggatgccgctgtcccccaacgtggtgcgcgtggccaccgtgctcaacgagaagggcctcgacttcgagatcgtccccgtcgacctcaccaccggcgcccacaagcagcccgacttcctcgccctcaaccctttcggccagatcccggctctcgtcgacggagacgaagtcctcttcgagtcccgtgcgatcaaccggtacatcgccagcaagtacgcgtcggagggcacggacctgctccccgcgacggcgtcggcggcgaactgtgaggtgt

SEQ ID NO: 260952 - DNA, 629 bp, Zea mays
  unsure (1)..(629): unsure at all n locations
cccacgcgtccgcccacgcgtccgccgcagaatccgagtccaatagctctcctccccagggctttcaacttctccaaaccccatctcgccgccgaggccgagcgagcagagcagaacaccacgtcggcggcttttccctgtctctccgctggatactacacccgccgccgcagcgccgatcctgtccgagtcaagcggagcgggggatcggattggttgcttccttccctccatctcatgttggtggactgagagatggagttttaatttcaaatagcatctagaggactgccactaagcttttaagttggtatataatgggtggctgttgttgctgttcgtcgagaacatctgaagcagttagagcacgagcaccagttgatatatatcatcaacaaaatcttgaggagcaggagccattgtcttcaatttttgatgggatcatctccagcctctgcaattgttgcagtagacacaaatctggatacttccacacctgacacatatcgagcgccgcctgcacccttgccttatgatgttattttggcagtcccaaataaccctggtttggagaagccagacactaagagcanaactgatgaccaacaagagtccataaatgatcagga

SEQ ID NO: 260953 - DNA, 697 bp, Zea mays
cagagagttgcgcccggaccccggaccgcgccggctcgcaaactccccacaaccctcgtcgccgccggctgctccacccccgccaccgccatgggtaaattccgcaagcttggccgcaattactcccaacgcctctgcatgctcaggacgatggtgtcgcagctggtgaagcacgagcgcatcgagaccaccgttgccaaggcgaaggaggttcggcggaaggcggatcagatggtgcagctagggaaggagggtactcagcatgcagcaagacgtgctgctgcctttgatcgaagtgatgatgtccttcataagctatttactgagctggcctttcgctacagagatcgagctgggggctacacaagaatgttaagaaccaggatacgtggtggtgatgctgctccaatggcatacatcgagttcgtggatagggagaatgagcttcgagaggccaaacctgcaacgccgccgcctcctcaacgagtccctcctgatccatgggccaagtcacgtgctagccaacagtgggcaggacctacaatcaccaagacctcggaatcggacggcttatgagctagtatacctatgttccatagaaagtttcagttattttgcttaagagatttttttatctagagatatctgccgatagaataattcaaactttattgtcattttgtatgcttctaattca

SEQ ID NO: 260954 - DNA, 536 bp, Zea mays
caaaagtttctgaaagtacagatatagttacatttgctgatgtggctggagtagatgaggcaaaagaagagcttgaagaaattgtggagttcttaagtaacccagaaagatatgttcgtcttggtgctcgccctcctcgtggtgtcttattggtgggtcttccagggactggaaagacacttcttgcaaaagccgtagcaggagaagcagaagtcccattcataagttgcgctgctagtgaatttgttgagctatatgtaggcatgggagcagctcgagtacgtgacctatttgctaaggccagaaaggaatcgccatcgattatttttatcgatgagattgatgccgttgcaaaaagccgtgatagtcgatatcgcattgtcagtaatgatgaacgtgagcagacattaaaccaattgctcacggtaggacagtgccctttcatatttcttgagcattcaccagattagcttcatcgcaagttgggaccgaattaaagcttatacttgtatttttagtggctgataattgatttt

SEQ ID NO: 260955 - DNA, 452 bp, Zea mays
cggacgcgtggggccgttgcaaaaagccttgatagtcgatatcgcattgtcagtaatggtgaacgtgagcagacattaaaccaattgctcacggaaatggatggctttgataccaactcggctgtcattgtactgggggcaacaaatcgagctgatgttttggatcctgcccttaggcgcacctgggagatttgaccgtgtggttatggttgaagctcctgataggtttggaagagaatcaattctaaaagttcatgtgagcagaagagagcttccactgagtaaagatgtagatctagccgatattgctgcaatgacaactggttttactggagcagaccttgcaaacttggtaaatgaagctgctttgttggctgggcgattaaataaagaaattgtggaaaagattgacttcatccatgcggttgagcgatctatagctgggaatagag

SEQ ID NO: 260956 - DNA, 1527 bp, Zea mays
cccccacgcgtccgcaatcctacaccaccaccaccacctcctccggtccccaacccctgtcgcaccgcagccgccggccatggcctgcctcaccgacctcgtcaacctcaacctctcggacaacaccgagaagatcatcgcggaatacatatggatcggtggatctggcatggatctcaggagcaaagcaaggaccctctccggcccggtgaccgatcccagcaagctgcccaagtggaactacgacggctccagcacgggccaggcccccggcgaggacagcgaggtcatcctgtacccgcaggccatcttcaaggacccattcaggaggggcaacaacatccttgtgatgtgcgattgctacaccccagccggcgagccaatccccaccaacaagaggtacaacgccgccaagatcttcagcagccctgaggtcgccgccgaggagccgtggtatggtattgagcaggagtacaccctcctccagaaggacaccaactggccccttgggtggcccatcggtggcttccccggccctcagggtccttactactgtggaatcggcgccgaaaagtcgttcggccgcgacatcgtggacgcccactacaaggcctgcttgtatgcgggcatcaacatcagtggcatcaacggggaggtgatgccagggcagtgggagttccaagtcgggccttccgtgggtatttcttcaggcgaccaggtctgggtcgctcgctacattcttgagaggatcacggagatcgccggtgtggtggtgacgttcgacccgaagccgatcccgggcgactggaacggcgccggcgcgcacaccaactacagcacggagtcgatgaggaaggagggcgggtacgaggtgatcaaggcggccatcgagaagctgaagctgcggcacagggagcacatcgcggcctacggcgagggcaacgagcgccggctcaccggcaggcacgagaccgccgacatcaacacgttcagctggggcgtggccaaccgcggcgcgtcggtgcgcgtgggccgggagacggagcagaacggcaagggctacttcgaggaccgccgcccggcgtccaacatggacccctacgtggtcacctccatgatcgccgagaccaccatcatctggaagccctgagcgccgcggccgttgcgttgcagggtccccgaagcgattgcaaagccattgttccttccgttccgtttgcttattattgttattatctagctagatcatctgggggtcaggtcgtcgtggtgtgccaaaacagaacacagaaagaggaagaagaaaaaaaaaacaagacgtgtggcgtttatgttatatcatccaataatggccgtaccacacttgtggtacctttcagtacgtatgcttgcattgtatgaggggtcgctttcctacgccctaccatgtctgtggctttccttgcttggtgatgcgatatggagggaatcgttcgtcagtgccagtgggcggcagcattattgtcatcgtcgcccgattggatgaat

SEQ ID NO: 260957 - DNA, 1437 bp, Zea mays
cggacgcgtcggcagcgatacttcagacagctcttcttgcgttgcctctcgagacgcttcgctctctctcttgttcttctcgccttctgccggagtgatggccagcctcaccgacctcgtcaacctcgacctgagtgactgcaccgacaggatcatcgccgagtacatctggattggaggatccggcatagacctcaggagcaaagcgaggacggtgaaaggccccatcaccgacccgagccagctgccgaaatggaactacgacggctccagcaccgggcaagctcccggagaggacagcgaagtcatcctctaccctcaagccattttcaaggacccgttcaggaagggtaaccacatccttgtgatgtgtgactgctacacgccacaaggcgagccaatccccaccaacaagaggtacagcgccgccaaggttttcagccaccccgacgtcgcagctgaggtgccgtggtacggtattgagcaggagtacaccctccttcagaaggacgtgagctggcccctcggctggcctgttggtggataccctggtccccagggaccatactactgcgccgccggtgccgacaaggcctttgggcgcgacgtggttgacgcccactacaaggcctgcctctacgccggcatcaacatcagcggcatcaacggcgaagtcatgcctggacagtgggagttccaagtggggccgtccgttgggatctctgccggcgacgagatatgggtcgcccgctacattctcgagaggatcaccgagatggccggaatcgtcctctccctcgacccgaagccgatcaagggcgactggaacggcgccggcgcccacaccaactacagcaccaagtcgatgagggaggccgggggatacgaggtgatcaaggcggcgatcgacaagctggggaagaggcacaaggagcacatcgccgcgtacggcgagggcaacgagcgccgcctcacgggccgccacgagaccgccgacatcaacaccttcaaatggggcgtggcgaaccgcggcgcgtccatccgcgtcggccgcgacaccgagagggagggcaagggctacttcgaggaccgcagccggcgtccaacatggacccctacgtcgtcaccggcatgatcgccgagaccaccatcctgtggaatggaaactgatcaagcatgtgcattctagagggagcccactgtttttcttctgcacaacgcatccgccgtggtgtcgctttggttttgaaatttagattccgttgtcctaaaatttatcactacggtctccggtgtattgctcgggaacaatgaataacgactgcgatgtttttttgtttttgcttgcgtcatagatgtacgtttggctgtgcttccagtttattgggtaaatgaaaaaaatgtaatggtctatcggtcttaaaacagtgctccctc

SEQ ID NO: 260958 - DNA, 1575 bp, Zea mays
tcgcctatgcgcacgccacatcctcccctccttcctccttgggttcccagcccgtgcgcccgcctgtcgcagtcgcaccgcagccgccggccatggcctgcctcaccgacctcgtcaacctcaacctctcggacaccacagagaagatcatcgccgagtacatatggatcggtggatctggcatggatctcaggagcaaagccaggaccctcccgggcccggtgaccgatcccagcaagctgcccaagtggaactacgacggctccagcaccggccaggcccccggcgaggacagcgaggtcatcctgtacccgcaggccatcttcaaggacccattcaggaggggcaacaacatccttgtcatgtgcgattgctacaccccagctggcgagccaattcccaccaacaagaggtacagcgccgccaagatcttcagcagccttgaggtcgctgccgaggagccctggtatggtatcgagcaggagtacaccctccttcagaaggacaccaactggcccctcgggtggcctattggcggcttccctggccctcagggtccttactactgtggaatcggcgcggagaaatcgttcgggcgtgacatagtcgacgcccactacaaggcctgcctgtacgcaggcatcaacatcagtggcatcaacggggaggtcatgccggggcagtgggagttccaggtcggaccgtccgtcggcatctcttcgggcgatcaggtgtgggttgctcgctacattcttgagaggatcaccgagatcgccggcgtggtggtgacgttcgacccgaagccgatcccgggcgactggaacggcgcgggcgcccacaccaactacagcaccgagtccatgaggaaggagggcgggtacgaggtgatcaaggcggccatcgagaagctgaagctgcggcacaaggagcacatcgcggcctacggcgagggcaacgagcgccggctcaccggcaggcacgagaccgccgacatcaacaccttcagctggggagtcgccaaccgtggcgcgtcggtgcgcgtgggccgcgagacggagcagaacggcaagggctacttcgaggaccgccggccggcgtccaacatggacccctacgtggtcacctccatgatcgccgagaccaccatcgtctggaagccctgaggcaccccgtggccgtgtcgtgtcggtttgctccgcgtacggcgctggccgttgcatcgcagggcccagcggttgcgcaactattttcccttccccgttctgtttgcttgtactactactctaccgctagtcctgcatagcattttagctagaacacaacaacagcccaaaaaaaaacattgttgcttgcttcggcttcgacgcttgccaccacttccattccatgccgtccgtccgcttccttcctgtgtaatcctcctccaataatagacgtgccatgttgcatcctctattcctctgcattgtataaaagtggcgtaattcttttgctacgcctccaatgtctgtggcttttagctgctgatgcgatgtcagattctgtcacggacgattcgtttcttttccttccgat

SEQ ID NO: 260959 - DNA, 1474 bp, Zea mays
tcgcccacgcgtccgcccacgcgtccgcccaggcgtgggtggacgcgtggcgaaagcacacacggatcaatcacactcactcgcggcccggccattgtcctgctcgtgcgtgctctgccttttcaggcgatcgaccaaccaacttctcgtcactgccatggctctgctctccgacctcatcaacctcgacctctcggaccgcaccgggaagatcatcgccgagtacatctgggttggcggttccgggatggacgtcaggagcaaagccaggacgctgtccggacctgttgatgaccccagcaagcttccgaagtggaacttcgacggctccagcaccggccaagctccgggcgacgacagcgaagtcatcctttgccctcgggccatcttcagggacccgttcaggaaggggcagaacatactggtcatgtgcgactgctacgagccgaacggggagccgatcccgagcaacaagcggcacggggccgcgaagatctttagccaccctgacgtcaaggctgaggaaccatggttcgggattgagcaggagtacacccttctccagaaggacaccaagtggcctctcggttggccgctgggcggctaccctggccctcagggaccttactactgcgccgtcggagcggacaagtcctacgggcgggacatcgtggacgcgcactacaaggcctgcctctacgccggcatcgacatcagtggcatcaacggggaggtcatgccggggcagtgggagttccaggtcggccctgccgtcggcgtctcggccggcgaccagctctgggtggctcgctacattcttgagaggatcaccgagatcgccggcgtggttgtctccttcgaccccaagccaattccgggggactggaatggcgctggtgcacacaccaactacagcaccaagtcgatgaggagtgacggcgggtacgaggtgatcaagaaggcgatcggcaagctgggcctccggcaccgggagcacatcgccgcgtacggggacggcaacgagcgccgcctcaccggccgccacgagaccgccgacatcaacaccttcgtctggggcgtcgcgaaccgcggggcgtcggtgcgggtgggccgcgacaccgagaaggaaggcaaaggctacttcgaggaccggaggccggcgtccaacatggacccgtacgtggtgacctcgctgatcgcggagacaaccatgctgtgggagcccagccactccaacggcgacggcaagggcgccgcggctccttgatttgattctgcggagactgagctctgtgtgtgagccggcctgcgtagatggcaaatgggactgaccctgtcagaaacttgagatgaccataataatagctgcagtgtgctcgttctggggttggataagacccaagaactttttttaaaaaaaaaaaaaagagaaaaaaaaaaaaaaaaaaaaaaaaaaaaggggggcgcccccctt

SEQ ID NO: 260960 - DNA, 1301 bp, Zea mays
cccacgcgtccgcccacgcgtccggtcgcaagtcgcaagtcccaactcaggtcaggtgaggggtaggtgaagtgggaaggcgcgcggaggggaggggaggagaggaggatggctgcagccgcggggaggaaggtggcggtcgccgccgtgcagttcgcctgcaccgacgtcgaggcggagaacgtcgccaccgccgagaggttgattagagaagcacacaagaaaggtgcaaagattgtactcgttcaggaattgtttgaggggcactatttctgccaagctcaaagactggatttctttcggcgcgctaagccttacaaaggcaatccaactattataaggatgcaacagcttgcaaaggagctggaagttgtcatacctgtcagttttttcgaagaagcaaacaatgcacattataattcggtggctattatcgatgctgatggcgctgatcttggactctatcgcaaatcacacattccagatggaccaggatatcaagagaagttttatttcaaccccggtgacactggctttaaggctttcaaaaccaagtatgccaccattggtgttggaatctgctgggatcagtggtttccagagtgtgcaagagcaatggcacttctgggggctgaaatactgttttatcccactgcaattggatccgaaccccaggattgtaacctggattcccgtgaacattggaagcgggttatgcaaggccatgctggtgccaacttggtccctcttgttgcttccaaccggattggcagagaaactgttgacactgagcatggcaagagctcgataaccttctatgggaattccttcattgcaggaccaaccggagaaatagtgaagcttgctaacgacaaagacgaggaagtgctggtggcagagtttgacttggatgagatcaagtcgattaggcatggttgggggatattcagggaccggcgccctgaactatacaaagtgctactgacgttggatggcgagaaacaatcataaaccccggtctcacgcttaatagtggtaaggcacaggcaggctccagctccacatcaatgttagattttttttttctccttttttaccctgtccaacgatgccatgcctgcatttgtacaagccatctgcgcgtgttcaccatttcacattcagcaaaataaataattttcgtgcaaaataaaaaaaaaaaaaaaaaaaaaaaaaaaaaaaaaaaaaaaaaaaaaactatcttcagaaaaaaaaaaaaaaaaaaaaaaaaaaaaaaaaaaaaaaaaaaaaacaaggggggg

SEQ ID NO: 260961 - DNA, 379 bp, Zea mays
cccacgcgtccgcgaaatgaaccgacctgttgccgtccgccctcgcgtccgaatggttcttcttacgctgagcctgtgtaaatccaggttcgggattgagcaggagtacacccttctccagaaggacaccaagtggcctctcggttggccgctgggcggctaccctggccctcagggaccttactactgcgccgtcggagcggacaagtcctacgggcgggacatcgtggacgcgcactacaaggcctgcctctacgccggcatcgacatcagtggcatcaacggggaggtcatgccggggcagtgggagttccaggtcggccctgccgtcggcgtctcggccggcgaccagctctgggtggctcgctacattcttgag

SEQ ID NO: 260962 - DNA, 656 bp, Zea mays
acggctcggattccgagtcgaccacgcgtccgggcgaagtcatgcctggacaggtagtagtagtacttgatgcatgctgctgatctgaactgctggttctgttctgaaccaccggccgggttccttccttgtcaaacagtgggagttccaagtcgggccgtccgttgggatctctgccggcgacgagatatgggtcgcccgctacattctcgagaggatcactgagatggccgggatcgttctctccctcgacccgaagccgatcaagggtgactggaacggcgccggcgctcacaccaactacagcaccaagtcgatgagggaggccggtggctacgaagtgatcaaggaggcgatcgagaagctggggaggaggcacagggagcacatcgccgcgtacggcgaggggcacgagcgccgcctcaccggccgccacgagaccgccgacatcaacaccttcgtctgggtaagcgcgtcgagaccatttacagctcttgctcccgcctcctctgtcgtcgcctaacaaaaacgggctcatcttgtcagggcgtcgcgaaccgcggggcgtcgccgcgggtgggccgcgacaccgagaaggaaggcaaaggtgagaggcggaagcgaaagcgatttttagttctttccccttgcgggtc

SEQ ID NO: 260963 - DNA, 304 bp, Zea mays
  unsure (1)..(304): unsure at all n locations
catccgggtcggccgcgaccccnaaaaggagggcaagggatatttcgaggaccgcaggccggcttccaacatggacccctacgtggtcaccggcatgatcgccgacacccccatcctgtggaagggaaactgataaaacccctgttcttctcctgcacgcatgcatccgccccgtgctgtcactttttgtttttcaaatttcgattcccgtcctaaagtttgttaccacttattattacggtctccagtgtactgctcggaaagtccgaataaaaacggctctaatgattttgttttttttttt

SEQ ID NO: 260964 - DNA, 318 bp, Zea mays
tggtcacctccatgatcgccgagaccaccatcatctggaagccctgagggctaaggcggccgttccgtcgcgctgcgttgcgttgcagggtccccgaagcgattgcaaagccattgttccttctgttccgtttgcttattattatcattattatcatctagctagatcatccgggggtcaggtcgtcgtggtgtgccaaaacagaacacagaaagaagaagaaaaaaaaacaagacgtgtggcgttaatgttatgtcatccaataatggccgtaccacacttgtggtccctttcagtaaaaaaaaaaaaaaaaaagga

SEQ ID NO: 260965 - DNA, 465 bp, Zea mays
tcaacaccggtgacactagagttgaaataaaacttctcttgatatcctggtccagctggaatgtgtgatttgcgatagcgcccaagatatcaagagaagttttatttcaaccccggtgacactggctttaaggctttcaaaaccaagtatgccaccattggtgttggaatctgctgggatcagtggtttccagagtgtgcaagagcaatggcacttctgggggctgaaatactgttttatcccactgcaattggatccgaaccccaggattgtaacctggattcccgtgaacattggaagcgggttatgcaaggccatgctggtgccaacttggtccctcttgttgcttccaaccggattggcagagaaactgctgacactgagcatggcaagagctcgataaccttctatgggaattccttcattgcaggaccaaccggagaaatagtgaagcttgctaacgac

SEQ ID NO: 260966 - DNA, 294 bp, Zea mays
tttgattctgcggagactgagctctgtgtgtgagccggcctgcgtagatggcaaatgggactgaccctgtcagaaacttgagatgaccataataatagctgcagtgtgctcgttctggggttggataagacccccgcccttttttttagctttcttcgaacaagtaatcatggtgctgaaccaacacagatgtgctactaaacacatctaacgagtcaaacgccgaagcatatcccgtcgcacaaccccggttaatcttgttacccatggattgaatgagcttgaaaaacttaa

SEQ ID NO: 260967 - DNA, 769 bp, Zea mays
cggacgcgtgggcggacgcgtgggcggacgcgtgggcgccgactctgccgtctccctcgcctctttcccctcgtctcgtctgcatccgcctccgccgccccaagacctcatcacctccccttcgccgtgaaccctaaccccgcgcccctcgccccctccttctcgtcgtcatcgccgcccgcttttccgggcccccatcgcctcttctcttccacgagtggttcaagcatggtggtcgtgggctccgcggactccttcaacagcatcttttccaaggtgcaagatgaaaagctaccagctgtcttttactacacggcggtgtggtgtggaccatgtagggcgatcgcacctttagtatcaaagctgagcagccagtatcccaagataccggtgtacaaagttgacattgaattggaaggactgggaaacaaactccgtgatctaaacatatgttcagtgccgacgttccacttctatcacaaggggcagagaattagtgaaatcgtgggtgctgatgcaaagaaaattgaagctaccatggaaagtctccacaagcagcagtagaagtttcagagcagagcctcaacctcacaccaatggaatggtttaatctacctcgcatgagaagtgttgcgcacttttggattcgtgtttttctttacgtgtcacaccgtgtgaacgccagcgtttcgtcatcagatgcttgtgattcgtgccggcttgtttcatgtgaagacatcagatgcttgtgtttcgtgccggcttgttt

SEQ ID NO: 260968 - DNA, 1562 bp, Zea mays
tttttgattcggcaaaccaggactccaaaaaggagcagggactcatagatattgaggatcccacaagccaagatgctgcaaaagagccaaatcaaaggtttgcttccatcactgttgcatatgctcttaataactctcataatgtctacaaatatgttaatacattcatatgtaatttaattgttttccagatgacttctctaattactttcttttatgcatgttatctttgtaacagtacaagtgaccaatctccttttgagcaattagctcttccagcaccaccagtgtcaaatggcgcagcaacaaaatctgaccttggcattgatcttctgagctgggatgatacccctgctacagcacaaaatccactagctcttgttcctgtcacagatcctcttgctgactcgacttcatcgaatcaaaatgcactagcaattgtggacacattttcacagaacagcaccgttaacagcaacactcaagctgctgccccctttggtctcaatccaagttctgctattccaggatctcaggcatacaacactccaactcagcagcatttccagtcgcaacaggcgacgctgtatccgaacgggggtgctggaacgtcctatgatcaggcatcccagtttaataatgttaattcagggtggaatgatcaagctgccagccttccagcagagcaagcactgaattacgatgatcaaagtggaaaccttccgccacctccttgggaggctcagccagcggcaagcaacgaaatgccaaatggtgaattgggaggcgtgcaacctctccctgggacagctgggcagttcggcggcatgcagcaggcactgcaaccacaagttaaccacatgggagttccacaaaggcagccaatgtacagcaaccagccaggggttggggtggcgccaacacagatgcaggcaggcttggggaaccagcagttgggttcgacatccatgatgggcatgcctccacagatgtatggcggcggatcgcaggcagccatgatgtacccgcaacaaatgccagtggcgccgcagcagccgatgtatggtggtggtggtcgtctggcagggtacatgcagcatcctgctgtggccgctgcacactactacagtaacctggggacggcgggaatgtatgggtaccccggcgcgaacgggctgtcccagagcatgtatggcctctcggtgcaggataactcgtcgtaccagactaagacggcgccaccctctgcggcgacgaagcccgaagacaagcttttcggcgacctcctgagcattgccaagaccaagaaagcttcatgagacgagcaggagcaggagctttgtcgtttgatcttttacacttgtgtaacattcattgtctggatgtcgtataagctttttggggtcctcttttttttaaaaaaaatatatttgttcccacgatcccgttggattcgttataccgttcgtaaatgatgattcaataaagggtgtgcagtactgtacgtacttaaaaaaaaaaaaaaaggccggccgctcgcgatctagaaccggacgcgtggg

SEQ ID NO: 260969 - DNA, 1690 bp, Zea mays
cccacgcgtccgcccacgcgtccgcgcaggggctcgcactgaatgatccggcgcagagtgttctagcccaaaacatgatgctaatatgctagcaggcatttgcagattcgagttgggagaaaaaaccaaagtcctttgcaagcactttgtagagacccgaggattcggcaaaccaggactccaaaaaggagcagggactcatagatattgaggatcccacaagccaagatgctgcaaaagagccaaatcaaagtacaagtgaccaatctccttttgagcaattagctcttccagcaccaccagtgtcaaatggcgcagcaacaaaatctgaccttggcattgatcttctgagctgggatgatacccctgctacagcacaaaatccactagctcttgttcctgtcacagatcctcttgctgactcgacttcatcgaatcaaaatgcactagcaattgttgacacattttcagaaaacagcaccacgaaccacaacgctcaaccagctgacccctttggtctcaatccgagttctgctattccaggatctcagctatacaacacgccaactcagcagcctttccagtcacaacagcctccgcagcaggcggcgctctatgcgaatgggggtgctgtggaccctggaacgtcttacgatcaggcatcccagtttaaaaatgttagttctgggtggaatggtcaagctgccaaccctgctgtgcccctgccagagcaagcactgaattacgatgatcaaagtggaaaccttccaccgcctccttgggaggctcagccagcgtcaaacaatgaattgccaaatggccaattgggaagcttgcaacctctcccaggttcagctggccagatcggtggcatgcagcagccactgcaaaccacaagttaaccacatgggagttccacaaagccagccaatgtatagtaaccaaccaatgcaacccggtcaggttgccgccacaacacagatgcagcctggcttcggaaaccagcagttcggttcgctaccaccaacatccatgctgggcatgcaattcggtggcatgcagcctccgcagatgtatggcggatcgcagccagtcatgatgtacccgcaacaaatggcagtggcccagtatggagcaatgccgcggcagcagccgacgtatggtggtcgattggcgggttacatgcagcatcctgctgtggctgccgcacactactacaacaaccaggggatgtatggctaccccggtgcgaacgggctgtcacagagcatgtatggcctctcggtgcaggacaactcgtccatggggatgaggtcgtcttaccagactacgacggcgccaccctccacggggcaacctatgaagccgacgaagcccgaagacaagcttttcggtgacctcctgagcattgccaagacgaagaaagcttcatgagacgagctggagcgggagcggccttctgatatatcgtctccccttttttttgtggtttttcgtgctgtttgatcttacacttgtaacattatctgaatgtgtaaacttttttggggtccttttcttttattcccacgtcgtgtgtgatcctattgatcccattggattcgttataccgtgtgcgtgtactgatcacgagcgatgggaaactttggccgtaaatgatgattcaataaagggtgtgcagtacgtgatt

SEQ ID NO: 260970 - DNA, 756 bp, Zea mays
tcggtcatcgcgtccgcccacgcgttcggacagtgacaaaaaacagtgcacttatgaaaggcagtatgctgaaatgagctccagcagtggggtgcttggtgaggacatagtgtcttttggcagagagagtgaacttaagccacagcatgctatttttggctgtgaaaattctgaaactggagatttgttcagtcagcatgctgatggtataatggggctgggtcgtggtcaacttagcataatggatcagcttgttgaaaagggtgtcataagtgattcgttctcattgtgctatggtggcatggatattggtggcggtgctatggtactcggtggaatgcttgctcctccagacatgattttttcaaactcggaccctctccgcagcccatattacaacattgagttaaaagaaatacatgttgctggaaaggcactgccggtggaatcaaggatcttcaacagcaaacatgggactgttttggatagtgggaccacatatgcttatttgccagagcaagcttttgtggcttttaaagaagctgtgacaagcaaagtacattctcttaagaaaattcgtggccctgatccaagttataaggatatctgctttgcaggtgctggaaggaacgtctcaaagctgcatgaggtatttccagatgttgacatggtatttggaaatggacagaagctctcactcacacctgaaaattatttattccggcactccaaagttgacggggcttattgcttggg

SEQ ID NO: 260971 - DNA, 674 bp, Zea mays
cccacgcgtccgcccacgcgtccgatcctccgccaccaccaggctctggtgtctacagtcctgcaccccctgcaccaggtcaagctgccccacctccgtatgggatgcaatatccaccaccaccaccacccccagcagctccaatccctccaccaggcactgctccatcaagtgatggagctcagaactatccacctggtgtaacaccaccaagttctggctcatccactcaccctgttgcaacatcagtatatgcatcatctggtgcaccaaatgcaccatcgatataccctccaccaccttatagttattcctcatactaccctccaccatttcagccaccacctccaccaccaccaccggctagtgttgatccctctcagagtattgcaactgcaccttggctaacccacagtgtggtggtgccaccaccacccacgagtgttgatccttctcagagtatttcaactgcaccttggttaacccacagcgcagtgccgccaccaccaccacctttgtcctccacaaccgaccagtctactgcttcctatggtgccgatgcagagtatgacaagtttatgtcagagatgaagtgatacgagcgaagctggatgattcttccaatgaagggcaaaaggattgatctttcttggagcttataccaacctgattta

SEQ ID NO: 260972 - DNA, 1304 bp, Zea mays
ggtcgacatagcacagtcctttttgctgcctcctaatctgcagaacgagataaatgaaattcaaggaaagctgaactcatcagctactgatcttgctattaaaacaacagataatgccgcgaagataaaaaaggtgctaaacagagtgcggcttgctttagttgtcattgcagctgtgatgcttcttctggcatttgttggcttcttgttatccatctttggtctggaattccttgtctctgtcttggttattattggatggatattggttactggaacgtttatcctgtgtggtgtatttcttcttctgcacaatgttgtttcagatacttgcgttgcaatggaagagtgggttgctcatccgacagaacacacagccctggacgaggttatcccctgcgtggagcctgccacggcgaacgaatccctgtacagaagcaggcaggtgacgttcgagctggtgaacgtggtgaaccaggtgatcaccaacgtgtcgaacaggaacttccccccgcagctgacgcctttgtactacaaccagtcggggccactgatgcctctgctctgcaaccccttcacgcctgatctgagggaccgcaactgcagcagaggagaggttaccttggacaacgcaacccaggtgtggaagaagtacgagtgccagagcaccaccgtctcaggaggagccgagatctgcgcgacggtggggcgtgtgacccccagcatctacgggcagatgaccgcgggcgtgacggtgagccaggggctgtaccagtacgggcctttcctcatccagctgcaggactgcaccttcgtgcgcgacaccttcacgaccatcaaccagggctactgcccggggctggagcgctacagcaagtgggtgtacgtgggcctggtgatggtctcgtcggcggtgatgctgtcgctcatcttctgggtgatctacgccagggagcggcggcaccgcgtgtacagcaagcagcaccagccgtacccggtggaggacaagccggcggcgacggtcccgggcgcttgaattgatatggcccgcccgttccagtgctccggcctactcccgtgccgctgtgcatactgtactccgcgcgctagttgggttttacgtggtggtgtaggtggatgatgtaccctggattgttgttcgtttgcttggtgttgctgtacgtttgctgattttccgtagacgaagttgctgtgcattctcgtactgacggtagctggacaatgaaacccctgtgttggaaaaagttacccataggtgttcttcaaaaaaaaaaaatataaaa

SEQ ID NO: 260973 - DNA, 2959 bp, Zea mays
gattattagtgagctacctgcaagtgctaattggaactttgaccttcactggtaccggaaaataccaggtgtcattgcagcatcctcatttgatgggaaaattggcatatacaacctagagttctctggtctttatgcgactggtgatgctgttggtgccccagtgcgtccaagggctccagctccaaaatggttgaaatgccccaccggtgcatcttttggtttcggtggtaaacttgtttctttccatccggtggcacccacccaaggtgcacaaacatctacatctgaggtgcatgtgcacaatttggtgattgagcaaagtctggtgagccgatcaactgaatttgaagctgctattcagaatggcgacaaaagttcgctgcgtgctctgtgtgaaaaaaaatcacaagaatctttatctgacgaggagagagaaacctggggcttcttaagggttatgtttgaggacggggattttgcaaggacaaaattgcttgctcatcttggcttcgaaccacctcaggcaccgcctgcaagttcaactgatgaattgagccaaacattggcagatacacttaatattgatcatgctgcagtaaccgataatgcggatgcccagtttcttattgataatggggatgattttttcaacaatcctcaaccttcagaggctagcttggctgaagattcagtttctacaaatggtcaacagacagagcaggaagtgtctggagatgctgtgccatcagatccatcaattgacaaaagtattcagcatgcattggtggttggagactacaaaggggcggttaaccagtgtcttgctgctaatcgtatggctgatgctttggttatagcccatgccggtggttctgctctctgggaaagcacaagaaatcattatcttaaaaacagtatctcaccttacttaaaggttgtctccgctatggtgggcaatgatttaatgagttttgtgagtacctggccactaagttcatggaaggaaactcttgctctgctctgcacgtttgcacagaaagaggagtggcatattttgtgtgacacacttgcgtctagacttctaaatatcggagatacactagctgcaaccctctgttatatttgtgctggaaatattgataaagctgttgaaatatggtcccgcaccttgaaatctgaagatggtgggaagacttatgttgatcttctccaggatttgatggaaaaaaccattactcttgcccttgctacgggccacaagagatttagctcatcactgtctaagcttgttgagaactacgctgaattgctggctagtcaaggtcttcttaaaactgcaatggagtatttaaaactgttgggatcagatgaacattcaaatgagctggcaattttgagagatcgaattgcatgttctatggaagagaatgataatgctaggagttatgtttctgaaagcaccgccactccttccctttatggcacaaatcaatcttatacagccccagaccattctcagaatgtttaccaggtacctcagccatacaatgtaccaagtaatacatattcagaagcttacccacaacaacctactggcgcctatggatacaacaacgcatatcaacctcaacaaccaacccatatgtttgttccacctagcgcacctgccaacactcagcaacagccaggcccttcacctgtaccagtgcctcagcaaacagtgaaggcatttactcctgcgaacccagctggtctaaaaaatccgggacaatatcagcaacctaataccctaggttcccagctttacacgggcactgcaaatcaacagtatccttctggaccatctgcttcttatccaagcggacctccaacaacatttcatcagcctgtatcacctgttcaatatcagcctgttgctccaccagtatcttcttttggtccgagcgctcctgtaccagcaacagtccctaaccagatgtttccccattctgctgctgctaactcaacttcaaggttcatgccatcgaacaatcaaagctttgctccaaggccaggtttaagtcctgtgcagccctcaagtccaacacaggtgcaggcacagccagctcctcctgcaccgcccccgactgtgcagacagctgatacgacaaaagtgtctgctgagttgagacctgttattggtacactaactagactattcgatgagacgtccaaagctctgggaggatcacaagctactcaagcaaaaaaacgtgaaattgaggacaattcgaggaaaataggggcattattttcaaaactaaatagtggtgacatatctccaaacgtttcatcaaaactcattcagctgtgcagtgcgattgatgctagcgattttgtcaccgcgatgcacctccaggtactcttaacgacaagcgactgggacgagtgcaacttctggcttgcggcattgaagcggatgatcaagacaaggcagaatttcagaatgtaaaccttgtgtggccttctcctgcacccagttatgtacacaccttttcccgctgcttgccagaaatgatagcgtttgcggttcagaggattctccagcacagcggttgttatcatgcagcttttgctctgggcctttgattctgcctgcgagttggtgaaatcgccctgatacttccgtgctcttatatacatttcgataatagttttggttttctgacatctactgtaaggtgacctgttgctgggttgttggttatctgaatattaattgtaagaggccccttagtctgttatagctggtggatcgcctttatcaaacaattttttttttgttttgccctgagaattctgtcagttcggacattcgaagaactctagatggttaatacgagtgacagtggcttgtttttttattggtactgccaaaaagaaaccaataaacctgtggatttttggggcccccccc

SEQ ID NO: 260974 - DNA, 651 bp, Zea mays
ataggggcattgttttcaaaactaaatagtgatgacatatctccaaacgttgcatcaaaactcaggcagttgtgcagtgcaattgatgctagcgattttgccactgcgatgcacctccaggtactcttaacaacaagtgactgggacgagtgcaacttctggctcgcggcattgaagcggatgatcaagacaaggcagaatttcagaatgtaaaccttgtggcctttttctgcagccagttctgtacacaccttttttctgctgcttgccagaaatgatagctgtagcagttcagagagtttgcctgcacaggggtgttatcatgctgctttgttctcggcccttgattctgcctaagcgctttggtacctcagtgctgttatacattttgataatagttttttgttttcgacatctgctataaggtgacctgcggctgggttgttcgttatgaatgttaattgtaagaggacacttagtctgttatagctggtggatcacctgtttcaattcttcctcttagatttcgtcagtttggacattccaagaactctagatggttaatacaagtgacagtggcttgttttttttttttttggtaatgccaacagaaatcaataaacttctggaatcctgaggtctgtgtttctt

SEQ ID NO: 260975 - DNA, 414 bp, Zea mays
cttttggctagccttccatgcaatttctcttttgcctctattcttaacttgttcatctaaaatctgtatagggattatccttttttccttatctttgtttaacttttcgttgttgcttacatgtaaatgaagtattcatttatttaaatttggtgtattgatttaattcttcctttagcatgtatgctgtgaatattcatatttgaacttgcggcaactgtcttttgtttcgcctttttgaatccatggtaaagtcacttttcttcatgcctttgtcctaaaatattggtaattacacatggattttatatcatagtatttattagggttttattttgcagagaatgataatgctaggagttatgtttctgaaagcaccgccactccttccctttatggcacaaatcaatctta

SEQ ID NO: 260976 - DNA, 505 bp, Zea mays
ttttccattcgtccggaaatatgatacgggaggcaacagcctttctgttggatgttctgaagccaaacttgccagagcatgcttttcttcaaaccaaggttttggagataaacttagtgacttacccaaatgttgctgatgccattcttgctaatggtatgttcagtcattacgaccgccctcgtattgctcagctatgtgaaaaggccggtttgtacttgcgagccctccagcattactcagagttgcctgatatcaagcgtgccattgtaaatactcatgccattgagccacaggcacttgttgagttctttggcaccttgtcaagagagtgggctttggagtgcatgaaagacctcctactggttaatctgaggtgaaatcttcagattgtggtgcaggctgcaaaagaatactgtgagcagctaggggttgacgcgtgcatcaaattatttgagcaattcaaatcttatgagggtctttactttttctggggatcctatct

SEQ ID NO: 260977 - DNA, 2613 bp, Zea mays
catgaagctgctattcaacaagtgatgtctcaggctaacagatgagtgccctttattacgctgcagcggctgtgattgagagggatgcacctgaacttcttcctaatctaacaaagtcagctggaactggaataggccttgaattccgagaatctggcttaaatctgaatgccaagaatgatcgcaggataaaaaagggaatggtttttaatgtatccctgggtttgcataacatccaggcagaaacaaccagtgagaagacaaagcagttttcactattattagctgatacagttttagtcaatgaaagaggacatgaggtcttaacagcaccctgctccaaggcattcaaagatgttgcttattcgttcaacgaagatgatgatgctgttgctgctgaggttaagataaagtcgaagaccatagatgttatgccaaccaaggcaactctcaggtcagacaaccaggagatgtcgaaggaagagctcaggagacagcaccaggctgaacttgctcgccagaagaatgaagagactgctagaaggcttgctggggttggtactggatctggtgacggacgtggtcctgcgagggcttcaaatgagcttgttgcatataagaatgttaatgatgtaccatttgtaagagatttggtgatccaagtagatcagaagaatgaagctgtcctcttacctatttatggtagtatggttcctttccatgtttctactgtcaagagtgtgacaagtcaccaggacaaccgcacctgcactatccgtatcttcttcaatgtgcctggcatgccattctcaaatgatagcaagtttaattctcaaggtgctatctatctgaaagaaattacattccgctcaaaagatccacggcatagcagtgaagttgttcagcagatcaaaacattgaggaggcaagtggcatcaagggagtcagagagagctgaaagggcaactcttgttacccaggagaaacttcagattggaagcaacagaatgaagatgatgaggctttctgatgtgtggatacgacctgcatttggtggtcgtgggaggaagctcacaggaaatcttgaggctcatttcaatggtttcagatattctacttcaaggtctgatgagcgtgtggacatcatgtttggaaatataaagcatgcctttttccagcctgcagagaaagaaatgattactctccttcacttccatttgcacaaccatatcatggttggaaacaagaagacaaaggatgttcagttctatgttgaagttatggatgttgtacagacgcttgggggcagtagaagatcggcacttgatcctgatgagattgaagaagagcagcgtgagagggataggaagaacagaataaacatggatttccagaactttgtgaacaaggttaacgaccactggtcgcaaccacagttcaaggggcttgacctggagtttgatgtcccccttagagagcttgggttccatggtgtcccatataaagcttctgctttcattattccaacttctacatgtttggttgagctgattgagacccccttccttgtggtgagcctgagcgagatagagattgttaacctggagagggtgggctttgggacaaagaacttcgacatggctatcgtgttcaaggatttcaagaaagacgttctccgcattgactccatcccttcagcatcgcttgacgcgataaaggaatggctggacacaactgacctcaagtactatgagagcaggctgaatctgaactggcgccctatcctgaaaactataatcgatgatcctcagaagttcattgacgatggcggctgggagttcctgaacatggaggcgagtgactcagagactgaggacacagaggaatcagaccaaggctatgtgccttcagacgctgagcccgaatccgagtcagaagatgatgactctgacagtgagtccttggtggaatctgatgatgacgatgaggagtcagacgaggactcagaggaggagaagggcaagacctgggaggagctggagcgtgaggcaagcaacgcggaccgtgagcacggtgcggagtcggacagcgaggaggagaggaggcgccgcaaggcaaagaccttcggcaagtcgcgtgcgccggagcgcagcagcttcaagggagcgccgccctccaagaagccaaagttcaggtgaatgctgccttcggcaattcgctcgtgccagagtgcagcagcttcaagggagcaccacctccaagaaggcagctctggttaatgggactccttgaagctttggcccccggagtagacgtgtctgtaggagtgtggtttgttatatctagattatctgcagtagcttagtccatctaaatgaaatgtgacagctgaactttggaagttgcatcgttggggaaacgaaatttaagtcgattgatttgttaatgccctcgttgatgtaatatttcccttgttcggtggatttccggtctgtataatatttatgcacgcttgcactttatccatggtatttgtatacccgtataaggcagcatggaggatgtttcttgcatgtggacgcattgattgatatatatatatatttaaggttc

SEQ ID NO: 260978 - DNA, 573 bp, Zea mays
cccacgcgtccggcgtttcgagacaggggggtccctaagccgacgagtgagtgtgctgggtgccctagcccagatgggtcgagcgcgtgggcgagcgcgaaggggggagaggcgaggtggccggagccgagcgtgaggcaagcaacgcggaccgtgagcacggtgcggagtcggacagcgaggaggagaggaggcgccgcatggcaaagaccttcgccaagtcccgtgcgccggagcccaccagcttcaagggagctgccgccctccaagaagccaaagttcaggtgaatgctgccttcggcaattcgttcgtgccaaagtgcagcagctttaagggagcaccacctccaaaaaagcaattttttttaatgggacttcctttaacttttgccccccgagtttaactttttttatagattgggattttttttttttaaaatttccaaaagtttcttttttctcttctatttttttttctttcttatttttttccttttatatggtacgctttattctttttattttttttcaataatcttttttctattcctacttttccatatttttttttaa

SEQ ID NO: 260979 - DNA, 1585 bp, Zea mays
gaaacttccaaattggatgcagttgccttgagccgtgcacttgagggcaaactgaattctccattatggcacgttcgcatgaaggctatttgtgtgttaaaagccattgtaaggaaacaggatactgatccttactctatcatcgcttcatatttcactgagaacacagcttctgttgttaaatgctctgagctgccacaggtttctctcagagagaaagcctcaaaggtcttgaatatgctgattggggaacaacctaccggaaccgcagcaacaaaatctgcaatggccacacctgttcagatgcctgatttgatcgatacaggtgatcaagatggtctggcaacaagttctggacaggaaagcaatggacaaaaaaatactgggaaagcatatgtttcttcagttgatgatttgcttggtggtgaacctattgctgatacaagtgtcactgctgatagcaatggaagcgatccatttgcagatgtatcgttccatgaggtagaggctaaggagactaatgatctcttctcaggattgatagtagaagaaaaatcatcagctaccatgcacggcagttcttcatcaaacaaaaatgaattaccagatatctttggcagcccccctgattctttcatccaaggtagtgttactgaccaaggaactgtcaatgatttgatgtctggcttgaaccttaatggaacaggtcaggctcagcctccagttaaagcagaacccaatagcaccttcagtggttcacagttctttgatacaaaaaatgagtccggccatgtgccaagtgctgcaacattgaatgacattcttggtcaaaactcgctttaccaacagcagcagactccattgcagtacagctttcctcaacatatgatgctcaatcaatcatttcctggacaacaattaaattatggtgccatggggattcttcttgctcagcagcagcagttactgcaaagttttggaaatttcaatgctggacttgggaattcttctttcaattcgatgaacggtgggaatacatctgtgcttccagatattttcaattcaagtaatcaacctcaaaatcatgttgcagtgatgagcagttcgaagaaagatgacaataaagcttttgattttgtttcggatcaccttgcagcagcacgtggttcgagaaagtgaaacaggaagcaatgaacatgtccagatgctggaaagagctcaagtgcttgatggacataaaagatgggaattccaaaaactgcatctcgtcacagcctcgcagattggctgcgtgatcacacacggctggtttggcatgggatcgggcgcatgtttgaacagttgagaaagaagggttgttccatacggttgaaaaacgggatgttgtgtcgtactatgtacttagacaaagactgtttttttactctgaaaaataaattgcatcttccgactttccttatgttctgcccttttctctcttccttttttttattaaaaaaatgagtcagacaccatatacgtatttattacctcaggttttatttcttttctgtacaagtacatggaggatgtttttttttgcggc

SEQ ID NO: 260980 - DNA, 465 bp, Zea mays
cggattcccggcttcggatcaccttgcagcagcacgtggttcaagaaagtgaaactggacgcactgaacatgtccagatgctggggagagctcaagtatttgatggacacaatagctgggaattccaaaaactgcatctcgtcacagcctcgcagattggatgcgtgattcacacggctggtttggcattgtttgaacacatgagaaggaagggctgttccatacggttggaagacgacatgttgcgttgtgtactatgtatttagacgaagactgttcttttttacgctgaaaaataaattgcatcttccgtctttctttgtgttgtgctccttttctctatcctttttcttttctagaaaaaaaaagagtgagacactatacgtgtttgttacctgcaagttttatgtttcttttctgtacaagtatatggaggatttttttgggggcaattgtaaagctttg

SEQ ID NO: 260981 - DNA, 789 bp, Zea mays
gagggttcttccttcgccatcttcagttccctccccacaccgttgcggcgcggcaccacctgaacccgatcaccacccacaccatgttgtcccgattgccggcgacggtgagccttcttcgccggtcgctccgagaaccgcgcggcttcagctcctctgtgctggcttcatctaaggaaacggccgacggaaagctggtggcgtcggtgcttttcgagcgtctccccgtcgtcatccccaagatccaccccgttgtctacgctttccaagaattctcatttcggtggaggcagcagtacagacggcaataccccgaggaggtcctcggcaaggccgacgcgaggggtaagggtgattatcatattgattatgtgcctgctccaagaattaccgaggccgacaaaacaaatgaccggaagtctttacaacgagctcttgataataaactttatctcctgctgtatggcaatgcttatggggctcctgatggaaagcctgtatggcattttccggaaaaagtatacgaaaatgaagaaactatgcgactgtgtgcagaggctgcattaaaatctgttcttgggggacttgaccatacatactttgttggcaatgctccaatggctcatatggcagttgaacaaacagattcaagtgtttcatcattcaagcgtttctttttcaagtcacaagtggttggcacaacgaaataccatgttggaaaatgcaaggacttcgcgtgggtgaccaaggatgagctgctggagtattttcctgagaacaaggatttct

SEQ ID NO: 260982 - DNA, 2131 bp, Zea mays
acgcgtacgcacacgcgtccgcgcgcccacttcttatactgccagcgtctgctccctctcgcggaggcctcgctctggttggaaggtttggagaaactccccggctcgaggagatcgtgacattgagaggacgatgggagggcgcgcgctcctcctcctcctcctggtctcggcgttggtctttcagatccacgcctccgacccgctgctgtacgagccgttcgatgaggactttgaggggagatgggtcgtctccaagaaggatgaataccaaggtgtgtggaggcatgccaagagtgatggtcatgaggactatggcctccttgttagtgagaaggcaaggaaatacgccataatcaaggagcttgatgagccagttaccttgaaggatgggacagtggtcctgcagtttgaagtgagacttcagaatggccttgaatgtggaggtgcctacattaagtacatccgccctcaggatgctggatgggatgccaaggagtttgataatgagactccatacactattatgtttggtccagataaatgtggatcaaccaacaaggttcatttcatccttaagcacaagaatcctaagactggaaagtatgttgagcatcacctcaaattcccaccatctgtcccatatgacaagctctctcatgtctacacggctatcttgaagccagacaatgaggtcagaattttggtagatggggaagaaaagaagaaggcgaacttcctttctgctgatgattttgagccagcacttatcccatccaagaccattcctgaccctgatgacaagaagccggaggactgggatgagagagctaaaattcctgatccagatgcagtaaagcctgatgactgggatgaggatgccccgatggaaattgtggatgaggaagccaccaagcctgagggatggttggatgatgaacctgaggagattgatgatcctgaggcagccaagcctgaggactgggacgatgaggaggatggtgaatgggaggcgccaaagattgacaaccccaagtgtgaagaggcacctggatgtggcgagtggaagaggccaatgaagcagaatcctgcttacaagggcaagtggcatgcacctatgattgacaaccccaactacaagggaatctggaagcctcaggagatccccaaccctgagtactttgagcttgacaggcctgattttgatccaattgctgctattgggattgagatctggacaatgcaggatggcatcctgttcgacaatatcttgattactgatgatgagaaagttgccacctccattctcgagaagacctggaagcccaagtatgatgttgagaaggaaaaggagaaggctgaggaggctgctgctggtgcagatggtctttctgacttccagaagaagatttttgacgtcctgtacaagattgctgatattccgttcttggcaccctacaagaccaagattattgatgttatcgagaagggagagaagcagcccaacatcactattggcattttggtctccgttgtcatcgtgttcgttaccgttctcttcaagatcctgtttggtggcaagaagccggtggcacctgtgaaacctgcagctgaggcgaagaagcccaaggccacggagaccgacggtgctggaagcagtggcgacaaggatgagaaagaggacgaaaaggaggagacagcaggcccacgtcggaggacccgaagggagacatagagacctatttttgatgtgtttggatgttctggcgcctgcttattttgaggactcttaatatttctgagtgtataataggaacttgtgtcacctctgcggcttccctgctgcttatttgtttttacatggttagaccaggaaccttcacgagctgtagaatttagttcttgttggtcatttgtgtgtgtgcctgacgggtataatcccttgttcaatcagatagaggtgatggttttttttctcgtagatcccaggaaggaaaccttcataaagtccccgttaaattctggacgccttttgttttcccaaaaaaaaaaaaaaaaaaaaaaaaaaaaaaaaaaaaaaaaaaaaaaaaaaaaaaaaaaaaaagggcggccgcccgggaatccggacggt

SEQ ID NO: 260983 - DNA, 495 bp, Zea mays
caaaaatatggttcgaaaaggtaattgtgttttgcacttatctttttgtttgaaccctatcaagttccgactgtctcttgtgggtatccctgaaatgaagctgaactatgtgtattgtgttcaggtttattaagttccttgcttggttcatggctataattcagagtctccttataattgcttctcgcaagcactactcggtcgatgttgttgttgcgtggtacactgtaaacttagtagtattctttgtcgacaacaagctgccagaaatgccggatcggacgagtggactacatttgcttccattaagctccaaagaaaaagagggcaggcagaaggaggagaaagacagtaaactgaaggacgagttccacaagttactgaatgggaaccatgcggatcctactgatcgggtaatgtagaatttatgctaacaactcttttacctggcaaccctattcatcctatctggatctgcatagccatctctgtcac

SEQ ID NO: 260984 - DNA, 1084 bp, Zea mays
  unsure (1)..(1084): unsure at all n locations
ngatgcttgggctggcgtgctgctgcggacttgggggggtacatagcgcgggagacttccaaggtgtggaggaaggtggccacggaggtatcggtggagctgcagctcctgcgcgagaagtgggggctccttctcgccggtctgatctttcagtatattcatggattagctgctcgaggagtgcattatttgcatcgacctggaccactgctccaggacttgggatttatggcccttccagagctcgggcaagacaaaggttatcttagtgagactatattttcttccatcttcatctcctttgtgttgtggacattccatccttttatttatcacagcacacgttgcgatactgtcctaatctggcgcagggtgcttgcttttttagttgcttcacaatttttaaggattattacattctattcgacccagctcccaggtccaaattatcattgtcgtgagggctcaaaactggcaactcttccaccacccaatagtgtacttgaagtgctcctgattaactttcctcgtggggtacgtttattaagttccttgcttggttcatggctataattcagagtctccttataattgcttctcgcaagcactactcggtcgatgttgttgttgcgtggtacactgtaaacttagtagtagtctgtgtcgacaacaagctgcgagaaatgccggatcggacgagtggactacatttgcttccattaagctccaaagaaaaagagggcaggcagaaggaggagaaagacagtaaactgaaggacgagttccacaagttactgaatgggaaccatgcggatcctactgatcggcgacagcgggcacagatgaacgggaggcacgacgaagacatcaatcacgcgctctccgaggccactgccaacggcacgtaagggcccgtcggcatctgcttttcaccgggggctttgtccttggcgctcgcaggagaatcctcgcgggggtcgagaaaaccatgcctggtgtggtgccccggccgcccggccccgttttatgaagctgtccgagattccagcgatccagccattcacatcatgcatcttcctgaacc

SEQ ID NO: 260985 - DNA, 469 bp, Zea mays
ctattgaagtgctcctgattaactttcctcgtggggtactttttggttgtggtgatttgatattttcatctcacatgattttcactctggttttcgttcgaacttaccaaaaatatggttcgaaaaggtttattaagttccttgcttggttcatggctataattcagagtctccttataattgcttctcgcaagcactactcggtcgatgttgttgttgcgtggtacactgtaaacttagtagtattctttgtccacaacaagctgccagaaatgccggatcggacgagtggactacatttgctttcattaagctccaaagaaaaagagggcaggcagaaggaggagaaagacagtaaactgaaggacgagttccacaagttactgaatgggaaccatgcggatcctactgatcggcgacagcgggcacagatgaacgggaggcacgacgaagacatcaatcacgcgct

SEQ ID NO: 260986 - DNA, 607 bp, Zea mays
  unsure (1)..(607): unsure at all n locations
gacgacccacgcgnncgcccacgcgttcgtggacgcttgggcttgttttatcattgataggcganggntngtcttctcggagagcacatgtatggaatatttcataaagttctcgtcgtgttcgctaccgttctcttcaagatcctgtttggaggcaagaagccgtgggcacctgtgaaacctgcagctgaggcgaagaagcccaaggccacagtgaccgactgtgctggaagcagtggcgacaaggatgagaaagaggacgataaggaggagacagcaggcccacgtcggaggacccgaagggagacatacagacctattttcgatgtgtttggatgttctggcccctgcttattttgaggactcttaatatttctgagtgtataataggaacttgtgtcacctctgcggcttccctgctgcttatttgtttttacatggttagaccaggaaccttcacgagctgtagaatttagttcttgttggtcatttgtgtgtgtgcctgacgggtataatcccttgttcaatcaaaaaaaaaaaaaaaaaaataaaaaaaaaaaaaaaagaaaaaaaagaaaaaaaaaaaaaaaaaaaaagggcgggccgc

SEQ ID NO: 260987 - DNA, 643 bp, Zea mays
ggtcttgtagggtgccaagaacggaatatcagcaatcttgtacaggaccaagattattgatgttatcgagaagggagagaaacagcccaacatcactattggcattttggtctccgttgtcatcgtgttcgttaccgttctcttcaagctcctgtttggtggcaagaaaccagtggcacctgtgaaacctgcagctgaggcgaagaagcccaaggccgcggagacggacggtgctggaagcagtggtgtcaaggatgagatagaggatgaaaaggacgagacaggcccacgtcggaggacccgaagggagacatagacctgtttttgacgtgttttagctcttctggcgtctgcttattttgagaactcttaatatttgtgagtgtataataggagcttatgtcacctctgcggcttcccccgctgctgatttgtttttaatggttagaccaggacccttcacgagcgtagaatttagttcttgttggtcatttatgtgctgtgcctgacggtgttcaatcagatagaggtgatggtttttttggtagatcaaatcaaggaatatttcatatgcctttttggcaactgtttcagttgggtgaatgcctggtttaacaaaaaaaatgaaaaaaagaagtcttcc

SEQ ID NO: 260988 - DNA, 334 bp, Zea mays
cggacgcgtgggtcgctctagtcggaaggtttcgaggaactcccgggctcgaggagatcgggacgatgatgggagggcgcgctctgctgctgctcctggtctcggcgctgctcgttcagatccgcgcctctgacccgctgctgtacgagccgtttgatgaggacttcgagggtagatggatcgtctccaagaaggatgaataccaaggtgtatggaagcatgccaagagtgatgggcatgaggactatggcctccttgttagtgacaaggcaaggaaatacgccataatcaaggagcttgatgagccagttaccttaaatgatgggacagtggt

SEQ ID NO: 260989 - DNA, 401 bp, Zea mays
  unsure (1)..(401): unsure at all n locations
ggcgttgtgaantatctttcaatacgaaatttctggttctgaggtccatctgaggctcggaagatgagtttcgtccttgcgctcattattgtttatgtgagcgcacctggaagcgctcattgaccaacatcattgatgttatccagaagggtgagtaggcagcccaacatcactattggcattctggtctccggtggcggcgtgttcgttaccgttctcttcaagctcctgtttgtaggcaagaaaccagtggtaagttattcccaaccaatgtaatactgctgtcacggttctgaacttgaagagaatgctcagttcactacatttgcttgttccaggcacctgtgaaacctgcagctgaggcgaagaagcccaaggccgcggagacggacggtgctgga

SEQ ID NO: 260990 - DNA, 1493 bp, Zea mays
gttctgagttgcccccgatccggcccacctacatctcccagctcacctcccgagtcccgacgaccgcatcgtgccgttgtttcgtccgtcccctagtccctacgaccctactccctaccgcacgccaccgcccaccagcgccgccgaggggcaaggccgaaccctcctccgttcgccgaggcggagcacgcccttccaggccagcttccaccggagcaagagctaagtcgcctcgaattcttcccagctagtagcgtgtgccgtaccccgtcgctcaaccgggatggcgtcgagtggggatccgcccggatctgctgatgagaagaaaactccaatatccgaagggtcttccgacgaacgtcaagggcttcctccagcaggcttttcaaatccttttgattttggttctatgcaaagtttgctcaatgatccatctattaaggagatggcagatcaaattgcaagggatcctgcattcaaccggatggctgagcagctacagaaaagtgctcaaagcacaggagaacagggcacacctccattaaatcctcaacaatacatggaaacaatgcaaaaggtcatggaaaacccccagtttatgaccatggcagagcgtctggggaatgctcttatgcaggatcctgctatgtccagtatgctggaaacctttagtagtccatcacataaggagcagctggaagagcgtatgtctcgcattaaggaagatccagctatgaagtcaattcttgatgagttagagaatgggggcccttctgcaatgatgaagtactggaacgaccctgatactcttcaaaagattggtgaggcaatgggagctagcttcccatttggtgcaggttcttctgctgaaccttctggtactgaagaaactgaggaagaaggtggggatgacgatgaatccatcgttcatcacactgccagtgttggtgatgaagagggtctcaagaaagcactagatggtggagccgacaaggatgaagaagactctgagggaagaagggccttacattttgcatgtgggtacggtgagttgaagtgtgcccagatccttcttgaagctggtgctgcagtggacgctcttgacaagaacaagaacaccccgttgcattacgctgctggctacggccgcaaggagtgtgtggatcttcttttgaagcacggtgctgctgtaactctccaaaacctggacgggaagacacctatcgatgtcgccaagctgaataaccaggacgaggttctgaagttgctcgagaaggacgccttcctttgaataccatgcctttcgtatacacttggactcttggtgtcatgtttttttttcataccggttgtttttgtctggatagccacatgtcatggtccttaaatctggtatgcctaaatgctattagcatgtgggtgttcgaactggcctgtaatggtctaccgttcgtgacttgtgttttcccactccatttctgatacttaagcac

SEQ ID NO: 260991 - DNA, 629 bp, Zea mays
  unsure (1)..(629): unsure at all n locations
ggcgcccacgcgttcggaaagcatgtaccaagaaactacctccgagattccaaatgaaacgtattgggtttgagaaggttgatnatacaaatttccacatggacttaattgctggtcttgcaaatatgcgtgccaggaactatggcatccaagaggttgacaagctgaaggcaaaaatttttgcaggaaggagcatcccagctattgcaacttcaactgccatggcgacaggactagtgtgccttgagctttacaaagttctggccagagggcacccaatcgaagactaccgcaatacatttgctaacctggccctaccgatgctcaccacatctgaacctcttccccccactgtgatcaagcatggagatatgacgtggaccgtatgggatcggtggtctatcgagggagacatcacagttgcagagctcctgaagtggttaagcgacaagggcctgagtgcgtacagtgtctcctgcggcacatcgttgctctacaacataatgttcacaaggcacaaggatcgactgagcaagaagatcagagacgtagccaaggaggtggcaaaggtagacattccagaatacaggaagcatctggatgtcgtccgtgcttgtgaggatgacaac

SEQ ID NO: 260992 - DNA, 774 bp, Zea mays
caaagagcttgattataatactaggataagctacgcttctctttggaaggcacttgtttttgctgatgcaaaagcaattaaggagaacagtgccaaactgggtgctggggaggatcttcatgcactctttgctggtgttctcactatgagaccatggaaaagggtgattgacccgtcccctgatcatcttgttctaggaaaaaatactgattattcagaattacagaattacgcctccttatattttactgagatctccgagctactgaggagattaccaagggttatattgttgatgcttaaaacaaatgactgtttacgtgcagtcagtcatgccctggttgggggcagttccttggagtcgtttatgattattggacgggtatcttctgaagctgtgctggatgctaaaaggatgaacaggaggtcctttctcgatggattgaagatatggctggaggaagccctgctggaagctcgattctttactttgaagctgatgctatgtgttatgcaacttaggaagttgttgcctggctaaaagcagttaggcgtatcagcagcctttttgaccggtagaactgcggagttgacatctagttccatatattttcttgagggcgaaacttgacattttgcttagaagattgcctttcttttcgtatacataattcttctgtcgatcattttctcaccatgagtggccatttttcatggtcgatacttgataccttcattgggtgaatacaagtatacaaactgctgacgtggccc

SEQ ID NO: 260993 - DNA, 581 bp, Zea mays
gcaaaaattgattgtgtttgcaggttgcgtgctagcctgaggaatgctaacttacaagcgaaagagaacattagaaaagctgctcaggaggagagggagcttcttctagggggtggagaagagtcaacaatccgtaggcgtaatctccagacaaaggttgggatgacatctgctgctgaaagtatcaccgagagcctccgacggtctcgccagatgatggttcaggaagtggaaaggagtgcaagtaccttggcaacatttgatgaatcaacaagtgttctccggaaggctgaaggtgaatatcaaggacaccgctctttgctaatgcgtacccgtggtttgctctccacgatgcaacagcaagatgttcttgataggattaggtactctcactcctttatacagttcaaaactgggatcactgaaaataagtgtataatctgttcttatagcttgcactatttgttttacagtctaaatatttaaacttaatgaaatatctttatatagtgtgtacacctaacagctcttcacatttcaatgagcatctacaaattgaactttaaccattgttcctttcg

SEQ ID NO: 260994 - DNA, 701 bp, Zea mays
gagggagcttcttctagggggtggagattagtctacaatccgtaggcgtaatctccagacaaaggttgggatgacatctgctgctgaaagtatcaccgagagcctccgacggtctcgccagatgatggttcacgaagtggaaaggagtgcaagtaccttggcaacatttgatgacatcaacaagtgttctccggaaggctgaaggtgaatatcaaggacaccgctctttgctaatgcgtacccgtggtttgctctccacgatgcaacagcaagatgttcttgataggatcatcctgaccatcggctttatcattttctccttggcggttctttatgttgtctcaagacgtattggtctattgacgctgcaaaggaaactggccgatgccatcagatccggttcattatcagccgatgacatcgtagcgaatgcccaacgtggacctgccccagcaaatgttcctgctcccatctacgatgaactgtgattcgtttgtcctctgtattgttaaggttagttttgcatgtggctattgggattttgtccagtgtgtggtggtcatgtaccgatctgcgattcattaaaataatttcaaatgaaaaatagttaactaacaaaaaaaacagaaaaatcaaaaaccgaaagaaaaataaatttgccagagattatttctttcttaaagaaagaataaaaaaaatga

SEQ ID NO: 260995 - DNA, 535 bp, Zea mays
gtgatattcctgaaaagcaaaaggaaaagaaaaggcaggagaataacgaagcaagatctgccgcggctccattttaactggtcggcgcctccgccgctgccgtcttccccctctcccctccgtaccactcgtcttcgtctagcctcccgcccgcagccaccatggcacccggcctctacaccgacatcggcaagaaaaccagagatttgctgtacaaggactacaacacgcaccagaagttctccctcaccacctgctcgccccatggcatcgcaatcacagctgcaggaacaaggaaaaatgagtccacctttggcgatcttcacactcaaattaagaacaataaattgacggtcgatgtcaaagcgaactcagaatcagatcttttgacaacaatcactggtgatgagattggtactccagggctcaaatcaattctcactttggttgttccggaccagaggtcagggaagcttgaactccagtacctacatgaatatactggtgtgaatgcaagcatcgggcttaatttcaa

SEQ ID NO: 260996 - DNA, 1071 bp, Zea mays
cgcgagaccgccggcgaatttgttgcagtgcactgaagccaacagctgcaggacaggaggaggaggaggagctgtttcaacaattatcccccgcgcgcccaggccagccccgcccccgcccgcccactctcccgaggattccaggttctcaacacaacagacaacaccgctcaccgcatatatatagatgggttccgaggggccttctcccgtcaccgtccacgtcaccggattcaagaggttccatggagtcgccgagaacccgacggagaggatcgtgcgcggtctccagccattcatggagacgagagggttgcccaagggccttgttctcgggagctgcaccgtccttgaggccgccgggcagggcgcgcttggcccgctgtatgaactgctggagtcgaccgtctccggccgggaacgtcaggagcgagtaattctgctccattttggcgccaacagtggttcacataggtttgctcttgagaatcaagctgttaatgaagctactttccgttgccctgatgagctaggatggaaaccacagaggacacctatcatatcgtcagatggaagcatcttacacgcaagacagactacactgccagtggaggagataagcaagtctctccaacagatgggatacgacgtggtgccttcagacgacgctggtcgatttgtgtgcaactacgtctactaccactcactcaagtttgcagagaagcatgggatcgggtctctgttcgtccatttccccctcttcctggcaatcgatgaggaagttcagatgcaatttgttgcctcccttcttgaagtcctcgcttccttgaacttctagtagtaacctgatggtagatctatctcttccagcggtgtattgttcccaatttatttggaagggtccccaatttacatgtggagtgaataagaatgaggaatcattcatggagttatgtgtgcttcaaaatgtgtaaaaaaatagctcttctcaaagaacatgtccaggcagtccagatgtacaaatatccaaagtggtttatatgacaggtgctattgttctcacacatgtgt

SEQ ID NO: 260997 - DNA, 715 bp, Zea mays
  unsure (1)..(715): unsure at all n locations
tgancatanttgttagcatacgaagtgaattaccggcctgagcatgtatgaaatccagatactttggagaaactggttaatactttaatgttgagaataggcgactgtgttcttcagtctttttttttttgcatggaacatgtgctagtgttttcgtcgcctgaaattgccatgataaaactcgctctagttgctcatgttcaggaactacgtgattcccactttgagagtcgtgaactcgctttagttgctcatattcatttaatctaaacaaatcaatttatgtttatgcaacgtttattttcagctccattttggcgccaacagtggttcacataggtttgcgcttgagaatcgagctgtcaatgaagcttctttccgttgccctgatgagctagggtggaaaccacaggtttgctatacttttgcggttgctcatgtacaagcatgttaattctgtgtgccattatatcttcttggtttctttacactccagaggacgcctatcatatcatccgatggaaacatcttacacgcaagacagaccacactgccactgaaggaaataagcaagtctctccagcaaatgggatatgatgtgatgccttcagatgacgctggtcgatttgtgtgcaactatgtctattaccactcgcttaagtttgcagagaagcatggcatgacgtctctcttcgttcatttccccctcttcctg

SEQ ID NO: 260998 - DNA, 1034 bp, Zea mays
tacggtcggagccccggggcgaccccgcgtccgccctcgtatcctcacgcccacaaaacacccgaagaaaagaagagactgaacgccgcgagttcacgtgacgatggagaacgccgcctccgccatcgctaagccgtcgctgtccaagaagccctcgccgtcgttccgcctccggaacggcagcctcaacgcactgcgcctgcgccgcgtgttcgacctcttcgaccgcaacggcgacggcgagatcaccctcgacgagatggcctcggcgctcgacgcgctcggcctcggcgccgaccgctccggcctggaggccgcggttggcgggtacatcccggccggcgccgcggggctccgcttcgacgacttcgaatccctccaccgcgcgctcggggacgcgctgttcggccccatgccggtggctgtgaccgaggacgacgacgacgagggggacatgaaggaggcgttccgggtgttcgatgaggacggcgacggcttcatctcggccgccgagctgcaggccgtgctcaagaagctcggcctgcccgaggctcggaacctggccactgtgcaggagatgatctgcaacgtcgaccgcaactgcgacggccgcgtcgacttcggcgagttcaagaacatgatgcaggggatcaccgtgtggggcgcttagctgccgcgcacctgcgttgtcacaccccctctactgcgtggtgtcatgtatgtatccaggcaccgtaggatgcgcttttctacccggcgcttcttcctcctcttgatggcgcagtggattcttcctgttcttggctttgctatctgactctgcttgtagtcttgagaatctggcggcacacagacatagttttctttagtttcttgtgtttgatttactccgtcgcccaattgcacagtttattcacatgtaagaacgttgaccttgaccagcttccctacaagtttatctttccttctttcttggtgtcttgggtcacgtatgcggtatgcgtctcccaaatcccaatcaagtcagtttacgt

SEQ ID NO: 260999 - DNA, 977 bp, Zea mays
accaaacgtccggtcgtcgtcgtccctcccgaaacaaaagaagctattttgacaccacacacacacacacagaggagagaagataagagaacgaggggcagggcagccagcgccgctagctgaagcaaggcagggcaagagaatccgtacgtcgaggtgcaggtcgtaggtaggatggacgcggaccagcagggcgtggttgcggcggcggtgaagccggcgctggccaaggggacgccgtcggcgtcgttccggctccgcaacgggagcctgaacgcggtgcgcctccgccgcgtgttcgacctgttcgaccgcaacggggacggcgagatcaccgtggacgagctggcgcaggcgctggatgcgctgggcctggacgccgaccgcgccgggctgtccgccaccgtcggcgcctacgtgcccgacggcgccgcgggcctccgcttcgaggacttcgacaagctccaccgcgcgctcggggacgccttcttcggcgcactgggaggccaggacgacgccaccgccgacgacgacgagcaggagatgcgggaggcgttcagggtcttcgacgtcgacggcgacggcttcatctccgccgccgagctgcaggaggtgctcaagaagctcggcctccccgaggccagcagcatggccaacgtccgggagatgatctgcaacgtcgaccgcgacagcgacggccgcgtcgacttcgccgagttcaagtgcatgatgcaggggatcaccgtctggggcgcctgatcgatctcatcgtcgtgggatcggacgagtgtgtgtgtgtcaagcaaattgaacccacaaagctccgcaggacccgtatttccttcctcgagacagcgatgcgaccttcattcttgtcttgtcttgtggtggaccggtgtgtctctacttgtgtgtgctcttcttttaaattcattaattatcttgacgtctttcgctggtcaagcagaggcgatgag

SEQ ID NO: 261000 - DNA, 722 bp, Zea mays
aaccgacgaaacaaaagaagctattttgacaccacacacacacacacagaggagagaagataagagaacgaggggcagggcagccagcgccgctagctgaagcaaggcagggcaagagaatccgtacgtcgaggacttcgacaagctccaccgcgcgctcggggacgccttcttcggcgcactgggaggccaggacgacgccaccgccgcggcggacggcgccggcgccggcgccggcgccgaggaggacgagcaggagatgcgggaggcgttcaaggtcttcgacgtcgatggcgacggcttcatctccgccgctgagctgcaggaggtgctcaagaagctcggcctccccgaggccagcagcatggccaacgtccgggagatgatctgcaacgtcgaccgcgacagcgacggccgcgtcgacttcaacgagttcaagtgcatgatgcaggggatcaccgtctggggcgcctgactgacctcatcgtcgtaccgcgtacgttctgacttctgagtgtgtggcaactggcatgatggtccccgcatttcgtcgagacagtcctgcgtctgcgtctctaattgaattctttagtatcgtccttcacatcactggtctagtggtgatgagaatgccctgtcctgtgtgtgtgtgtcacataaccatggtatgtaatgtcatactgggaattaggtatatgatgatgacagctgataagaaaatg

SEQ ID NO: 261001 - DNA, 432 bp, Zea mays
aacgtcgaccgcaactgcgacggccgcgtcgacttcggcgagttcaagaacatgatgcaggggatcaccgtgtggggcgcttagctgccgcgcacctgcgttgtcacacccccctctactgcgtggtgtcatgttctggagcatataaagactagaggaggggcgatcacaaatcagtaactggtaccaggtttaaaaagtagggatgattcgtgacttcagtgttctaactttggtggttctgcccccctagtgtagatattgttctactgtacgtagtgtctcccttgctctattaagctttctgatcatgagacatccagtttatctataaacaaaattgttatgaacatgctcgatttctactatgatgtaatttgccatctttcttggcacgacctgcatcttaaataaactgtccctagtggtttc

SEQ ID NO: 261002 - DNA, 452 bp, Zea mays
caatcagccagccctcgcagcctgacctgctgacggccgacgcccacaaagcattgaagagagggggagaagggacgccgccgcgcgagttcacgtggacgatggagagcgccgctcccgttatcgccaggccgtcgctgcccaagaagccctcgccgtcgttccgcctccggaacggcagcctcaacgtcctgcgcctgcgccgcgtgttcgacctcttcgaccgcaatggcgacggcgagatcaccctcgacgagatggccgcggcgctcgacgcgctcggactctgcgccgaccgccacggcctgcacgccgaggtaggcgcgtacattccggccggcgccgcggggctccgcttagacgacttccagtgcctgcaccgcgcgctcggggacgcgctgttcggccccatcccggaggcggtgcctgaagaggacgtcaagggggacatg

SEQ ID NO: 261003 - DNA, 394 bp, Zea mays
ctcgcgggtcgacacacgcatctaaagcgattctgaacagctccgctagctaaagcagggcaaggcggccggacggcaggaaatccgtacgcacgccgaggtcgaggtcgaggtctcagcagggaggatggaaacggagcagcagggcgtggttgcggcggtgaagccgacgctggccaaggggacgccgtcggcgtcgttccggctccgcaacgggagcctaaacgcggtgcgcctccgccgcgtgttcgacctgttcgaccgcaacggggacggcgagatcacggtggacgagctggcgcaggcgctggacgcgctgggcctcgacgcggaccgcggcgggctggccgccaccgttggcacctacgtgcccgacggcgccgcgggcctccgc

SEQ ID NO: 261004 - DNA, 2013 bp, Zea mays
tctttaagcaaaaccctacctgatcccaccggcgtggtagagtctgctcaacaccaaacttcgacgactgcgccggccgtcggccgtcgctgccgccctattttgaccccatcgccggcgacgataatcgccagtttgtggataagggtcttttaagtcttcatatgaaactatccttttgatatacagctgaaggacaataactatcatggatgctactgcaaattcagatgtgcaaagggctgaggaatttaaacttaaggcgaatgatgccttcaaggcaaacaagttctcgcaggctatagagctttacagtcaagccattgagctgaatagttcaaatgcagtttactgggcaaaccgtgcatttgcacacacaaaattagaggaatacggaagtgctgtgcaggatgctacaaaagccatcgaaattgattctagatattcaaaaggttattatagacgaggcgcagcttatcttgccatgggaaagttcaaggaagccctgaaggattttcagcaggttaaaaaaatctgcccaaatgatccagatgctacaggaaagttgaaagagtgcgagaaagctgtccaaaagatccgttttgaagaagcaatatctgctggggatgatgagaggcggtccgtggcagactctattgactaccatatcatagaagtagagccacattatgcgggaccgagaattgatggggaagaaataacgatagagtttgtcaaagcaatgttggatgaatttaagaagcagaaatgcatacataaaagatatgcttaccagattgtgctaaaaaccttggatttgctgcgatcgatgccttcccttgttgatgtggatgttccaaacggtggacattttacagtttgcggtgatgtgcatggccagtactttgatttgctcaacatatttgacctcaatggccttccatcagaagaaaatccttacctcttcaatggcgattttgtggaccgaggatctttctccgttgaagtcatactcaccctttttgctttcaagtgcctctacccaaaagctatgtaccttgcaagaggaaatcatgaaagcaagagcatgaacaaaatatatggctttgagggggaagtgaggtcaaagctgggtgagaagtttgttgaactttttgctgaagtcttttgttggttacctcttgcccatgtcatcaacaacaaggtctttgtggttcatggtgggctatttagtgttgatggggttaagctttcagacattaggtccattgatcgtttttgtgaaccacctgaagaaggtctaatgtgtgaattactatggagtgaccctcagcctcagcttggaagaggtccaagtaaacgtggtgttgctctttcctttggcgcagatgtgactaagaagtttttacaggaaaataacctggatcttattgtccggtctcatgaagtaaaggatgaaggccatgaaattgaacatgatggaaagcttataacagtcttctctgcgcctaattactgtgaccagatgggcaacaagggtgcatttattcgcttcacagctccagaaatgaaaccagatattgttactttctcagctgtgccacatcctgatgtgaagccgatggcatatgcaaataacttcctcaggatgtttcaatgacagaatataacaacattgtttagcaatttttatcagatgagtctgttgtttgtcagctcccaattcacatttcttgctaggtttaagtatatgctcccttgtacaacaaatcaaatgatgcaagggattcaactgtcgatttacttggatggtacatccatttttgtgcacgagttgtgattcttgtaactatccgtaaagtcttagatcattagattttagtttacttgtaaaattgctaaatcgtcatttcctgtcttgcttatcagtgagttacacacgtttagtgcttttatcaaattacatgtgtttcagcggtacaattcctaatatctgagtaatccttccatttt

SEQ ID NO: 261005 - DNA, 370 bp, Zea mays
cccaattcacatttcttgctaggtttaagtatatgctcccttgtacaacaaatcaaatgatgcaagggattcaactgtcgatttacttggatggtacatccatttttgtgcacgagttgtgattcttgtaactatccgtaaagtcttagatcattagattttagtttacttgtaaagttgctaaatcgtcatttcctgtcttgcttatcagtgagttacacacgtttagtgcttttatcaaaaaaaaaaaaaaaaaaaaaaaaaaaaaaaaaaaacaaaaaaataaataaaaaaaaaaaaaaaaaaaaaaaaaaaaaaaaaaaaaaaaaaaaaataaaaaaataaaaaaaaaaaaaaaagggggggccct

SEQ ID NO: 261006 - DNA, 302 bp, Zea mays
gtctgctcaacaccaaacttcgacgactgcgccggccgtcggccgtcgctgccgccctattttgaccccatcgccggcgacgataatcgccagctgaaggacaataactatcatggatgctactgcaaattcagatgtgcaaagggctgaggaatttaaacttatggcgaatgatgccttcaaggcaaacaagttctcgcaggctatagagctttacagtcaagccattgagctgaatagttcaaatgcagtttactgggcaaaccgtgcatttgcacacacaaaattagaggaatacggaa

SEQ ID NO: 261007 - DNA, 343 bp, Zea mays
gtggcggaggctggtaactgggctgtgccctgcgttgtagtccagacaacagctactagatgaaaacagtttcctcgttttaactcctgtcctatcgtactgtggacgggagaaatctggcacttataagtcttgcagctgctgcacgtctgcagatgttgcattgcggacagcgttatgtttcagtgcatgtacataaatccaatatgtctggtcacactttcctgctacgaatttgatcctggtgcttcattgttgaggctatccgcaattaggccagtactctaccccatgttggtaagcttttgtgttgaaagtgtaacacgctacattttgtttccct

SEQ ID NO: 261008 - DNA, 1021 bp, Zea mays
catactttggttcactgcgtacaagatgaaaaagccgaacaagtacaactatccaattgggaagaggcgcatgcagccagtgggaataatagttttcgcatcagtgatgggcacacttggcttccaagtgctgatcgaatcagggcgccagctcataactcaggagcacgcggatttcaagttcaagcaagagctctggatggtcattagcatgtcctctgttgcggtcgtgaagttcttcctcatgctctactgccgaacgttcaagaatgagatcgtgagggcctacgcccaggaccatttcttcgacgtaatcacaaactctgtcggcctggtctcggcgctgctcgctgtccggttcaaatggtggatggaccctgttggcgccatactgatcgcgttgtacacgatcacgacgtgggcgcgaacggtgctggagaacgtaggcacactgataggcaagtcggcgccggcagagtacctgacgaagctcacgtacttgatctggaaccaccatgaggagatccagcacatcgacacggtgcgagcctacaccttcggcacgcactacttcgtcgaggtggacatcgttctctcgggcgacatgccgctgagtcaggcacatgacatcggcgagtcgctgcaggagaagctggagcagctgcccgaggtcgagcgcgccttcgtccatgtggacttcgagttcacgcaccggcccgagcacaaggccgaggtctgagtgcgtggctagtggctactgcagagttcagaccagctgtagcgctactgcagatttgacttcatatgctattagttcgtaagacgaatgctatattcatttcccacaactcttcaaaaagaatctagatatttttttgtcatgtacgtgcagactggaatacaattttgtatagtcgttcatgaaccggtgaaaaatatattttttaatacatttggctaataaagaattattcatattagtttctttttattttctataaaacaaacataatagatattt

SEQ ID NO: 261009 - DNA, 306 bp, Zea mays
  unsure (1)..(306): unsure at all n locations
cccacgcgtccgcccactcgtccgcccactcgtccggaatcatcaattaccaattcatttgctcggaattgttcaattaatgtatgtttctaatttaccttaaagttgattttctttcattctttgcatatatatgttgtcagatatttgctccacacttatattattctgatatctagttactagtagctatgcaactcaattttcaatcacatgattatgtatagttgtcttctcgtgttttagcacctttgataactgaagcacacttgaaatttgattcctttntataaaaataaaataaaa

SEQ ID NO: 261010 - DNA, 1230 bp, Zea mays
aggcagatcttcgcaggtacgccatgacgccgatgccagtgacgagggcagccccggcggcgaccccgctgtacgccgccgcccacgcgtcccggctggacatgcccaccgccatggcgccacgtggggtggccaccgctttcctgcgcccggtggtgccggagtagtccaggaacagcttcagacccttccatccggcgagcctggcgtgttccaccgccgccgcgaggtcgtcgtccgacgcgagcaccaccttgtcccggtcctcgtcttcgtacaggatttgcggtaggcggtcagggtcgatgtcggcgcggacgcgtgggcggacgcgtgggcggacgcgtgggcggacgcgtgggcgacgtcattgacatcgcacatgccgcgatctccattgtggagagcagtggcggcggcggcgacggcagcgcggggagcgacgaggcggcatcgtccatgttccagaggttctgggactccgccatggccttgggccccctggacgacgagacggacacccagtcccagatgagcgaggcgtcgaggtcgcagatgatgatgtccgatgtccaccaccaccaccaccaccacgactccgcgggcggcggcagcgaggcggggttctcgctgtcgtccttctccttcaagctccaggacaggcgagggcggatgcaccgcttcagctgtgaggttcagagcttgacgcctctggtgacctgcatcctgcggaggctcggcgccgacatcgaccctgaccgcctaccgcaaatcctgtacgaagacgaggaccgggacaaggtggtgctcgcgtcggacgacgacctcgcggcggcggtggaacacgccaggctcgccggatggaagggtctgaagctgttcctggactactccggcaccaccgggcgcaggaaagcggtggccaccccacgtggcgccatggcggtgggcatgtccagccgggacgcgtgggcggcggcgtacagcggggtcgccgccggggctgccctcgtcactggcatcggcgtcatggcgtacctgcgaagatctgcctagctagtgtggtggcgcggcggcgcggcgcgcatattcgccaatgcaagagcaaggggttcctgtcctgccttcgaatcaccacagaggtgctagtatgtgtggattacgtacccaaccggtgtatgtgtgtattctcttctacacgaacatgtaccatggcacaaagtttccatt

SEQ ID NO: 261011 - DNA, 997 bp, Zea mays
agcacaccgccttcgccgcggacgacgcgatcatcgccgccgccgccgtcatcacgtcgcagcccggccggcggttcacgtcgtacccgccggcgagggcgcgcggcggctgcaggctggccccggcggcggcggcgcgccaggccacggacgatcccggcgccgctgtgtcctggccagaactagtcgtgccgcggcacgccgacttcgacgactggatggagaagcacccgtcggcattggccgcgttcgagtcggtgctggccgccgccaaaggcaagaagatcgtcatgttcctcgactacgacggcaccctgtcgccgatcgtcagggaccccgacagcgccgtcatgtccgaggagatgcgggacgcggtgagaggcgtggccgagcacttcccgacggcgatcgtgagcgggaggtgtagagacaaggtgttcaacttcgtgaagctggcggagctgtactacgccgggagccacggcatggacatcaagggacccacggcgcagtccaagcacagcaaggcaaaggccgaagctgttatgtgccaaccagcgagcgcgttcctgcccgtcattgacgaggcgtaacgcgcgctgacggcgagcaccgcgccgatccccggcgcgacggtggagaacaacaagttctgcctctccgtccacttccgctgcgtccaggaggagaaatggcgcgctctggaggagcaggtccggtcggtgctcaaggagtacccggacctccgcctcaccaagggcaggaaggtcctcgagatccggccgtccatcaagtgggacaagggcaacgccctgcagttcttgctcgagtctctcggttttgctggcagtaacagtgtcttcccgatatatatcggagacgatagcaccgacgaggacgcgttcaaggtcctgcgcaacttggggcaagggatcgggatcctggtgagcaagattccgaaggagacccgcgcatcctactccttgcgtgaaccttc

SEQ ID NO: 261012 - DNA, 1587 bp, Zea mays
aagctggatcggtatattcaacccacccatccggttttatttcctctgctccctctccgcttctctccactatcctaccaggcaccactcgcatcgtgtgctcagtcagatccccgtcccgcatttcctaaggccaggttagttggcattgaagacgatgactgcttctgcagctgctggtgtgcagatggtggctgcacgcccttgcatttcggcctcgccaggaattcttaccgcacgggtttctaggactgattgcatgctcagtaccactgctacattccccaaaatcagctgctcctggcctctaaggtttaagcgcaatgatgttgttgtaagagcaatatcggaagagtgtggcccgcaggggcttcccattgatctcagaggtaaaagggcattcattgctggagttgctgatgataatggctatggatgggcaattgcgaaggcacttgctgcggctggtgctgaaattcttgtgggtacatgggtgccggcacttaacatatttgagacaagtctgaggcgtggaaagtttgatgaatcacggaagctacctgatggatctcttatggagattgctaaagtatatccacttgatgcagtctacgactcccctgaggatgttcctgaagatgtcaaatcgaacaaaagatatgcaggggcttcaaactggactgttaaggaagttgttgagactgtaaagaatgactttggtagcattgatatccttgtacactctctcgccaacggccctgaggtaacgaagcctctgctggagacctcaagaagaggctatcttgcggcaatttctgcatccagttactcctatgtttcattgcttcagcacttccttcctataatgaatcccggtggtgctagcatctctttaacctacatagcttctgaaaggataattcctggctacggtggtgggatgagttctgctaaagcagctcttgagagtgatacacgggtgcttgcattcgaagctgggcgaaaaggcaaaatcagagttaacaccatatcagcaggccctcttgggagccgagctgctaaggcaattggatttattgagaagatgatagagtactcatatgttaatgcaccattgcagaaggagctgttggctgatgaggtggggaacacagctgcattcctggtttcttcattggcttctgccatcaccggctcgactgtttatgttgacaatgggctcaatacaatggggcttgcaattgacagccctaccataacgtcatagatgtggttgtggtagatagacgacctttcctgctgcattgcggtatcatccttgaataaagatcatagttagttataaatatgagaggtaagggcaggaaagggggaaaattatgaactggtcttttgcgctttctttgctggagaggaacattagagcgatttccagaatgatgggatgctattatgtgatttcatatgattcagaagcagtacaataactccctagatgagctgtcataactatacttatgtttaagaaacagcctacatcttaggtcactgatgggcttaaaaaaaaaaaaaaaaaaaaggacggaa

SEQ ID NO: 261013 - DNA, 515 bp, Zea mays
cccactcgtccgcccacgcgtccggtaaaatgcattgtattgaaacagaaaccagttcttttaccagaataagccagcttatgccatctaattttgtttgggggaaaatgaacctactatcagctcagcatcatgcacatcattctctgtctatttgaattccatgtgatgattttacaatgtatctttctgatattatcatatttgcgtcacctctattgacaaaagtggatctgataaccatttacagatatgaaagtttccctctgcgggtcacgggatggtcagttgagctgatggcttatgccttccttggggccaggccacctgacatgagtcaatgcttggaggacatggctgctgctgcatctaataaaactccatcctggcgctggcgcatgagctcgggcccagctatagcgacgctgtgctggggctcaatgcctcagatgacaggtttctgccaccgtgacctgattttgtatcggcgattcgggctgcctcgagtgatgaca

SEQ ID NO: 261014 - DNA, 973 bp, Zea mays
ggcgagctatcgctttcatatgggtcgggttcaattgagggaacaaatccttatgattcacttgaactgttggtgtctcttgataagtctgataattgctataaagagaaattacaagcactgaagcgaaatggtttgtcagaatctgaaagtttccctttgcgggtcacaggatggccagttgagctgatggcttatgccttccttgtggtcagtccacctgacatgagtcaatgctttgaggagatggctgctgctgcatctaataaaacttcatccaaacctggattgaattatcctgacctggaagaacaggcccttcagtttatcttggactgctgtgaatctaatatagaaaaatatacaaagtacttagagggtggcgctggctctccagaagttccaatgaatgcaaagcaagccaacagaacattactgctaaaacagctagcaagagatctgtgcatcagtgaacggagaatcctgtatcgcacacaatatatattgcgtagaagattgagggacatgagaggtggcgaacttagagctctgtcacttttcaacgggctgagaaaactctttaaataaatggatcggctatcttatcttggcagatcttactggacagatttgatttctccagtaacatggtgctttgaccttgccgccaaagcctcagatacttgtatgccaaatcagactgcagtccaggctctcggccgcaaatttcatctagatgctagaaacaagtaaaccttcgatgaaggatagctgtgcgttgagattgaacaacccagagcttatatgtatgtgtgtaatgtagattcagtccaaccatggagtcgttttacgctaggtgcgagcctggccttctgttacgtatataattataaatccagtagccagcaaggcaaccccccacccccatgtgtacacaggatcgatctcagaacagatgatttggttctccctt

SEQ ID NO: 261015 - DNA, 630 bp, Zea mays
cccactactctgaggcagcatcttccccgccgtcctccgccgcctcccattttcaccttggctgcagcctgcaacacaatcctacgcttccgacttcaacgcgcgcccctcccattttcacctagccctactcctttgtacataaaggaagatgggagcatatgcaacgactggtatgcagatgatagcaacacgcccttccatcccggcctacaggcaaatacttgggtcgacatcagcactatctgcatttggaaggtcaatctgttccagaactggctttgccatctcttctaaagccacatcagcaggaccactggtttcttcgaattgcaagagggttgttgtgagggcaatgtcgcagagaggtgcccaaggacttcccattgatctcacaggtaaaagagcatttatagctggagttgctgatgataatggttatggttgggcaattgctaaggctcttgctgctgctggtgctgagattcttgttggtacatgggtgcctgcgttgaacatatttgagacaagcttgagacgtggaaagtttgatgaatcacggaagctacctgatggatctcttatggagattgctaaagtatatccactggacgcagtttatgacacccc

SEQ ID NO: 261016 - DNA, 274 bp, Zea mays
gaacattactgctaaaacagctagcaagagatctgcgcatcagtgaacggagaatcctcgatcgcatacaatatatattgcgtagaagattgagggacatgagaggcggcgaacttagagctctggcacttttcaacgggctgagaaaactctttaaataaatggatcggctatcttatcttggcaatgattcagaagcagtacaataactccctagatgagctgtcataactatacttatgtttaagaacagcctacatcttaggtcacttat

SEQ ID NO: 261017 - DNA, 861 bp, Zea mays
cggcctctccgactctgggttcattcgcctgcactgcaacccatctcggaaccctccctcgcctccctcgcgttcagtttgatccaggacgaagggaacggtgagccgccatggtgaaggacagcgcgtactacgacgtcctggagatcagcactgacgcctccatggccgagatcaagaaggcctattacctcaaggccaagctggtgcacccggacaagaatccgagcaatcctgatgctgcgcgcaagtttcaggaactaggcgaagcctatcaggtcctaagtgatccactgaaaaaggagtcttacgataagtatggaaaggaaggactttcacacgactatcttgaagattatgttggccaacttgcgctagcatctgttgcctctgtagagattgaggaagaatcaaacacacctgaggcaaggacaaggattcaagagaagataaaggacgtgcaaaccgaaagagagcaaatacttactcaaagtctaagggatcggctgcaaccatatgttgatgggaagcaagatgagtttggtgattgggcaagtgcagaagctcagcgtttgtctcaagctgcttttggtgaggctatgcttcacacgattggctacatctatgttcggcaagcagcacgagaacttggaaaaagcaaactgtatatgggtgtaccttttattgctgagtgggtaagggacaagggccaccacgtaaaatcacaggttaatgctgccgcaggtgcaatttctctgatacagctacaagaagggataaaaaagattgaagagggtgacaaggaagagcagcttattaagagtatcgaagagaaaaaagatgcaatgctgaattctttat

SEQ ID NO: 261018 - DNA, 967 bp, Zea mays
ttcacgcgtccgattttagaggttagaccgccacgaaagcgtcactgcacacggcattcccctcccctagcgttatcgtcgcaccataaataaccatcctctcctcgcctttccccacatctcatcttcgtctgtgttcttgggcgtacgcggacacagccccgatccgaatcgtcgtccttgcgagcctcgccgatcccccactcccctcccctcgcttcaagatgcagatctttgtgaagaccctcaccggcaagactatcaccctcgaggtggagtcttctgacaccattgacaatgtcaaggctaagatccaggacaaggagggcatccctcctgaccagcagcggcttatcttcgccggcaagcagcttgaggacggacgcacacttgctgactacaacatccagaaggagtcaaccctccacttggtgctgcgccttaggggaggcatgcagatctttgtcaagaccttgactggcaagacaatcacccttgaggtggagtcctcagacaccattgacaatgtcaaggcaaagatccaggacaaggagggcatcccacctgaccagcaacgtctcatctttgccggcaagcagttggaggatgggaggacccttgctgactacaacatccagaaggagagcaccctccacttggtgctgcgtcttaggggtggtatgcagatctttgtgaaaacccttactggcaagaccatcactcttgaggtggagtcttcagataccattgacaatgtcaaggccaagatccaggacaaggagggcatcccgccggaccagcagcgtcttatctttgccggcaagcagctggaggatggacgcacccttgcggattacaacattcagaaggagagcaccctccacctggtgctgcgcctcatgggaggaatgcatatcttcgggaagacatttaccggcatgaccatgaccttggaggttgagagctc

SEQ ID NO: 261019 - DNA, 985 bp, Zea mays
ccgagcaaacgccttcaagcccatctcggtagccggagaacgagcagcagcggaggcgatggcgtccccggatcccggccacacgccggcgcaaggcgaggaatctgcctccccctcctcgtggcctccccgaaagctccagagtttcacaccagggctgtggtcacaatacaaagcttatgaggatgcagttgtggagaacattaaaggaactattgcggatgctctggttcttgtgagagagcatcaggcggaggcaattggatgtgccactgttgcaggattcattctgttcagaggccctcgaagatttttataccgcaatacctttggccgtttgaagactgagaaggatttactgaatgatgccgagcaaagtatgatggagtaccaaacatctattcagaacttgaagaaagaatcaaaatacactcttgacaaagtagctatcggtgaaagcgatgtgcagcgtgggcgaactgatctgagatctactgggaagcagatacaatctcttataggttccatttacaaagcagaatctacagctgcaggtctgatggatagactaagaaccattccaaccaggcaatctctcgagctgcgagcagaggtggcttccatggcctccgatttgaagaaccagaggtgtgccttgcacgaaaggatcaacaaaatatctgaatatggtgtccgtgtctgaactgctgcaccgtctgtacatttcccctcatagagcctcttttggtcctcccgtacaataaactgtgaatccaccgtgagaggtgcgccgttctggttagacaggttccgattctcaccatattttcttgccagcattttgaatgctaggacagacatggtaactcatcacaaccataaattgtacctatcactgtaacgttgagcattgctcgtttctggtaagcatatgggctgatggctactatcttatatatgcgattgcaaggaaaaactttgttcc

SEQ ID NO: 261020 - DNA, 601 bp, Zea mays
  unsure (1)..(601): unsure at all n locations
tacgcggacacagtcccgagggcgaanctagtagtggaccctctttttcccccactcccctnccctngcttcaagatgcacatctttgtgaagaccctcaccggcaagactatcaccctcgaggtggagtcttctgacaccattgacaatgtcaaggctaagatccaggacaaggagggcatccctcctgaccagcagcggcttatcttcgccggcaagcagcttgaggacggacgcacacttgctgactacaacatccagaaggagtcaaccctccacttggcgcgccgccgtacgggacgcatgcagatctttgtcatgaccttgactggcatgacaatcacccttggggtggagtcctcagacaccattgacaatgtcaaggcaaagatccaggacaaggagggcatcccacctgaccagcaacgtctcatctttgccggcaagcagttggaggatgggaggacccttgctgcctaccacccctaagacgcaggatcaagtccatgttgtataactacctagaggtgcgattgcgagtgtaacggtggaagtgcaagaagctaacagtgaagccgtggtcagctgccacaaggtgctc

SEQ ID NO: 261021 - DNA, 702 bp, Zea mays
cccacgcgtccgcccacgcatccactcccttctctcctcttcgatcccgacgaacgccgagggccgcggcgatggaatactcaggcggcggtgcgacgctgtcggagatgtaccagagcgcgcggcggctgctactctcggcgcgggatggcgtgggccgcgtcgagcgccttgcctcggcacccacttcgtcctcctactcctcggcgccgctcgtcggtggtgcgtcgggggaccccgcggttgctgaggaggtgcggcgagaggtggcgcagatccaggggctgtgcgcgcagatggaccgactctggcgatccatccccgccaaaggccaacgggacctctggaagagaaaagtggagcagctctctgaagaggtagattcattgaaggaaacccttgacaggcattctctgcgacagaaaaaacggattctggaagcaaaagaaagggctgagctatttgaaagagctaacggtgaatcttcacacgtcctccgaatattcgacgacgaaccccagccaaagcattcatgcccgtacctcctcacggatgctcgaagaagcttatgagacaggagtgggtatccttcacaagtacgctgaccagagggatcggctgaagagtgctcaaaggaaagctttggatgtcctgaacactgtcggtctgtcaaactccgttctgaagcttatcgagaggcgg

SEQ ID NO: 261022 - DNA, 805 bp, Zea mays
cggacgcgtgggcaatttttgtaccataaattcttgcgatagagtattagaccatgtttgttgtttgaccttttctgtttcatgcatttctcctgtttccgttgttcggtgagttctcaaaactcttgacgctatgtatctgtatctgtgttgattaacatttgcagtatgtttttttcttggctcataggaataggataattgaaacagctcatctcatgagggatatgtattacaaaaggaacccaccagcaagaggttcaagctctaatatttcagtaaaaagttactttgagatgcttgccatggatgagcatgcatctgctttctctagaggacctgctgaagcttttcagtggattgggcacccaatgagggctaccttgtgccgtatgaagagtggtttaattttaactggagttggagataagattctccgcctttggtctgctgaaagctgcaaattcatgaatgagtacaatgtgccaaattctaaaacattagccagactttgattttgatgaaaataagattgtaggtttgaccagctcccagatttgcatatggagacgcagtgaaccaagaggcagtatggcaatctggtggagcctcattcaatcatgggttatgcatgaggtgtggattctgtttttattattagttaaggtagaagagctgaaccatacaaacaacacacttgcaagcctataggagatcaataggaaggcagccggaggttagaccattctagcatacgaaaagaagttccagtattacaagaatggtatgcaactaagatatgcac

SEQ ID NO: 261023 - DNA, 385 bp, Zea mays
gcaccagcaatggaggcgagcggcagtcgggtccggagggggagcccggtccccaagcgccgcagaggcgtcggcgtggctactggcttcgggtctacggcgcagtcgctgaacgacgacatcctccggtccgtcttctcccggctggacgaccacttcgacctcgcccgctgctccgccgtctgcggctcatggaataggataattgaaacagctcatctcatgagggatatgtattacaaaaggaacccacctgcaagaggttcaagctctaatatttcagtaaaaagttactttgagatgcttgccatggatgagcatgcatctgctttctctagaggacctgctgcagcttttcagtggactgggcacccaatgagggcta

SEQ ID NO: 261024 - DNA, 1090 bp, Zea mays
  unsure (1)..(1090): unsure at all n locations
agaggacaaagtggctgctgttgctgattgcttctgtttggcaaaagatgctgggtttaaggtggttgcccacatgatgccagatttacctaatgttggagttccgagagatttggaaagtttcagagaattttttggaggtccagcgttccgggctgatggtctgaagatttatccaacacttgtgattcgtggaactggtctttatgagctctggaaaactggcagatatagaaattatccacctgagctgttggtggatattgtggcaagaattctgtctttggtaccaccttggacacgagtgtatcgggtccagagagatattcctatgcctcttgttacttctggtgtcgagaaaggtaaccttcgcgagcttgctttggctcgaatggaagatctgggcttaaaatgccgggacgtcagaacccgtgaggcagggattcaggatatccatcacaagatccggccagatgaagtagagcttgtcagacgtgactatgctgcaaatgagggttgggaaacattcctctcttatgaggatacacgacaggatatcctgatcgggctgttgcgcttgcgtaaatgtggccgtaatgttacatgccctgaacttgtaaggaggtgttcaattgttcgtgagcttcatgtctatggaactgcagtccctgtgcatggccgtgatgtagacaagctacagcaccaggggtatggaactctgttaatggaagaagcagaaaggattgctcaaaaggagcaccgttcaaagaaattggctgtcatttcgggggttggtactcgccactactaccgcaaattgggttatgagctagaaggaccttatatggtcaaatgtttggcataataccgtttcattttttttcgtgctcatgtagaacagactagtgtttataatgtaacttgtgtagttttttcaaaaaaaaaaataaatatttggtatacccttcttttaaatattgagtcgtccaaatgaaaatggagccagctcagcgtgtaatattaaatgatagcaaaattcccccctaaaaaaaccaaaaaaaaaaaaaaaaaaaaaaaaaaaaaanaaaaa

SEQ ID NO: 261025 - DNA, 510 bp, Zea mays
ttcccggtcgaccacgcgtccgcggacgcgtgggcggacgcgtgggcggactcgtgggctgacgcgtgggttgcgcttgcgtaaatgtggccgtaatgttacatgccctgaacttgtagggaggtgttcaattgtgcgtgagcttcatgtctatggaactgcagtccctgtgcatggccgcgatgtggacaaactgcagcaccagggatacggaactctattaatggaagaagcacaaaggattgctcgaaaggagcaccgatcgaagaaattagctgtcatttcgggggttggtactcgccactactaccgcaagttgggttatgagctagaagggccctacatggttaaatgtttggcgtaatgctatttcattttccgtatcatatagagcagactagtgtttgtaatgtaatatgggtagtctttttttaaaaaaatgatcgttataccattgttttctaatattgagtagtccagaactccagatgaaaatggagacaactttct

SEQ ID NO: 261026 - DNA, 595 bp, Zea mays
ccagccacaaaaaaggacccaagatgcaggcgctgggcctgggccgcgggtgcagccccctccatgccagccactgccgctgcaccgcttcttcctatcctccggctccaccccgtcctcgcaatcgcaacatcacaaggctaacctgcatcgccgccgtgcgcgccagcgctgcccagtccgcgcagatggaacgcaggcaggaggcgaaggttgtgaagctgcgggcggtggaggccacgcccgagtccttcgcttcgttcgggcaggtcatcggcgcctcccccgacggcgacgagttcggcccccacgacgcccagctcgatctcagccgcggcatcccaaggttctacatcatgcggttgcagaaccggccgctgaaattctctaccatcacccaccacgccagcgtgacccagtgcctgggctccgtcggcggccaggactggtacctcggggtggccaagccgtcgatcgtggatggggcgtccgagcagagtggcccggagggaaggaagttcttgcagtctgccgcagggcactattacctgcctcctgatccagccgaggtctgcgtgttccgggtttctggccc

SEQ ID NO: 261027 - DNA, 822 bp, Zea mays
  unsure (1)..(822): unsure at all n locations
tcctccacgcagcggcactgacgccgagaaggctgacgctgctgccatccttccggctgttcaaaagcaggacccgggttcttgtcaccctgttgccgcgtaatgctgctgccatggaggcacttcctatatttcttgacagaatgtttcatcctgttgttgctgtggtattgtcagtgacatttgttcttgcctttggagaggttataccgcaagcaatctgtaccagatatggcctagcagtgggtgctaactttgtatggctcgtacgcattctcatggtcatttgctatccaatttcttaccctattgggaaggtcctggactgtgctcttgggcacaatgagtctgcactttttaggcgagctcagttgaaagctctagtttcaatccatggcaaagaggctggcaagggcggagagcttacccatgatgagactacaatcataagtggagccttggacctgaccgaaaagactgctgcagaagctatgacacctattgagtcaactttctcactagatgtggattccaagttggattgggaagcaattggaaaaattcttgcccgtggtcatagtcgtgttcctgtatactctggacaccctagaaacatcattgggctcctatagtcgaagagtctatngactgtccgtgctgaaacggaaaacccaagtagtgctggttcaaatagaaagaattcaaaggttcctttaaaccttcctctggatgaaatactggatgaggttcaaaaaggaaataatcatatggctgctgttgtgaaggcttaacccaaaactgaaccaccccttgacaaaactg

SEQ ID NO: 261028 - DNA, 603 bp, Zea mays
tccacgcgtccgctcagttgaaggcatctcgcgacgttgcaaatgccatggctgcaaaagcaaagttgctattgcgggagctgaaaactgtgaaggcagatttagcttttgcaaaggaacgatgtgctcagcttgaagaagagaataaaatgttgcgtgagagttatgacaagggtgataatccagaagatgatgatctgatccgcctccagttggaaacactactagctgagaaagcacggcttgcgcatgagaactcagtatatgcacgagaaaacagattcctgcgggaaatagttgagtatcaccagctcactatgcaggatgtcatatatgtagacgaaggcatcgaagaggtcaccgaggtgtaccctacacaagtactacctcgcactgggtcgagcgtcagtcgtgcagccactgcagctacaccgaaatctgctccgacgtcaacataatcttgccctgtcgtacaagcttctacaaatacactttttcgcggtcatctctgagcaatagatcaaagcgcccacctccaaccttcacggaagagtaaggtggttgtttggttgtgacgggaccacataggttatgctgctactg

SEQ ID NO: 261029 - DNA, 1302 bp, Zea mays
cccacgcgtccgcggacgcgtgggcgaccccgccgccgcaagccgtccgccttgcccttcacgaaggcttggtcctcctccttgtatctccactccccccttcacagatccgttcctccagctagggttagcgttcctctgcagcgatggcgatcaagcggaccaaggcggagaagaagatcgcgtacgacaagaagctgtgcagcctgctcgatgagtacaccaaggtgctcatcgccctcgccgacaacgtcggttccaagcagctccaggacatccgccggggcctcaggggcgactcggtggtgctcatggggaagaacacgctcatcaggcgctgcatcaaggtgtacgccgagaagaccggtaaccacacctttgacccgctcatggacctcctggtcggcaacgtaggcctcatcttcaccaagggagacctcaaggaggtgcgcgaggaggtcgccaagtacaaggtgggggctcctgctcgtgttggtctggttgctccagttgatgttgttgtgccccctggcaacactgggctggatccgtcccagacctctttcttccaggtgcttaacatccccaccaagattaacaagggtaccgtggaaattatcacccctgtggagctgatcaagaagggtgaaaaggtgggctcgtccgagtctgccctgctcgccaagctgggtatccgccccttctcgtacggcctccaggtcaccagtgtctacgaggatgggtccgtgttcagccctgaggtgcttgacctttccgaggaggacctgattgagaagtttgccactggtgtctccatggttgcctccctgtcactggcgatctcgtacccgacccttgctgctgtgccccacatgttcatcaatgggtacaagaatgtgcttgctgttgctgtcgagacagactactcgtacccacatgctgacaagatcaaggagtacctcaaggacccaagcaagtttgctgttgccgccccggttgctgctggggactctggcgctgcagctgctcccaaggaagaagagaaggctgcggagcctgaagaggagtcggacgaggaaatgggcttcagcctcttcgacgactagagctgctgttttcgtcaaactgctgcaagttttggctttttttatcatctacaagtactgtttcctatattttttagcagacaaattatcgtgtgtaatcgacaatgatatctccttaaattttaagtacctgtgttgtgtcaaaaaaaaaaaaaaaaaaaaaaaaaaaaaaaaaaaaaaaaaaaaggggcgcccc

SEQ ID NO: 261030 - DNA, 464 bp, Zea mays
  unsure (1)..(464): unsure at all n locations
gaacggaanaaaccgggtccgacccacgcgtnccgcggacgccgtgggcgacgccgccgccgcaagccgtccgccttgcccctcgaaggcttggtcctcctccttgtatcccgacctcccccgcgacagacccgtttccccgctaggctagagttatcgttcctctgcagcgatggcgatcaagcggaccaaggcggagaagaagatcgcgtacgacaagaagctgtgcagcctgctcgatgagtacaccaaggtgctcatcgccctcgccgacaacgtcggctccaagcagctccaagacatccgccggggcctcaggggcgactcggtggtgctcatgggcaagaacacgctcatcaggcgctgcatcaaggtctacgccgagaagaccggcaaccacacctttgacccgctcatggacctgctcgtcggcaacgttggcctcatcttcaccaagggagacc

SEQ ID NO: 261031 - DNA, 595 bp, Zea mays
gtttatcaatgggtacaagaacgtgcttgctgttgctgtggagacggactactcgtacccacacgccgacaagatcaaggagtacctcaaggacccgagcaagtttgctgttgctgctcctgtagctgctgcggactctagtgctgctgctgcccccaaggaggaagagaaggctccagagcctgccgaggagtcggacgaggaaatgggcttcagcctgttcgacgactaagccgctcttatcgtccatccgccgcaagttttgcttctgcttattattttagtgcattatgttttagtagacaaaccatgttggtgtaattgacaatgttatctccttaaatgttgaaagtgtccgtgttgtgtcacttgttattggtttcttgagctagtttggttctcttctcttgtgaaaaagatgtctcccgtaaagacacctcttcaagtaatctcatctaccacaagacatcttttaaagcaatgtgttagacttagggtgtgtttggtttagctgtgagccgtaaaaaaactgttgtgagctgtcagctttgaaaaagcgttcacagctgtgaaaaagttaaaagctgtttggttg

SEQ ID NO: 261032 - DNA, 439 bp, Zea mays
gacgaggaaatgggcttcagcctgttcgacgactaagccgctcttatcgtcgtgtggagactgactactcgtacccacacgccgacaagatcaaggagtacctcaaggacccgagcaagtttgctgttgccgccccggttgctgctgcggactctggcgctgctgctgcccccaaggaggaagagaaggctccggagcctgccgaggagtcggacgaggaaatgggcttcagcctcttcgacgactagagctgctgttttcgtcaaactgctgcaagttttggcttttttatcatctacaagtactgtttcctatattttttagcagacaaattatcgtgtgtaatcgacaatgatatctccttaaattttaagtacctgtgttgtgtcaaaaaaaaaaaaaaaagggcggccgcccgggaatccggacggtcgtgcgg

SEQ ID NO: 261033 - DNA, 818 bp, Zea mays
caattccagtgagtacgtaggaagagatccgcttcatgataaaccccgaattgattgtgggtatgctattcttgtcttgtatggaagataacgacgctatagaaatctttggtgcagaacggttctcacagtatatgggttatggttcctcctttcgctttgtcggtgactatttagataccaaaccctttgattcgatgggcagacggagaactaggattgtggctatcgatgctttggactgtccagctaggttacactacgaatctggctgtctcctaagggaagtgaacaaggcattttgtggatttttcgatcaatcgaaacaccatctctatgcgaacttttccaggatttgcacaacaaggatgacttttcaagcatcaattccagtgagtacgtaggagtttcaacaggaaactggggttgtggtgcttttggtggaaaccctgaaatcaagagcatgattcagtggattgctgcatcacaggctcttcgcccttttgttaattactacacttttgagaacgtgtctctgcaaagattagaggaggtgatccagtggatacgacttcatggctggacggtcggcgagttgtggcatatgctcatggagtactcatctcagaggctgggaggagaaacgcacaagggttttttggcctggttgcttcccagcgacaggcccaagaatcaagtgcattacatgtccgaatagcaataaacccggcttttgtgaggagtgtgtgcatgaacgaagttattgctgacaaaaaaaaatgaaataaagataaaagcgtatgtatcagttgccacgc

SEQ ID NO: 261034 - DNA, 616 bp, Zea mays
cggacgcgtgggcgctcggcgtcgggggagaagagaagcgcgcgcgatggcaccgggaagatctcttcgccctgcggggacggcggcggttctgtgggcggcgtcgctgctgctgctggcgacgtcgtgcgcgcgcgcaggtggcgcgtacgcggggccggggtgccggaagcacgtggcgagggtcacggagtacggcgcggtcggggacgggaggacgctcaacacggcggcgttcgccagggctgtggcggacctggcgcggcgcgcgcccgacggcggcgctgcgctggtggtgccgccggggaagtggctcacggggcccttcaacctcaccagctgcttcacgctctacctcgacgagggcgccgagatcctcgcgtcccaggacatgaagcattggcccctcatagctcccctgccgtcctacgggagaggaagggacgagcctggcccaaggtacatcaatttcatcggaggatccaatctcactgacgtcatcatcacgggcaaaaatggaacgatcaacgggcaggggcaggtctggtgggacaagttccacgccaaggagctcaagttcacccgcggccacctcctcgagctcctctactctgac

SEQ ID NO: 261035 - DNA, 1335 bp, Zea mays
tgcttactcccatttgtacttctgagttctgtcttagttgttcttactggtgtttgaaaccattgcttatgttatacttgagcaggtgtgttcactgagctgattcagcaaatgcaagtgaaaggtgtacaggtggaagagctttactctctcgatgtgggctctcttagtcaactgcggccagtatatgggctaatttttctcttcaagtggatacccggggagaaggatgaacggcctgttgtcagagatcctaacccaaaccttttctttgcgcaccaagtcatcactaatgcatgtgctactcaagctattctctcagttctcatgaatcgccctgaaattgacattggcccagaattatctcaattgaaggaattcacaggagcttttacacctgatctgaagggcttggctattagcaacagcgaatctatccggacatctcataacagctttgcaaggccagagccatttatttctgatgagcagagggccgcgactaaggatgatgatgtttaccatttcataagctatttaccttttgaaggtgtcctgtatgagctggatggactgaaggaagggcctgtgaatcttgggcagtgcgatggtgctgatgatcttgattggctacggatggtgcagccagttattcaagaaaggattgagcgctactcacaaagcgagatcaggttcaatctcatggccatcataaagaacaggaaagaggtgtacagtgctgagcttgaggaactggagaagagaagggagcagattttgcaggagatgaataatgcttcctccacagaatccttgagcagttcgcttacggaggtgatatcggcaatcgaaactgtcacggagaaggtcatcatggaagaagagaagttcaagaagtggaagaaggagaacattcggaggaaacataactacatccctttcttgttcaacttgctgaagatgcttgcagagaagcagcagctaaaacctctggtcgagaaggccaaacagcaaaagtcagcaagcccgagcacgagttgatggtgaaatgtcaatagactggtagcttttgccgatgtcttctgagcgtcgtgttatcttatcagatacattgccaagtcggcagctcagataaattatgaccgatgttatttataccatgttgcacgccgtgatgtatcagcagctatgccattttttttttgcagagcacgtgcgttgttgaagtggttaattttagtcgtttagagagattgtttgagagtaagggtaatggaatggactgaggaggttgaatcactcaatattcaattttaaataatgatgggttccagc

SEQ ID NO: 261036 - DNA, 551 bp, Zea mays
cccacgcgtccgcccacgcgtccgcacattccttccccacttctctctctctctcgtgacgacggcgacggcaacgactggggcgacagtcgctgccgccctacttgccggttgctcggatcttcttcggcccgttagccgtcgacgagcaccaccagggcaaccagatacttcagtggcttcgcaaggatgtcctggtgcactattgagtctgatcctggtgtgttcactgagctgattcagcaaatgcaagtgaaaggtgtacaggtggaagagctttactctctcgatgtgggctctcttagtcaactgcggccagtatatgggctaatttttctcttcaagtggatacccggggagaaggatgaacggcctgttgtcagagatcctaacccaaaccttttctttgcgcaccaagtcatcactaatgcatgtgctactcaagctattctctcagttctcatgaatcgccctgaaattgacattggcccagaattatctcaattgaaggaattcacaggagcttttacaccagatctgaagggcttggc

SEQ ID NO: 261037 - DNA, 1578 bp, Zea mays
ttcattcgtccgatcctctccagtctccacccccgactccacgaacacgattgctgcttgcctgctgctgctgcggctcgcggccatcagatccagcgccaccgatgccgccgcagccgaacgggggcaaggtgaccccgaacctggcgatggacgcggaggccacgcgcctgctcaacctcacggtgctccagcgcttggaccccgccgtcgaggacatccttatcaccgccgcgcacgtcacactctacgatttcaacatcgacctcaaccagtggagccggaaggacgtcgaggggtcgctgtttgtcgtcaagaggaactctcagccccgattccagttcatcgtcatgaaccggcgcaacactgataatctggtggaggatctcttaagtgattttgaatacgagcttcaacctccatatttgttgtaccggaacgcttcacaagaagtcaatggaatttggttttacaaccaacaggactgtgaagctgttgcaagtctatttggaaggatactgaatgcttacgccaaagtacctccaaaacctaaagtgccttccacaaaaagtgagtttgaggaactggaggctgttcctacatctgctgctatagacggccccctggaacctccgctggcatccacagctgtagtttctaatgcacctgatgaatcgctggtgaattacttcaacggtgctgctagcattgggagcgtaccaagtgcacaaatggctggcagagcacatccatcgaatgatacggtcacaccttcccatgtgccactgattgttccatctgctactccaacacatcaaatgtctcatcctttagggggttcatctgctccaccacttcctctccatgacacaaatccgcatgccagtcagtctgcaaatcttctaacaccagctttctttgcaccaccaccaccctcttcaacatctgtgacaccacctgcttcatccatgatgcctacagcaccacctcttcatccgacttcaacagctgctcaacatccttcatatggcactcccttactccaaccttttcccgcaccgtctccacctccttccctgacccctgcacacaacgatggacttgttatttcaagggataaagttaaggacaccctccagagacttgttcagaatgacgagttcatcgatttgatatatcgtgagttacaaagtgtgcacatgtagactgctgctcactagtctgtacggagtttgtctaaaccaccgatagtcttatggagctgctcgtcgcgacaaagatcgcctccctgtttttcttcttgtgagttttgtatgatttatttcttataaacctgtgcatagtttgttttaatgtagagtgcttatagcagtgcttggtaagcatttatcctgctggtttccaaataactggattgtcggataggatttaaaaggtaactaagccccaagaatgttagattcccgcaatgcccattctggggcatctcggttttgtaaaacaggacttgtgcaggatttaaatgccatatttttcgtgtgaataaaaaaaaaaaaaaaaaaaaaaaaaaaaggtcga

SEQ ID NO: 261038 - DNA, 984 bp, Zea mays
tctatttcctaaagtgccttccacaaaaagtgagtttgaggaactggaggctgttcctacatctgctgctatagacggcccccttgaacctccgccagcgtctgccgctgtagtccttgatacccctgatgaatcattaatcagttacttcagtggcgctgctagcattggaagcgtatcaaacgcacaaccgtctggaagagtgcacccatctactgagagcatcccatcttcccatgtgccattgatcgttccatctgctgcttcaacacatcaactgcccccttcagtagcttcaacagcttcaccattgcccgtccatggaactaatgcccacactagccggccaacaaatcttgtgacaccagatttctttgcgcctccaccatcctcttcagctccactggctccgccgggtgcatctgtggttcctactgcgccacctcttcatcccacttcggcggcatctattcaacgctctcagtatggcaccccactgctccagccctgtgcaccgaccactctaccttcttcccttaacccctcacacagtgatagactcactgggacaagggatagagtcaaagacgctctacagagacttgttcagagcgacgagttcgttgatctggtgtgccgggaattgcagagatcacttgtataggctgcttgcttagtcttgtcgggagttttctggctcgtggcaagaatgtgcctgtaattttcctttgacttttttgcatgcttcccttcccgtactattgtataggtttgtgttagtgtattggtgtagagtactataggaatggttggtaggtatctgtggggtcccttggttccaaatatccgtgttggcagtgtgagaagcggaagtaaaactagcctgttcaagaacgttggaatttgatgtgctttggcgtggacaaattacagcactgagattctagaagtttttttttaattcttattaacttcgctttctgg

SEQ ID NO: 261039 - DNA, 546 bp, Zea mays
aaggacgagtgggcggacgcgtgggcggacgcgtggggcaccccactgctccagccctttctaccgcccactccacctccttcccttaacccctcacacagtgatagacttactgttacaagggatatagtcaaagacgctctacagagacttgttcagagcgacgagttcgttgatctggtgtgccgggaattgcagagatcacttgtctacgctgcttgcttagtcccgccgggagtttctctggctcgtggcaagaatgtgcctgtaattttcctttgacttttttgcatgcttcccttcccgtactatcgcataggtttgtgttagtgcattggcgaggagcactataggaatggttgggagcactctgtggggtccatcggttacaaacatgcgctttggatgtgcgagaagcgaaagccaaactagacctgtcaagaacgctgaaagtcgatagagctctggcatggacacaatgccccacataacatctttaccagatctgtccgtccccctcccacgcataactttactgaattgccc

SEQ ID NO: 261040 - DNA, 2164 bp, Zea mays
  unsure (1)..(2164): unsure at all n locations
gcggcggcgctcgcggcactcctcgtcgtctgatttaacaccgcgtttggacctacccacntggctcccaacgacttccataagaaagatccacttttggtgaaggtgaataagctgacatccacgaagacgcaacttccctactcgtattactctcttcctttctgcaagccaaacacgatagttgacagtgcagagaatcttggagaagttctgcgtggtgatcgcattgagaactctccttatgtgtttgagatgggggaaccaagatgtgccagattatctgcaaagcaaaaattgatgataaacaggcaaaggagctcaaggaaaaaatagaggatgagtatcgggtgaacatgattcttgacaatctcccactagttgttcctcttgcaaggcaggataggggtgctactgtttaccaggctggatatcatgttggtgtcaagggccaatacgctggtaacaatgataagaagtcctttatccacaaccacttggcatttttagtaaaataccataaggatgaaactacagatctctctagaattgttggatttgaggtcaaaccattcagtatcaatcaccagtttgaagggccgtggaatgataaaaacactcgtttaatcacatgtgatcctcatgccagcaagcttgtggtaaactcagatactcctcaggaggttgaagccgggaaggaaatcatatttacctatgatgtaggcttcgaggagagtgatatcaagtgggcttctcgctgggacacctacttgttaatgatagatgatcaaattcactggttttctattgtgaactctctcatgatcgtactcttcttatctgggatggtggcaatgattatgctccgcaccctttatagagatatctctaggtacaatcagcttgaaactgaagaagaagcccaagaggagacaggatggaagcttgttcatggagacgtattccgccctcctgcaaactctgacttactctgtgtctgtgttgggactggtgttcagttcttcggtatgctgctagtaaccatgatctttgctgttctgggtttcctttcgccatcaaaccggggaggactgatgactgccatgctgctcacttgggtcttgatggggttgtttgctggatatgcttcttcacgcctgtataagatgttgaaaggatcagaatggaagaacatcaccctgaggaccgccttcctgtttcctgggattgctttcggtattttcttcatccttaatgctctaatatggggggagaagtcgtctggtgctgttcctttcaccacaatgtttgccttggtcctcctctggtttggtatctcggttcctcttgtatttgtcgggagctatctgggcttcaagcaacctgccattgaggctccggtgaagacgaacaagatcccaagacaggtccctgagcaggcttggtacatgaaccctgccttcaccattctgattggtggcatacttccgttcggagcagtcttcatcgagctcttcttcatcctgacgtcgatctggcttcaccagttctactacatctttggcttcctgttcctggtgttcattatcctcatcatcacctgtgcggagatcacgatcgtgctgtgctatttccaactgtgcagtgaggactacctgtggtggtggaggtcctttctgacctcaggatcatcagcaatctacctcttcctgtacgccgggttctacttcttcactaagctacagatcactaaggttgtgtcaggcatgctgtactttggctacatgcttcttgcctcgtttgctttctgtgtgctcaccggtacgatcggcttctacgcctgcttctgcttcacaagattgatttattcatctgtgaagatcgactaggcatgttccatgggcctgcagcgagtatgcccattgtgtgttttttttcatgaattttcagtgcagctgtacttttggtgttagcttataaacaatttatgctcactgtggttcagagttgtacaaggataggacactactgctagctttatatggggtaattttaacttgtgctgttgagaactgcctaaaaaaaaaaaaaaaaaaaaaaaaaaaaaaaaaaaaaaaaaaaaaaaaaaaaaaaaataaaaaaaataaaaaataaaaataaaatg

SEQ ID NO: 261041 - DNA, 392 bp, Zea mays
caccaccctgtttcctttttgttcctatgtcgtttcatcagagagaaaaacatctgaagttagctaggggggagcgatatcaagtgggcttctcgctgggacacctacctgttgatgactgatgatcagattcactggttttctattgtgaactcttctcatgatcgtgctcttcctatctggcatggtggccatgattatgctccgcactttttacagagccatttttggatccattcagctggaacctcaggaggaaccgcaggaggaaacaggctggaagcttgttcatggggacgtattccgtcctccaacccactctgacttgctctgtgtttgtgttggcactggcgtccaattctttggcatgctcctagttacaatgatcttcg

SEQ ID NO: 261042 - DNA, 386 bp, Zea mays
tggtggccggcccgttcaccatttctcatcgttcaattcagaatctgatacatcagagaagggccacagcacagagagagagctggctgccagtggacgcgagggagcgcctccgcctcagatccaacccccaccgatgcgagctccggcgatgctccgctgggccgcggcggcgctcgcggcgctcctcgccgtctcaccggccgccgagttttacctacccggcgtggcgcccatcgacttccataagacagatccacttttggtgaacgtgaataagctgacatccacgaagacgcatcttccctactcatattactctcttcctttctgtaaaccaaacacgatagttgacagtgcagagaatcttgcagaagttttgcgtg

SEQ ID NO: 261043 - DNA, 301 bp, Zea mays
cagacaaaggatgagaaatacttcatacacaaccatttgtcatttacggtgaagtatcacaaggacgataatttggaacattctagaatagtgggatttgagctcaacccacacagtgtcaagcaccaggttgacgataaatggaatggtgtagacacccgcttgagcacttgtgatcctcatgcgagcaaatttgtaataaactctgattctcctcaggaagttgaagttggcaaggaaatcatattcacatatgatgttcgctttgaggagagtgagatcaagtgggcgtcacgctggg

SEQ ID NO: 261044 - DNA, 562 bp, Zea mays
cccacgcgttttaccgaaccgcaagaggcgagcagcagccatggatcccgcggcaggaggcgccggccagcagcgccagaacaaagcttcggcgggcaagaaggtaaagaagggcggcggcagcggcgggagatggccggcggtcaagcccaagaaggatctccagatcaatcgcctcaagggcacccacctcctcaccattccagacttcttcacttctgcggaggcgaaggctttcattgatatcgctgagtcgatgggcttcacgcaccagggcagtttggggccactaaagggggaggcttacagagacaacgatcggatatctgtgacggatccattgcttgctcaagccatttgggaatcaggaataaacaggatttttacagacatcagcgtctctggcaaagtagcatcaggattgaatccaaatatcaggttctacaggtacactggaggtcagcgttttggtcggcatatcgatgagagtgtctccctcgctgatggttctaaaacgtattacacgcttttaatatacctttctggcaaaggaagtgcaaag

SEQ ID NO: 261045 - DNA, 1254 bp, Zea mays
ttccaaatagtcgccctctcaactgggggggggtccgtcagtggattgtccccggcctccttaccgtcgcgtccaaatcatcctcacaccccgcagcatctccacgccgccacacctcgtcgcgtcgcgtcgtctccgccgagaagatggtcggaccaggcctctacaccgagatcggcaagaagaccagggatctgctgtacaaggactaccagacagaccacaagttcaccctcactacctacagctccaatggcgtcgctgtcactgctactagcacaaagaaagctgacctgatcttcagtgagatccattcacagataaagaacaagaacatgaccgtagatgtgaaagcaaactcagagtcaaatatcattactacagttactgtcaatgagattgcaacaccagggctgaagaccatcttaagctttgctgttcctgatcagagatctggaaaggttgagctccagtatttgcatgattatgctggagttaatgcaagcatcggtctgacagccaatcctgtagtcaacctctctgctgcctttggtactaaggctgttgcagttggtgccgatatctcacttgatactgcaactgggaacttgactaaatacaatgctgcactgaggttcactcatgaagaccttgtcgcatccctgaacctgaacaacaagggagacagccttactggagcttactaccacaaggtgagcgaattgacaaacacagctgttggggcagagcttacccacagtttctcgaccaatgaaaacaccctcacctttggcgggcagcacactctggacccactaaccgtcttgaaggcacgcatcaacaactctggcaaagccagcgccctgatccagcatgagtggaggccaaagtcgctggtcaccatctcggctgaggtcgatacaaagaccattgagaagagctcgaaggttggaattgctgtggccctcaagccctgattggttatcaagaccattttttccccttctaagttcctagcatgactgtttgggtcagatcagatcagctggggaaaacaaaactgttggggttcctggcatctttggtcgttgcagtcagttgatttaatgaactccgaaatgtctcatggaggaaaattttcggtcgcctgtgtagcgctctgttaaatgagcaaccttcacaataattcaagctcggtagaattctgaacttgttaaaatgacatttgcgaacgaatcagttggcaattataaa

SEQ ID NO: 261046 - DNA, 510 bp, Zea mays
cccactcgtccgaagagctcgaaggttggaattgctgtggccctctagccctgattgattatcaagactattgagaagagctcgaaggttggaattgctgtggccctcaagccctgattgattatcaagactattttttcttctaaggtcctagcatgactgtttgggtcatatcaggtcagctggggaaaaaaaaactgttggggttcccggcatcttttggtcgttgcagtctgttgatttcatgaactgcgaaatgtttcattgaggaaatttttgggtcgtctgcttagcgctctgttaaatgagcaacttccaaaataattcgagcccagtagaattctgaacttgtttacaatggttgatggtgactttgtcaattgaggtaggggtggttcagttttccccctaagttttctaactgcgtttttggaccggtttgtttcatcttttttctgacaagcttttctaataatctaaaaatttatctgtggagaatatggttgtgag

SEQ ID NO: 261047 - DNA, 382 bp, Zea mays
accgtccggattcccggtcgcccacgcgtcgcccacgcgtccgtttttcccttctaagttcctagcatgactgtttgggtcagatgagatcagctgggggaaacaaaacctgtgggggttcctggcatctttgtttgctgtagtcagttgatttaatgaactccgaaatgtctcatggaggaaaattttcggtcgcctgtgtagcgctctgttaaatgagcaaccttcacaataattcaagctcggtagaattctgaacttgttaatgatgattgatggtgactgtcaactgaggtaggggaggttctgttttcagcaataatttttctacctagtggtgtcggggactttacccaatcgattcatgtgtttttgtggtgca

SEQ ID NO: 261048 - DNA, 713 bp, Zea mays
tcgttcaattcttagctattgatatggtatgatggatgggaggtggctgaaatcgttcagataagtgccaatttgctgttttcttttttaatgaatggtttcttattcagctgatgaaccttttatagttcttttattatatgctgccactgattgctaatagggtgcatgtcttctatttctaggtatggtgcataaaaaagtaggaaccacgatgagattgtaatgctgcacatggcacatcaaggtgcgcaagatatgtaccgtagaaattatcgtaaagtgcacacagctgtatgtatagatgtttagaagtggccgaagttaggcttgctcaaccggggcaatgatttacttagcctgctgaaatgtactataggtagcattcaagtttgtgaccatcatgcaagtacatgtgggtttgttgaaattgtgtggtccactttataatttcttatttttttctattttatcttttttctattttttttctttttctatttttttttttcttattccctccttccttttttttatttatttcttttttttttatttttttttaatcttttatttttttttctttttttttttcattattttattttcttattcttatattttctttcctttaatttttttttatttttttattttcttattttttcttttcttttctcttatctttttttttttttttttctttttttttt

SEQ ID NO: 261049 - DNA, 899 bp, Zea mays
tccccccgtccgtaaccttgaatcctttaaagtcaacccacccttccttcctttttgtccgtaacctgggggccatggtggggcgtgaccaatcctaccggcaggctctgcccttgtactccaatctcctcccgcgaccgttccaaattcctgctcacgttcgtattccacgcggcgacgtctacgtcgcggacgtcgttcccatccaccttacttcgcctatacgtaggtagccgctgcggccgcctccccaaaccctaagcctttccctcccacacgcgcttcaccccgcacatcgccggcgatgggatccaaggaccagggcggaggggccgcctcctcgggcggcggcttcttctcgtcgttcgccgccggcatgcgcagctggggcaccgccgtgcacaaatccgtcaacgggctgcttggttatgaaggccttgaagttattaaccccgatggaggcacagatgatgctgaagaagaagctttaaggggccgatggaagcaagaggatcgtgatagctattggaagatgatgcacaagtacataggatcagatgttacatcacttgtgacacttccagtcataatttttgagccaatgacaatgcttcagaaaatggctgagttgatggaatactgtgagttgttagacaaagcagatgaatgtgaggatccatacatgcgtatggtttatgcttctacatgggctgtttcggtatacttcgcgtatcagcgcacatggaagccttttaatccgatccttggagagacttatgagatggttaaccaccagggcattacatttcttgccgagcaggtaagccatcatcccccaatgggtgctgctcactgtgagaatgagcattttacttatgatatcacgtctaaggtgaaga

SEQ ID NO: 261050 - DNA, 494 bp, Zea mays
tttcgactcgacctgaacaaccccgcccggcgtcctgcccttgtgctctagggctcccgcgaccgttccaaattcttcctcgcgttcgtattccacgcggcgacgtcgccatcgccatcgcggccgccgctccgcccctcttccttcgcatatacgtaggtaggcgcctccccaaaccctaagcctttatctcccacgcgcgcggctcgctctgctgcgccgcggctcgctcgaccccgcagatcgccggcgatgggatccaaggaccaggacggaggggctgcatcctcgggaggcggcttcttctcgtcgttcgccgccggcatgcgcagctggggcaccgccgtgcataaatccgtcaacgggctgcttggttatgaaggccttgaagttattaaccccgatggaggcacagatgatgctgaagaagaagctttgaaggggagatggaagcaggaggaccgtgatagctactggaagatgatgcacaaata

SEQ ID NO: 261051 - DNA, 426 bp, Zea mays
cccacgcgtccgggaaacagtgggcgatgaaagcagagaatttgggaggtacatgcgacggagagaagagcaagagaagcaggaagaggagttgttcactcgggctcctgtaaccaaacgtgataagcagatcgagaagcgcataaggagacaacttcatgggctaggaggcttaactgacggtttcgaccttgggatgaacatgctgttgggaggagacaaggaagatgatggcggttcaagcaagtcgcatggcaagagcggaaaccgaaagaagcacctgaagagcaacaagaagaggaagaggcattagccttggacccacactgctgtagcacttcaacataccgatacagcctagaagacggttcaagcaagccacacggaaagttgaagctggagaaaataccaagaaaccaagtagag

SEQ ID NO: 261052 - DNA, 1878 bp, Zea mays
  unsure (1)..(1878): unsure at all n locations
tcgtccacgcgtccgcccacgcgtccgtagggggcagattagttcataaaatgggtggcagctgatgaaccttttagagttcttttattatataatgccattaattgctaacagggtgcacgtcttctatttctaggtatggtgcataaaaaagtaggaaccacaatgagattgtgatgctgctcagggcacatgccttttgtgtgatgtctgaatgttcatagcccttgtgctcctcatccacccattttaagaatatgctcacgtctcatgattgtgtctttcttcagaatctcagctgttcctcatgtggagaacctccagaggctcacatgtattcctacactcaccgcaacgagaatctgattgttcttgtgaggcacttgctgcctaaatattgtttacctggtgaatcagaaggaaagatttggatgtggactagatgcttaaggtgtgaacgtgaaagtggggtccccagatcatcacgaagggtgataatgtcagctgaagcacactacctttcatttgggaagttccttgaacttagtttttcaagccactcaaccgctagaaggctgccaatatgcgggcattcactcaatacggattgtctgcgctttttttgggttgggctccaaagttgcaatgttcccgtattcctcagtcgaaatttacaatgcctgcaaaccacagcctactcttgagattcacaaccccgatatgcacaaagatgccccaaaggttgctgccctcgtgtttcgtgctctgattgttgagtcttcaatgagagctgattccagttatatagaggtgaacaagcttttgattatttcttttgttaatttggtgcaacatatagaggtgaacaagcttattaaaggaagatccttgtacaatcaagagttcatacaatagatgaaacgatattgtgattctctcaatggtggcttcatgagcaagcaatcattcaccttgttcactaaaattttagactgtagctcagataaagctttgagcattccttggtagtattatattttctttgtcgccaccaactttaagtagtattaaaagaaatttttttaaactttacattttattnttccttgttcttttttgcgtaataactacaatgcttccgagagaaaggaaacccgcaaaagggaaaagagaccaatagaagggcattggtgccctcttcacacacaggccaagtatacatcccaacatgccacaaggctgaagcttccacatgaacaagagaatggatcgtgatagctattgcaagatgatgcacaagtacataggatcagatgttacagtacttgtgacacttccagtcataatttttgagccaatgacaatgcttcagataatggctgagctttgttaagtgttccattttagttatctgtctacttcctttaaactggttctggttatatgcgcgcgtatctattattatgtataagcattgttgctactggtccttatccacaatcgcataaggagacaacttcatgggctacgaggcttaactgacggtttcgaccttgggatgaacatgctgttggaaggagacaaggaagatgatggcggttcaagcaagtcgcatggcaagagcggaaaccgacagaagcccctgaagaccaacaagaggaagaggcattagccctggactcacactcctgtatcacttcaacatacttgagtgtgtgacatgtcagttattttacagatatgttagttttaccatagtattgttcgatgtgatcctagcatgcccgtgaatgctttggttccctatagagctgttgatgtcttacacaaatgtattacaaaacttttttcataccaatataacacacatttgtacat

SEQ ID NO: 261053 - DNA, 408 bp, Zea mays
cggacgcgtgggcggacgcgtgggcggactcgtgggcggacgcgtggggtgcataaaagagtaggtaccacaatgagattgtgatgctgcacatggcacatcaaggtgcacaagatatgtaccgtagaaattatcgtaaagtgcacacagctgtatgtatagatgtttagaagtggccgaagttaggcttgctcaaccggggcaatgatttacttagcctgctgaaatgtactataggtagcattcaagtttgtgaccatcatgcaagtacatgtgggtttgttgaaattgagtggtcatcggagatgtagcaaaatgttccctatcgagagctcgtgtactatatttgttttatgaacttaatttttattacaacatataatgtggtcatacatatgttattgctac

SEQ ID NO: 261054 - DNA, 430 bp, Zea mays
  unsure (1)..(430): unsure at all n locations
aacttcatgggtatgttcagatagtttatcttttgttgcttattgtccgtgtaaatacacaaggcgcctttgatagcacttggtttccctgttgggatttttagcttgtcttagtatccaacttacaccaccatctgatatctgatcctgacaacaggctaggaggcttaactgacggtttcgaccttgggatgaacatgctgttgggaggagacaaggaagatgatggcggttcaagcaagtcgcatggcaagagcggaaaccgaaagaagcacctgaagaacaacaagaagaggaagaggcattagccctggactcacactcctgtatcacttcaacatacttgagtgtgtgacatgtcagttattttacagatatgttagttntaccatagtattgttcgatgtgatcctagcatgcccgtgaatgc

SEQ ID NO: 261055 - DNA, 1467 bp, Zea mays
cctagtcgcacactcaatgctagtgagtgtgtggctcgggggtgcgcgttgcaatgtgcaatgcttagtcctacgttccgtgttcgggaatacgaggtgcaggatgcaatccctgcttccataggatttaacactagtgacggcccagtttcaacattgtcaagtgatgcattgttccggagaggcctgcactttcccagtgttaagatcattactctagagaagaatgacagttttagttttgatgcatattatgtggatgctaatgaattgcctcctggtacctcaacagacatcggtagttttcagattggcccattccaagcacataccgaagcttctaaagtcaaagtaaaaattcgcttgaatctacatggtttggtttcagtcgaatctgccgttttgataaatgattatcaaaggaatggaagttctactgaccatatggaggtggataccagcggtgatgacatgggtcacaagtcaagaagtgaaaggtctatccagcggcaggagttgccaatcactgagtacatctgtggtgcaatgagcaagcaggaattgctggaagctcaggagcaagagcaccaattggcttatcaggataaacttatggaacggacaaaggacaggaagaatgcattagaatcttatgtatatgacacccgtaacaagctttctgagaggtaccggagctttgctactgattcagaaagggaacaaatctcatttaatttacaacagactgaagattggctttatgaagaaggtgatgatgagacagaagtggtttacagtagcaaacttgaggagctgaaaaagcttgtagatccaattgaaaatcgttgtaatgatgacgaagtgagagctgaagccatgagagatcttttgaagtgcattgttgaccacagaaatgctgccaagtcattatccacacctgaaagagatgctgttgacaatgagtgcaataaagctgagcagtggctaagggaggggtcccaacttcaagaatccttgcccaagaatgtggacccagtactttggtcctgtgaaatcaagagaaaggaagaagagctggatacgttctgtcgaaacataacaaggcacaagggctctccagcaaggacagatggcagcaggggttcagattacatgcctacacctgatagagattaaatattttcacgatcacgaggtttctttactgtacggccacacatgtcttaatcattttgtagcaatatatgaatgaacgagttcctgctaacaccgtcatataatcgactctgtacaacactaggcccgccattgggtgaccgcttcttggttctccaaggtgcagttgtcacttgagagcctactgatcatgattgtcgatacctgtgaattcttttccggtacttggatcaaggttgtctgcttcagtttgtgctgaatggaaaggataattaaaaggaaattgtatgc

SEQ ID NO: 261056 - DNA, 562 bp, Zea mays
agacgacgcaagccctcgcctgtcctcactcctaaccctcgcccgactcagatctatctgccccgcgccgccgtcgccatgccgttcactccgggtccctactctggcgtcagcaccctcgcccttgtagcgagggcatcggtcttcggcttcggtgtcgtctacgggagcatcaagctctcaatcctcaaggcaacaaagcctaaaaaggaagaagcgcatgctcatcactaaggacgacagggctgctacatgttaatttctatggaaggatgatataaaaatgtggttgcactctttctccatacgtgcaatttgatttatgatttgtggacatcttgctgtaacacacctgctgagttatcttagttttgtgtcataataaaattcttagccaatgacttgaaatcaggaaggggaaaatcaaaagaacccacttttgttttgtcaccatgcgaccttgagcaggtgagaacccacccgagtagcactaataaccatctccaacccgacagctaacgggggggaccctataaagaacccaagattacttgccagggcc

SEQ ID NO: 261057 - DNA, 628 bp, Zea mays
acgcaggagacggtgggctcctccggcgtgcagaccacacggactcgggcttcctcaccgtgctccaggaggacgagtgcgtcggcggcctcgaggtcctggaccccgccaccggcgagttcgtgcccgtggaccccgtcgccggctccttcctcgtcaacatcggcgacgtcggcacggcgtggagcaacgggaggctccacaacgtgaagcaccgggtgcggtgcgtcgcgcccgtgccgcgcatctccatcgccatgttcctgctcgcgcccaaggacgaccgcgtgagcgccccggaggcgttggtcgacgcgggccacccgcgtcggtacaagccgttcaactacgacgactaccggaggctccggctgtccaccggcgagcgcgcaggcgaggcgctcgcgcggatggcggcgtgacgtcgtcacgcacgtgcaagccgttaattataggctcgcgcatgcatacgcctacacgtacgagaggttgtctcgttaagccgttctattaaaatgtgtgggggagaaagatgactaccgtggtgccatgtggattgctatcgggtctgatcaataaaatcttgcaacacttgcacaaaaaaaaaaaaaaaaaaaaaaaaaaaaca

SEQ ID NO: 261058 - DNA, 2501 bp, Zea mays
  unsure (1)..(2501): unsure at all n locations
gcgtcagcccacgcgtccgcccacacgtacaccacctctcatttcctctgctcaggatccactatcccagttagtgtcagctattgaaggtttgaagcctgttcaggaagatagtctggcccatataaaatcagctattggtgaagcaatcaagtctatcccagagccaatacctgatgcccttgcaaaactttctcatgaaatacttgatgcagcaccaccaccattagctgagctgatgaaaccttttgcacaattgatggcaccaaacaataatggcaatgggccatctgatgtgcatgctgaggggtcatctagctcttccagtgcgcaggtgcctgctgaagctaaaaatgagcccaaagttaggccaagtttgggtcttaagaccgtgttgaaagaggctgctggacctgttcctaatgctggagcttctcaggttcaacagataatgtatccatctgttgaggagatgctgttcccctgtaattcagtcgacaaatctgtttgcaaagggaagattgatgctcaaagtaagggaaaatctgttacgtcctcaggcatccaacctgctcctcattctcttcgtactcatgccccacctccaccacatccgtgcatttcagaatggtcccgagcacaaagaagccaacaccgtcaattgaaatttgaagacaatgcaaaagccactaatgattctagatggcgcattccgatgtataaaatgccctatgcaccaccacctccagcagtgccacccccaggctatgtaccttctccacattttccttatccaggccgcctcttatcttctgggcatccatacggagatctcgctggtaacatggaaaactcagcaccacatagtctgcatagatggattcagtgtgatggctgtggagcgcaaccaattgttggtccacgttataaatctaatgtgaaggaagactatgatttatgtgattcctgtttccagcgcatgggaaatgaaatggagtacaccaaaatagacaagcctattttaccccacaggtttctaagagatccccatgtgtaccggaaggtgcaccatccacgggttctaatgaagtcaagacgggagaaacttgaaagtcgcttcattttggatgtgactgttcttgatggaacactgatgacaccttctaccccgttcactaagatttggcgcatgcataacaatgggtctgttgtgtggccacggggcacacagcttgtctgggttggtggagatcagtttgcattgcagacatctgttccattagagattcctgtggatggttttcctgtggacaaagagattgatgttcctgttgattttgtggcacctacaaggccagggaggtacatatcttactggaggttggcttccccttctggtcagaaatttggtcagcgagtttgggttcatatccaggtggaagacccttcttttgttaatgacaataacaggaatgctgctattaacctgaatctgcctccagagagctatagttcaaacacaaccaacttaattgatgtgaacattgagcctgctgactcagcccttagtgcacatgctaagcgcacaaaggagttccatttctgttcaactgattttcctgaacccagtaagtctgtgccttttacgttggccactacctctttgtctgcagcagctcctacaaaccaaactggtgatgttcccatgtccagtacacctgctgctgcttgtttgccctctgttaatgtgcctatgcatgaagtcgttactactcatacaccgtcacctattacgcctgtcttgcctacaactatacacttttcagccccagtatctgctcctgcaattgcccctgagcttgcatcaggggctgttggtgtgcctccacctgttagtgctgtggtacctgagctgtcagaactggatgttcacaatgaggagaagttgctgagggagctggaggaaatgggttttaggcaggtcgatctcaacaaggaaatcctcaggcagaacaattacaatctggagcagtctgtcgatgacctatgtggcgtcaatgaatgggatcctctccttgcagagctggaagagatgggatttgatgacacagagatgaacaaggagctgcttgcgaagaatgagggaagcatcaagcgagctgtgatggagctcattgccagggagaagaaggacaagtgaagatcgtgtgctatctaagtatatattcgtaaataatgagacggctgtgccactgcggtgcagccctggtgcgtctcagagcttgcttatggtgaactcttcgtgttaggtttcttccttatatctgtcgtgtctgcggtgtcgatgaactatctagtatgtggagcgtgtgcgtctcagcagttaccctgccatgccacgtggactggctgtcgtgcctactgtctgttaccatgtatatatataaaaaatgatgcgtggccccccttttagtntnctnttaaaaaaaattatgtacnaa

SEQ ID NO: 261059 - DNA, 511 bp, Zea mays
agtctgtcgatgacctatgtggcgtcaatgaatgggatcctccccttgcagagctggaagagatgagatgaacaaggagctgcttgcgaagaatgagggaagcatcaagcgagctgtgatggagctcattgccagggagaagaaggacaagtgaagatcgtgtgctatctaagtatatattcgtaaataatgagacggctgtgccactgcggtgcagccctggtgcgtctcagagcttgcttatggtgaactcttcgtgttaggtttcttccttatatctgtcgtgtctgcggtgtcgatgaactatctagtatgtggagcgtgtgcgtctcagcagttaccctgccatgccacgtggactggctgtcgtgcctactgtctgttaccatgtatatatataaaaaatgaatccgtgacccaaaaaaaaaaccaagaaattcaaaaaaaaaagaggcccaaaaaaaaaaaagggccggcccttttaaagaacccaacttaacttccccttcct

SEQ ID NO: 261060 - DNA, 563 bp, Zea mays
cccacgcgtccgcccacgcgtccgcccacgcgtccgcccacgcgtccgcccatgcctcagggtgttgtgctgccgcctcgcccgcacagccaacgggcttgccgtcgcgcgatggagcgtttgtctcgccgtccgccgtcgttccgcgccgagatcgcgatccgtttccgagcttcgaggaatcgacgatcaagcgttggcgaccaagtgatcaagctcttcgagttctacgagattgaagaccctgagcatctgtttggtgaaggttgcctttggtgcaatctatgctcaggtaaagaagaaggcgtcgaggcggatctccaggagttccaggacttcgacgagttcgaggattaggctagcgacctcccccagtcagctgcctgtggtgggtttgtttacgttggctacgtttcgattctgtgtactttgatttatattatgtaaatgactctagtctgtaatattattacttactctttattgtaattcgaagcattgtgctatgatgagtcaaaaaaaaaaaaaagaaaaaaaaaaggaaaaagggtgaatgaaggaaa

SEQ ID NO: 261061 - DNA, 595 bp, Zea mays
cgcatgccatgcgccgtagctgcgcatctcgcccactaggctgcccaatctcctattcatcttctccaaactgcctctccccacccatctcgcccatgttcgcgaaacccagagccgaaccgcccccagtcgacctcggctctccggcgagctgccctccatgtcctggccacacagtcgttcgtcgcgccgatcgcccaggaagatctgcgatgcgctcgtcgttgccgagatcgcgtttcgtttccgcgcttcgaggaatcgatgatcaagcgttggcgaccaagtgatcgggctcttcgagttctacgagatcgaagaccctgagcatctgtttggtgaaggttgccttcggtgcaatctatgctcaggtaaagaagaaggcgtcgaggcggatctccaggagttccaggacctcgacgagttcgaggattaggctagcgacctcccccagtcagctgcctgtggtgggtttatttacgttggctacctttcgattctgtgtactttgattcatattatgtaaatgactctagtctttaaatattattacttattctttattgttaaaaaaaaaaaaaaagggcggccgccc

SEQ ID NO: 261062 - DNA, 815 bp, Zea mays
tgataaagcggggctcctcgggcccggcgttggccgcatcgacactcgccgcgcaccaccaccaccgctgcggctcacggctacgcagcccgctctcccgacccccccgtgccctcctctttttgctactagcacatagagtttcgcccgaatcgatcgccgactgactccgctagggttcggcccgatcgccgcttcgtcctcccggctcccgcggggaccccgccgagatgtctgactggagctcgccggctgcgccgacgttcttcccttttggcccgcaggccgaggggtgggacgtcaccttcaaggtcaaatatggtgatacacttaaaaggttttatggttgtgccaatgggagtcattttgacatgaatttatctgctctacgggcgaggattgatactgcctttaagtttggtcctgacgttgactttgttctgacttacaccgatgaggatggtgatattgtcatgctagatgatgatgacgacttgcgtgatgcagctctccgtcagagattaaaccctctcaggattactgctcaactgaagaaaaatcaaccaactgaaataaaagatacttctgcaccagtgaaatccgctgctcaggatccactatcccagataatgtcagctattgaaggtttgaagcctgttcaggaagatagtctggcccatataaaatcagctattggtgaagcaatcaagtctatcccagagccaatacctgatgcccttgcaaaacttttcatgaaatacttgatgcagcaccaccaccattagctgagctgatgaaaccttttgacaattgat

SEQ ID NO: 261063 - DNA, 447 bp, Zea mays
agcgcagccatctcctgaccgcacattagccaccccacgtcttgctcaccgtcgggcagaggagccgtgccgcgctcaccatcgctcatgtccaaaccatcgctgtcgtccctggccatggtcggttccgagattgcgatccgtttccgagcttcgagggatcgaagatcaagcgttggcgaccaagtgatccggttcttcgagttccacgaggctggagaccctgagcatctgtttggtgaaggttgcctttggtgcaatctatgctcaggtaaagaagaaggcgtcgaggcggatctccaggagttccaggacttctgacgagttcgaggattaggctagcgacctcccccactcagctgcctgtggtgggtttatttacgttggctacgtttctgttctgtgtactttgattatattatgtaaatgactctagtctttcatatt

SEQ ID NO: 261064 - DNA, 607 bp, Zea mays
acggacgcgtgggcggacgcgtgggatcgtgcgagccccttcggttactggtcgtccgcaggcggcaggcgaacccctctccctccctgcgatctcttagctgctcatggcaatggcagtcttaacttcctcgccgagccgcgcccgccctctccacacgagctccgctggcctacctcgtccctgcactcctgcactcgtcgtcgtcttgccgaaggagcttttgtcgccatccaccatgctgcgacacgccgagcgtcgtcattgttctcctcgccgtccgagctctgcccgagatatcgggccgttcgtggagtctgagggaattgcaggagaggaccctgagcagcagcagcttggtgaaggttgtccacattgcaaccactgctcaggagaagacgaagtcgtggaaggagacttccaggagttccaagactacgacgagttttaggtgtgggttggcggcaacccccagtcagctgcttgtgaaggccttatctttactgcgtttcgctagcactttgatttaactgttaagttgatgactatgtggatgtctatgactctgtgatgtaataagttaatactcttttatgttattattcga

SEQ ID NO: 261065 - DNA, 296 bp, Zea mays
  unsure (1)..(296): unsure at all n locations
tcctgttattgtcattaataaaagaagggtcttccacctggatatgaacccaaactcgctgaccaaatttctgaccagaaggggaagccaaactccagtaagatatgtacctccctggccttgtaggtgccacaaaatcaacaggaacatcaatctctgttccattagagattcctgtggatggttttcctgtggacacagagattgatgttcctgttgattttgtccacaggaacatcaatctctttgtccacaggangaccatccgcatacatctgttccattagagattcctg

SEQ ID NO: 261066 - DNA, 468 bp, Zea mays
cacaatcaccccttccctttctctaacccagatcacactagagcacatcggttaccattttctcttcctttgaacgatgttgtcgtcgccataggagcggcaaccaattcaagcgatgttgtcttcttcgcgcgtctactctgccattcaaggtacgcagactgtgatccatttccgagcttcgaagaatcgacagtcaagcttggcgaccaagggattgaactcttcgagttctacgaggctgaagatcctgagcatctgtttggtgaagtacaatggatcaagcagtctcattagctgcgagaagcagacgattcgaatcgagtttttatccttacaaggttacctttggtgcaatctatgctcaggtaaagtagaaggtgtcaaggcggatctccaggagttccaggacttcgacgagttcgaggattaggctagcgacctccccagtcagctgcctgtggtggg

SEQ ID NO: 261067 - DNA, 301 bp, Zea mays
cttcagccaaacgggacatttgctgagtacgttgatgtgtactcatccttgctttaccacaaaacaccaggttgtccgcattgtaaccacttctcaggagaaggcgaagcgtcggaaggagacttccaggagttccaagattacgatgaattctaggtgtgggttggcggcaacccccagtcagctgcctgtgaaggccttatctttactgtgtttcgctagcactttgatttacttgttaagacaatgactatgtggatgtctatgactctatgatgtaataagtactcttttatgttag

SEQ ID NO: 261068 - DNA, 365 bp, Zea mays
atccaaatcacgcagaagctgtcgtccctgcacatggcggttctcgactgtgatccatttccgagcttcgaggaatcgacagtcaagcttcagtgaccaagagactgaactctccgagttctacgaggctgaagatcctgagcatctgtttggtgaaggttgcctttggtgcaatctatgctcaggtagagaagaaggcgtcgaggcggatctccaggagttccaggactttgacgagttctaggcgtgggttagcggcaacccctagtcggttgcctgtgaaggccgcgtttatctacgtttcgttttcgcactttgattattgtaaagactatatggatgtcttagacatatgatgtaatcga

SEQ ID NO: 261069 - DNA, 628 bp, Zea mays
tccagatcgtttccccagatccagatcgcaggcgtgaagggcaactgttaccagattgcaatctattcccgagcttcgaggaatcgacgatcaagatttggtgaaccaccggtcctgagatcaagctcttcgagtcctacgagatcgaagaccctgagcatctgtttggtgaaggttgcctttggtgcaatctatgctcaggtaaagaagaaggcgtcgaggcggttctccaggagttctaggacttcgacgagtccgaggattaggctagcgacctcccccagtcagctgcctgtgaaggccctatctttactgcgcttcgcttagcactttgatttacccgttaagttgatgactatgtggatgtctctgactctgtgatgtaataagttcatactcttttatgttattattcgagcactatgcgatggtgtgcatttatgtaatcgttgtgtacgtgaattttgatcctggcacgtacatagttcgcattcggtttgccttccaaaaccgggtgtgacatcctggtgaccagcagttagaagtagctgagcaagagctcattgaaggcaagttgtgcccttgatcacttttgtttacctaataatattctttattatcactattc

SEQ ID NO: 261070 - DNA, 1806 bp, Zea mays
gtgcccgcatctcacaagcattgtgagacgaaaggtcctaagtctcacgctagtaaacagaaggagtcccttcaggatgaacccagaaccccagcaccagctaacaagaaggctgctgtcagctccactgttgatggatctgattttggcaccaaagggtgtggcgctggtgtgatccatggcccgaaggttggtgagctgtcaagatcaaaggagaagggtgaatgctcccaaagctctaagagtagcattggtgattatagcaccagcaccagcatcagtgaggacagttatggcagcttcagtgctaacggaagcaggcctcacatgtcaaaggatgtgagatggggagccatcaggcgcatggctatccaacaagggagcttgggattgaagaacttcaagcttctcaaacaacttggttgtggggatattggcactgtttatttggctgagttagtgggctcagactgcatgttcgcattgaaggttatggacatcgagtacctcataagcagaaagaaaatgctcagagcacaaactgagagggagatactgcaaatgctcgaccacccattccttccaaccctgtattctcatttcacgacggacaacctttcttgtctggtaatggagttttgccctggtggtgacctgcatgttcttaggcagaagcaacctaccaaaaccttttcggaagcagctgcaaggttttatgtcgctgaagtcctcttagccttggagtatctccatatgttgggggtcatttaccgtgatctgaagccagagaacatacttgttcgagaagatgggcacatcatgctctcagactttgatctgtcgctgaggtgctcagtgagcccaatgcttgtgagaacatcatcagtagacagagatgagccaagtaggccttctggtccctgtgcacaaagctgcattgatcccctgtgtatccagccatcgcggagcaattcgtcttgcttcacgcccagtctggtttcatctacaccgtcaaggacacggaggactagagctgaacccctgaagaaaccatcacttccacagctcgttgttgagcctacggaagcaaggtcaaattcgtttgttgggacccatgaatatcttgccccagagatcattcgaggagatggccatggcagctcggttgattggtggactcttggaatcttcctttacgaattactctatggcaagacaccattcaggggaccggacaatgacgaaacactctcaaatgtgatctcacagggcttgaagttccctgacagtccagcattaagcttccacgctcgagatctgatcagagggctgcttgtgaaagaaccggagtaccggcttggctcgtcgagaggagccgctgagattaagcggcatcccttctttgaaggcctgaactgggccttgatccggtggaccgcaccaccagagaccctgaagaacattgacactgcaccaacacctgtaacgacacgcaagaaaaaggaaggcaaatgtctggaattccggctgaatggtgacgacatcgagttcgagctcttttagttgtagctgtagtggcatcgctgttgtagtgtcaaggatatatcaaatatcatgataagctagcaagagtagtcttagtccctcttccctgcagttttctgttgaaagttagtcatcgttgggaagtaaggtaagattggctgttaagcctgtaactttatgccttgtccataccatcaaatattagaagacacggttgggaaattcctgggcatgtgcgagatgctgagacgcagctggcag

SEQ ID NO: 261071 - DNA, 365 bp, Zea mays
ggcatcccttcttcgaaggtctgagctgggccttgatccggtggacttcaccaccagagaccccgaaaaatattgatactgcagcaacactcgcgggaacacgcaagaaaaaggaaggcaaatgtctggaattccggctgaatggcgacgacatcgagttcgagctcttttagttgtagctgtagtggtagtcccaatgatatatcagtaccacgtaagcgcaagagtagtctttagtcccccttccttgcagatttctgttcatccttggtcatttcggacgttgggaagtaaggtaaggttggctgataagcatgtaactttatgcgttgttaatactatccaatattagaagacgccgttgg

SEQ ID NO: 261072 - DNA, 499 bp, Zea mays
gggctcaccggtcatcggctcgagatcgatggattaggtgcaaaagtggatcgcgggccgacgccagtacagttgtcagctcggcccaccttctcggcccgacgccctgattccgctcctcttgctctcgcacccttcccactgccggcggcggctgaaggcggcgcggtatcagcttggtgatttgtgagcgatggcgccgccggggtcgcggcggtgggcttacgtgcgcgtgatggccggcaccatcctcggtggcgtacttggattctacgtcatgcaccgcgtcgagacctcgtacaaggcgaggatggaggagaggctgcggaggtaccaggcgcatctgctcgccaaagccaaggagtcgcagcagttgcaggacgaggcacagcgggaggataaagcccagttcctgcccgactcgtgacaccgacattcttcccctcttggcgcctgctcttttccaagctgttagttacctgtacttaaaaaatccatc

SEQ ID NO: 261073 - DNA, 1923 bp, Zea mays
gcgaggtgcaccaccgcggcaagcccgtcgggatgaagaagacgctcgtcttccacgccgggacggcgcctaagggcgagaggaccaactgggtcatgcacgagtaccgcctcctcgatgcagacggacctcaggatctgcatgtggtttgtagaatcttccagaagcatgggtctggaccacagaacggtgcgcagtatggtgcaccatacatggaagaggaatgggaagaggatgatgatgctattgagaatggttctacccacgatgcatctggtcaaattgctgcaaccacctgtgctgtagatgaggagtcaaatgaggacgatgagaatgcatattgtgaaacaaacagacctgctcgagtagaaccatctcatctgccttcggtccatgaaatgctcaatccaccagagatggctcctctccaaggtcaagattctaaagagacaagcgatggaagttgttctgatgttgctatttctctggaagagattttgcaggaacctttgtcaaatattagtgtggagaatatgcatagacttgaagggcagaatgccactgatgataacatcagtgttgataacttgttatcagcatatcccacgaaagataatggctacgtaggccagtataacactatgaatgggagtgctccagcagatgaagctcacgcacgctggcctttgagaacatatagtaatcagaattatgtcaatggccctcttgctgatgagttctttgacacagggaatgataccaatggggttgcatattccaggcagcagcaagctgatggcttcccagcacctcgccaagttgatgaaagtatggtattttatgatgccccatctgattacaacttggtggatggaaaagatgacttcgtatatctgaacgacattctgaatgagccacttggaaatgaatcgctctttgatggagatgatatgatggcttactttgatgccacagagaatgatttcaagtatgacattttgggctctggtcagggtttggattatccacttgcagacatgccgttgaactttgcccaaaagagtgacaaggaagacaagtttacattcgaagggatctctgaggttccggaagcaaatcctcagtacggtgcatcctcatctggttcacatgaagatctgtatactgatactgaatttctaggtgtgccaacagatgacactgctgataaaacttacggaaatcgcctggccagcatgttaggctctatcccagctccacctgcaatggcctcagaattcccgccgtcaacagggaaatctgctgggatgctttcggctgtcagctcgagctcaattcgttttactgctggtatcatccaacttgatggcctcactttcagcagcggctccggtcagtggcccttgcagaagaatggagacttgagtttgcttgtctcttttgctgtggagggcgacgtggcatccaagctccctgttggtcttgggcgtgctactcggattagcaccgttcccatggtgctgcgcagtggtttttaccttttctttatgtcggccatgattctcttgtttagctacaaagtagggtcgtgtatctacagcaggtaagttgaagttgatggcgcctcttgtccggccagacctgtgggctgtttattttagttcaacacgtggatcattccctcagtgatgggggtatagcagtcgttcgacaccttttttacacatttaccattttgacctgtcaaaacatacagcaataaactttcgaactggtggtggtgatcatgccgggaccatgttctcgtcagggaaagcagtgcactgtgaatttggtgctctgctcttattattgtaaccaaaattaactgcaatatgttatattctgtcctgtagaggaaaagctattttacctggttattgt

SEQ ID NO: 261074 - DNA, 1044 bp, Zea mays
cggacgctgtggtcggacgcgtgggcggacgcgtgggcggacgcgtggggaaattcgtgagttcaggagtcctacagatggtgagacgcggatgttctatgagatagtggttgctcccggctatacggagaagggtcttgaggttctcagaggcaagtccaaggcactgaggatactcgaggcgaagagaagtggaaaagggatgctttcacttaggcaggtgagtggtgggtggttagctcaggagtctgatgatctaacccctgaagagatcacctttaccacagagtctgagaggtctccgcaagaaaacgagcttgccgatgccaaatttgcctggctttgcgcaaaacatgtcaagagcaacgcaattgtgatagccaagaacaactgcatgctgggaatgggcagtggtcagccgaacaggcgagagagcgttcgaatcgccttcaggaaggcaggagaggaggccaagggagccgcattggccagcgacgccttctttccctttgcctggaatgatgccgtcgaggaggcgtgccagaacggcatcggcatcatcgcccagccaggaggcagtaagaaggacgaggacgccgtcgcgtgctgcaacaagtatggtgtgtcgctcgtcctcaccggcgtcaggcacttcaagcattagccgtcatgccccatggctggtcatcttagcttagggagttacggaaaaaaaaaacaagcttcgaaggctgcagcttgtggagctgccctgatgtttagctttctgcaaagtgcaaaaactgcaaattttggtttctgtagggcgtaggctttgctgggtgagctcgtggggaaggtaatgtttctcctggagtcgaataagctgatgggtgtaccgcgagtgacaattgaacccaacctaaggacttgcaggttggtacttttatctgtcacaaaatcagccgtgcgcctatgcaccaggagaatcatcgatgatcgatgtgacctacacctcaacggccatcgatgtgacctaaaaaaaaaaaaaaaaagggcggccgc

SEQ ID NO: 261075 - DNA, 910 bp, Zea mays
caggagcatcatttgaaggcactaaaagatcatggaattgggacatttgatgtggttgtggtgaatttgtatcccttttatgacaaagtcacctctggtaacatctcttttgaggatggcattgaaaatattgatattggtgggcccacgatgatcagagctgcagccaagaaccataaggatgttcttattgtggtggatcataatgattatcctgctttactggagtaccttaaaggaaagcgagacgatcagcagttccccaggatgttggcatggaaagccatgcagcatgtcgcctcttatgattctgcagtgtcagaatggttgtggaagcaatcaaataaaggagagatgttccccccaagctttactgtgccactggagctgaagtctacactccggtatggcgaaaatcctcatcagagtgctgcattctatgctgacaagagcctttctcttgtcggtgctggtggtattgccactgctattcaacaccatggaaaggaaatgtcttacaacaactacttggatgcggatgctgcatggaactgtgtatcggagtttgatagtcctacttgtgttgtggtgaagcacacaaatccatgtggtgttgcctcacgaaaggatattcttgaagcttacaggttagctgtaaggggagatgctgtcagtgcatttggtgggatagttgcattcaacacgactattgacgaggatcttgcgaaggaaattcgtgagttcaggagtactacagatggtgagacgcggatgttctatgagatagtggttgctcccggctatacggagaagggtcttgaggttctcagaggcaagtccaaggcactgaggatactcgaggcgaagagaagtggaaaagggatgctttcacttaggcaggtgagtggtg

SEQ ID NO: 261076 - DNA, 563 bp, Zea mays
caagaatccgaagaaaattcattttcgagatgaacgaacagtccagaacccactgctcgaaaccgcagccactggccagtcgatgcccatgactgcggtgcccaggaccggccccggttgcctggggtcgccgccggctcaggctctgtcgagctcactagccggggttcaaggcgccccgaagcgactgggcgcatcgaagccgtcgtggatcgttcgcactgagtcaaacgtgaggagggagagagcaaaacgacctgatcctccttgcaccatctgcaagggcacagggagaatagactgccgcaactgctttggccgaggaagaacaaaccatgccgatgtggccatgcttccgaacggcgaatggccacaatggtgtcgaatttgtggtggtagtggactggattactgcctccggtgccatggaactggtgagtatcgtgaacccatgggcttgcacttcactgtccaaagaaaatgaggtgggatggccttgtatgctacgatgcagcgcagttgttaccagctgcggggacatcgtagccactcagagcatgttt

SEQ ID NO: 261077 - DNA, 697 bp, Zea mays
gctttttcatatgagggcctgccaataaagccaaagacaagaagagagaatgcatttctcataacggaagcggtgagaggagacggagggattctttacaaccagtccatggagagattcatgccgatgtacgatgaccgctcggagctggcgccgagagacgtggttgcgaggagcatagacgaccagctgaagaaacgaggcgaaaagtacgtcctcctggacatcagccacagaccaagagacaaggttcttgcccacttccccaacatcgccgccgagtgcctgcggtacggcctggacatcacccggcagcccatcccggtggtcccggcggcgcactacatgtgcggcggcgtccgggcagggctgcagggggagaccaacgtgaagggcctctacgtggccggcgaggtcgcgtgcacggggctgcacggtgccaaccggctagcaagcaactcgctgctggaagcgctggtgttcgccaggagggcggtgcagccgtccatcgacctcatggtggatgccgacggagatgccagaccgtcgctggcggcgaggtgggcacggccgacgctgccgcggtcggtgctgggcgacagcgtgctgtcggacatcgtggggcggacgaggcatgccaagatggagctgcaatcagtgatgtgggagtatgtcggcatcgtgcgctcgacggggc

SEQ ID NO: 261078 - DNA, 2077 bp, Zea mays
gtccgaatattttatcttcctgaatctgcaggatggcttgttagcaaaggtcggatggcagaggcaaaaaaggtgttgcaaaagttacgggggaaagacgatgtctcaggtgaattgtcccttcttctcgaagggttggaggttggaggagacacttccattgaagagtacatcattggacctgccaccgaggcagccgatgatcttgttactgacggtgataaggaacaaatcacactttatgggcctgaagaaggccagtcatggattgctcgaccttctaagggacccagcatgcttggaagtgtgctttctcttgcatctcgtcatgggagcatggtgaaccagagtgtaccccttatggatccgattgtgacactttttggtagtgtccatgagaatatgcctcaagctggaggaagtatgaggagcacattgtttccaaactttggaagtatgttcagtgtcacagatcagcatgccaaaaatgagcagtgggatgaagagaatcttcatagggatgacgaggagtacgcatctgatggtgcaggaggtgactatgaggacaatctccatagcccattgctgtccaggcaggcaacaggtgcggaagggaaggacattgtgcaccatggtcaccgtggaagtgctttgagcatgagaaggcaaagcctcttaggggagggtggagatggtgtgagcagcactgatatcggtgggggatggcagcttgcttggaaatggtcagagaaggaaggtgagaatggtaggaaggaaggtggtttcaaaagagtctacttgcaccaagagggagttcctggctcaagaaggggctcaattgtttcacttcccggtggtggcgatgttcttgagggtagtgagtttgtacatgctgctgctttagtaagtcagtcagcacttttctcaaagggtcttgctgaaccacgcatgtcagatgctgccatggttcacccatctgaggtagctgccaaaggttcacgttggaaagatttgtttgaacctggagtgaggcgtgccctgttagtcggtgttggaattcagatccttcaacagtttgctggaataaacggtgttctgtactataccccacaaattcttgagcaagctggtgtggcagttattctttccaaatttggtctcagctcggcatcagcatccatcttgatcagttctctcactaccttactaatgctttcttgcattggctttgccatgctgcttatggatctttccggaagaaggtttttgctgcgaggcacaatgccaatcttgagggcatctctagttatcctggttgtgtccaatctaattgatttgggtacactagcccatgctttgctctccacagtcagtgttatcgtctacttctgctgcttcgttatgggatttggtcccatccccaacattttatgtgcagagatctttccaaccagggttcgtggcctctgtattgccatttgtgcctttacattctggatcggagatatcatcgtcacctacagccttcctgtgatgctgaatgctattggactggcgggtgttttcagcatatatgcagtcgtatgcttgatttcctttgtgttcgtcttccttaaggtccctgagacaaaggggatgccccttgaggttattaccgaattctttgcagttggtgcgaagcaagcggctgcaaaagcctaatttctttggtacctttgcgtgcaactattgcactgtaagttagaaacttgaaggggtttcaccaagaagctcggagaattactttggatttgtgtaaatgttaagggaacgaacatctgctcatgctcctcaaacggtaaaaaagagtccctcaatggcaaataggagtcgttaagttgtcaatgtcatttaccatatgttttacctatttgtactgtattataagtcaagctattcaacgctggttgttgctagaaatctttagaacaaagatgataatgatctgatctgatgttataatattcaaatctcaaataaagaaaatatcgtttctcaaaaaatctttgcaagcttttgccctgttcaatatgatatt

SEQ ID NO: 261079 - DNA, 424 bp, Zea mays
gaaacgacatatattattaagcatgggttccctaggctcaagcaccattagcagcatgaacatggcgaagcaggcagccaccaccgttggtgctaagaacggcgctgttgctgtcgccgatcagcagaaagtagagggccccaggacgatgaactgcagtagctacaccttccacatgccgctgcactacccgaggtacaagaaggcggactacgagagcatgccggagtggcgcgtcgactgcctgctccgcgagtacggcctccccgtcgacggcgaactcgacagcaagcgaaagttcgccatgggcgccttcctctggcccgaccagtactgaaggaacccgtggcccgagctagctgaggctgctgagcctgagctaacaagagatgaagcaactgcagtcgtagccggagctagctgt

SEQ ID NO: 261080 - DNA, 414 bp, Zea mays
acccgcctcgctcaaagccaagcaacagcagcagcttccctagcaacaccttgcccctgagctcatgggatccctgggccccacagtgagcttgagcatcatggccaggccaggcggccagcagccggcggagatggagaggaagaaggacagcggtgtcttcttcggtgggggctgcggcttccggatgccgctgcactacccgcgctacaagaaggcggactacgagagcatgccggagtggcgcgtcgactgcctgctccgcgagtacggccttcccgccgacggcgacgtcgacagcaagcgccgcttcgccatgggcgccttcctctggcccgaccagtactgatccaaccaaacaaagctcagcgctagctagctgcgtgccggccgtgatctcgtcatatttagagg

SEQ ID NO: 261081 - DNA, 500 bp, Zea mays
acgcactgccgtaccggtactgaatggctcgacccacgcgtgcgtccacgcgtccgcaaggatggcatccgtcccctctgggaggatcctgcaaaccagagtggtggcaagtggataattagatgcaagatggcaggttcaggtcgattttgggaggatttggtgctagtggtagtaggcgaccagcttgagtatagcgatgatgtctgtggtgttgtgcttagtgtccgtttcaatgaagacattctgagcgtctggaaccggaacgcatcagaccatcaggctgtgatggcattgagggattctatcaagaggcacctcaagctgccgcacagctatctgatggagtacaaaccccatgatgcttcgcggcgtgacaactcgtcctacaggaacacatggctgacaggatagataaacctcgtgatgctctgcagcttcactgcgactgctctgaagcaaagagactcttttatgtaccatgaacgcagactattatg

SEQ ID NO: 261082 - DNA, 760 bp, Zea mays
ttgtgtcaccttctcttcgttcccctcctcggctcctcgcgatccttctttactgcccgagagttctgactagccacatccagtcaagcagtaaaggcgcaccatggaggcggcggcggagaataaggaggccgagcaggaggagcagcagctaccgcacgcgcagaaggataacgcgcccgccgccgccgaggaagacgaagcggattcggaggagaccgagcgccgcaaccgcgacctcaagtccggccttcacccccttaggcacaaactcgtgctctggtacactcgccggacgcctggagcgaggtcgcagtcgtacgaggacaacatcaagaagatcatcgatttcagcacagtcgaatcgttctgggtttgctactgccaccttgcgcgcccttcttccctgccgagccccactgaccttcatctcttcaaggatggcatccgtcccctctgggaggatcctgcaaaccagaatggtggcaagtggataattagattcaaaaaggcagtttcaggtcgattttgggaggatttggtgctagtggtagtaggcgaccagcttgagtatagcgatgatgtctgtggtgttgtgcttagtgtccgtttcaatgaagacattctgagcgtctggaaccggaacgcatcagaccatcacgctgcgatggcatcgagggattctatcaagaggcacctcaagctgccgcacagctatctgatggagtacaaaccccatgatgcttcgcggcgtgacaac

SEQ ID NO: 261083 - DNA, 1051 bp, Zea mays
ttgacgcgtgggtgagaagcaacttctttggactaaaaaaatccaattttctccgcgacgaaggagaggcatccctcccttccgcgtggtgtgctctctgttcccctttacgccgtttcctctcccgactctctcctcgccggcgacgccgcggagtaggtgcaacagaaactgctcgaggcggaggcggagcctgcggctgcacagacatgggtgatcacgaggcgcgcggtgatgacttcgagaagaaggcggagaagaagctctcgggctggggcctcttcggctccaagtacgaggacgccgccgacctcttcgacaaggctgcgaactccttcaagctcgccaagaactggagcagagctgcatcagtttacatcaagattgctaactgtcatttgaagggagatagcaagcatgaggctgcctcagcgtacgtcgaggcagcaaattgctacaaaaagttttcacctcaggaagctgcgcaagcgctaaaccagtctgttaatcttttcttggaaattggtaggttgaacatggctgcaagatacagcaaggacattggtgagatatatcagcaagaacaagatttagagaaggctacagattacctggaaagggcagctgacctttttgacagtgagggacagtcgtctcaatcaaacaccatcaaacagaaagttgcagaaattgctgctcagttggaacagtacccaaaagcaactgagatatttgaagcgatcgctcgtcagtcaatcaacaacaatcttcttaagtatagtgtcagaggaattcttcttaatgctggcatctgtcaactatgtagaggtgatcctattgccatcacaaattcattggagcgataccaggaaattgacccgactttctctgggacacgtgaatacaagcttttagctgatcttgctgcatctatggatgaaggggatgttgccaaatttactgatgcattcaaagaatttgttattatttcacttcttggattctttgtaaattactctggtgcttatggctgtataatgagctgattaaa

SEQ ID NO: 261084 - DNA, 933 bp, Zea mays
  unsure (1)..(933): unsure at all n locations
acccacgcgtcggcggcatgagctgctacgacgtcagcacaatgtacaaaagcggacctagaagtgccagcgctaaccagctgtaatcttttttgaaattggtggttgaacatggtgcagatacagcaggacattgggagatatatagcagacaagatttagagaagctcagattacctgaaagggcactgccttttgacggagggacagtcgctaatcaaacaccataaacagaaagtcagaaattgctgtcagtggacagnaccaaaacaactgagattttgaagcgatcgctcgtagtcaatcacaacaatcttcttaagttagtgtagaggaattcttcttaatgctggcatctgtcaactatgtagaggtgatcctattgccatcacaaattcattggagcgataccaggaaattgacccgactttctctgggacacgtgaatacaagcttttagctgatcttgctgcatctatggatgaaggggatgttgccaaattcactgatgcaatcaaagaatttgatagcatgacacgtctggatccttggaaaaccaccctgctgctcagggcgaagaacgagctgaagaaaaaggaggacgatgaggacgaccttacataagtattgtagtaaaaagaaatggtacgatatgttttggtttgtgcctccattgcattggaggcatcgtgttccttacaaacgagcatgatgaaattaatcgctggtctggttgtacagaacgtcaatttgggttctactgttgatgtgactgccagtttcgttgacttgatgccagagtgaaaattagtaccgagatgcttgtttctggggttctgttcttttcaaatctttagaccttatttcctattgtacttctatacctcgtattaataatctaagcggtttccaaaagaaaaaaaaaaaagaaaa

SEQ ID NO: 261085 - DNA, 1765 bp, Zea mays
cccacgcgtccgtgaaaagaagaaacccgatatcaaacaaaggagggtggttgtcacaggcatgggtgtagtgacaccattgggccatgatcccgacgtcttttacaacaatcttcttgatggtgttagcggaataagtgagatagagaggtttgactgttccaacttccccacgagaattgcaggagagataaaatccttttccactgatggttgggttgtacctaaacttgcaaagcggatggacaagtttatgctatatctgataactgctggaaagaaagcattagaaaatggtggactcactgaagaactgaggaacgagttggacaaaaccaggtgcggggtcctcattggttctgcaatgggcggcatgaaggtttttaatgatgcaattgaagcactgagggtctcttacaagaaaatgaacccattttgtgttccttttgcaactaccaatatgggctctgcaatccttgcaatggatctgggatggatgggaccaaattattctatttccacagcctgtgctaccagtaacttctgtatccttaatgcagcaaaccacatcagaagaggcgaagctgacgttatgctctgcggtggttctgatgcacctcttatcccaatcggattgggaggttttgtggcctgcagagcactttcacagaggaacagtgacccaacaaaagcttctcggccttgggacatgggacgtgatggttttgttatgggggaaggggctggtgtcctcgtattggaagaacttgagcatgccaaggaaagaggtgcaacaatatatgctgaatttcttggtggaagcttcacatgtgatgcttaccacatgactgagccacatcctgaaggaagagggattactctctgcatagaaaaggcactagctgatgcaggggtagcaagggaagaaatcaactacgtgaatgcccatgcaacttctacacaagcaggtgacctgaaggagtatgaggctattgtgcgctgttttcgccagaaccctcaactgagggtgaactcgaccaaatcaatgactgggcatcttataggagcagctggtggaatagaagcagttgcttctatacaagctataagaactggttgggtccatccaaatttgaatttagaaaatcctgaggacactgtggatgtgggcatcttggtaggatcacagaaggagagatgtgaggtgaaggtggcgttatccaactcattcggcttcggtgggcacaactcatcaattctctttgccccctttaagtgaacatgaccgacgaactgccatcttcctcatcgtccaaatagattcatatatctggatctccacatagaagacaagtggactctgcaacttcctcggtgccatagatattacagggaggtccaaactgagcgtatctgagcgaacaaaacatcagcccccctacatgtttcatctatatcacgaagttgcagatatgtggtaactatcaaaaggatttaccgtacctgggccagtgttttcgccttcaccatacctgcccattgtcagtactatttcctagatttggagtagtcccgtagctaatcctcttccctgcggaggtgatgggattttatgttgtattgatgttgtcaacaatgtcgttcttagccatgaattgctggttccactgtaagcaccgctggatgtttatcgctttggctgtttttctgctgttcataactgagttaaagatttgtaaatggcgacactgttcggcctttgaac

SEQ ID NO: 261086 - DNA, 725 bp, Zea mays
  unsure (1)..(725): unsure at all n locations
ttnttttttttcttttttttgataaaaggccgaacagggncgccatttagagatctttaactcggttatgagcagcaggaaacagaaacaaccaaagcgaaaacgtccagtgatgcttacagtgggaaccagcaattcatggctaataacgatactgttggcaacatcaatacaacattagatcccatcacctccgcagggaagaggattaagctacgggactacaccaaatgtaggaaatagtactgacaatgggcaggtatggtgaaggcgaaaacactggcccaggtacggtaagttctttgatagttaccatatatattttgcaactttgtgatagtagatgaaacatgtaggggggctgatgttttgttcgctcaaatgtgtgtggcatagtattgtaccctcactttggacctccatatgcagtatgtgtggcacggaggaagttgcagaatccaccagatttctatgtggagttccagatatatgaagccatttgcgcgatgatgaagatgtcggttcttcgcctcggtcatgttcacttaaagggggcaaagagaatcgatgagttgtgcccaccgaatccgaatgagttggacaacgccaccttcacttcacatctctccttctgtgaccctaccaagacgcccacgtccacggtgtcctctggattttctaaattcaaatttggatggacccaaccagttcttatagcctgacga

SEQ ID NO: 261087 - DNA, 799 bp, Zea mays
aactgggggagagtcaatttatgggtccaaatttgaggacgagaattttgttttaaagcatgagaggaaaggaatgctttcaatggctaattctggtcccaacacaaatggttctcagtttttcatcactactacacggacacctcatttagacgggaaacatgttgtttttggtagagtgatgaaaggaatgggggtagttcgctctattgagcatgtttctgtcggagaagctgactgccccactcttgaagttaaaattgttgattgtggggagcttcctgaaggtgctgatgatggagttgtaaactttttcaaagatggtgatacgtacccagattggcccaatgatcttgaagagaagcctgctgaggtttcatggtggatggatgctgtggagtctgctaaagcttatgggaatgacaatttcaagaaacaggactacaaggcagctctcagaaagtacaggaaagctctgcgctacttggatctttgctgggagaaagaagagatagatgaagataagagcacagcactgcggaagaccaagtcaataatactcactaatagctccgcatgcaaattaaagttaggagattcaagtggggctttattagacgcagattttgcactgcgtgaaagggagggaaatgctaaagcttttttccgacaaggacaggcacacattgcacttaatgacattgatgcagccgtggagagctttaaacaggcattggagttggagccaaatgatgctggaatcaaaagagagctggctgctgcaaagaagaagattgct

SEQ ID NO: 261088 - DNA, 974 bp, Zea mays
ggtgcagcgatgtccgaaccctccccacccgcacaccctccttatccaaccgagtcccggcggcgatggcggcggcggcgacgaacgccgatgtggaggtggtcgacttcgacctcgatgacgacgacctcatggacgaggacgccgggccggatccagcaccgccccccgcctcccgcctccgctccaccatcgcgggcgacgacgcgccgcgtaggaccaagggccgcggcttccgcgaggaccctaactcctccgcgacccgcgactcgcgctttggcgcggggggacgcgccgacctcgactcgcttggcggccctggacccatccagtcaattgaaggatggattgtgttggtcacaggagttcacgaagaagctcaagaagatgaccttcaaaatgctttccaagaatttgggcaggtcaaaaacctgcatttgaatttggaccgccgtaccggatttgtcaaggggtacgctttgattgaatacgagaagtttgaagaagctcaggctgcaataaaagaactggatggagctgagctttataaacaaagaatgagtgttgattgggcatttagcagtggccctgctaaacgcagaaatactcggaaaaggtcaccaccaagagctcgttcaaggaccccacccaggagaaggcactgatgtttccccagcatgtcttgaactacttgctatgtgtgacgaagagcaagaagtctggggattccaaatattaccttggtgtatgtggatcacctgatttcgatggtggttattaaattgcctgttgtttccttattgggattccaaatattagctttgaactctggtgtaagttgatgagacatggatgtgcacttagacgcttaccattatgtttggcatgccagttggagacgattgttggaggcgattgtatgggatcatgcttttggatttttgacgagtgatgagttgatgttggatttttac

SEQ ID NO: 261089 - DNA, 415 bp, Zea mays
gcaattcccgaaatccccaaaagtcgcccttcccccaaccctatccaaccgaatccagcggcggcggcggcggcggcggctatggcggcggttatgaacgccgatgtggaggtggtcgacttcgacctagacgacgacgacctcatggacgaggatgccgggccggatccagcgccggcccccacctcgcgtctccgctccaccatcgcgggcgacgacgcgccgcgtaggaccaagggccgcggcttccgcgaggaccccaactcctctgcgccccgcgattcgcgctttggcgcggggggacgcgccgacctcgactcgctcggcggcccgggacccatccaatcaattgaaggatggattgtgttggtcactggagttcatgaagaagctcaagaagatgacctccaaaatg

SEQ ID NO: 261090 - DNA, 422 bp, Zea mays
tggccctgctaagcgcagatttactcggaaaagatcaccaccaagggctcgttcaaggaccccacccaggagaaggcactgatgtttccccagcaagtcatgaatttactatgcgtgatgtagtgaaagaagtctgggatttcaattctcaaatgttagcttggtgtatgtgtatccggctttgagttgatggacacacggagttacttagccgcttaccattacgtttggcatgccagttggagactattgtaagcgatgatttttttttggggtgtttctgaggtctgccaagtggcggtgttggatttttatgttcgtgtgtgccttcactttgttatcgccattctgacgagtgatgctttgggttttgaaaaaaaaaaaaaaaaaaaaaaaaaaaaaaactcgagactagttctctt

SEQ ID NO: 261091 - DNA, 869 bp, Zea mays
tttttctctccctcggctcggtccctctccggcgctccctcacggcctcgccccctgtgccttccaggagctccgaatcccgatcgcctcggtccccgcgagctcacatggtgggggcgcccaccagaggctagggttcccagttcccatcattctcctgctgattaaaaccgtggggttttggagagcctgaggctgtggcggcggcaggaatgaacggggaggtggaatgcagcgtgtgccatgcgaaggtgccggtgccgccgccggtgtcgaaagcgtacgacagccaccggagcactgtgtcgtcgcggcaacgtgcgctaaacgtgctcctcgtctccggcgactgcgtccttgccggcctccagcctatattagtgtacatctcaaaagtggatgggaaattcaaatttagcccaatcagcgtgaatttcttgacagagattacaaaaattatgtttaccattgtaatgctattcatccaggctagacgtctaaaggtgggagacaagccactttttacagtttcaatatttatgcatgctgctcgcaataatgttcttctttcagtacctgctcttctctatgctatcaacaactatttgaagttcataatgcagttatattttaatcctgctagcgtgaaaatgctgagtaatctcaaggttctggtaatcgcagtgcttcttaagatgataatgaggaggcgattttccgtaatccagtgggaggcccttgcccttttgttaatcggaatatctgttaatcagctgaaatcattgccaaattgttctagtgtgctaggtcttcctgttgcagctggagcctacctatatacattgttttttgtaacagttcccgcattg

SEQ ID NO: 261092 - DNA, 292 bp, Zea mays
gccggcaggtacaaggagttgatgagcaggggcgagagaggaggagacatgggcagcagctcgcaccaggtatacctcaccttcccttcagagagcaccttcatggaggaagacgtggccaattacttcggtttgtatggttcggtgcgcgacgtgaggatcccatggcaggagaaacggatgttcggcttcgtgagcttccacattccggagacggtgaacaccattctcacgatgcgcatcccacatattattggcgaaatcaagggtcctggtgaaacgttacatagag

SEQ ID NO: 261093 - DNA, 918 bp, Zea mays
  unsure (1)..(918): unsure at all n locations
cccacgcgtccgcccacgcgtccgcccacgcgtccgtgctatctgaacatattgctgactgggtcagggaggagagtgggaagaagattattttccacaccttcagtaatactggttggctttgttatggcgtaattctagagaacttgcaacagcatgatccttcagcagtggactaaattaaagcttgtgtagtagactcagcacctgttgctgcacctgatcctcaggtttgggctttgggcttctcggctgccctcatgaaaaaacgcagtgtcaccacgaagggactaggttcagatgattcaaggtctgatgtcctagttgtggagtccaacaaggagctcaagctgggggcaacagaggcggttctactgtcagcgttagagagtttctttgacgttgttttgaactatccaaagatcaataggaggttatgtgacgtgatggagctcttgtcctggaagcaacccaagtgcccccaattgtacatatacagctccgccgacagggtgatcccagcgaaatcagtggaggcattcatcgacggccagcggaaagccgggcatgaggtgagggcctgcgacttcgtgtcatcgccccatgtggaccattaccggagcaatcctgggctgtatagctctcagctggccaacttcttggaggattgtgtgcttgccaagcgctgtgagggtgcttgcacatcatgattgtctcttttatttgttcctggtcttgaattggaatgcaccanggacactgacatacgtgggttatacatgattttgttctctccttgttttaacggtctttgtgggtgacctttttttccccctcttgtaactcttgtctttgtggttggagtctgggcgcacaattgtaaaaacgtgtgaggagaaataaccaaatgaaaggaga

SEQ ID NO: 261094 - DNA, 482 bp, Zea mays
gggccgacccacgcgtcctggcgcgcaacctgtctgtcacattgttcattctgacggcctatgtcgccgcgacggcggcaccgaccgtctgtgcggtcaaatctccggcgagcacaacgaccacaaggaaacacgaagcagccaaagaagagacggatgcgcctgccaaggcaccagctgctgcagccaccgaggggcctgctgcgggagcgcccatgacatggccggatggcgggcctgagttcgtcaagatggtcatcaagaaccccttctttaaaagcgcacctccatctggtagcgaagacggcctacccattgaccccactccagaaggcagcatgaactaaattaaataccaattacgagaccgaccagatatgcatggagcatgcaagaatgttgtcgaacgaatatatgctatgaatggttacatgtactggctacatttagttcaacttaatttctctagtgcgctgaaagct

SEQ ID NO: 261095 - DNA, 591 bp, Zea mays
  unsure (1)..(591): unsure at all n locations
gcaacatcctcaaaacgctgaagaagctcaagccggaactctgcgccgacgccatgggcacgctcatctaccagtccgacatgcgcgcgcaggatcccgtcggtggctgctaccgcctcgtcctcagtctggagcgccagctcgagatcgatactgccgagctcaccgccgtgctccaccacttggcgttctgccgccaggctaccacgacaaccaccgtgatggcaccgcaacagcaaggcggtggcatggctgacctcgacgtcacgtcctccaaccagccgcttctccccaacgagcagcaagaagtcgttgacgcactctacgtgaatcacgaagctcacaccgccatccttcaaaccgacgaggtcgtccaccgccacggtggaggccacagccccaccgatgatcatcacggtgagcagcaacagcagcagctcttcgactacttctattacgatgccaccgncagcgacgatgcaagtagcaagcctaccatagacatcaacctcgacaacatgcaacaattcgatnttgacgatagttgtgcccgcggcgagaaagtggatctggctccggcagctgggggat

SEQ ID NO: 261096 - DNA, 385 bp, Zea mays
cccacgcgtccggtgatgccccgcgaccgcgacgagccagccgccgtgcgcgtctacaccgtctgcgacgagtccaggtacctgatcgtgcgcaacgtgccgtcactcggatgcggtgacgacctcgccagtctcttcgggacgtacggccccgtggaggagtgcacgcccatggatgcagaggactctgagccctacactgacgtcttcttcgtcaagttctcacaggtcaacaacgccaggtttgcaaagaggaagctcgacgagtctgtgtttcttggcaaaccgcctgcaggtgacctatgcccctcaatttgagagccctcaagataccaaggagaaactggaagttaggagaaaagaagtccttggccgaataaaatca

SEQ ID NO: 261097 - DNA, 665 bp, Zea mays
tggcatcgcccgccggtgccggcccggacttcatggctggacccacccacgcggtcttatttacggacgacttcagagacatgggccccgggcaccacatacgcttctcgactggaagagctgcctgaggaggaccccctggcctgtatctgccatttctataacgtccacttggctcatactgctggaggccgaatgatcggcaaaaaggtttctgagaagattctggacaagaaagagctggagttctacaagtgggagggcaatctctcccagctgctgcagaacgtccgcaacaagcttaaccaagtcgcttcgagctggtctcgggaggagaaggaccactgcctggaggagacggagaagtcgttctcttactcaggaggcctcctccgccatatattcacctgatctatcgctgctggttgatccagtctcaaacgctgtacatacatagtcctttgactggtaaaacgttattactggtgagggggatctcctcccccaggtacggtttacctgcattcaagttgcccagtgtcttactggattgctggtgtttggtgtttctgtgatgcaatctgtattctgtaggtcatttcatgactaatagagtcgaccccttccaatgccgtcaatggcaagagctcttccaatcaacatgc

SEQ ID NO: 261098 - DNA, 1062 bp, Zea mays
caacattccgccatcgtcttccccagccggcgaggccgttcgcccgttccaatccgttcccccggttctcattcccaccccgcctcctattctcctcgctcgcgctgacgcgctcccacacgcacccccctctgtgccgccacaccaaaaccgcactccaccgccacagtccccgcctccgcgtcgctgtcgtccgtcatcggtgccgtcgcttcaccagcacggtacccctagcgccagcgcacgctataaggcaccgcggtctagccatggcgcccgcaccggcatcgctctccgcgcccaacgccctctccctgcccgcgcctgctagagtcacctccgggaggtggaacaggagcctgtctgtttccgccgctgcgcggtccgtgacccgggtggtgtctgtcgcgtccgcggcagcggtcacggcgcagaggaggttggtcgccgcggcagcggccacggagatggcgcccgcggcgagcggggaggatgggagcaagcccttcgtggaggagatgcgggcggtcgcgatgaagctgcacaccaaggaccaggcccgcgagggggagaaggagccccaggcgccccccgtcgccaagtgggagccctccgtcgaggggtacctccgattcctcgtcgacagcaagctcgtcttccagacgctcgaagccatcgtcgagcgcgccgccgtcccgtggttggtgtgtgtttcagatgcagagtttcggaatactgggctggagagatcagaggcgctgaaaaatgatctggaatggttcaggcaacagggccacacagttccagaaccatcggcccctggcaccacatacgcttctctactggaagagctgtctgaggaggacccccaggcctttatctgccatttctataacgtgtactttgctcatactgctggaggccgaatgattggcaaaaaggtttccgagaagattctgaacaacaaagagctggagttctacaagtgggagggcaatctctcctagctgctgcagaacgtccgcaacaagcttaaccaagtcgcttcgagctggtctcggg

SEQ ID NO: 261099 - DNA, 366 bp, Zea mays
gccttgaggaggaggaagtgaggccagagcgttgaatgcacatctcccatattcctacacaaaaacacaaaaacacaatgcacatcaactgacagaagtgcaataccctctcatatgcagagtttcggaatactgggctggagagatcagaggcgctgaaaaatgatctggaatggttcacgcaacagggccacacaattccaaaaccatcggcccctggcaccacatacgcttctctactggaagatctgtctgaggaggacccccaggcctttatctgccatttctataacatgtactttgctcatactgctggaggccgaatgattggcaaaaaggtttccaagaagattctgaacaacaaag

SEQ ID NO: 261100 - DNA, 1590 bp, Zea mays
gaccgacctaccggcatggagatgaagctgaccatcacgagggtgcccaccgtcgtctccaactaccaggaggacgccgacaagccgcgcgcgggctgcgggaggaactgcctcggcgactgctgtctgcctgcttccaagcttcccctctacgcgttcaagttgactccggcaaagggctcgcaggaggatgctgcttcaaccaagttacttgttgatatcctccttagtgagtgggaggacaggatgactcgaggcttattccgctacgatgtcactgcctgtgagaccaaggtcattcctggcaaccttgggtttgttgcacaactcaatgaagggcgccatcttaagaagcgccctactgagtttcgtgtggaccgtgtgctccagccgtttgaccctgccaaattcaatttcacaaaagttggccaggaagaggttctcttccaatttgagaatagtggtggtgatgacagctatttcctgaacaacgctccaatcattgctgttgatcgggctccaaatgttattgctatcaatgtaagcccaattgaatatggacatgtgcttctcattcctcgtgttctggaccgcctgcctcagaggattgatccagagagcttcttgcttgcactgcaaatggcagccgagggaggtagcccatacttcaggcttggttacaatagcttgggtgcgtttgccaccatcaatcacctccactttcaggcgtactacttgtcagtgcctttccctgttgagaaggcagctacccacaagatcccactctctgaggacacgaagaagaatggggtgaccgtgtccaagctgataaattatcctgtgagaggcctggtatttgagggagggaacaccctggacgacctggccactgtggtttctaatgcttgcatttggctgcaagacaacaatgtgccttacaatgtgctcatttctgactgtggcaagagggttttcctgttcccccagtgctacgcagagaagcaggctctgggtgaagtgagccaggagctgctggacactcaggtgaacccagctgtgtgggagatcagtggacacatggtgctgaaacggaggatggactatgaggaggcatctgaaacctccgcgtggaaactcctcgccgaggtctctctctccgaggagcgcttcgaggaagtgaaggcgtacatcttcagcgctgctggcctggttcagtatgatgaggaagaggaggaagccagcgacggtgagggccctacggcctatgttcctgtcaaggttacccctctgcccgtcgctgaagggtgcctcgtcctcccgtgagtccgtggtcggttaaataaagggccgtatatgattgcgagccctgtgctctgccgctattttcttctcgtttgtgtcttgctgctctcgtggtgaactcgctactccagtactctgcaatattaagcagaagctattgtattgtttgggtcgtttgtcagctaaattgaaatgcgatggacatttactagtaaaaaaaaaaaaaaaaaaaaaagggcggccgcgaccaattggcaggcgtctgtgttgacgcttgggtcggcccgc

SEQ ID NO: 261101 - DNA, 984 bp, Zea mays
aggtccctttcaatggcccagcgagagaaaattatcgaatatctgaggaaggatgggaagctacttaatcattgtggaatgacaccacagaagctccctgaccttgttgaacataatccacttatagctgtcgatgttctttcaaagctaatcaactctccggacatggatgcgtactttgatgctattgttcatatggatatgagcttgcattcaatggaagtagtaaatcggctcactactgcagtagttttaccaccaggatttgttcatgactatatctcaaactgtattcgatcatgtgaagacattaaggacaagtatatgcaaaatagactagtgagactagtatgtgtttttctacagagcctcattcggaacaggataatagatgtgcaagatctcttcgtggaggtgcaagcattttgcatcgccttctcgcgaataagggaggcagtggggttgttcaggctcctgaaatctctagaatgaagagcgctgcaccatcagttgggcgctggattctcagaacagaaattcccaaggtgtacatccatggctctgccttttgcttccaagctgctgaccctgcataggtctggactctgtagggcgtggattttgctggtatattggttatcatcaagctgcgtcccctgcatcatccccgaaagacattgaggagaaacaaatccataggtctgacaggttgggttcgaggtagagttagttctgttggaagtgtccacggggcttgtcgttcttgtgcagtaggcaacaatggcaagccccgtagttggtttgctcgaaatgagcgaatggtacggtgaactcagaaataaccgggatagagtatccgactgtcagtcatacttgctctacggcatagtatatttattcagtagcctcataaacggttgctttctatttaggctgtcaaaaaaaagacgtaagattacagcagatcagctgaaagaaaaagag

SEQ ID NO: 261102 - DNA, 1276 bp, Zea mays
tctatgcctacacttgcagatatcccgcttcgtgattcgagtttgacacgtagaaggaattctttcaagttggactcatatttggatcctgcttttatgtctataattaaggatcctgatctccgacgcaaggagcaatgggaaaaatctcaggcaaacaagggacttaacttggctaacatgcttgggtttggtgatcttggcagtccacctttttctgctgctgaagaatattcacttcattcacgataccttgctaaagcgaattctatgaatctgtcagatgttgctgaaatgaaaataatttaccgtggaggagttgatagtgaagggcgtccagttatggtcattgttggtgctcactttcttcttcgctgcttggatctggaacgatttgttctatatgtagtaaaggaatttgaatctctgattcagaagccttacacaattgtctatttccactctgtggcatcattacaaccacagcctgatttaggattcatgaaacggttacaacagatactaggtcggaagcataaaaaaaatcttcatactatatacatactccacccgacactgggactgagaacagccgttatggcgatgcaactttttgttgacggggaggtctggaagaaagttgtatatgtcgacagacttgtgcagctattcagatatgtaccacgtgaacagctcaccattcctgattttgtgttccagcatgaccttgaagtgaatggtggaaagggcataatcgttgacccaagaacaaagcatatctaccagagaccatctggttgatctgtcataaacctgcaaatgaacgcttcacagtaccactctcactatgtacagactctccatgactctgtccagtcctctgtagaagagtacccttctagagctgtgcattttgtatctagttgacattgttgctctgtgctattccttcgcctttttgggaggcatatttatgtatcttaataactattctgtataaacaaaaaaaatgctaaatgtctctcaatttgcctatagctgggcgtgctcgttaggttctgtaaatttttgacaggtccatagatattgagaaataggattgcagtctgttccgtctgagaaattgagcgccttggaatgtcttaataggctgaaggctgatctgtttgctgttgcgaacaataagtagcaagtcccaaaggcgaggaagcataaactctggtctattttgcttttggttaactgcatgagatagtctgttaatttttaagattct

SEQ ID NO: 261103 - DNA, 581 bp, Zea mays
aggtccatgcgggctgcggccctgccttttctcccattcccctcgccgcgtgacacgcgctctcgccctctctcccgagtcccgacgaccgggcaacagccgccgccgccgctcagcctccgtcgggcccttcgccggcggcgaacaccatcaggtgtacatgcgtacgcccatgcccttggctgcgcccgcccctgcaagtggtttcctgctggtctgtgtggatttggctgccggaagattgattgatgcggccttcaggatcactgtagactcgctgtgagattccaaggctgctcaggtcatgttgggggaccagtgcatcatacaggcgttagactcggttagctcatcaagctctgcggcctctgcccctgattcgaccctctccggagagcttcctgctgtgagcaggaactgtgtgattgggagcctgcatgtggcgcgggcgcagaaggtgggacatgtggagggtctggtgaattgttgcatagcacggagaagaagaagatttggactggcaccggttttgtgggattctgcaaccaaatcctaggctttctggaatggggggtgatgat

SEQ ID NO: 261104 - DNA, 1994 bp, Zea mays
cggacttgtgggcggacgcgtgggcggaccgtgggcggacgcgtgggccgcattgctcgccaagagttcttcttgtttaggcaaaggcaaaagcaggagcaaaaaggtttcgttggcgatggcgagctcgtggacgcttcctgaccacccgaagctccccaaggggaagccggtggctgtcgtcgtgctggacggatggggcgaggccaaccccgaccagtacaactgcatccatgtcgctcagactcctgtcatggactcgttaaagaatggtgctcctgagaaatggagactagtgaaggctcatggaacagctgtgggtctcccatctgatgatgacatgggcaacagtgaagttggtcacaatgcacttggtgctggtcggattttcgcccaaggtgctaagcttgttgatcaagctcttgcctcaggaaagatttatgatggagatgggttcaactacatcaaagaatcttttgaaaatggtactcttcaccttattgggttgttgagtgatggtggtgtccactcccgccttgaccaactacagttacttctgaaaggtgtcagtgagagaggagcaaaaaaaattcgtgtgcacatccttaccgatgggcgtgacgttttggatggaagcagtgttggtttcgtggagaccctagagaatgatcttttggagcttcgaggcaagggtattgatgcacagattgcatctggtggtggaaggatgtatgttaccatggaccgttatgagaatgactgggatgtggttaaacgtggctgggatgctcaggtgctcggagaagcaccctacaaattcaaaagtgcacttgaggctgtgaaaacactgagagcacagcccaaggctaatgatcaatacttgcccccatttgtgatagttgatgacagcggcaaagctgttgggcctgtattagatggtgatgcagttgtcactatcaacttccgggctgatcgcatggttatgcttgcgaaagcactagagtatgcagattttaacaactttgaccgtgtacgtgtccccaaaattcgatatgctgggatgcttcagtatgatggtgagttgaagcttccaagtcgctaccttgtttccccaccagagatagatagaacatctggggagtacttggtgaagaatggcatccgcacctttgcttgcagtgagacagtgaaatttggccatgtcacatttttctggaacggtaaccgctcgggatactttgatgaaactaaggaagagtatgtagaagttcctagtgacagtggtattacattcaatgttgcacccaagatgaaggcgcttcaaattgctgagaaagctagggacgctctcctaagtggaaagtttgaccaggtacgtgtcaacctgccaaatggtgacatggttggtcacactggggatattgaggccaccgttgttgcttgcaaggcagctgatgaagctgttaagatcattctggatgctgtcgagcaagttggtggtatttaccttgttactgccgatcatggcaatgctgaggatatggtgaaaaggaacaaatctggcaagccgttgctcgacaagaatgaccgtatccagattcttacctcgcatacccttcagccggtgccggttgccattggaggccctggtcttcaccctggagtgaaattccggaacgacattcaaacccctgggctcgccaacgtagccgcaaccgtgatgaacctccacggatttgaggcccctgctgactacgagcaaaccctcattgaagtggctgacaactaaacactggccacctgtgtccaattttggttatatgtagttctgagaatggacattcaataatttatgtttgcaagcacgttgctcaaactcaccaaaacatcgagggatgccttttgactttggcatttacagcattttcgtttggctttaatccttatcggttaaaaaaagggcggccgcccgggaattcggacggtacgtgcgg

SEQ ID NO: 261105 - DNA, 818 bp, Zea mays
gcgtccggtcggctcgcctgctaagtagaaagcacatctttgtttctttacaccggccacttcataacgtggctcatcacactggggtcggagaggccacctcggcgcttgcaagggagctgatgaagctgttaagattattttggatgctgtcgagcaagttgctgggatttaccttgttaccgccgatcatgggcaatgctgaggatgtggtgaaaagggacaagtctggcttgcccttgctcggcaggattggtggtatccagattctaacctcgcatacccttcagccggtgccggttgccattggaggccctggtcttcaccccggagtgaaattccggaacgacattcaaatccctgggctcgccaatgtagccgcaactgtgatgaacctccatggatttgaggcccctgctgactacgagcaaaccctaattgaagtggctgacaactaaatactggccagctatgtccaattttggttctatagttttgagaagggatatggccatgccattcaataatttctgtttgcaagcacgttgctcaaactcaccaaaacattgagaaacgccttttgacttgcatttagatgctctatttataccgttgacaatcgtctcttctggcttttagcagtttgatggctatctttacttagctatataatgtatctgagactgcaaactttgtgtcagtcaaactgctcgaggttatatgctgtttgtgtgggtcatcacgtgtgattaccttcgcacgcattgacgcatgaattgtgttcaccattctaactgcaaggcattttgatgggcttc

SEQ ID NO: 261106 - DNA, 615 bp, Zea mays
tcttactgctatttgtgcgatgcgaccattccggtgcctcgcagcaccgatccggccgtccacctgttaataaatcgcctgagtttagtcgaaacacaatcgttaaaatgcagtaaagtaattcacgacccccgggcgcccccgtctccgctcctttattaatatcgccgcggcctcgcacctccatctgttctatatcgccccattgctcgctcgccaagagttcttcttgttaggcaaggcaaaagcagaagcaaaaagagaaaggtcttgttgccgatggggagctcagggttctcgtggacgcttccggaccaccccaagctccccaaggggaaaccggtggctgtcgtcgtgctggacggatggggcgaggccaaccccgaccagtacaactgcatccatgtcgctcagactcctgtcatggactcgctaaagaatggcgctcctgagaaatggagactagtgaaggctcatggaacagctgtgggcctcccatctgatgatgacatgggcaacagtgaagttggtcacaatgcacttggtgctggtcgaattttcgcccaatgtgctaagcttgtcgatcaagctcttgcctttcgaaagatttatgat

SEQ ID NO: 261107 - DNA, 472 bp, Zea mays
tgtctgttgccattggaggccctggtcttcaccctggagtgaaaaaccagttcgacgttcaaagccctgatcttgacgctggcccctctgccgagatgaacgctgccggatcatgtgccactgctgactacgagcagaccctaattgaggcgggtgacaactaaatactggccaagtatgtccaattgtggttctatagttttgagaagggatatggccatgccattcaataatttctgtttgcaagcacggtgctcaaactcaccaaaacattgagaaacgccttttgacttgcatttagatgctctatttataccgctgacaatcgcctcttctggcttttggcagtttgatgtctatctttacttagctatataatgtctctgagactgcaaactttgtgtcaaaaataaaaaaaaaaaaaaaaaaaaaaaacccaccgtccgcccaccgtccgcggacgcgtgtgcgt

SEQ ID NO: 261108 - DNA, 549 bp, Zea mays
cagcaagaagacgacccttggtacttggtaatagatggcagcaccttcgtccatgccggggccgccgccgccggagccaagcggaggcatcgtatcccccgtggcggtggtggcctcgcatttctgcgcgccctacgtggtgcagctggcggtgaaggagaagaaggtgagcctccgggaaggcgacttcaccatcaccgacaccaacggcgccgtcgtggtcacggtcaagggtgccttgatcagcatccacaaccgccgccgcctcctcgacgccgtcggcaaccccctcctctgcctgcgcgagaaggtaatcagcatgcacaacacgtgggaagcgtacagaggggacagcacgagatcgagcgacctgctcttcaccgccaagaaatcctccatcatccagccgttcaagaccgagatgctcatctacctggcctgcaacacctcgcacgaggcctgcgacttcatcatgaagggcagcttcaaggagaggtcctgctctttctacctcggcggcaacaactccaacgccttgatcgctaaaat

SEQ ID NO: 261109 - DNA, 651 bp, Zea mays
ggaactacttcctgtttttgagttcgatgagctggagttgaagaggttccctaacccaagggaccacatggtaaatacatacggatattctacaatcaacttttttgcgcccatgagtcgttatgctagtgctggtggtggacctgtggctgcttccaaagagctcaaacagatggtcaaggcatttcataattctggaattgaggttattttggatgtagtttacgaaccatacaaaggaagctgatgatgttaacccgtacatgacttcctttcgtggtattgataacaaggtctattacatgttagatctcaacaacagtgcacagctgctgaacttctcgggttgcgggaatacactaaactgcaaccatcctgttgtcaaggagcttgtacttgacagtttaagacattgggttaaggagtatcacatagatggatttcggtttgaccttgcgagtgttctttgtcgtggaccagatggcagtcctcttgatgcacctccacttattaaggaaattgccaaagactctgtattgtctagatgtaagatcattgctgaaccttgggactgtggtggcctttatctagtagggaggttccctaattgggacaggtgggctgaatggaacgggaagtacagagatgata

SEQ ID NO: 261110 - DNA, 850 bp, Zea mays
cgcagactaggcgccaccttctgcgaactgtctctacccttacgaaggaagaggcagccttctcaccgtcgcacccggcgatgcagcggcacgtcgcctccggccggccgtcgggcacggacggctccgacttttcttaccgcatggtcgtcgaatcccggtaccagagggtcgccgagggcagatcccgcctcgcgcgcctcatcctcgtgcaggcgctgcacctagtggccggaggcttgcttctattgctgtcgttgtccaagggggcggcggtgaacaagttcgccgtgctgtccatggccgcgggattcctggctatagtggtgggggaattagggcgaatgcggaccatgtcagtgctgcttcggctctacacaagcttgtcatcaattgcggttgcattctctgtgacgtgcattatccggtcagagttgttcttgaaggttatgaagcaaaacacagaggccatcacaagctacgaaatgcttgatgcggttcgtgttgctcttggtatcctgctgcaaatggtggttatagctacaactaccagactcctgcagaatatgtctcctcccaagagagcttcatgaatgctatgacattttagctttgtttcaagtagtaagggatacaaacttcgagttaaaaatattggccaagtgcgatagtcttgtaccgaagatgctactggtgtacaactgtcaggaaatcgtggattacttgtttcctcttttgtttttgatttacttcttcccttttctggatctggaaaattagtagtcgttggcagagctttgcaagctaaaggctaacggagcatatgtgtttctaattccgccttcatgtt

SEQ ID NO: 261111 - DNA, 450 bp, Zea mays
cgcagactaggcgccagcattctgcgaactgtctctacccttacgaaggaagaggcagccttctcaccgtcgcacccggcgatgcagcggcacgtcgcctccggccggccgtcgggcacggacggctccgacttttcttaccgcatggtcgtcgaatcccgtaaccatccaccgcccacaccgccaaagccacgcttccaacgcctctttcataacctcgcaattttgcagggtaccagagggtcgccgagggcagatcccgcctcgcgcgcctcatcctcgtgcaggtgacggcaagctttcctcctggattcgctcctcgctctcttgccttcattggcggttattgatctgatgactgttcgtggtggtttgctcctccaggcgctgcacctagtggccggagcttgcttctattgctgtcgttgtccaagggggcggcggtgaaca

SEQ ID NO: 261112 - DNA, 769 bp, Zea mays
cggacgcgtgggcgcccaatctccacttctttatcttctccgaggtgagagagcccaggcgatccaattccaccctcgttctcaggcactgtcacacagacacagctgacctgccactgccaggaaagtaggtcgaggatgccccgcagcggcttctcggggtccttcaggtcgcccaagatcgacgtcgtcatcgacatgggaaaccccttcctcaaccgcaccgtcgacggcttcctcaagatcggcgccgtcggcgcctgcaaggtggctgccgaggagaccttcgagtgcctccacaggggggatgtttcgaagcacaaggttgagcatgccctgaggaagatgtgcaaggagggcgcatattggggcactgttgctggagtttatgtgggcatggtgtacggcgtggaaagggtccgtggccgcagtgactggaagaacgcgatggtcggaggcgccttgtccggcgccctggtctccggcgccagcagcaaccacggagacaagatcgtcaaggacgccatcaccggcggcgccgtcgccacggccgtttatttcattatctgcattacctatctgttcttttatcatctgcatttttatttttattgtcttgctttttttttatttttttcttggggggtggttttttttttatttatttttttttttattttttttttttttttatttttttctttttttattatttttttttttatttattttttttatttttttcttttattttttattttattttttt

SEQ ID NO: 261113 - DNA, 1689 bp, Zea mays
cccacgcgtccgcccacgcgtccgcggagcggcggcctcgacgcgcctctgaaagttcggagccgccggcccgtccgcctccctctccgcctcccgtccccaaggccaatagttttcaagtggcaatggcggaccaggctaaccaacccactgtccttcataagctcggtggccagttccacctgcgctcgatcatctctgaaggtgtacgggcccgtaacatatgcccatctgtctcatcttatgaaaggagatttgccacaaggaactacatgacccagagcctttggggcccttcaatgtctgttagcggtggcatcaatgtcccagtgatgcagaccccgctctgtgctaatgctcctgctgagaaaggaggcaagaacttcatgattgatttcatgatgggcggtgtttcagctgctgtttcaaagactgctgctgctcccatcgagcgtgtgaagctgcttattcagaaccaagatgagatgattaagtctggtaggctatcagagccgtacaagggtattgttgactgcttcaaacgtaccattaaggatgaaggtttctcttccttgtggaggggtaacactgctaatgttattcgttacttccctactcaggctttgaactttgcatttaaggactacttcaagaggttgttcaacttcaagaaggatagggatggctattggaagtggtttgctggcaacctggcctctggtggtgctgctggtgcttcctctttgttttttgtgtactccctggactacgcgagaacaaggttggctaatgatgcgaaggctgccaagggaggaggtgaaaggcagttcaatgggcttgtggatgtctaccgcaagacactcaagtctgatggtattgctgggctttaccgtggatttaacatatcttgtgttggaattattgtttatcgtggcctgtatttcggactctacgattctatcaagccagttgtcctcactggcagcctccaggacaacttctttgccagtttcgctctgggttggctgatcaccaacggtgctggtcttgcatcttaccccattgataccgtccgcagaaggatgatgatgacatctggtgaggctgtcaagtacaagagctccttggacgcgttccagcagattcttaagaaggaagggcccaagtccctgttcaagggtgctggtgctaacattcttcgtgccattgctggcgctggtgtgctttctggctacgaccagctccagatcctcttcttcggaaagaagtacggctccggcggtgcttaaatggagaaaaatgatgacgaacaagagcagttcgctcccggtccagcccagtcaggatctggtcaagtttttgcctttcatatcgaagaaattaataatttatgtaggagaatttttccaacattcgttttgggcggagacattgatctcaaaacactcgtaactgtcctactaggtggtggcatgggtccccaaaacatggtcatagggtgtgtctagtctgcccttcgttgcagccgggcaattttccttacatatattgcctttaatcaagtatcagatgagtgtcaagtcgctgcggttaattgtttgtttttcttatgctttgcttgattgtgatagcatttttattatgactgggtttcttgagaatggtgcatttggtttacatgtgcgtcag

SEQ ID NO: 261114 - DNA, 651 bp, Zea mays
tatggggagaagctgctacgcgctgcaggctagccgccgcgcataatctcgggtcgacccacacgtgtgcgcttaagccgcctgcgcggagtcgaggccgccgcccagaccgcctccccttccccgcctccggtgcccaaggccaggccaacagttttgaggtggtaatggcggaccaggctaaccaacccactgtccttcataagctaggtggccagttccacctgagctccagcttctctgaaggtgtacgggcccgtaacatctgcccttctttctcaccttatgaaaggagatttgccacgaggaactacatgacccagagcctttggggcccttcaatgtctgttagcggtggcatcaatgttccagtgatgccgactccgctttttgccaatgctccagccgagaaaggtggcaaaaacttcatgattgatttcatgatgggcggtgtttcagctgctgtttcgaagactgcagctgctcccattgaacgagtgaagctgcttattcagaatcaggatgagattattaagtcttgtatgctttcatagcctttcaatgttattgttgtctgctttaaacttattatttttgttttatgttttcttttttttttttgttttttatttgtttattttttttttattt

SEQ ID NO: 261115 - DNA, 717 bp, Zea mays
tctattcgtccgcccacgcgtccgcccacgcgtccgcccacgcgtccggcggacggtatcaatggggtaagatgcaagaccagcaccattagtgatcagccaacccagaaggatgatgatgacatctggtgaggctgtcaagtacaagagctccttggatgcgttccagcagattcttaagaaggaagggcccaagtccctgttcaagggtgctggtgctaacattcttcgtgccattgctggtgctggtgtgctttctggctatgaccagctccagatcctcttcttcggaaagaagtacggctccggcggtgcttaaatggagaaatatgatgacgaacaagagcagtgtgtgttcccggtcctttccaatcaggatctggtgaagtttttgcctttcatatcgaagaaattaataattcatgtagagggaggattcttccaacaatttgttttggatggagacttagatctccaaacactcgtaactatcctactaggtggtgacatcggtccccaaaaacatttatggtcatagagtctgcccttcgtttgtcagtcgggcaatttttcttgcatacaatgccttcgtttaagtatcggatgagttgctgcgactaattatttgtttgtctttaccttttgcaatgcttgatcgttgatagcattgtttttgtcactggatttcttgttaatgttgcatttggtttacgcgtt

SEQ ID NO: 261116 - DNA, 581 bp, Zea mays
cccacgcgtccgaaaggccaaagcggtacgggagccacagagatagctagcaagaaaccacagatggcggcgatagcggcggccacccaggcggcggcgacggtgctactgctcgcggcgctggtgctggcggcgggaccgggcggggcgcgggcgcagtcggcgtcgccgtcgagccagtgcacgtcggcgctggtgagcctgtcgccgtgcctcagctacatctccgggaacgtgtcggcggcgccgccgtcgtgctgcgcgcagctgggcaaggtggtgcagtcggacccgcagtgcctgtgcgtggcgctcagcgcggacccggcgtcgctgggcctcaccgtcaaccgcacccgcgcgctgggcctccccgacgcatgcaaggtcacgacgcccgacgtcagcagctgcaagggcggcgccgccccgcggggggagcgcctgtggcgacgcccgcggggcagacggcgccggccacggggtccaagacgacgcccgccacgtcgtccgtgcccggtgccgccgcgtcgccgccgggctcggctgcccgtctcgtcgccggcttcttcgtcgccgcg

SEQ ID NO: 261117 - DNA, 880 bp, Zea mays
gttcggagccgccggcccgtccgcctccctctccgcctcccgtccccaagggtgagtcttgcgtcccaccaggcttctctcccgtcctctgtccccgatttaaggcccatgctctcgttcctatttgtggcgattggtccgccatgcgtgctgtttgtggtagatagatctgctctgcacgtctgcgttcgtcacgtataggttggattgttcgtgtggtagcctcggccgttggtgctcattcagatcggtgcttcctgcgtcggccaacagttttcaggtggcaatggcggaccaggctaaccaacccactgtccttcataagctcggtggccagttccacctgcgctccagcttctctgaaggtgtacgggcccgtaacatctgcccttctgtctcatcttatgaaaggagatttgccacaaggaactacatgacccagagcctttggggcccttcaatgtctgttagcggtggcatcaatgtcccagtgatgccgactccgctttttgccaatgctccagccgagaaaggtggcaaaaacttcatgattgatttcatgatgggcggtgtttcagctgctgtttcgaagactgcagctgctcccattgaacgcgggaagctgcttatttagaattaggatgagatgatcaagtctggtaggctatcagagccttacaagggtatcgctgattgctttaaacgtaccatgacggatgaggggttctcttccttgtggaggggtaacactgctaatggtacacggtacttacctactcaggtagcccacacattccattatattttgtactgagtaactattgcaaatatgttgaaactgcatggtctttcaggacctaaattattgaatgctcattat

SEQ ID NO: 261118 - DNA, 628 bp, Zea mays
cgggagacggggaggtctcgcggcttcggcttcgttaccttctcctccgagaactccatgcgcgacgctgtcgatgacatgaacggcaaggagctcgacggccgtaacatcaccgttaaccaggcccagtcccgtggcggtggcggtggcggcggtggctacggcggcggtcgcggcggcggcggctatggtggcgggcgccgtgacggcggttatggcggcggtggcggctacggcggtcggcgcgagggtggtggcggcggctacggaggcggtggcggctacggcggtcggcgcgagggtggtggtggcggctacggcggcggcggcggcggctggagggactgatgtgtgggcccatcctggcttcggccgagttatcttatctatctatagtatcgtgttaccgttcgcttctgtcaccgtgttagtgtccgttctacctttggattaggtgttggtacccctgttgttccctttgtttgctcccgctatgaaacgagacgagagaagaatgagcaaggtttttgttcgcagctatttttgtccaatgatattgatatgttgttcccaagttaaaataaaaataaaaaaaaataaaatttaaattaataaaaaagggcggccg

SEQ ID NO: 261119 - DNA, 1931 bp, Zea mays
gggcaggccgcccgcctgccgcgtacccgggaccggaactgtgcgccgggccgacgcgtgcgggcggaagaagggcctcctgtctcctctcacttccctcagtcctcgtccgtctgctccctcctctctctacctagctctagctagccttcctgtagcgcggcagagatggctgcccctgcctccaccacggcggcggcggcggcagcgctgctgctgctgctcctcctgtcgctcgccgcggcggcggacatgtcgatcgtgtcctacggggagcgcagcgacgaggaggcgcggcggatgtacgcggagtggatggcggcgcacggccggacctacaacgccgtcggcgaggaggagcggcggtaccaggtgttccgggacaacctccgctacatcgacgcgcacaacgccgccgccgacgcgggcgtccactccttccgcctcggcctcaaccgcttcgccgacctcaccaacgacgagtaccgcgccacctacctcggcgccaggaccaggccgcagagggagaggaagctcggcgccaggtaccacgccgccgacaacgaggacctgccggagtccgtcgactggagggccaagggcgccgtcgccgaggtcaaggaccagggcagctgcgggagctgttgggctttctcaacaatagcagctgtggaaggcatcaaccagattgttacaggcgacttgatctccttgtctgaacaagagcttgtcgactgtgacacttcgtacaatcaggggtgcaatggaggtctgatggactatgcatttgagttcatcatcaacaatggcggaatcgacaccgagaaggattacccttacaagggcacggacggacggtgtgatgtcaacaggaaaaacgcgaaggttgtcactattgacagctacgaagatgtaccagcgaacgatgagaagagtctgcagaaggcagttgcaaaccagcctgtcagtgtcgcaattgaggctgctggcacagcatttcagctctacagctcgggtatcttcactggaagctgtggaacagcgctggaccatggtgtcacggccgtcggctacgggacagagaacggcaaggactactggatcgtgaagaactcatggggcagcagctggggcgagtccgggtacgtgaggatggagcgcaacatcaaggcgtccagcggcaagtgcggtatcgcggttgagccgtcatacccgttgaaggagggcgccaacccgccgaaccctggccccagcccgccgtccccgaccccggcgcccgccgtgtgcgacaactactactcgtgccctgacagcaccacctgctgctgtatctacgagtacggtaagtactgcttcgcctggggctgctgcccgctcgagggcgccacctgctgcgacgatcactacagctgctgcccccatgactaccccatctgcaacgtcaggcagggaacctgcctcatgggcaaggacagcccactgtcactgtcagtgaaggctacgaagcgaaccctggccaagccgcactgggctttctccggcaacacagctgacggaatgaagagcagcgcatgagaaaacgcagcgtggcattaggtcgtcagcagcctgggtgatcgattagagcccctgcgtgggaaatggtcacctggcccccctgattgacgacggaagcatggctcggcggccgctatctacctatatcgattttagtaggtactcactcctgtacataaaccctgcagaaaaaaagagggttcagttgtttatggaaccctggcaaatttgctttcgcgcacaatgtaaaactcagctaagctccccggcgtagctcgacacagctgcgatctattattatttgatgtaatggggactgatattgcaacgaccagcaatgttatactacattcattttcttggaaaaaaaaaaa

SEQ ID NO: 261120 - DNA, 460 bp, Zea mays
gaattcccgggtcgaccgacgcgtccgcccacgcgtccgtccacgcgtccggcggctgcggctgctatggtggcgggcgccgtgacgccggttatcgcggcggtggcggctacgccggtcggcccgagggtggtgcccgcggctacggaggcggtgccggctacggcgagtcggcccgagggtggtggtggcggctacgccggccggcggcggcggctgtagggactaatgtgtgggcccatcctggcttcggccgagttatcttatctatctatagtatcgtgttaccgttcgcttctgtcaccgtgttagtgtccgttctacctttggattaggtgttggtacccctgttgttccctttggtttgctcccgctatgaaacgagacgagagaacccccagcaagagtttttgttcccccctcaaaaaaagaaaaaaaaaaaaaaaaaagggcggccgct

SEQ ID NO: 261121 - DNA, 457 bp, Zea mays
cccgtccggaattcccgggtcgaccgacgcggccgcccacgcgtccccgcccgtccgcccgcgcgtcccggcggcggctacggaggcggtggcggcgacggcggtcggcgcgagggtggcggtggcggctacggcggcggtggcggcggcggctggagggactgatgtgtgggcccatcctggcttcggccgagttatcttatctatctatagtatcgtgttaccgttcgcttctgtcaccgtgttagtgtccgttctacctttggattaggtgttggtacccctgttgttccctttggttgctcccgctatgaaacgagacgagagaagaatgagcaaggtttttgttcgcagctatttttgtccaatgagctacctctctattatgacttgttccaacaaaataacactaagaatctcagagacagcagacatcacaaggaggccaaaaactaag

SEQ ID NO: 261122 - DNA, 1160 bp, Zea mays
  unsure (1)..(1160): unsure at all n locations
acgaccgtggtcggacgcgcgtgaacccctagccctcgcgccgccgcctcctccgccacccagcgctcgagctcctcgcgtcctgcgagcgcgcgccgcaacgccaccatgaagttcaacatcgcgaacccttccaccgggtgccaaaagaagctggaaatcgatgacgaccagaagctgcgtgccttttatgaccgaaggatatcccaggaggtcagtggtgatgctctgggtgaggagttcaagggttatgtcttcaagatcatgggtggatgtgacaagcaaggcttcccaatgaagcaaggagttttgacttctggtcgtgttcgtcttctgctccataggggcactccctgcttccgtggttatggcaggcgtaatggtgagcgcaggaggaagtctgtccgtggttgcatcgtgagccaagacctatctgttatcaacttggtgattgtgaagaagggtgagaatgatctgcctggtctgactgacactgagaagccaaggatgaggggtcccaagagggcctccaagatcagaaagctgttcaaccttaacaaggatgatgatgtacgcaagtacgtgaacacataccgcaggacattcactaccaagaacggcaagaaggtcagcaaggcacctaagatccaacggcttgtgacacccttgaccctccagaggaagcgtgctagaatcgctgacaagaagaagaggataactaagaagaagtctgaggctgctgagtaccagaagcttcttgcccagaggctgaaggaacagagggaccgccggagcgagagcttggccaagaggaggtccaagctttctgccgccgtcaaggcttctgctgccacctctgcttaagaatattcagtgttttgggatctttgtaaggtctatctcgttacagcgaaagtgcctctctacttagatttatgagtaattgttgcttttttgtatgaacatggtaatggcttgtcggagtaccagaggtttactatgttggtttatgctgtgaacgtaagcgagccatattctttggtatgcagtctgaactatatgttaacgtttgggatttttgttaacatgaagtatcctgcttggttgcgttggtcaaaaaaannaaaaaaaaaaaaaaaaaaaanaaaganaaaaggccg

SEQ ID NO: 261123 - DNA, 428 bp, Zea mays
agaactccatgctcgacgctatcgagaacatgaacggcaaggagctcgacggccgtaacatcggcgtttaccaggcccagtcccgtggcggtggccgtcgcgggaggcggtggcggctgcggcggtcggcgcgagggtggtggtggcggctacggcggcggcggcggcggctggagggactgatgtgtgggcccatcctggcttcggccgagttatcttatctatctatagtatcgtgttaccgttcgcttctgtcaccgtgttagtgtccgttctacctttggattaggtgttggtacccctgttgttccctttggtttgctcccgctttgaaacgagacgagagaagaatgagcacggtttttgttcaaaaaaaatatattttttcttattactaaggggcggtcgctctagaggatccaagctta

SEQ ID NO: 261124 - DNA, 1267 bp, Zea mays
cccacgcgtccgcccacgcgtccgcccacgcgtccggtccgttccgctccttcctccccctatctagctagccttcccgttcctgcatcgcggcggagatgggcgcctccaccacgccgctcgcgtcggcggcggcgctgcttctgctgctgctcgcgccgctcgccgcggcggcggacagcatgtcgatcgtctcctacggcgagcggagcgaggaggaggcgcggcggatgtacgccgagtggatggcggcgcacggccggacctacaacgccgtcggcgaggaggagcgcaggttcgaggtgttcagggacaacctccgctacgtcgacgcccacaacgccgccgccgacgcgggcgtccactccttccgcctcgggctcaaccgcttcgccgacctcaccaacgacgagtaccgcgccacctacctcggcgtcaggagcaggccgcagagggagaggaggctcggtgacaggtacctggccggcgacaacgaggacctgccggagtccgtcgactggcgggccaagggcgccgtcgcggaggtcaaggaccagggcagctgcgggagttgctgggctttctcaacaatagcggctgtggaaggcatcaaccagattgttactggcgacatgatctccttgtctgagcaggagcttgttgactgtgacacttcatacaaccaggggtgcaatggaggtttgatggactatgcgtttgagttcatcatcaacaacggcggaatcgacaccgaggaggattacccttacaagggcacggacggacggtgtgatgtcaacaggaaaaacgccaaggttgttactatcgacagctatgaagatgtaccagcgaacagtgagaaaagtctgcagaaggcagttgcgaaccagcccatcagtgttgcaattgaggctggtggcagagcatttcagctctacaactcgggtatcttcacaggaacctgtggaacagcgttggaccatggtgtcacggccgtcggctacggcacagagaacggcaaggactactggatcgtgaagaactcttggggcagcagctggggcgagtccggctacgtcaggatggagcgcaacatcaaggcgtccagcggcaagtgtggtatcgccgttgagccgtcgtaccctctgaagaagggcgccaaccccccgaaccctgggccgacccccgcttcccccacccacgcgcccaccgtctgcgacaactactactcgtgccccgacaggaccaccttgctgtgcatctatga

SEQ ID NO: 261125 - DNA, 1066 bp, Zea mays
ccttctcgtccgcccacgcgtccgcccacgcgtccggaatcatctgccttgtactggtgactaatcatcttttcctggcctctccgggtatcttcacaggaacctgtggaacagcgttggaccatggtgtcacggccgtcggctacggcacagagaacggcaaggactactggatcgtgaagaactcttggggcagcagctggggcgagtccggctacgtcaggatggagcgcaacatcaaggcgtccagcggcaagtgtggtatcgccgttgagccgtcgtaccctctgaagaagggcgccaaccccccgaaccctgggccgaccccgccttcccccaccccgccgcccaccgtctgcgacaactactactcgtgccccgacagcaccacctgctgctgcatctatgagtacggcaagtactgcttcgcctggggctgctgcccgctcgagggcgccacctgctgcgacgaccactacagctgctgcccccatgactaccccgtctgcaacgtcaagcagggaacctgcctcatgggcaaggacagcccactgtcactgtcagtgaaggctacgaagcgcaccctggccaagccgcactgggctttctctggcaacacagctgctgatggcatgaagagcagcgcatgagaaaaacgcagcatggcattaggccgtcaacagccagcatgattagagcccccctgcatgcagaatgatcacccggtcccgtagttcacgacgaaagcatggctgggcggccgctgtttacggatttacttatatcactatagtaggtactcctcctgtacataagcctgaaaaaaaatgggttcagttgtttatggaactctgccaaatttgcttttgcatgccatgtaaaaatccagctagctcttgccaagcttcccctgcgcagttcaacaggactgcgattgatattcggtgtaatggaagtatttatcggaacaatcagcaatgttatgctaaaaaaaaaaaaaaaaaaaaaaaaaaaaaaaaaaaaaaaaaaaaaaaaaaaaaaaaaaaaaaaaaagggggggggggcg

SEQ ID NO: 261126 - DNA, 1182 bp, Zea mays
ctagccttcccgttcctgcatcgcggccctagccctcgcgccgccgccgccgtgcccagcgctcgagctcctcgcctgccgcgagctcgcgccgcaacgccaccatgaagttcaacatcgcgaacccgtctaccgggtgccagaagaagctggaaatcgatgacgaccagaaactacgtgccttttatgaccgaaggatctcccaggaggtcagtggtgatgctctgggtgaggagtttaagggttatgtcttcaagatcatgggtggatgtgacaaacaaggcttcccaatgaagcaaggagttctgacttctggtcgtgtccgccttctgctccacagaggcactccctgcttccgcggttatggcaggcgtaatggtgagcgcaggaggaagtctgtccgtggttgtattgtgagccaagacctatctgttatcaacttggtaattgttaagaagggtgagaacgatctgcctggtttaactgacactgagaagccaaggatgaggggtcccaaaagggcctccaagatcaggaagctgttcaatcttgcaaaggatgacgacgtgcgcaagtacgtgaacacgtaccgcaggacattcactaccaagaatggcaagaaggtgagcaaggcacctaagatccagcggcttgtgacccccttgaccctccagaggaagcgtgctagaattgctgacaagaagaagaggatcgctaagaagaagtctgaggctgctgagtaccagaagcttcttgcccagaggctgaaagaacagagggaccgccgcagtgagagcttggccaagaggaggtctaagctttctgccgccgccaaggcttctgctgccacctctgcctaagaatgatcagtgctttgagatgttttcaaggcctattttgttacagcttataagtaccttatgctgccctggctgtgttgcatcagtcgaccctccctacttagacttatgagtaattgttgcaattttgtatggacatggtactggcttgtcgggattttttgagtaccagaggtttgatatgttgttttattctgtgaacgtcagctagccttgttcttttgtctgcagtctgcaccatatgttgaactgctggattttttctgcttggaaatatgaaacgttaaccttgaaaataaaaaaaaaaaaaaagggcggccgc

SEQ ID NO: 261127 - DNA, 550 bp, Zea mays
cctattcgtccgcggacgcgtgggcgcccacaggacaggacacacagagccgagccaccccacccaccatcggcgaccagcagccagccgcgggagcagctgtttaaagacaccgagtcggagtcggacggaggactggcaggcacaaccgaagccaccgcttctagttctcgggttcatcgccagcaatccagaccacataatgggacagccggtgacgaggaggagggagagggacgcggaggcggagctggacctgccgccggggttccggttccaccccacagacgacgagctggtggagcactacctgtgccgcaaggcggcggggcagcgcctccccgtgcccatcatcgccggggtggacctgtacaggttcgacccgtgggacctgccggagcgcgcgctcttcggggcccgcgagtggtacttcttcacgcccagggaccgcatgtaccccaacggctcccgccccaaccgcgccgccggcgacgggtactggaaggccaccggcgccgacaagcccgtcgcgccgcgcgccgccgcccgc

SEQ ID NO: 261128 - DNA, 550 bp, Zea mays
gttcagtcttggcgtcatcgaatcaatggaacatgaagttagaagcacactgagatccagtggcttgtgaccccttgaccctttagaggaagcgcactagagtcattggcaagaagaagaggatcgccaagaagtctgaggctgccgagtaccaaaagcttcttgctcagaggctgaaggaacagagagaccgcgagagcttggccaagaggaggtccaagctttctgccgcttccaaggcttccgctgccaccgccgcttaagaatgttcgatgctttgagatgtttcaagacctatcttgttacaccttaaataccttatgctactctgattgtgttgcaacttgcaactgcccctgtacttgatagatttgtattagatgctcaagctacagagggtaggttcctaattatgaccatatgactatgtactaaattatatatctgttgctaagttacaatacatacaaaataagtttactccgaccatcttgtagaaaaacaagttatagtgactaaggatatctgaattgctcctatgttacttttt

SEQ ID NO: 261129 - DNA, 586 bp, Zea mays
  unsure (1)..(586): unsure at all n locations
aaaaacggggcggacccacgcgtccgcccacgcgtccgnggacgcgtgttcacactttcagatccgagctaaccaccgtcgacgtgcgccagccgccagcagccgagccggagcgaccttttcttttttcttttacacagcgggacggagaaaggagtcaggcagccaaagccacccaccgcttttaccgatcggcgttgccgccaccgctagcattgtcggcttcagctccatccaaatccaccgccagcaagcaagcaagcaagccggcgccatgggtctgccgatgaggagggagagggacgcggaggcggagctgaacctgccgccggggttccggttccaccccaccgacgacgagctggtggagcactacctgtgccgcaaggcggcggggcagcgcctccccgtgcccatcatcgccgaggtggacctgtacaggttcgacccctgggacctgccggagcgcgcgctcttcggggcccgcgagtggtacttcttcacgcccagggaccgcaagtaccccaacggctcccgccccaaccgcgccgccggcaacgggtactggaagggcaccggcgccgac

SEQ ID NO: 261130 - DNA, 598 bp, Zea mays
cgcaggacattcactaccaagaacggcaagaaggtcagcaaggcacctaagatccaacggcttgtgacacccttgaccctccagaggaagcgggctagaatcgctgacaagaagaagaggataactaagaagaagtctgaggctgctgagtaccagaagcttcttgcccagaggctgaaggaacagagagaccgccggagcgagagcttggccaagaggaggtccaagctttctgccgccgccaaggcttctgctgccacctctgcttaagaatgttcagtgttttgggatctttgtaaggtctatcttgtaacggcaaaagtgttttgggatctttgtaagctccatagttcacatcacttaagtgtttctgctagtagtggatccacaactatttgcttgcttggctctgagtcacacctgaccgatcaatgcaggtgtcactttgcttttaactgtttacatataaagagtcgagtttcgcacgtggccacctgggtcctgattaatctacccatatagctacgttgggtttagatgcttaggcattcttgtaaattgttttcttaaaactagttttgtttctcagagatttaat

SEQ ID NO: 261131 - DNA, 465 bp, Zea mays
aaaaaaatgggttcagttgtttatggaactctgccaaatttgcttttgcacgccatgtaaaaatccagctagctcttgccaagcttcccctgcgcagttcaacaggactgcgattgatattcggtgtaatggaagtatttatcggaacaatcagcaatgttatgctaaaaaaaaaaaaaaaaaaaagggcggcggcggcggcggctggagggactgatgtgtggccccatcctggcttcggccgagttatcttatctatctatagtatcgtgttaccgttcgcttctgtcaccgtgttagtgtccgttctacctttggattaggtgttggtaccccttttgttcgctttggttgctcccgctatgaaacgagacgagagaagaatgagcaaggtttttgttcgcatctattgaaaaaaaatgatattgatatattgttcccctgtctgttgctggattgttgtgt

SEQ ID NO: 261132 - DNA, 285 bp, Zea mays
tcgtgggtcgatacaagcctcgtagcggctacggcggtcggcgcgagggtggtggtggcggctacggcggcggcggcggcggctggagggactgatgtgtggccccatcctggcttcggccgagttatcttatctatctatagtatcgtgttaccgttcgcttctgtcaccgtgttagtgtccgttctacctttggattaggtgttggtaccccttttgttcgctttggttgctcccgctatgaaacgagacgagagaagaatgagcaaggtttttgttcgcatc

SEQ ID NO: 261133 - DNA, 277 bp, Zea mays
gtcactattgacagctacgaagatataccagcgaacgatgagaagagtctgcagaaggcagttgccaaccagcctgtcagtgtcgcaattgaggctgctggcacagcatttcagctctacagctcgggtatcttcactggaagctgtggaacggcgctggaccatggtgtcacggccgtcggctacggcacagagaacggcatggactactggatcgtgaagcactcatggccccaacccgccgaaccctggccccacccgccgtccccgaccccgg

SEQ ID NO: 261134 - DNA, 293 bp, Zea mays
cttgcccatgaggcaggttccctgcctgacgttgcagatggggtagtcatgggggcagcagctgtagtgatcgtcgcagcaggtggcgccctcgagcgggcagcagccccaggcgaagcagtacttgccgtactcgtagatgcagcagcaggtggtgctgtcagggcacgagtagtagttgtcgcacacggcgggcgccggggccgggtacgtgaggatggagcgcaacatcaaggcgtccagcggcaagtgcggtatcgcggttgagccgtcatacccgttgaaggagggcg

SEQ ID NO: 261135 - DNA, 302 bp, Zea mays
ctccggtccgttccgctccttcctccccctatctagctagccttcccgttcctgcatcgcggcggagatgggcgcctccaccacgccgacgcgggcgtccactccttccgcctcgggctcaaccgctatcgccgacctcaccaacgacgagtaccgcgccacctacctcggcgtcaggagcaggccgcagacggagaggaggctccgtgacaggtacctggccggcgacaacgaggacctgccggagtccgtcgactggcgggccaacgagcgccgtcgcggagatcaaggaccagggcagc

SEQ ID NO: 261136 - DNA, 354 bp, Zea mays
ttcctctccgacgccgccgtgcccagcgctagaggagttttttaaaacaagcgggcgctttaacaccaccatgaagttcaacatcgctaacccgtctacctggtgccagaagaagcttgatatctatgaccaccagaaactacgtgccttttatgaccgaaggatctcccaggaggtcagtggtgctgcactgtgtgaagatactaagggttacgtcttcaagatcctgggtggatgtgacaagcaaggcttcccaatgaagcaaggagttttgacttctggtcgtgttcgtcttctgctccataggagcgcatcgtgagccaagacctatctgttatcaacttggtgattgtg

SEQ ID NO: 261137 - DNA, 524 bp, Zea mays
ctcgttctcaggcgcatcattcttctcgcctcgtgtcgctgacttccccaagctttgctgggttgccttcgagcaggagacaggctgtgtagtgtagtctagtgctaccaggatcggatcagcggctgctgcgcttcagttgccgccggcggcatgagggtggtggtgacgggcgcgacggggtacctgggaggccgcctgtgcgcggcgctggccggcgcgggccacgccgtgcgcgcgctcgtccgccactccagcgacgtctccggcctgccccgcgacatcgagatgacctacggcgacgtcaccgacgccgagtccctcgccgtggccttcgacggctgcgacgtcgtgttccacgtcgccgcggccgttgagccgtggttgcccgacccctccgttttcttcaaagttaatgtacgtggacttgagaatgtgttgaaggctgtcaagagaacaccaactgtgaagaaagataatctacacatcttctttctttgcaattggtccaactgatggttatg

SEQ ID NO: 261138 - DNA, 2825 bp, Zea mays
  unsure (1)..(2825): unsure at all n locations
ntccggagattctgaccacatttccaagagaactagaccggttggcatgtctgaggagatgaatcggtgggtgaacatgctgcctgtgacttatccacagagccataattaccaacaagatgatttccacaaagctgttgcacggaccttgagccaaggatcagcacctatgagcatggatttccatccacttcaacaaactcttcttcttgttggtaccaatgttggcgacattggattgtgggatgttggtaccaaagagagactcgttgtaagaaacttcaaagtctgggaccttggtaaatgtacaatgaccctacaggcagcactggttaaggacccagctgtgtcagttaatcgcataatatggagtcctgatggaaccttgtttggtgttgcttattcaaggcatattgtacaaatttattcctataatggtggcgacgatattagacaacacttggagattgatgcacatattggtggtgtaaatgacattgcatttgctcatccaaataagcagttatgtataattacatgtggagatgataagacaattaaggtatgggaggccaccagtggagctaagcaatttacatttgaaggacatgaagctcctgtttattcagtttgtccacattacaaggaaaatattcagttcatcttctcgactgctttagatgggaagatcaaggcatggctatatgataatatgggatctagagttgactatgatgcaccaggtcattggtgcactacaatggcatatagcgcagatggttcaaggttattttcatgtgggactagcaaggatggtgaatcacatctagtagaatggaatgaaagtgaaggagcagtgaagagaacatatcagggattccgtaagcgatccatgggtgtcgtgcaattcgataccacccggaacaggtttttggccgcgggggacgaattcatgattaagatatgggacatggacagcacgggtcttctgactaccattgatgctgatggtggcttaactgcaagtccacggatacgcttcaacaaggagggaactctattggctgtctccactgctgacaatggtatcaagatcttagcaaatgctgatggacttcggttgctgcgcacactggaaaatcgttcttttgatgcttctcgtaatgcatctgaggctgtaacaaagcctctaataaatcccttgactgctgcggcaaatgcagctgcagcaagcagttcaggagctggtgctccgtcagctataactgcaatgaatggtgatagcagaagtttggttgatgtaaaacctagaatagctgatgagtcactggacaagtcaaaggcgtggaagcttatggagataactgagtcaactcagtgcagatcaattaaactggcagacaacatgagaacgagcaagatctcgagattgatttacacaaactctggtcttgctatcttggctttaacttcaagcgctgttcatctactctggaaatggccacgcagtgatcggaattctggaaaggcaaccgcaagtgtatctcccactctatggcaaccaccaagtggcatcttgatgactaatgacacgactgacaataatcctgaagaagctgttcactgctttgctttgtcgaagaatgattcatatgtcatgtccgcttctggaggaaaaatctctctgttcaacatgatgactttcaagacaatgacaacatttatgcctgcaccgccggcagcaacttttcttgcatttcacccccaagataacaacataattgcaattggaatggatgactcaaccatccaaatctataatgtccgaattgatgaggtcaaaagcaagctcaggggtcactctaagagaatcacgggtcttgccttttcaaatgtgctaaatgtcttagtctcttccggagctgatgctcagttatgtgtttggaacacggatggatgggaaaagcaaaagaacagatttttgcagataccgtcaggtcgccaatctaatatcttggacactcgtgttcagttccaccaagatcaaatgcactttcttgttgtgcatgaaacccagattgccatctatgaaactacaaaactagaaccagtgaagcagtggcctgttcgagagaattcacctccaatcacacatgctgcattctcgtgtgacagtcaactgatctatgcaagctttatggatgccactgttggcatatttaatgcatcgagtttgagacttcaatgtcggattcttccagcttcgtatctccccccaaatatcagtccgagtgttcatcctgttgtggttgcggcacacccttcggaagcgagtcagtttgctctagggctgactgatggtggtgtttttgtgttggaacctttggaatcagatagaaaatggggaaatcctccaccggtagagaatgggtctgctagcaacttgtccacaccgcctcctaatggagcttcaagttctgaccaaccagaaagatgattaagaagttggaactggtagatttttcgtggcacgagtctaaccaagaagacagggcttcaaagggtggtgcgactaaccttggcagataggttccaagggagccggacaatgcgctcaataaaaataagttcaacagaagtttgtccgttgcttgtataaatatttgtattgactatcgagtgaggagtcctagtatttcatttttgctttgtttgcggtgctgtgaaaaggatcagtagataagctgtagtacaacaactatcagactggctgtacttacctatatttatgactattagttaatgtatgttgtttcatttgcctt

SEQ ID NO: 261139 - DNA, 544 bp, Zea mays
cagtttgctctagggctgactgatggtggtgtttttgtgttggaacctttgaatcagatagaaaatggggaaatcctccaccggtagaaaatgggtctgctagcaacttgtccgcaccgcctcctaatggagcttcaagttctgatcaacctgaaagatgattgagaagatggaactggtagatttttcgtggcatgagtctaaccaagatgggcttcaaaaggtggtgcaactaaccttggcagatcggttccaagggactcggacaatgggctcaataaaaacaagctcaacagcagtttatccgttgcttatatatatttctattgactgtatcgagtgaagaggatagttctagtatttcattttgctttgtttactgtgctgtgaaaaggagttcttatcagtagataagctgtagacaactatcagtttggctcctacattttatgacttagtgaaagtatcttgtttcaaaaaaaaaaaaaaaaaaaaaaaaaaaaaaaaaaaaaaaaagggcggctgctcgcgatctagaactagt

SEQ ID NO: 261140 - DNA, 1619 bp, Zea mays
gcgcgcttctgcacaccgcacgggcacgcacgaacgcgctcccaccccctcccgccgccaccgccgccaaaaccccggcccgacttggcgtcctccgccaacctcctcctgggcagcgccggcggggggatatggcatcggaggacgtggtgggcaagagcaggggcgacacggccgtcaccaccatcgtcaacctggcggaggaggccaagctcgcgcgcgagggcgtcaaggcgcccggccaccagatcctcaccatctgcaagtcgctcgtcgccggcggcgtagcaggcggagtgtctcgtactgctgttgctccacttgaacgattgaaaatattgcttcaggttcaaaatccgcacagcatcaagtacaatggtactgttcagggtctcaagtatatctggagaacagagggcctccgtggacttttcaagggcaatggtaccaattgtgcaaggattgttccaaattctgccgtgaagttttttagctacgagcaggcgtcaaagggaattctgtgggcctaccgtcaacagactggtgaagaggatgctcagcttactccgctcttgcgccttggagctggagcatgtgctggtatcatagctatgtctgctacttacccgatggatatggttaggggaaggatcactgttcagacagacaaatctccctaccagtaccgtggtatgtttcatgcactgggtacagtctaccgtgaagaaggctttcgtgctctatacaaagggtggcttccatctgtaatcggagttgttccatatgttggtctcaacttcgctgtatatgagtccctcaaagactggctactccagacaaattcatttggccttgcaaatgacaacgagctgcacgtagttacaaggcttgggtgtggagctgtggcgggaaccattggccagactgttgcatacccgcttgatgtcatcaggagaagaatgcagatggttggttggagccatgctgactctattgttactgggcaaagcaaagaagcactccagtacaatggcatgatcgatgcattcaggaagactgttcgtcatgaaggagttggtgctctgtacaagggtcttgtgccgaactcagtcaaggtggtgccctcaattgccattgcatttgtgacttacgaggttgtgaaggatgtgctaggagtagagatgaggatatcagactgaggatggtcgttttcaactgctatttttgtaggctttgggaagttgtgttttttttttgtaggcagggcgggtagaagggtatgaccgcggctccattcagcatcaggccctctcagcccatgttggatatatatcatatatcctgccactggcttcagtcaggtcctagaattgtttgctgggtcgtgcaaaaagtaataagtcggctgtaaagcttattaagcatctgcctaactcatcaaaagaaatctattccttattgatgatgtaccgagattttcgaacttaaagcggtactacgtgctgctaacagttgattaatgatttttctttgcctctatcaaaaaaaaatcattaatcaactgttagcggtactacgtgctgctaacagttgattaatgatttttctttgcctctatc

SEQ ID NO: 261141 - DNA, 504 bp, Zea mays
gttgcgctgttcggtcgccgctgagcggagctgatgcgccgcgcctcctgtgagacaatggccacttctccccaagcgaaaaaaatctgctagaagaccttagagggttttaacattgggatggatatttgggcccttaccttgctttaagtggagattcagttttctgttttcacttaatatgacaactgaagagcgaaagactttgaagggcacagagtcttcagctccttctcttcctcctgatggaggagtcagcaaggaacctcaaaaagggggggagattatccaatgggaggacaactggtccagcacgccgctcatccaagggcaactggactctagaagaggatgacatacttcgcatggctgttgatacctacaagggacaaaattggaaaaagatagctgaatgttttccaggtaggactgatgttcaatgtttgcttagatggcagaaggttttgaaccctgagcttgttaaagggccttggtccgaagaag

SEQ ID NO: 261142 - DNA, 751 bp, Zea mays
gagatgacgtcgccatggatgtttcagaaaatggccatggcggttcttcattctgcaagaagccgaaggaaggtgatgttcatgtctcttccagttcaactgaagtggcaggaaccattccagagatgaatggaggcgatcatcatatacctggaagctccttttcatgtctagtgaagatctatgacatgcctgatagtcaagtgaaattaaatgatgttattgagtttattggcgtatatacatttgacccagaacttgctgctcctagtgacaacccagatgatataatgttagacctcatcgaagatgtaacagttcagttgcctccgagcaaggtgccacgtcttcactgtttggtatggagaaaattatcattccatgattttatttcaaggcctgttgttgagccttcacccagcctgttaagaggcattcggcaatctttgctctcacacctcacccttgtattaggcaatgacgagcttgcagcccagtgcttgctgttgcatcttctatccagacttcgtaatagggtggatgtggtcaccgttggcagactctccttgaatttcactggcttcaacagggaaagtgcttccatatttgggaatcagctgtattctttgatccagaaattggtgccgtattcacaagccatacctctgtcaattgagtatctcaacacagctacacttcaacctagaaaggacaacaagtcaggaaggttggtcacaggagttctgcagct

SEQ ID NO: 261143 - DNA, 564 bp, Zea mays
aaaaactagggtgagagaagaggaaaaggagaggtggccaggtggtggtgggggacgaccggacgaggaagtagtggcctgtgcgtgccgtcgcggaggagggggtggcgatggagaagggcgcgggcacgcggcggcggcggctggtggaaaggggatcggatcgccttgccttcatcaccggccagacgcgcagcctctcctgcgacccgattccagattcaccacttcgttcacagtttgaaggtggcactcgtgatgatgggttcagcgagagaaatcagttgcagaagtcagaacctagcgacctggtacctggatttcaagatcctggtactcgccaaggagtcaaggctagaaccttaagctatgatgccctggtacctggatttcaacgagctggtggccgccaagaaatgaacgctagtaccttgagctatgaagacgagcttttccgcaaatttaagatgggcagttcagtccctgaaatttagccagtaaatcaaacaccattgtgtacccatgatctggaaactgtgagtaacaatgcaatccatgctggag

SEQ ID NO: 261144 - DNA, 638 bp, Zea mays
tcttccacgcgtccggggcatcttattgtgtactaatgtggctgcccgtggacttgatactcctgacgtgaaggaaggcagtgttcatgtctcatccagttcaaatgaagtgacaggaaccattccagagacgaatggaggcgatcatcatatacctggaagctcttttcatgtttagtgaaggtctatgacatgtctgatagtcaaatgaagctaaatgattttatttcaagccttgttcttgagaggatggtcaagattaatttgagtagggtgccattgcatttgtgacttacgaggttgtgaaggatgtgctaggagtagagatgaggatatcaggctgaggatggccgttttcaactgctatttttgtaggctttgggaagttgtgttttttttgtaggcagggcgggtagaaggatatgaccgcggctccattcagcatcaggccctctctggcttcaggtcctagaattgtttgctgggtcgtgcacaaagtaataagtcggctgtaaagcttatttaagcatctgcctagctcatcaaaagaaatctattccttattgatgatgtaccgagagtcttgaacttaaagcggtactacgtgctgctaacagtccattaatgatttttctttg

SEQ ID NO: 261145 - DNA, 488 bp, Zea mays
acggctggctggagccatgctgactctggtgtttctgggcaaggcatagaatctctccagtacaatggcatgatcgatgcattcaggaagactgttcgtcatgaaggagttggtgctctctacaagggtcttgtgccgaactcagtcaaggtggtgccctcaattgccattgcatttgtgacttacgaggttgtgaaggatgtgctaggagtagagatgaggatatcagactgaggatggccgttttcaactgctatttttgtaggctctgggaagttgtgtttttttttgtaggcagggcgggtagaaggatatgaccgcggctccattcagcatcaggccctctctggcttcaggtcctagaatgtgtttgctgggtcgggcaaaaagtaataagtcggcttgtaagcttattaagcatctgcctaactcatcaaaagaaatctattccttattgatgatgtaccgagatttttgaacttaaagcg

SEQ ID NO: 261146 - DNA, 1125 bp, Zea mays
cggacgcgtgggcggacgcgtgggcggacgcgtgggcggacgcgtggggtcaaccagggtcttctatcacctcaattatcatcgttactgtttttagtcgttggcatttcaatggctctgacaccatggttagctgctggagggcagtttctggcatcaaaatttgagcagcatgatgtgaggagtttattgcctgtggaaagtgagactgacgatttgcacgaccatattattatattaggctttggacgtgttgggcagatcgttgcgcaactcctgtcagagcggttaattccttttgttgcccttgatgttagaagtgatcgggttgcagttgggcgtgcacttgaccttccggtatattttggggatgctggaagcagagaggtactgcacaaagttggagctgaaagagcttgtgctgctgcaattactttggatacccctggtgcaaactatagagctgtctgggcattgaacaaatatttcccaaatgtgaagacatttgttagagcacatgatgttgatcatggtgttaatttggagaaagctggtgcaacagcggttgtccctgagaccttggagccaagtcttcagctagctgctgctgtccttgcacaagcaaaactcccaatgtcagagattcaggaaaccatcaacgagttccggaatcgtcatctgtcagagcttacagagttgtgtgctacgtcaggaagttctcttggctatggattttccagagctacgtccaaatcgaagtctttcacctccgacgacgaaagcgaaacagtggatggcgcactagcaatttgaagacgatgagataaaatgggatcccttgatagtactagatcgattgcactgttagtagataagcttgttgcatgtagaaaaatggaataaaaattaatgcaagagctgtcacaaaagtcggcgtgcaattttgtatgttagagtacttatatatttcttctctcccccaaaaaaattgtttgcatacaactcttcccaaagaaaaataatacactctagcagtgcacgtgaaaatgagacccttgtaagcagggaagaaaatagatgtcaaaaaaaaaaaaaaagggcggcagctcgcgatctagaactagt

SEQ ID NO: 261147 - DNA, 480 bp, Zea mays
tgtcagagcttacagagttgtgtgctacgtcaggaagttctcttggctatggattttccagagctacgtccaaatcgaagtctttcacctccggcgacgaaaaccaaacagtggatggcacactagcaatctgatgctgatgagataaaatgggatccccttgctagcgctagattggttgcactgttcagtagataatcctgtttcatgtggaaggagggtggaataattattcatataagagctgtcataaaagttggcgtccaattttgtatgttagacagcttgtttgagagtaatggaggggactgagagggccaaaatattttagggcttgttcggttattttcaattcatatgtattgggagagattgatatagattggaggagatttgatgtactagaaattgaaacttcctcaatccatatagattggagtaaaactgaatatatctttagggcttgttcggttttaggtg

SEQ ID NO: 261148 - DNA, 815 bp, Zea mays
cactacaccaaccaccaagtctgatgcgaacttcatcgaccagtatcttgatttgatggacatcacgagaggcataatctggcgcttccttggaccatggctacaccgaccacggaacaagtgcacaaaagtcatctttggtttagttggcatgcaacgctaaaagaactcgtgaaaggacccctactcctggaaaatactgtggtcgaagaggaggatctcaaaggagcccatcaccttaccgccctcgcagaagggagcgttcgcgctcaagggaacgcagaagggagcgttcgcgttcaagggatcgaagggagcggtctcgctcaagggatcgaagggagcggtctcgctcaagggaacgccgaagggagcggtctcgttcaagggaccgcagggagaggtctcgctcaagggaccgccggagggagcgctcacgctcaagggaccgcagaagggagcgctcacgctcaagggaccggaggggcagttcaccccatggcagaaggcatagagatcggtccaggtcacccaccagcaatgggaaccataaggcagactaggaagcgcttttatggacttgtcgttgattgcgtgaacaaaggaacttgtaacactacctataaactggtcagactgagacggttagcatggatttttagtagtgttgctgtattttgttgtttcatacaagtactctattctgttagctttcggatcgaaatgtcggatgatgatggttgttattgttccggaaatcgtagacatgtcctccagaatacctatgaacctatggcatactcgtgtgtctgctt

SEQ ID NO: 261149 - DNA, 889 bp, Zea mays
gcacctgcccggactgacttgccggaccgactcacgcgtctttgctctcgaacttcaatgatgctatgctctgttcagtttaaaactctggtgaaggtccttgaggtgaggtatgttatgacttatgagtagaagattacaaatatgctctttccctatgatggaagagtatattctgtaacagacaagcctggaaaccccactcaggtgaaatgtgccagagtaaattgaaaggggatcatttatgatgtgttctgatgcaatcctaatgtggtgaatggggaaaacctcttctgtggctcttcaactggggtcttaactctcatctcgtgctgacttcctgaccttccagtttaacatggtgctgggctgcctctacgtcaacctggttggtccaggctgtgcagtctccaaccatggttgtctccaaaggatgtgcagctgacgtgatggtgcttatcaccacaccctcagagctcatcaccacttgccgtcttcacctcgctcaccgacaatgcatacatgctacatcaacacgacggctgtcgccatagagcgagcttggagtcttgatgtgcatcgggtcaccaccatcgccaccgcaacttctaccacaaccggcatcgtcaacatcacgctcgtgatccaacaggctctacgatttgtctgctacgactaagcttacatggtgcatgctgctgccatgtcacgacaccaaccaccaagtctgatgcgaactgcatcgaccagtatcttgatttgatggacatcacgagaggcataatctggcgcttccttggaccatggctacaccgaccacggaacaagctaaaagaactcgtgaaaggacccctactcctagaaaatactgtggtcgcagaggaggatc

SEQ ID NO: 261150 - DNA, 877 bp, Zea mays
cggtctttgggctgacccgtgcgggcgtgcggctcctcgcggacagctccagactccagagccgcctcttcgccctctcgccatcggcaggctacggtggctgcttccccgagcctgcaggtagaccaccttgtgttgattcctcgagtcttcacctggtgcttccgtttgcagcttcatttttaactaagatgtcacaagccaaggaagtgaggtacactgcacggtctattacacctcctgctgatagaaatggcacttcaaggtcgcctcctccaaagagacgcagcccttcaaggtcacctccaccaaagagtgcttcacggtccccacgtccaaggagtccaaagagacgcagcacttcaaggtctcctcctaggagacgtggtagatcaaggtcaagggataggagtcggtccaggagcccagatgatagaaatccagggaataacctttatgtaactggattgtctactcgtgtaacggaagatgatcttgagaagttctttagtaaagaaggaaaggttaagaactgtcatgttgttcttgatcctaggacaaaagaatcccgtggctttgccttcgtgactatggatactcttgaaggtgcaagacgctccatcaagtatctgcaccgcactgtacttgaaggtcgcctggtcactgtagagaaggctaaaagaactcgtgaaaggacccctactcctggaaaatactgtggtcgaagaggaggatctcaaaggagcccatcaccttaccgccctcgcagaagggagcgttcgcgctcacgggaacgcagaagggagcgttcgcgttcaagggatcgaagggagcggtctcgctcaagggatcgaagggagcggtctcgctcaaggga

SEQ ID NO: 261151 - DNA, 646 bp, Zea mays
tttttcacctcgctcaccgacaatgcatacatgctacatcaacacgacggctgtcgccatagagcgatcttggtggcttgttgtgcatcgcgtcaccaccatcgccaccgcaacttctaccacaaccgccatcgtcaacatcacgctcgtgatccaacaggctctacgatttgtctgcttcgactaagcttacatggtgcatgctgctgccatgtcacgacaccaaccaccaagtctgatgcgaacttcatcgaccagtatcttgatttgatggacatcacgagaggcataatctggcgcttccttggaccatggctacaccgaccacggaacaagtgcacaaaagtcatctttggtttagttggcatgcaacgtaaagtttaatctacctatatcacaagattttgatcaagagttgacaagcttaatggaccatgactatttttcaccaaaagggcaaagtttagtttcattatcaattatattaaccactctgttcaaatttaagatcgaattgggttcttcctttatttagcatacttgaagttcattgcttgtttcattcgtaccaactaatacatttgttcacgattttattccaggctaaaagaactcgtgaaaggacccctactcctggaaaatactg

SEQ ID NO: 261152 - DNA, 579 bp, Zea mays
cgccctctcgccatcggcaggctacggtggctgcttccccgagcctgcaggtagaccaccttgtgttgattcctcgagtcttcacctggtgcttccgtttgcagcttcatttttaactaagtctgtaatttattggctgtttatctgagtgacactacactctctgttttttcttattagatgtcacaagccaaggaagtgaggtacactgcacggtgccgggaacccccgatggcacctcctgctgatagaaatggcacttcaaggtcgcctcctccaaagagacgctgtccttcacggtcaacttcaccagagagtgcttcacgggctactcaatcacagcgaccgactagccacgtgtgttcaaggtctcctcctatgatacgtgcaagatcaaggtcaagggataggagtcggtccaggagcccagatgatagaaatccagtgaataacctttatgtaactggattgtctactcgtgtaacggaagatgatcttgagaagttctttagtaaagaaggaaaggttaagaactgtcatgttgttcttgatcctaagacaaaagaatcccgtggcttt

SEQ ID NO: 261153 - DNA, 588 bp, Zea mays
  unsure (1)..(588): unsure at all n locations
gtcctagaaaggaggaagaaaaactagaaaccctagcgatgctgcagatccgcctgagcaagattggctcgtcggactccggcgctgccgccaccggctcggcagccgccgccggtgccgccgccgctgtggggtcggctgcggcgctgggcggcggcatcccggaatcggtcaccgtggcatgccccgaccacctggtgatcgcggacctacccgtcgcgaagagcctcggtgccgtcacgacctccgctgccgccgccacgcgcgccatcggccgtcgctcccgtcgcccgctcggggagcgcgtccacatctgctcccgctgcgagttccccatcgccatctacggccgcctcatcccttgtgaacatgccttttgtttaacctgtgcaagaagtgattccagctgctatctttgtgatgagcgcattcagaagatacaaagtgtgaaaatgatggaggggattttcatctgtgctgcaccaatgtgtctcaaatcgttccttaagaaagcagatnttgagttccatgtgcctgatgtccatgccaaccttctccaactaatctagagaaggaagaaagacgcat

SEQ ID NO: 261154 - DNA, 507 bp, Zea mays
agagcgttcccccgcggctcctccacggcaagagctcgcgtgcgtacggctccatctgggagtccaccgtcaggaacgtcaagttcgtgtcggacaagacggtgaagccggtgtacattatcacccccaccgaggccgcgcacatccaggccaccgtggcgtgcgggcgcaagcacgggctgcgggtccgcgtgcggagcggcgggcacgactacgagggcctgtcgtaccggtccgccaagccggagacgttcgccgtggtggacctgtccatgatgcggcaggtgcgcatcgacggcaaggccgccacggcgtgggtggactccggcgcgcagctcggcgagctctactacgccgtggcgaagatgacccccagcctccggttcccggcgggcgtgtgcgccacgatcggcgtcgggggccacttcagcgggggcgtgcttcggcatgctgctgcgcaagtacggcaccgtctgtgacaacgtcatcgacgccaaggtggtggac

SEQ ID NO: 261155 - DNA, 662 bp, Zea mays
gacccacgcgttcgcccgcgcgttcgcgactagtgagcgcgatggaggcggcgctgcgcgggatcagggccaagctgacggagcaccgggagaaggtgatcagcggtctgctgctgggctcggcggtggcgctggggtggaagtcgtcggagcagcagcgcgagatccagagcctgttggccgagaagagctctctccgagccaccaacgcctctatgtccgccgccatgtgggcctggcgggaggagctcttcgccctcgccgccgcgccctcctcccccatttccgcgtcccggctccgccacatctacggcgaggaggagcccgcgccgctcgcgcccgcgcccgcgccgtcaggagcaaatgatgggaaggaagaggaaccgatctccatagcctgaactctttccgcacttttttccagtcgagcgtgtgccgtccgtgtacatcatggccggctccctgaaggctaggaggatgctttgctagataatcacgagtacctgtgcgctgaatcgcaaataattttcatggacctcacctaacgaaaggtacagtggagctgtaccgttaccgtggactgacataaagtctggtcacacggaatgttatatttcggtgctgctactatgatgatgatgagcttcaggctctagattttt

SEQ ID NO: 261156 - DNA, 1846 bp, Zea mays
caactcatgtttatttgagtttcaattattttcagggagtttttatcaattgtgcccgcccggtcccatttggactcaccttgagtgaggctgctgcatatggtctacccatggttgccacccgaaatggtgggcctgtggacatacatcgggttcttgataatggaattcttgttgacccccacaatcaaaatgaaatagctgaggcactttataagcttgtgtcagataagcacttgtggtcacaatgtcgccagaatggtctgaaaaacatccataaattttcatggcctgaacattgccagaactatttggcacgtgtagtcactctcaagcctagacatccccgctggcaaaagaatgatgttgcagctgaaatatctgaagcagattcacccgaggactctctgagggatattcatgacatatcacttaacttaaagctttccttggacagtgaaaaatcaggcagcaaagaagggaattcaaatgctttgagaaggcattttgaggatgcagcgcaaaagttgtcaggtgttaatgacatcaaaaaggatgtgccaggtgagaatggtaagtggtcgtcattgcgtaggaggaagcacatcattgtaattgctgtagactctgtgcaagatgcagactttgttcaggttattaaaaatatttttgaagcttcaagaaatgagagatcaagtggtgctgttggttttgtgttgtcaacggctagagcaatatcagagttacatactttgcttatatctggagggatagaagctagtgactttgatgccttcatatgcaacagtggcagtgatctttgttatccatcttcaagctctgaggacatgcttaaccctgctgagctcccattcatgattgatcttgattatcactcccaaattgaatatcgctggggaggagaaggtttaaggaagacattaattcgttgggcagctgagaaaaacaaagaaagtggacaaaaaatatttattgaggatgaagaatgctcatccacctactgcatttcatttaaagtgtccaatactgcagctgcacctcctgtgaaggagattaggaggacaatgagaatacaagcactgcgttgccatgttttgtacagccatgatggtagcaagttgaatgtaattcctgttttggcttctcgctcacaggctttaaggtatttgtatatccgatggggggtagagctgtcaaacatcaccgtgattgtcggtgagtgtggtgacacagattatgaaggactacttggaggcgtgcacaaaactatcatactcaaaggctcgttcaatactgctccaaaccaagttcatgctaacagaagctattcatcccaagatgttgtatcctttgacaaacaaggaattgcttcaattgagggatatggtccagacaatctaaagtcagctctacggcaatttggtatattgaaagactaaatctttgatctttgctggtcagcagaggaatcaaagcagtaggaatgtaggatcgaggagagtgacaggacttcccctctgtgcacttcgccgaaaagtaataatgggattgctatgcatggcccttgttgtacactagaaaattgggcacgcaaacttgtgtcagtttttccgctgttgcgaaattcagtgatggtgtttttgtaactataccaacctgtgtcagttttgccgttgttgcaaaactcagtgatggtgttttttgtaattattatacatccgaataataagactggtgtttccagacagactatgcaagctaaggggaaatcacgattttcctagatcaaatatgtaatatgttcttttccgatgcattgtgcctg

SEQ ID NO: 261157 - DNA, 1023 bp, Zea mays
  unsure (1)..(1023): unsure at all n locations
ttggacgcgtgggcggacgcgtgggggcgggggcgcgtataaatcccggtaaaattcccccgacgcgaggcctcaaatcgctctctgcccccgatcaccggtcgcctcccttccgctcccctgcctgcctaatccctccggccaccccgaaaccgctcgctcgctcgctcgctccccgcgcccagagacaagcccggagaccatggcggaccagctcactgacgaccaaatcgccgagttcaaggaggccttcagcctcttcgataaggacggcgacggttgcatcacaaccaaggagcttggaactgtcatgcgttcactgggtcagaacccaacggaggctgaactccaggacatgatcaatgaggtggatgccgacggcaatggcacgatcgacttccccgagttcctcaacctcatggcccgcaagatgaaggacaccgactccgaggaggagctcaaggaggcgttcagggtgttcgacaaggaccagaacggcttcatctctgccgcggagctccgccacgtgatgaccaacctaggcgagaagctgaccgacgaggaggtcgacgagatgatccgcgaggccgacgttgatggcgatggccagatcaactacgaggagttcgtcaaggtcatgatggccaagtgagtaaagcctgcggtaatggtatagtaaccccgctcggaaggaggaaaccgtgcgttgcatattagtaaggcaatgcaatgcagctcttgtttccttcttcccgtgaagaaaccgtactagctgtagctgctgaacgtttgagtccctctgctgccacccttatctccattgtgccgtcgaacctccttgcttcccctgtgtgaatctgtacggattttcgtgttctgaacactgattgcagttgaatccagtttgtagttctatttgttcatcgaaaaaaaaaaagaacaactcaataaaaaaaaaaaaaaaaaaaaaaaaaaaaaaaaaaaaaaaaaaaagggcggccgcaccggttttcnaggaccggt

SEQ ID NO: 261158 - DNA, 1049 bp, Zea mays
tgagctaaaacgataaaccagagcccggcctaaatgtgacggccgctctagtggaagcgcgtataaattgggggaaggaaaattccagcggacgagcgctctagccgtttttcctcgtcctcgatccagccccctgccgcttcccgctccgatcgacctgctccctccccaccaccgagcccatggcggaccagctcaccgacgaccagatcgccgagttcaaggaggccttcagcctcttcgacaaggacggggatggttgcatcacgaccaaggagctgggcactgtcatgcgctcgctggggcaaaatcctacagaggctgagctccaggacatgatcaacgaggtcgatgctgatggcaacggcaccatcgatttcccagagtttctcaaccttatggctcgcaagatgaaggacaccgactctgaggaagagctcaaggaggccttccgtgtgtttgacaaggaccagaacggcttcatctcggccgccgagctccgccatgtcatgacaaatcttggtgagaagctaactgatgaggaggtggacgagatgatccgtgaggctgatgtcgatggtgatggccagatcaactacgaggagtttgtcaaggtcatgatggccaagtgagccacagaaccataatctgaaggcagagaagattatgcattgcatattagtcaagatgcaactttttattccatcgacttctagtgaaacattctgctagttgtagttgctgaaaaaggcaatgcagttgctgctttgttcttccctccagtgtgttttcagaactgttgattcatgtgaaactgtaatgattgccctccctgctgtgtcttggttgcagttgaaaccatatgtagctacattccccctcccaccacctccacacatcaacttctgcttcaccttttttagcatcaatggatggccggttgtttttaatgcgatgatctgcagttatcgtggcagaataaaaattaataatatttttattttatatattttttttttttttttatattttttattattttttttttt

SEQ ID NO: 261159 - DNA, 952 bp, Zea mays
cggacgcgtggcgagacgcgtgggcggacgcgtcctcaaatcgctccctgcctctggtcacctcgcttccgctcccggctcccctccggccacccagacatcgtccgttcgctcgccaagagacaggaccggagaccatggcggaccagctcaccgacgaccagatcgccgagttcaaggaggccttcagcctcttcgacaaggacggcgacggttgcatcacaaccaaggagctcggaactgtcatgcgatcactgggtcagaacccaaccgaggctgagctccaggacatgatcaacgaggtcgatgcggacggcaacggcaccatcgacttcccggagttcctcaacctcatggcccgcaagatgaaggacaccgactccgaggaggagctcaaggaggcgttcagggtgttcgacaaggaccagaacggcttcatctctgcggcggagctccgccacgtgatgaccaacctcggcgagaagctgaccgacgaggaggtcgatgagatgatccgcgaggccgacgtcgatggcgatggccagatcaactacgaggagttcgtcaaggtcatgatggccaagtgagtaaagcctgcggtaacggtatagtaccccgcgggaattgaaggaggaaaccaaaccgtgcatcgcatattagaaaggcaatgcaggtcttgtttccttcgttttccccatgaagaaaccgtactagctgtagctgctgaacgtttgagtccccctgctgccacccttatctccatttgtgtcatcgaaactccgtgcttcccctgctgtgtgaatctgtacggctttgcgtgttctggacactgattgcagttggatccagtttgtagttctatttgttcatcgaatctgcccagactcctttggtaccattcaacaggctgatgctttctgtttaaaaaaaaaaaaaaaaaaagggcggccgc

SEQ ID NO: 261160 - DNA, 1028 bp, Zea mays
  unsure (1)..(1028): unsure at all n locations
cggacgcgtgggcggacgcgcgacgtccggtcagaccaatcaacaaagtgacgcgagcacgagcatccatcgtttccccttcttccccatcgcgtgccctcgccgcagccatcttccatggcggaccagctcacggacgagcagatcgcggagttcaaggaggccttcagcctcttcgataaggatggcgacggctgcatcactaccaaggagcttggaactgtgatgcgctcccttggccagaaccccactgaagcagagctgcaggacatgatcaacgaggttgatgctgatggcaatgggaccattgacttcccagagttcctgaacctgatggcaaggaagatgaaggacaccgactccgaggaggagcttaaggaggcctttcgcgtcttcgacaaggaccagaatggtttcatctcggctgctgagctccgccatgtcatgaccaacctcggcgagaagctgactgacgaggaggtcgacgagatgatccgtgaggccgatgttgacggcgacggccagatcaactacgaggagttcgtcaaggtcatgatggccaagtgaggagcgatccccgttatctatgaatgaattgaagtgaaatatcaggcacacaagctgtactttgccatgtcccttttgagtacacatcagtatcatgcaggaggtaatgtctagtagtggtcggtttaggtggtgtagtcatgggaactcgacatcagatacctggtctcttttgattgtgatgttatcttgcattattgctcctgctggagcttttaggatttgttgtaagctcatattttcagggggttttggatcttttgtgcgagtcttgtatctcgtgtacgttgcattgcattgttgtgttatgcttctgctggcttgtcccnnnnaaaaaaaaaaaaaaaaaaaaaaaaaaaaaaaaaaaaaatataaaaaaaaaaaaaaaaaaaaaaaaaaaaaaaaaaaaaaaaaaaaaaaaaaaaaaaaaaaangggggggggcctttttaaagaaccaaa

SEQ ID NO: 261161 - DNA, 992 bp, Zea mays
cggcccacctcgctccccatccgctcaggccaatcaacagaagtgacgcgagcacgagcacacatcccctcccttcttcggttattcctcgttgcgtgccctcgccgcagacctctgccatggcggaccagctcaccgacgagcagatcgcggagttcaaggaggccttcagcctcttcgataaggatggcgacggctgcatcactaccaaggagcttggaacggtgatgcgctcccttggccagaaccctaccgaggcagagctgcaggacatgatcaacgaggtcgatgcggatggcaatgggaccatcgacttcccggagttcctgaacctgatggcgaggaagatgaaggacacggactcagaggaggagctcaaggaggccttccgcgtcttcgacaaggaccagaacggtttcatctcggctgccgagctccgccatgtcatgaccaaccttggcgagaagctgaccgacgaggaggtcgacgagatgatccgtgaggccgacgtcgacggggacggccagatcaactacgaggagtttgtcaaggttatgatggccaagtgaggagcggtccccgtgaaataagtatctatggattgaagcggattatcaggcacacaagctgtactttgtcatgtccctttgagtacgcatcagtgtcatgcaggtggtaatgtcttgtagtggtccgtttaggcggtgtagtcatgggaacgcgacatcagatacctggtttcttttgattgtgatgttatcttgcattattgcacctgtaggatttgttgaagctcatattttccagggttttggatcttttgtgctagtcttgtgtctttgtgtatgcagaggctgagctaggattatggtatgtaagggagccaactaattcatcaatactatatgatgttatcaagcttaagtacttaaaatggaaaaaaaaaaaaggagggcggccgcacaggaggcacccagccgacggacgcgtgc

SEQ ID NO: 261162 - DNA, 824 bp, Zea mays
tttatggatgaaataaatgcaacctataagataatgcgtccaattgaggccgaggaactttgccttgatacatctgttatcataattacacgtaccaggctttgaaatagaacagcaatggggattatatgatggttttgatctaactatggcccggaaactcagagcaagaataaggcgtggtgtgagctgctttggtcgttacatgccccgtatgattgcaatccctcctggcatggagtttagtcatatagcaccacatgatgttgacctcgacagtgaggaaggaaatggagatggctcaggttcaccagatccacctatttgggctgatataatgcgcttcttctcaaacccccggaagccaatgattcttgctcttgctcgtccggatccgaagaagaatatcactactctagtcaaagcatttggtgaacatcgtgaactgagaaatttagcaaatcttacactgatcatggggaatcgtgatgtcattgatgaaatgtcaagcacaaatgcagctgttttgacttcagcactcaagttaattgataaatatgatctatatggacaagtggcataccccaagcaccataagcaatctgaagttcctgatatttatcgtttagctgcgagaacaaaaggagtttttatcaattgtgcattggttgaaccatttggactcaccttgattgaggctgctgcatatggtctacccatggttgccacccgaaatggtgggcctgtggacatacatcgggttcttgataatggaattcttgttgacccccacaatcaaaatgaaatagctgaggcactttata

SEQ ID NO: 261163 - DNA, 699 bp, Zea mays
cgaattccgggtcgaccacgcgtccgcggacgcgtgggggccttcagcctcttcgataaggttggcgacggctgcatcactaccaaggaggtgggaacggtgatgcgctcccttggccagaaccctaccgaggcagagctgcaggacatgatcaacgaggtcgatgcggatggcaatgggacatcgacttcccggagttcctgaacctgatggcgaggaagatgaaggacacggactcagaggaggagctcaaggaggccttccgcgttttcgacaaggaccagaacggtttcatctcggctgccgagctccgccatgtcatgaccaacctgggcgagaagctgaccgacgaggaggtcgacgagatgatccgggaggccgacgtcgatggcgacggccagatcaactacgaggagtttgtcaaggttatgatggccaagtgaggagcggtccccgtgaaataagtatctatggattgaagcggattatcaggcccccaagctgtactttgtcatgtccctttgagtacgcatcagtgtcatgcaggtggtaatgtcttgtagtggtccgtttaggcggtgtagtcatgggaacccgccctcaaaaacctggtttcttttgattgtgatgttataaagcaacattgcccctgtagaaataaaaacaaaaaaaaaaaaaaaaaaaaaaaaaatataagcc

SEQ ID NO: 261164 - DNA, 230 bp, Zea mays
tcgacttctagtgaaacattctgctagttgtagttgctgaaaaaggcaatgtagttcctgctttgttcttccctccagtgtgttttcagccctgttgttccatgtgaacttgtaatccttgccctctctgctgtgtcttgattgcagttaaaatcatatgtagtttcaccccacccgcacatcaacttctgtttcccgctgtttgtatcaatggatggcccgttgttttt

SEQ ID NO: 261165 - DNA, 1793 bp, Zea mays
tgggagctcgccgcctgcggcgccgggccggaacttggctggaccgacgcgtgcgtgatttatacctggatcatcatctgaagcgccacctatctctgcacatagaagagcaactctcatttcatacttccgtgcagctaaagatatggaggaatcttctagtcccttccgtgatggtgcagcaactcaaactccagttgttgaaactgcccctgtggatgcacctactgcagctggagtggcaggacgtccagtagatacttcgtcaaggccagctaaagctaaaatgacggaagaaagagcagttcccaaaccaagcagtgaagtacgcaggcctggaggaagaagaccccttgttcgtcctactcttgaacgaactgaagaacctcatgctgatacagatatatcagctgttgatgcctccacagttcaggacaaaggggggccaccagcagagcaagaaacttctggaattttacctgtgttacagcctttgagtcgtaaacggcttatcacatcttcacagacggtagacagtgcctcgcagggtgaggctaatgatgtcaatcctccatctaagaagcccaagggggaagaatcttcacaagggactagtgaactcaaaagtggtcaaccacctcttggggatgtagcggcacaggttaatgtgcttccagccactgatgacctagatggacaacagcctacagaagagatcgatactgatcaggcacctgagccaatggtagaggttgaggcaacaagggaagaggatgggggtgataaagatgactctggagatgcatcaacggacatcaaaggccaggatgctgatgctaatattgacgcaaatgcaattcctttagaagaagagcatgtagtggcaaagtcagaggcaataattgaatcatttgatgatgaccggaaaacagaagattcgaaggaagatgctcagcgtactactgcaactgatgttgatgatgacatggaggagggagagttggcagaggaacctgaagacaagagtgacgttgatatgtcagagatcgagggtgaggctacagccgaacgtgctgctgtggaaccggaccaaagtcctataacacaacctggtgcagctgatgcctcaccaagcagaactgcagatgcatctcctgctcgtgaaccttcccctagtccggtccaagctggtgcatcttctcgaccccagaatactagcactgcaacagaggcacgtgaaccttcctctaacccagcccaagctggtgcgtcttctgaacagcggaacaccagtactgtagtggaggctgctgaaactcgttccagaacaatcaacttaagtgagagggccagacaaaacaggcaaaccaggtttcaacgcgcacaacaacctggcactgctcggggtcgtggccagcaatctgttacactcaggaaagatgctacgggtcgaggatcaaggggccgcggggggcgtggtcagtcctagtaaagtagattgtcttttctcgtgcagggataattttgtccattgggatagagacccttgtatttttagattgatcgacgaacttcatggggatacagagacccttgtgtttttagattgatcgacgaattttgtctcattggtttttactaaatgttccctgacctgcgtgcgaatccttgtgggttctgagaccgctatatctaatccaaactgttgtgtttgttggtactaaaaaaaaaaaaaaaaaaaaaaaaaaaaaaaaaaaaaaaaaaaagaaaaaaaaataaaaaggcgaccgatc

SEQ ID NO: 261166 - DNA, 1418 bp, Zea mays
ggactaacgccagcagcgtaaatagcactctttattgacaacgaacgtagcggaatgtttaaccttcaatacagtgcttatttatatccaacacaccgcccaatcggcaactacttattagcatcatacaatggtgatatcaccccatgtttgccgccaaccgacccaaaaatcctctgcatagctaaacaaggaaaaatggtgctgttcgtcccatgtctaaacaaaggggactgaggtttatgatccatccgagacaacagatgaaaaaatgatttgttccgggaacaaaggccatcaaagattgtacatcggctacatgggacgatctcaatcttcttcctcacgaatcagcgcaaagtagaatggggcgaacttgtaaccatcaccttcatagaacttgttctggaactccacccagtgaagcctcagtgcgtgaaggaatgcactcagggtctccataacaagcaggacaccaaccgtggcaaatatgaagacgatgatgccaataataaggatgataacattgttaaacccccatgccatcattagtactttctcgtagaatacagtggacaactcagagtgtgcaagactcagagcccaaagacgaaggtatgaagcggtgtttgagactgcacccagaacaaattctatcgtgtgaatcagttggtgaacaaaaacttcaccgaactcaaactcctcgtggtcatgtgcgtcctcatgatgttcccccaattctgctcccactgattcatcaatgccctgaagcatagcgtactggtgaccttgatgcctttgctgatgttgtttcttcaaaagaagaggttttggaatcaacatccaaggtacagacactaaagcaagcagaagtagaacaagctgcactgtcttctggccactaaacaactggttctcaccaagctcatctgttgggctaaggaacatgtagatcataacatggtatagatctgcttttgaccccgtgcaccacttaataataataagcaaggacaggtaaccaaataagctgttcaagaagatcagctggggaatgaactggtaccacacattaagactgttcctaaaaaattttgcattgaagtagctgatcacaatcccaaggttcatttgtgcaactccaagaagaatcgacatcttcatcttcagtgaattgagaaacggcagctcgctgcggctaccatgccagacagggtccacaccaaaagggtatgcatctcttactttaagaagtccttcggtagtagcatcactgcaagaagaatcacggcatgcataggcagatttaccgaaaagcccaaatggaacagagaaaaattcattgtatattaatcctgtgtagactcaaaaatctcccatcatcccaattacataacgcccaccaaacatcatctcca

SEQ ID NO: 261167 - DNA, 608 bp, Zea mays
aaagagcactctttattttattgacaatgaacgtgatggagattgtctaaccttcaatacagggcttatttatatccaacacaccgcccaatcggcaactacttattagcatcatacaagggtgacatcaccccatatctgttgccaaccaacccaagaatcctctgcatagctaaggaaaaatgatgctgttcgtcccagtttaaacaaagggacggtggtttatgatccacatccgacacaacagatgaaaaaatgatttggtctgggaacaaaggccaccaaagattttttatcggctacaataaatacaaatgttgagacaagctcaatcttcctcctcacgaatcagcgcgaaggagaatggggcaaacttgtagccatcaccttcatagaacttgttctggaactccacccagtgaagcctcagcgcgtgaaggaatgcactcagggtctccataacaagcaagacaccaatcgtggcaaagatgaagatgacgacaccaataataaggatgaaaacattgttaaacccatatgccgtcattagtactttctcgtagaatacagtggacaactcatagtgtgcaagactcagagcccaaaga

SEQ ID NO: 261168 - DNA, 1008 bp, Zea mays
cccacgcgtccgcccacgcgtccgcccacgcgtccgcccacgcggctccgctcacctagaacctactagaaggcgaaccaacccgcacattcacttctcttcccatccgtacgaactcgcagatcagagagaccgaggcgcccgcggttctgctttccttccttgccccgttcacgagagaattttctggagtcttcgactcgagcagggttccgatggcgctgcaatggatgatcctggcgtgcgtggtggcggtggaagctgcggtggctgcgctggtcacgctcccggtgccccgcgctgtgcggggccagatcgtcgcgctcacgtccttgttcctgcagcccctgtccagtgtgatacccttcgccgccttccagatcctcgatctctactggaagaaggagcacagactgatgtgcacctcggagatttgcaccgccgaagagcgcattcgcttcgagaaatctatgtttaaagctcagagaaatgtcattctttgtgtttcagcatgtctcctttattggtgcatttatcgtattgtaaaattgaacaaggatattaaggctttggaagagaccgagaagcgcctcaaggaagagtagatctattgtgttttaaggtggctgttgtctgctcctggtcttcagaagatattgttaaaatatcatggttcataggatatctagtgtatagtcttcttgcagcaaagaagataatgttttgctgtttcagcaaacatctgaagtatgagtcttattattaagaggtcttttctttaacttatggcgagtttagcatcggtcagttatcaaacagttaaagcgttttctgaaatcttgtttgaatatccgcagtcctttttttggtttggcatgccgaattattctgaaatgtttagtaccccgttgttcgtaaaaaaaaaaaaaaaaaaaaaaaaaaaaaaaaaaaaaaaacaaaaaaaaaaaaaaaaaaaaagaacgaataaagaagacggggaagagcgcg

SEQ ID NO: 261169 - DNA, 458 bp, Zea mays
ggagtgtctattttgtcttaatttaaactatttattatttgttttctggtacaggtgcatttatcgtattgtaaaattgaacaagcgcgtccgggctttggaagagaccgagaagcgcctcatggaagagtagatctatcgtgttctaaggtggcgtggtgtctgctcctggtcttcagaagatatcggtaaaatatcatggctcataggatatccagtgtatagtcttcttgcagcacagaagataatgttttgctgcttcagcaaacatctgaagtatgagtcttattattaagaagtctttcctttaacttatggcgagtttagcatcggtcagttatcaaacagttaaagcgtcgtctgaaatcttgtctgaatatcaaaaaattaaccaaactcaatgctagtgttcgagattgaagttctcaatgccccactaattcgcatctgtcaaataa

SEQ ID NO: 261170 - DNA, 911 bp, Zea mays
ggcagttgatgatctagacttggttatcaaaacccttgaggaaaacggctttaaagatcggttttatattcattgtgatggtgccccgcccgcgcggccgataccatttgttaagaaggcacctcaagtgacatttaaaaagcctattgggagtgtcagcgtctctgggcacaagtttgtcggatgccccatgccatgtggtgtccagataacaaggttggagcacataaatgccctttctagcaatgtggagtatctggcgtcaagggatgcaacaatcatgggaagcaggaatggccatgcccctatcttcctctggtacaccctcaacaggaagggctacagaggctttcagaaagaagtccaaaagtgcttgagaaacgcacactacctaaaagatcgcctcaaggaagcaggaatcggagcgatgcttaacgagctcagtagcacagtcgtgtttgaaaggccaaaggatgaagaatttgtccgaaggtggcagctggcttgtgaagggaatatagctcacgttgtggtgatgcccagtgtcaacattgacaagctagactatttcctgaatgagttagtggacaaacgggcgacttggtaccaggacgggataagccagccaccctgcattgccagagacgtaggtgttgagaactgtctctgtggccttcacaagtagcgagccttttgctttgcaagtgggttcactcttgagtcgagttaaaaagtgttatgttgtactgtgttcattcttgagttgagttaaaaagtgttatgttgtactgtgttcatgcgttctgcttctgtgtttctccacagtgtagcttatttgttgccatgggaataaaattccttctattaaattgattgaaaaaaaaaaaagggcggccgctcgatagtaaagc

SEQ ID NO: 261171 - DNA, 439 bp, Zea mays
  unsure (1)..(439): unsure at all n locations
atcaaaatcactttgcgtgcagcatcgattgggtcggaaatcgagggtttggtaagcgagatcgccgccggtgacagctgacagggacgagatggacgccggcggaggcggcgtcttggtcgccgttctctgcatgctgctggtcttcgccatcttccccctcctcctctggcgccgccgctccgatgccgccaccgccgataaccaccgcgtcccgccccagcccctccaggaggatcaggtgctgcacggtcgcgcggcggcgcgacggatgcgtcggaggcctggggctgccggagcaagctcctctactgcgtcaactagccgcaatgctgtagaggacgacgcggagagtgacgatgaggaggtccccgaaagtcgcaacgtccccagatccttcaaaaaggagaagaaaggcangagcgagagatgcaacgtc

SEQ ID NO: 261172 - DNA, 533 bp, Zea mays
aaaaaagggacgggcggggcgtacgcaggaagatgctatatgatttagaaatgcggttggcttccaaacaaaaacttgaactggaagggggacagttgagggggaatctggacgtatggaaccatatgggaaaggaagatgcaaaatcgaaggaaatgctcgataagttgcatgaagcactgaaagagaaagatgaagaaatggatcatattgattctataaaccagacccttattattaagcaacgaagaaccaatgatgagctggaagaagccaagaaagaactgactactgacctacttaatatgtcatcagctcgatccattgttggtgtcaaaaaaatgggtgagcttgacaagaaagctttcattgtctcttgcaaagagaaaacagcagacgagttgtcattgtcaattctgtgctcgaaatgggaagatgagatcaggcaaccagaatggcatcctttcaaagttatagatgttggtggacaggcaaaggaaataattcgggaggatgatgagaagctgcaagct

SEQ ID NO: 261173 - DNA, 493 bp, Zea mays
ctgccttgtctcccttctccgtccaggccctagtgtccgcgaatctcgtgcagcaagtgagcgccgccgccagactacgccaagtgtccagttcctcgtcgggtataccctttctcttccttttctgctgtgtggtacctagcaccatcggaaccctaacttgagctatctggctatttgcatccggatctaatctaattaccaagcatgtacatacatactaacttcgattttttggaaaaatattggaacatctgtgtcctttaccgggttctccccctatagaaaattcgagtattagactctacatgtcaagaaagtatggcgccaggaagcaaggccgagcggaaagcagcactagatgctggcgcatggatgttcaatgtcgtcacatctgttggtatcatcatggtcaacaaagccttaatggcgactcatggttttagttttggtaggagcatgctaaatcttcattcctaactgcatgccatgc

SEQ ID NO: 261174 - DNA, 1178 bp, Zea mays
cccacgcgtccgccaaaaccgaccgagccgcggatttcacccctgcctttccttctccccgtgtccaggccctggtgcccgcgcgttcccgtgcggcaactggccgccgccgccgcactacgccaggtgcccaattcctcgtcgggtcctccgccggcgacgagcacccaccagaaaactggagtggactctacatgtcaagacagtatggcgccaggaagcaaggcggagaggaaagcagcactagacgctggcgcatggatgttcaatgtcgtcacatccgttggtatcatcatggtcaacaaagccttaatggcgacgcatggttttagtttcgctacaacgttgaccggacttcatttcgcgatgacgaccttgatgacattagtaatgaaatggctgggatatattcagccgtcctatctaccgttacctgaactagtaaaattcgccttttttgcgaacctgtctattgttgggatgaatgtaagcttgatgtggaactctgttggattctatcagatcgcaaagctgtgtatcattccagtcttatgcattctggaaatcatgttcgacaaagtccgttactctagagatacaaagctcagtatagtgcttgtccttgtaggtgttgctgtatgcacagtcactgatgttagtgtgaactctcaagggctattagctgcagtaatagctgtttggagcacagcactacaacaacattatgttcaccaccttcaatggaagtactcgcttggctcattcaatctcttaggccatactgctccagcgcaggcagcatcattgttaatagtggggccttttgtggacttctggctgactaacaaaagagttgatgcttttaactacacatcaatagttacgttctttatcgtgttgtcgtgcataattgccgttgggaccaacctaagccagttcatatgcatcggaagattcacagccgtctcgttccaagtcctaggccacatgaagacggttctcgtgttgaccctggggttctttttctttgggaaagagggtctcaatttccacgtcgcccttggcatgtttctggcagtgatcggcatgatctggtatgggaatgcctcctcgaaacctggaggcaaagagcgccaggtttactccacaccgagtgagaaaactcagaagcatggggt

SEQ ID NO: 261175 - DNA, 646 bp, Zea mays
ttcaaactttgaccttgtggaccttgctaataggcacgcaactagtgctgagcctgctggccgtgcccttccccctgccatgatatgcttattagggcatatcacacactgtgtgctacatggtgtactcctctgtggtgcaggatgttcaccaccttcaatggaagtactcgctcggctcattcaacctcttaggccatactgctccagcccaggcagcatccgtgttagcattgggaccctttgtggacttctggctgaccaacaaaagagttgatgcttttaactacacatctttagttacgattcacagccggcgcgttccaggtcctgggccacatgaagacacttctggtgttgaccttggcgttccttttctttgggaaagaggggctcaacttccatgtcgcccttggcatgcttctggctgtgatcggcatgatctggttcgggaacgcgtcgtcgaaatctggaggcaaagagcgccaggtctaccccacaccgagcgagaagactcacaagcatggggcgctgtcatcgcagtccgagctcgatcagaaggtctatacgagacacacaaaggcatccgatgcttgttgagcaccggtcgacctggctgtattttttagtacttatttttgaggga

SEQ ID NO: 261176 - DNA, 557 bp, Zea mays
cggacgcgtgggatcgggcgtaccccggtgcccgttcaccgccgttcacgccgcgtgtgcgctctggctctgccgctctctctctctctcctgcgcgtggcgcactgccgtcctataccaggcgcccaggtctagcctcgtcggtgccttcgccaggtctttctcgggcccttcgccaacgacgagcgcccgctaggttagaaggtatgcattcgtgttcataatattgtatttgactaaaaagactgggcctacgcatgggggctccaaaacagaggtggacttctgaggaagaggctgctcttagagctggagtagccagacatggagttggaaattggcgcatgatattgaatgatccagaacttagctccacattgcgctaccgctcgaatgttgacctaaaggacaaatggcgcaacatgaatgtaattgtcacttcatcgagtactcgtgacagggggagaactttcacgaggagaacccgagctgctcctaagaataatgaccaattgttggcaatgagcacaatcacttctgaggttgatgatgagaat

SEQ ID NO: 261177 - DNA, 575 bp, Zea mays
  unsure (1)..(575): unsure at all n locations
ctaacggccgcccggcaaacaaggcggtttccacaaccaattgcaaagccccccggcaacagaggcggggcccagaaggaccgggggcgccgagggtcggcggccccgccaaagcccgtcagcattgacgtgccccgcatacccttcgacgagctcaagaggatcaccaacaacttcagcgaccgcgccctcatcggggagggctcctacggccgcgtctacaacgccacgctcagcgacggccgcgccgccgtcatcaagaagctcgacaccagcgcctcgcagggactccgacaccgacttcgccgcgcagatcgcgatggtccccaagctgaagaacgagtatttcctggagctcctagggtactgcttggaagacggcaaccgaatgctaacctatcagttcgccacaatgcgttctttgcacaacatactacacgggaagaagggagtccagggcgcggagcccggtcccgtcctcaactgggctcagcgagtcaagatagcctacggggcagcgagagggctggagtacctgcacgagaaggtccagccgtacatcgtncaccgggaca

SEQ ID NO: 261178 - DNA, 864 bp, Zea mays
cggacgcgtgggcggacgcgtgggcggacgcgtgggccccagtccccacccaccaccagtcttcctcgctctccaaatctcgcgacgagaaagcccatctaggaccacaggggcgcgccagccggcaggaacgacgggagaggagggcatggagccggctgagcggatcgagtcggccgggacggcgctggggaagcgtccgaggagcagggtgctgccgcgcacggccagcatggtgacggtgccgtcggcggcgaagcaggggcgccaggagcggggcgccggcgtgccgtcgtcctgctcactgccggctgcctgcgccgggatggtggccgtgccggggggttactactactgtggcacctcgttcgcggcggtggagacggcggccttcctgaaggcgtgcggcctctgcaaacgccacctcgggcccggccacgacaccttcatctacaggggcgaggtggcattctgcagccaggagtgccgggagaagcagatcgagtacgacgacctcgacgagcgcatggagcagacctgctccgtgacctccatatgaaggaggccccgtccgtgtccggcgccagcggctccgaccagtccggcagcggcggtgagaccgtggccgccgcctaggagccccggtgggtggggtggcgcgcatgggggcgggcgcggtgtgtgttgttgcgccctggtggagcgggagcagcgacgccggccgatcggtcggcccggtccggtagattccgccatgctatagagcgcctgtgcatacagcttttagctctgaattccggcagtgatgcatgcgtcaatgatctattattattatagctgggtgatgcatgtgactctggaaac

SEQ ID NO: 261179 - DNA, 512 bp, Zea mays
tccaaatctcgcccatctcgagccacagggcgcggagggccgcgtacaggagaagagggggtatggagcccgccgagcgaatcgagtccgggacggcgctggggaagcggccgaggagcagggcgctgccgcggacgcccagcatggtgacggtgccgtcggcggcgaagcaggggcgccaggagcggcgcgccgtctcgctgccggctgccggcactgggacgggagccgctgccgccatgccggtggggtactgttactactacggcggctcattcgccgcggtggagacggcggccttcttgaaggcgtgcggccgatgcagccgtcgcctcgggcccggccacgacaccttcatctacaggggcgaggtggcgttctgcagccaggagtgccgggagaagcggatcgagtacgacgagcgcatggagaagacctgctgctcactgacctccatcaaggaggccccgtccgtgtccggcgccagcggctccgaccagtccggcagcggc

SEQ ID NO: 261180 - DNA, 819 bp, Zea mays
gtaaagatgataagaaggggcatgatgatcagctagaaataccagaacctgcataaggggcaggtgaagatgagttagaaattccagaacctgccgaagaaaattatggtggttatcattcagaagttgaggatgataggcgtaaatatgaagatgaagagttttatcatgagtcagaagatgaatatgttgacgaccatgatgagcatgttgagtcctacaaatctgatgatgaccaaaaagatttaactgagccaggacatgcatcgtggttggacaaagttcagcagactgtacaaaatgttttccaaaaattcaacttttttaagacccctgtagatttgtcagaggcttctcatgttcgtaaggagtatgatgatgctagctcaaagctttcaaaaattcagtctaagatatccagtctagctgagaagctaaaacatgattttggtaatgacaaggagttctattccttttatgatcagtgttttgagaccaaggaagggaagtatacttacaaggtctgtgcatataagacagcatcacaggctgaagggcacagttctaccaacctggggcggtgggacaaatttgaagattcgtacagagtgatgcacttttcaagtggagacaaatgctggaatggtcctgaccgaagcctaaaggttaggcttagatgtgggctgagcaatgagcttaatgatgtacatgagcctagcagatgcgagtatgttgctgtattgtcgacgcccgcactctgcgtcgaggagaagctgaaggagctgcaaaacaaactggatgccatgtcttcgaagcagc

SEQ ID NO: 261181 - DNA, 1704 bp, Zea mays
cccacgcgtccgcccacgcgtccggtggggccatctgagggacctgcacctggcgctgaagctgtgcaagaaggccctgctctgggggaagacatcgacggagaagctgggcaagcagttcgaggcgagggtgttcgagatcccggagcagaaggtgtgcgtggcgttcctctccaaccacaacaccaaggacgacgtgacgctgacgttccggggccagtcctacttcgtgccgcgccactccatcagcatcctcgccgactgcgagaccgtcgtcttcggcacccagcacgtgaacgcgcagcacaaccagcggacgttccacttcgcggaccagacggcgcagaacaacgtgtggcagatgttcgacggggagaatgtgcccaagtacaagcaggccaagatcaggctgcgcaaggccggcgacctctacaacctcaccaaggacaagaccgactacgtctggtacacctccagcttcaagttggaggcggacgacatgccgatccgccgcgacatcaagacggtgctcgaggtcaacagccacgggcacgccagcgtggcgtttgtgaacaacaaattcgtaggatgtgggcacgggaccaagatgaacaaggcgttcacgctcgagaagcccatggacctgaagaagggcgtgaaccacgtcgccgtcttggcatcgtcgatgggaatgacggacagtggcgcttacatggagcaccgtctggccggcgtggacagggtgcagatcacgggcctgaacgcgggcacgctggacctgacgaataacggctggggccacatcgtcggcctcgtcggcgagaagaagcagatctacaccgacaagggcatgggcagcgtcacctggaagccggccgtgaacgacaggccgctcacctggtacaagaggcacttcgacatgccgtcgggagaggacccggtcgtgctggacatgagcacgatgggcaagggcatgatgttcgtcaacggccagggcatcggccgctactggatctcctacaagcacgccctcggccggccatcgcagcagctgtaccacgtcccccggtccttcctgcggcagaaggacaacatgctggtgctgttcgaggaggagttcgggcggccggacgcgatcatgatcctgacggtgaagcgcgacaacatctgcaccttcatctcggagcggaacccggcgcacatcatgtcgtgggagcgcaaggacagccagatcacggcgaaggcgaacgccgacgacctcagggcccgggccacgctgacgtgctctcccaagaagctcatccagcaggtggtgttcgcgagctacggcaaccccatgggcatctgcggcaactacaccatcggcagctgccacacgccgcgcgccaaggagctggtggagaaggcctgcctcggcaagcgcatctgcacgctgcccgtgtccgccgacgtctacggcggcgacgccaactgccctggcaccaccgccacgctcgccgtgcaggccaagtgctccaagaggtcgcccagagccgcgcagtaatttcggtagtcgtcggcttcggcctcggcttgctacctcccgtcgtctttcattcttcattgctgatgctgctgctgtaccatgggaccattatctgaccggagacgtcgattcggatttcggacccatccatgcgtggctgggtggggaaacagattgtc

SEQ ID NO: 261182 - DNA, 1204 bp, Zea mays
gtcctacttaacgtgggtgcaaagctgggtggcatgaattcgttgctccaaattgaaacatccccagcaattcctcttgtatccaaggtcccaactataatcttgggaatggatgtgtcacacggttctcctggacattctgatgtaccatctattgctgctgttgttagttctcgtgaatggcctcttatctcgaaatacagagcttctgtccgcacccaatcacctaaaatggaaatgattgactcattgtttaagccacgggaagctgaagatgatggtctgatccgggagtgtctgattgacttctacaccagttctgggaagagaaagcctgaccaagtcatcatattcagggacggtgttagcgaaagtcagtttaatcaggtgctgaacattgagttgcaacaaatcatcgaggcttgcaaatttcttgatgagaaatggaatcccaagttcacgttgattattgcccagaagaatcatcacactaaatttttcattcctggaaagccagataatgtcccaccaggaactgtggtggacaacaaagtctgccatccaaagaacttcgatttctacatgtgtgcgcatgctggaatgatcgggactacgaggccaactcactaccacatcctgcatgatgagataggcttcagtcctgatgatctgcaggagctggtgcattcgctctcttatgtgtaccaaaggagcacaacagccatatcagtcgttgctcccatctgctacgcacatctggcagctgctcaggttggccagttcataaagttcgatgagatgtcggagacgtcctccagtcatggcgggcatacttcggcgggcagcgttccggtccaggagctgccgcgcctgcatgagaaagtgaggagctcgatgttcttttgctgagccgtggttttacttttttggtggatggtgaacccctctagttatgtcggtagacgctcttggatgacgctctagttgtggtccaggaaggctcgagctggtacgatgttaaatgttagttttttaagcgtcgctgcggctatgttggtgcctcaggaagacttggaacctggttaggatgtcgttaaatctaccccttatcgttcctggttcgttgggctgttgttcttattgtccgtcctggtgtctgatttctgctttgttgcatgcaagtgtgaggcccagcttgatattg

SEQ ID NO: 261183 - DNA, 1692 bp, Zea mays
gtcttggttgaagatttttcaactggaaagactcctgcaaacggcagtccaggaaatgacagtcctcccggaagtgacaggaaaagggtcagaaggccttacaatacaaagacctataaggtcgagctctcttttgcagcaaaaattcctatgagtgcaatctcacaggccttaagaggtcaggaatcagagcacactcaggaagcaattcgagtgattgacattattctgaggcagcactcagctaagcagggttgcctattagtaaggcaatcattcttccacaacaatccttccaattttgttgacctgggtggtggtgtagtgggctgtagaggttttcattctagttttcgagcaacccagagtggactttcactcaatatcgatgtgtcgactacaatgatagtgaaacctggtcctgtcattgactttctgcttgccaatcagaaagttggtgatccaagcatgattgattgggctaaggccaagcgtgcactgaagaacttgaggataaaaataagtccagcgaaccaagaacagaagattgttggtctcagcgaaagaacttgtcgtgagcaattattcacactgaaacataaaaatggtaacaatggtgactctgaagagatcactgtttatgattacttcgtaaagcagcgtggcatagtgctgcaatactctggtgatcttccttgcatcaatgtgggaaaactaaagcggccaacatattttccaattgagttatgcagtcttgtgcctttacaaagatacactaaagctttgaacacacttcagaggtcatcactcgtggagaaatctaggcagaaaccgcaggaaaggatgtctgttttatctgatgtgctgcaaagaagcaactatgatgcagagcccatgttgaaggcatgcgggattacaattgctagaaatttcacagaagttgatggtagggtattgcagccacctaagcttaaagctgggaatggtgaagacatttttacacgcaatggtagatggaacttcaacaataagaggctcattagagcttgtagtgtcgagaaatgggcggtggtaaacttttctgcacgatgcaatgtcagggatcttgtccgggatctcatcaagtgtggaggcatgaagggcattatggttgatgctccttttgctgtatttgatgagaatccttcaatgagacggtcacctgctataagaagggttgaagacatgtttgaacaagtgaaaactaagcttcctggagcacccaagtttcttttgtgtgttctagcggaaagaaagaattccgatatttatgggccttggaagaagaaatgccttgctgaatttgggatcgttacacagtgtgtggcaccaactagagtcaatgatcagtatcttacaaatgtcttgttaaagattaacgcaaagttgggtggcttgaattcgttgctccaaattgaaacatccccagcaattcctctcgtatccaaggtcccaactataatcttgggtatggacgtatcacacggatctcctggacattctgatataccgtctgttgctgctgttgttagttctcgtgaatggcctcttatctcgaaatacagagcatctgtccgcacccaatcaccaaaaatggaaatgattgactcgttgtttaaaccacgggaaactgatgacgatggtctggttcgg

SEQ ID NO: 261184 - DNA, 390 bp, Zea mays
tttttgtgttgaagttactgtttggttgagaaaattagttgcctatcttctattttctctgttttgttatagcagcaagctgatttgtgtctaatttatagggacgatgttagcgaaagtcaatttaatcaggtgctgaacattgagttgcaacaaatcatcgatggagactgagtcaccgcagccagaaaaccacggtctcaatttgaggagcctttccatctatgtttgttagaaggcatataatgcctatttatctcttgtattcgaacatttggcaaaattaagaaatagaagattacttccccaatatcccttcttcctaatctcacctttcacggcttctggggaacaatcacttgctattactgactgacatgttcactcctc

SEQ ID NO: 261185 - DNA, 407 bp, Zea mays
cccacgcgtccgcccactcgtcctttgactcttgggtgggatcgttacacagtgggtggcgccaactagagtcaatgatcagtatcttacaaatgtcttgttaaagattaacgcaaagttgggtggcttgaattcgttgctccaaattgaaacatccccagcaattcctctcgtatccacggtcccaactataatcttgggtatggacgtatcacacggatctcctggacattctgatataccgtctgttgctgctgttgttagttctcgtgaatggcctcttatctcgaaatacagagcatctgtccgcacccaatcaccaaaaatggaaatgattgactcgttgtttaagccacgggaaactgatgacgatggttctgttcgggaatgtctgattgacttctaca

SEQ ID NO: 261186 - DNA, 386 bp, Zea mays
ctaaaatggaaatgtttgactcattgtttaattcggggggaagctaaaggtggtctgatccggtaagagatcttaatctgcattacacttgttggattttgatgtcgcttctgggagtgtttgattgcattctcccccagttctaggaagagaaagcctgaccaagtcatcatctccaggggcgatgttagcgaaagtcaattgaatcaggtgctgaacattgagttgcaacgtatcatcgatggaggctgtctccgcagccagttaaaccacggtctcaatttgaggagcctttccatctatgtttgttagaaggcatataatgcctatttatctcttggattcgatcatttggcccctaaggaatagaagatttcttccccaat

SEQ ID NO: 261187 - DNA, 476 bp, Zea mays
caaaggagcacaacagccaatcagttgttgctcccatctgctacgctcaccttgcagccgcccaggttgggcagttcataaagttcgacgagatgtcggagacttcatctagccatggggggcatacctcggcgggcagcgtccctgtccaggagctgccccgtctgcatgagaaagtgaggagctccatgttcttctgctgagcagcagggaatgtgtcccttggttttaccgttttgggtgtatggttctgaacccattgcgtcacttggttccagcctcaggaagaacttaacctggttgtaggatgctgaatggtaggatttttaagcatcgttgcagttgtgctgggtggcacgctgcaaccattttggctagcttgttgcagcaacttggtgccttcctgagaggaagtagacttggaacctggtagcacgtcgttaaaccatccttttaagcgttgctggttcggcctc

SEQ ID NO: 261188 - DNA, 412 bp, Zea mays
acttcatctagccatggggggcatacctcggcgggcagcgtccctgtacaggagctgccccgtctgcatgagaaagtgaggagctccatgttcttctgctgagcagcagggaatgtgtcccttggtttttaccgttttgggtgtatggtcgggggttctgaacccatgaacttgttgcctcacttggttccagccccaggaagaactttgtaggattgtaggatgctgaatggtaggatttttaagcatcgttgcagttgtgatgggtggcaccctgcaaccattttggctagcttgttgcagcacttggtgccttcctgagaggaagtagccttggaacctggtaccccgtccttaaaccatccccctaagcgttaaaaaaaaaaaaaaaaaaaaaaaaaaagagcggcgc

SEQ ID NO: 261189 - DNA, 467 bp, Zea mays
ggatcggcgacggcgaaggtgaagagctggacaagggcggcggcggcggcggcggccaccacaagcacgagggctacaagaacaaggatggcaagggaaacctgaagccctctcagtgcggcggggagtgccggcggcggtgctccaagacgcaccacaagaagccgtgcctcttcttctgcaacaagtgctgcgccaagtgcctgtgcgtgccgcctggcacctacggcaacaaggagacctgcccctgctacaacaactggaagaccaagaaaggagggcccaagtgcccgtgagaagatggcggcccaatacgcggttttcccggcggctacgcgggcgggccgccggcccaacgtaacctaccaccgtagttggaagcgtcgtaggttaggttaggaataacagtcctctcttttattttctctcctcgttccggtgtttgtttgggccgggccggcggccgc

SEQ ID NO: 261190 - DNA, 595 bp, Zea mays
aacccgcactcgctcaaaaccctactgctcccgctccgctcctgcttggtcgagatcacttcgccgccgccgctttcgagatctccgggtggagcaagcgagcaaaggcagcagccatgtcgctccgcgtgctgaaccctaacgccgaggtgctcaacaagtcggcagcgctgcacatgaacatcaacgccgccaagggcctccaggacgtgctcaagaccaacctcggccccaagggcaccatcaagatgcttgtgggtggagctggtgacctgaagctgacgaaggatgggaacaccctcttgaaggaaatgcaaattcagaacccaactgcaatcatgattgcgaggacggctgtggcacaggatgacacaagtggtgatggcacaacctccactgtgctatttatcggggagctaatgaagcagtctgagcggtgcatcgatgaaggaactcatccaaggttcttggttgatggttttgatgttgctaagagagcgtgtcttgattttctcgataagttcaagacgccagtcgttactggtgatgaacctgacagagataccttaaaaatgatagcaagaacaactcttag

SEQ ID NO: 261191 - DNA, 909 bp, Zea mays
  unsure (1)..(909): unsure at all n locations
cccacgcgtccggatacatctccccttctcacccaaccctccaagcaacattgaccgcaaagggccatccgctgcggtcagtgtaggtttctgaatcatagcttggcgatgcctgaggctagacaaatactgagctagccttcagaaaaaaaaagaaaagaaagagattgagaagcagggagaaaaaatggcactggcccattgaggaagcttgagaaccagttaacaagaattgccaacatattcttggacaatcttgttaacagagttttaaggtttcccagcagagaagagcgcgtgcaaccaccacattcatataattaataagcaaggtttagagaagaggcaacatgggcacaaagatgaagaaggggatcctgaagccgttccgctatatctcaaccatcatggatggtaaggaggctgaaatgcaaattgggttcccgacggatgtaaaacacgtggcacacatcggttgggatggtcctggctccaccaacaacaataacaatcaacagcaacaacaatagtggcggagcacctagctggatgaaggattaccactcggcaccgcttgactcgtcctcttttaggagtgagagtgggggcacggctgctgcaaatccctgggcttctcaagagatagtcatggatggagcaagcgtcggagaaacctccttcagggacacgaaaagcgaggcaggcgtcgacgtcggcgggggcgactccccaccgtcccccgccacccgccggtcgagacggcaccgctctcggggctccggcaactcatccatggacgccaccggcggcgagggcgaggagaagactaaggagaagagcaagaaaggcacccganaagaaccgcangaagcangacaagtcggccggcgacgacgccctcggcacatg

SEQ ID NO: 261192 - DNA, 449 bp, Zea mays
attgaccgcaaagggccatccgctgcggtcagtgtaggtttctgaatcatagcttggcgatgcctgaggctagacaaatactgagctagccttcagaaaaaaaaagaaaagaaagagattgagaagcagggagaaaaaatggcactggcccattgaggaagcttgagaaccagttaacaagaattgccaacatattcttggacaatcttgttaacagagttttaaggtttcccagcagacatttttcgagtccaggaagagcgcgtgcaaccaccacattcatataattaataagcaaggtttagagaagaggcaacatgggcacaaagatgaagaaggggatcctgaagccgttccgctatatctcaaccatcatggatggtaaggaggctgaaatgcaaattgggttcccgacggatgtaaaacacgtggcacacatcggttgggat

SEQ ID NO: 261193 - DNA, 611 bp, Zea mays
acggacacgtgggacgcgcgcacgcacgtatggtcgaacaatattaggagagaagctcagagaccggttcctggccttccaaaaaagaagtagacataagatagatctctccgcctctcctcgcccaacctcctccaacaagtaacattgaccgcaaacggatcatcgtccggtgcggtcaatgtaattaactaagcttctcaatcatacatagcttggcaaatgcctgagggctagctagacaaggtccgttgagctagcccctttgggaagaagggagaggaatggcgctggtggcccgttgagcgaggaagaggctattgagaacccgttaacaagaattgccagcagcatctggacaatcttgttaacagagttccaaaggttcaattccaagcagatacaatttccgagttggatcgagaagagtgcgtgcatccgatccgtccgtccacgttcgtggttcgtataagctaggtttcatcaaccatgggcacaaagatgaagaagggcatcctgaagccgttccgctatatctcgaacatgatggacggtaaggagcctgaaatgcaaattgggctccccacggatgtaaaacatgtggcacacat

SEQ ID NO: 261194 - DNA, 1124 bp, Zea mays
gcaagccgtgctcggaggcgaggcgttcgcacacctcgccgcgcgtccttggcctctccccgcgccaccaccgttccgttgcgcccgctaacgatcacgcgtttccggtgggagagagagtaggtagggagaggacgggacaggatgctcgggttcaggcagatgtcgtggtcgtcggcggaggcgcaggcgccgtcggagcagctgtgcgaaggggtggcggccgtcgtggcggcgcgccaggggatggagacgccgctgacggcggtggccgaggcgttcgaggagctggtgcgcgggatggacgccgacggcggcgagctccgcctcgcgcccttcagcgactcctgcgccctcgtctccgtgctcttcagcagcctcgggatggccttcaggttcgccgagatggagtacgtcaccaaggtgaacgatctcatcggtgccggcaagtcgtaccgcacgctgagcgacatcctcgacaaggacatccagaacgactgcgtgaagaagcagggaagccactcccggaacctgcgcacggtccgtctcgggcctcggcctcatcaaggccctcttcgagcaattcctcgccaccgagggttcattgtatgatgctgctacgacagcttacgggcaggtgtgcgcgccgtttcatagctgggcgatcaggaaggctgttggcgctggcatgtacacccttccaaccagggagcagttggtagtgcggctgaacgaaactgatctctcggtgcagaagcagatgaggagatacattgacgcttctagtcctatcatagagtacatcgataaccttttcctctcgaggaacattagcctagattggtgagctgatctgaactggactggactgaagatcaagtctgcagcttgttcacaaagctgttgttggtaccatcgatttgttgttcatagttatttattcagccttgttgggtggtggatggatgctcccttttcttcctttgttgcacgcacgggtctcgtgcatgtgttgtacaactgcatgataattctagcacggacattgatgttctaaaaaaaaaaaaaaataatatattaaaatatataaaatttaaaattaaaaaaattataaaataattaaa

SEQ ID NO: 261195 - DNA, 480 bp, Zea mays
ccacggcagaattccgattccggccgcctcctatacatagccagccttccaccctctcccctggcccaacacagagcagcgagccgcgcgcggaggcgaggcgttcgcacacctcgcccgcgccaccaccaccgctccgttgcgcccgccagccgtcacgcgtgacgtttcccggggggccgggggagagagaggcagaaggaggaggcacggagaggacgagacaggatgctcgggttcaggcagatgccgtggtcgtcggcgcaggagcaggagcaggcgccgtcggagcagctgtgcgagggggtgtcggccgtcgtggcggcgcgccaggggatggagaagccgctgacggctgtggcggaggcgttcgaggagctggcgcgcggcatggaggccgatggcggggagctccgcctcgctcccttcagcgactcctgcgctctcgtctccgtgctcttcagcagcctcggggatggc

SEQ ID NO: 261196 - DNA, 1865 bp, Zea mays
cgcggctctataaagccgcacgcgcgcggagcggaggtcgccagggctggattcactgctccctgcccgtcgaaccagccgagcaagccgcaaacccagcgagccgcggcgcctcgtcgcgcgcgccttgcttgtccgcttcttcgtccaaccgtccgccggtccggtccgagccgagccccccgaaggatggcggagcccgcggcggcggggaggaagacgcgggtggggccgtacgaggtcggcaagaccatcggggagggcagcttcgccaaggtgaagcacgcccacgactcccgcacgggcgccgtccgcgccatcaaggtgctcgaccgcaaccacgttctccgccacaagatggtcgagcagatcaaacgggagatttcgactttgaagctaatcaaacatcccaacgtggttcagctgcatgaggttatggcgagtaggacgaagatatacatggttcttgaatttgttgatggaggcgagttattcgataagatcgtcaattctggaaggctaggagaggatgaagctaggatatactttcatcaacttataaatgcggttgattattgtcatagccgaggagtgtaccatagagatctgaagccagagaatctacttctggactcacatggaacccttaaagtttcagactttggcctaagtgcatttgcaccacaaacaaaagaggatgggcttctgcatactgcctgtggaactccaaactatgtagcgcctgaggtgctcgctgataaaggctatgatggtatggctgcagatgtatggtcctggggcataatctggcttgttcttatggcccgatacttaccctttgatgatgccaatctgatgagactgtacaaactgatctgccatgcaactttttcttgcccaccatggttttcttctggagcaaagaagtttattaagcgcattctcgatcctaatcctgatacgaggataacaattgcagaaattttggaagatgaatggttcaaaaaagactataaaccaccacgttttgaacaaggcgaagatgttagccttgacgacgttgatgctgcattcaatgattcagaggaccgtcttgtggcagagaaaagagaaaagccagaatccatgaatgcatttgctcttatttcgaggtcacagggcttcaaccttggaaatttgtttgagaaggagatgatgggaatggtaaagagggaaacatctttcacgtctcaatgtacagcacaggagatcatgtcaaaaatagaggatgcatgtgggccacttggtttcaacgtgcggaaacaaaattacaagatgaaattgaaaggtgacaaatccggaagaaaaggtcacttatctgttgcaactgaggtttttgaggttgctccttcacttcacatggttgagcttcgtaaaaccggaggagacacattggagttccacaatttctacaagaatttctcatcagagctgaaagatatcgtgtggaaagctgaatctgacgcaagtattaaacagacgaagtgacacccagggaatctgtgtaactcatgaggccacattctgagatagaccacctcctcgggtgataccacctgcttggtactgtatgctttttttttactggtaccacattagcagccaaaatctcttgtaaacgggaactccttctgaatgagcgcaattgtacaaaacacatatgaagaggccctccgtgagatgctccgaacactgcaatgggatgtcaaatagttctgaatggtgagtgctgtttttgcatctataggggcatatatatgtttccattccatgtgcaaaaaaaaaaaaaaaaaaaaaaaaaaaaaaaaaaaaagggcggccgctct

SEQ ID NO: 261197 - DNA, 623 bp, Zea mays
gctttctctccacgcgttccctccacaacagaacggaccgggaccaccagcgccgtgtggctttacaaaagccgcacgcgcgcggagcggacagcggaggtcaccaccactcttggcgaagcgaaatccaccgtacaccgctgcctccctctccctgtctcgtctcgtcgaaccagccgaggaagccaacgcagacccagcgatcctcgtcgcgcgtcctcctcccccacggagggaaggatggcggagcccaaagcggcggcggcggcgaggaagacgcgggtgggcccgtacgaggtcggcaagaccatcggcgagggcagcttcgccaaggtcaagcacgcgcgcgactcccgcaccggcgccgtccgcgccatcaaggtgctcgaccgcaaccacgtcctccgccacaggatggtcgagcagatcaagcgggagatttcgactatgaagctgatcaaacatcccaatgtggtccagctgcatgaggttatggcgagcagaacgaagatatacatggttcttgaatttgttgacggaggcgagctattcgataagatcgtcaattctggaaggctaggagaggatgaagctaggatatactttcatcaacttataaatgc

SEQ ID NO: 261198 - DNA, 513 bp, Zea mays
cccacgcgtccgcccacgcgtccgcccacgcgtccgcccacgcgtccgattctggaaggctaggagaggatgaagctaggatatactttcatcaacttataaatgcggttgattattgtcatagccgaggagtgtaccatagagatctgaagccagagaatctacttctggactcacatggaacccttaaagtttcagactttggcctaagtgcatttgcaccacaaacaaaagaggatgggcttctgcatactgcctgtggaactccaaactatgtagcgcctgaggtgctcgctgataaaggctatgatggtatggctgcagatgtatggtcctgtggcataatcttgcttgttcttatggccggatacttaccctttgatgatgcctggctgatcagtctgtacagtctcatcagattggcatcatcaaagggtaagtatccagccataagaacaaataagattatgccaatctgatgagactgtacaaactgatctgccaagcatattt

SEQ ID NO: 261199 - DNA, 557 bp, Zea mays
aggttctgcatactgcctgtggaactccaaactatgtagcacctgagatgtgtaagtatcgcacacttcctgcaggtgctcgctgataaaggctatgatggtatggctgcagatgtatggtcctgtggcataatcttgtttgttcttatggccggatacttaccctttgatgatgtcaatctgatgagactgtacaaactgatctgccatgcaactttttcttgcccaccatggttttcttctggagcaaggaagtttattaagcgcattctcgatcctaaccctgataccaggataaaaattgcagaaattttggaagatgaatggttcaaaaaaggctataaaccaccacattttgaacaaggcgaagatgttaaccttgacgacgttgatgctgcattcaatgattcagaggtattatatagaccaaatgttcattttgaatctacgactatcttgaaaatctttccagctttccagaaatattacgtgctttaaaagcatttttacattctattttatgttcacattatcgttcaggttcatagctgctataa

SEQ ID NO: 261200 - DNA, 1900 bp, Zea mays
actagctcgcgcaaaagcggcacaggaattatatggattaagaggcctgataagtcaatagacaacaaagctttatatgacacattctgtgcatttgggaatatactttcatgtaaaattgcaacagacccttcaggagaatcaaggggctatggttttgttcagtttgagaaggatgaatctgcacagtctgctattgataaactcaatgggatgcttatcaatgacaagaaagtgtttgttggaccttttgttcgcaagcaggacagggaaaatgtctcgagtaatatcaaatttagtaatgtatatgtgaagaatctgtcagatactgttactgatgatgagttgaaggagatgtttggaaaatatggaaccataacaagtgctgttgttatgcgggatagtgatggaaattccaggtgttttggatttgtcaattttgaaaatgcagatgctgctgctcaggctgttcaagagttgaatggcaagatattcaatgataaggaactgtatgttggaagagcacagaagaagtctgaaagagagatggagttgaaggagaaatttgaaaagaatgttcaagaggtagctgagaagttccaaaacacaaacttgtatttgaagaacttagaggagaacattgatgatgagaaattgcgtgaactctttgctgagtatggcaatattacttcctgcaaggttatgcgggattcgaatggtgtcagcagaggttctggatttgttgctttcaaatctgctgaagatgctaaccgagctcttacggagatgaatggcaaaatggttggaagcaagcccctttatgtagctcttgcgcagcgtaaagaagacagaaaggcaaagctacaggcacaattttcacaaatgcgtcctgttgcaatggcgccttcagtaggtcctcgcatgcccatgtttccacctggtgtccctggagttggtcagcagctgttctatggtcagccaccaccagccttcatcaaccctcaggctggatttgctttccagcaacctctgatgcctggtatgaggcctggtggtccaatgccgaactttatgatgcctatggttcagcaaggacagcaaccacagcgtcctgctggtagacgtgctggtggaatgcagcagcccatgccaatgggtggtcagcaacaggtgttccctagaggtggtcgtggctatcgctatcctactggacgtggaatgcctgatcctggcatgcacagtgttggtgctgtgatgccaccttcatatgagatgggagggatgccaatgagagaagctgccccccaacctgttccaattggggcgctagccactgcacttgctaacgccccaccagatcagcagagacttatgcttggtgagaacctgtatcctcttgttgaacagctggaacgtgagcaggctgccaaggtcactggcatgcttttggagatggatcagacggaggttcttcacctgctggagtcgccagatgctctgaaagccaaggttgctgaagccatggaggtcctccgctctgcccagcatctccagcagagcaatgtttctactgagcagcagctggctaatctatcattgaatgatggcgtcgtctccagctgaacgttaatgtttctgatgtttcggaagtgctgccagtttttgcttgaatactaccctatctagagtgtaatgactttgtttacttggtttgttggagttttagctgctcctattactaggggttggttttgtcttgactttgttattttggttgcatggataatcgtttcgtttggatctattgtccgattgttactcgaattacaacagttgagtttttgggcgtcccaaaaaaaaaccccaaaaaaaaaaaaaaaaaaaaaaaaaagaagaaaaa

SEQ ID NO: 261201 - DNA, 549 bp, Zea mays
ggtgagaaaatgtaaattcttgttgaaaagatggagagtgagcaggctgataaggtcattggcatgtatttggagatggaccagacggaggttattcacatgttggagtcgccagatgctctcaaggctaaggttgctgaagccatggaggttctccgctcagcccagcatctccagcagagcaatgcctccaccgagcagcagctggctaatctatcactgaatgatggcgtcctctccagctgaatgtttctgatgattcagaaattgctggcaatttttgcttgatacctatctctagaatgcaattactttgtttactttattggaattttaggtgctgctctataattagctgaactagggggtggatttaattgccttgaattggttattttggttatatgaatatgttatgtcggagctcaggtctgtcattttggtatatggttatgttagcccttgtccgtttatcacccgaattatcacagattgaattttagagcgtcattgcttttctaaaaaaaaaaaaaaaaaaagggcggccgc

SEQ ID NO: 261202 - DNA, 1128 bp, Zea mays
  unsure (1)..(1128): unsure at all n locations
cgcgtcggcccacgcgtcagtcgagatacagatctcgagaagttgcagctccccacaatggaaggtctggctaaaaaactaaaaaagaactctgggagcaagatcgagtctgctagtgttgcatgtcatccatcagaagcaggtactagtgactgccagctggtttaactccaagtcaggaaagaagattcctttgaaatcagtcacttcaatcgtcgatgggctaaagaaatcgtacattgagaagttgaggcccttggaaaaaacctatcagttccatgacttcgtgtctcccttgctgactagcagcgatttcgatgcgaagccaatggtcatgctgttgggtcaatactccacggggaaaacaacatttataaagcatttactaaaaacaagttatccaggcgctcatattgggccagagcctacaacggacaggtttgttgtcatcacttctggaccagacgaaagatgcattcctggaaacaccatcgccgtccaagctgacatgccatacagtggcctgtcatcgttcggaacagcatttttgtccaagttcgaatgttctcagatgccacatccactgttagagcacgtgaccttcgtggacactccaggagttttatcaggggagaagcagcggacgcagcgcagctacgatttcaccggagtcacgtcgtggtttgcggccaagtgcgacctcatccttctcctgtttgatccgcataagctggacatcagcgatgagttcaagcgtgtgatcgggtctctccgcgggcatgatgacaagatacgcatagttctcaacaaggccgaccaagttgatgcacagcagctgatgagagtgtacggagcactgctgtggtcgctcgggaaagtcctgaacacaccagaagtcatgcgtgtctacataggttcattcaacgacaagccgatcagggagacagcggctgggccgctgggcatggagctgttccagaaggaacaagatgacttgctctcggacctgaacgacatccccaagaaggcctgcgaccgtcggatcaacgagttcgtgaagcgggcgaaggcggncaaggtccacgcgcacataatcagccatctgaagaaaagatgcctgcgctgatg

SEQ ID NO: 261203 - DNA, 999 bp, Zea mays
gatttcaaggaggtaaccagcaaaaaagccgccatcattaaccattatagtgaaatgaaagaaaagttaggctcagaagcttcaatttcaatcgaaaaaggtgaagtgataagcacacattacaagctatttttccgctgatattcgtgacataccaaaactggattcagttattcgcatggcccttttggatcccagagtgtgtgcttatttacctggacccaactgccactggtgctattgtgagttgggcatctcaaaagttctccactgctgtctttttcttatatgagcagattcatcctgatgatgcatttggggagcaaatgattagaaatcttgagagtagaggatgcccccttctcggtataaatgctacaccaaccctgagtcacaaggagaaactttttcttggcaatggatggcagagagccgttgcatgggatatgctgaaaatctataatgacttcattgacagtcaagaaagacgcaggatcgaacggttagaactgtttgatgagtttgaagagtggtatatgatgcaggaacactactgtgtggcctatggaatcaacgacgccgagggcatatttgacagttttggatttggggagacatagcagcactggtgccttttcttctgtgggtaccagctgcacttgttgtaaaccgacacctttaattcaagtattactcgaagtaaactttgcttgattaaagaaggaacgattgcttgataaaagaaggaacggacaggggtaggatacctaaacatctccctgatgttggagcttgctttgataggctgttaaagttcaacggcgttgtgcttggtttaaggtctttggtgccagtcgcagtggtgtttgatgtcaagcatgccaggctgccagttcgtcacaatatgaacagaacagtggtgctttccattttactctttccagatttaggttaaaaaaaaaaaaaaaaaaaaaaaaaaaaaaaaaaaaaaagggcggc

SEQ ID NO: 261204 - DNA, 299 bp, Zea mays
actttgcttgataaaaaaaggaacgattgctttataaaaaaaggaacggccaggggtaggatccctaaacatctccctgatgttggagcctgctttgataggccgttcaagttcaacggcgttgtgcttggtttaaggtctttggggcccgtcccagtggtgtttgatgtcaagcatgccaggctgcccgttcgtcccaatttgtacagaacagtggggccttcccttttcctgtttgcagatttaggtttaatctgggagcccctgtttgcagaatcactcccatgtagtttccctcc

SEQ ID NO: 261205 - DNA, 468 bp, Zea mays
gacccacgcgtgcgattcttggtagatcgtcatccattgtcatcagctgctggatcggtcagcaaaacataggagtggtctctattatcattatcaagcagctcgccgagccctcttcctgaaagaatgttgtacatattagcatttgaactctggccagtatcgcggaagaagttgggtgctgtttggttcacgaaatgtaacgtaaagggtaatggtaacggtttacactcgattacggacggtaacaagtttgaatagtccggtatcaaattttagtatggtatctgattacggttggactaaaacaaacatgatttaacgttatcacttacccattacgttacaaatatttgaaccaaacggtaccttggtgtttcgcgtgccctttggttggttaagatgtagcctgtgcaaataatgggttctgcggaaataaaatccccatttttctcacccatttgattg

SEQ ID NO: 261206 - DNA, 1935 bp, Zea mays
ttggacgcgtgggccgaagcaaagactacaggggggagacacatctctccccacctcgcttcgcacctctccagccgccgcctcctccttcgccggcgtcgacgatgggtgactatggccacggcggggggcagatgcggggcaacccggactcccgccccaggggccagggccagcgccctaacgtccagcagctcaagctcatggggcagatccacccgacggggctcacgcccaacctgcttaagctcttcgaaccgcgtccaccgctcgagtacaagcccccgctggagaagcgcaaattgccggcctacaccgggatggcacaatttgtgtcgcactttgctgagcccgaggatccagagtatgctccgccagtacccaagtgtgagaccagggcagagaagaaggctagaattcgcaataataagctcgagcaaggcgcagctaaggttgctgaagagcttcagaagtatgacccacaaagtgaccccaatgctactggagatccatacaaaacactctgtggtgctagacttaactatgagacatctgagcagaggatcaaacgcgagtttgaaggttatggtcctattaaaagggtgcgtcttgtaactgagaaagatacaagtaaacctagaggatatgcattcattgagtatgtgcacacacgagacatgaaaaatgcctacaagcaagcagatgggagaaaagtggacaacaggagggtattagttgatgttgagcgaggcagaactgttccaaattggcgtcctaggagattgggtggtgggttgggatcaagcaggatgggtggtactgatactgacaaaaaggattccactagggagcaacaacaaggtggacgccctagatcagaagagcctcggagggatgatcgtcgtgccgatagggatcgtgaaaaatctcgtgaaagggtacgggaaagagaccgtgaggagaggacccgtgaacgttcgcatgaccggactcgtgatagagatctacgagatgagaagcatcaccatagagaccgtgagaggactcgggatagggagagaggaaaggaccgtgaaagagaccacggccgtgaccgggagcgtgatcgtcgtgacagggacaaggatcgtggtcgggactatgatagagaaagggaccgtggtcgctctcatgatcgccatcgtgagagaggcagggaccgtggtgaaagagattatgagcgcaccagccatgaacgtgaccgtggtcacatgcatgagagggatgcagactatggcaatggtgggacaaagcatgacaaaaatctgtctagttatgggcaggattatggctatggtcagtatgagcaacacaaaggtcatgatgcatatggttacagtcaagatgtacgtggacatgaaactgaacactcaaagcggcatgagcacgaatattatcgtgttgactcgtatggtaaaatggaagctaactatcagatgccgccaaacaatgctgagccagaaggccctgaggaaggtgaggcatatgaggaaggcgactaccagtatcaccggtctggtgaacacatgaaggaagcttgattgcagcgatgagatttgcctgcagctttatactgatacacaacgatggtttcaatgttggttctttgtatgaattagtttcagctgcatagtgcctgtcagttgtgttcttccatgttggggaattctcaaaaggaagcaaaatcttgcccaactgcgtggatttttgaatttgaagcctatggctgccaatatcttgtggaataagatatttgtgtaatctggttgtggagatccatatgatctgccgttatccatctactcttctgttaagaagttttgtatgacagttccttcaaattatttgttccaacattttgcagaacttcagaattgttgttctatttggccttct

SEQ ID NO: 261207 - DNA, 665 bp, Zea mays
ccctcgcgtttgcggacgcgtgggagatcactttttatttttcaaaaagcagcttgtctgtagacagggattttctactgtatgtaggcttaattgggtaggcttgctggtgagtatagtatttatagttccttcagattagctatgaaagctatcactgctaccaaattttggttgtggagcaatcagcaaccttacacaatactaattgcatctctcaactcctagagtcgaagatccatcgattttgtgcataaggggtatacatcactcacttggtatttatcacctttctgttaacttcgttatcattctgtttgtttggaaaacgaaggctgaacaaatttcaccgatggagggcaacttggtatagtatttagttctatcgtacaccctttcctttagtataaaattccctggtaaggggatatccaatttatttcccaacgtatgccaatcggccagacagcgcttttcctccaactgtgttgatctgtgctggatttcactcctcgtgtggaagctctacatgtgcaaggttcgtcttgtaactgagaaagatacaagtaaacctagaggatatgcattcattgagtatgtgcacacacgagacatgaaaaatgcctacaagcaagcagatgggagaaaagtggacaacaggaggg

SEQ ID NO: 261208 - DNA, 1620 bp, Zea mays
cggacgcgtgggcggacgcgtgggcggacgcgtcggcagtcgcagcgcacgccatcagctagcagctagcgcgctcctcgagcccagcagagaaaggccggcctacccactctctctctctctctctccagtctccaccggcagcgctaatcgtaatagccatgggctccaccgccggcgacgtggccgcggtggtggacgaggaggcgtgcatgtacgcgatgcagctggcgtcgtcgtccatcctgcccatgacgctgaagaacgccatcgagctgggcctgctggaggtgctgcagaaggaggccggcggcggcaaggcggcgctggcgcccgaggaggtggtggcgcggatgcccgcggcgcccggcgaccccgccgccgcggcggccatggtggaccgcatgctccgcctgctcgcctcctacgacgtcgtccggtgccagatggaggaccgggacggccggtacgagcgccgctactccgccgcgcccgtctgcaagtggctcacccccaacgaggacggcgtgtccatggccgccctcgcgctcatgaaccaggacaaggtcctcatggagagctggtactatctcaaggacgcggtgctggacggcggcatcccgttcaacaaggcgtacgggatgacggcgttcgagtaccacggcacggactcgcgcttcaaccgcgtgttcaacgagggcatgaagaaccactcggtgatcatcaccaagaagctgctggacttctacacgggcttcgagggcgtgtcgacgctggtggacgtgggcggcggcgtgggcgccacgctgcacgccatcacgtcccgccacccgcacatctccggggtcaacttcgacctgccgcacgtcatctccgaggcgccgccgttccccggcgtgcgccacgtgggcggggacatgttcgcgtccgtgcccgccggcgacgccatcctcatgaagtggatcctccacgactggagcgacgcgcactgcgccacgctgctcaagaactgctacgacgcgctgccggaaaatggcaaggtcatcgtcgtcgagtgcgtgctgccggtcaacacggaggccacccccaaggcgcagggcgtcttccacgtcgacatgatcatgctcgcgcacaaccccggcggcaaggagcggtacgagcgcgagttccgcgagctcgcaaagggcgccggcttctccgggttcaaggccacctacatctacgccaacgcctgggccatcgagttcatcaagtgaaccaccgtcgccgcgatgagatgcatggctgccacatgctttgcttgcttggtcctcgtatcgtacgtcgccgtcgtcgtcttcttctggttattgcgctgctacctcgctgctctcgcgtatgcatgtacttttgcttaattttctttcttcatatcatgcactctggctggcctagactgcccccgatccatggtggccggtacgtcttgtcgagctcttgcatgtcgtggattctaaattcttcttctgcgtcgaattgtctctgccatgtgcgagtaataacaatcaaggttatacttacgatacaattacatggcggttttaaaaaaaaaaaaaaaaaaaaaaaaaaagaaagaccgaa

SEQ ID NO: 261209 - DNA, 651 bp, Zea mays
tttgtttacgcgcactgcgcctcgctgctcaagggcggctgcgtcgcgctgccggcgaatggcaaggtcatcgtcgtcgagtgcgtgctgccggtcaacacggaggccacccccaaggcgcagggcgtcttccacgtcgacatgatcatgctcgcgcacaaccccggcggcaaggagcggtacgagcgcgagttccgcgagctcgccaagggcgctggcttctccggcttcaaggccacctacatctacgccaacgcctgggccatcgagttcatcaagtgaatacggctaccaccgtcgccgcgatgagatggcttgcttgcttggtcctcgtatcgtacgtcgccgtcgtcgtcttcttctcgctctcgcgtatgcatgtacttttgcttaattttctttcttcatatcatgcactctggctggcctagactgcccctgatccatggtggccatgtcttcggtacgtcttgtcgagctcttgcatgtcgtggattctaaattcttcttctgcgtcgaattgtctctgccatgtgcgagtaataacaatccaggttatacttaccatacaattacatggcggtttaattgctctcttttgtgaatcgaatcgaatgactgaatcttttctgttgagaatgcccttgtctt

SEQ ID NO: 261210 - DNA, 444 bp, Zea mays
cccacgcgtccgcccacgcgtccgcccacgcgtccgatcagcagctagcgcgctcctcgagcccagcagagaaaggccggcagcgctaatcgtaatagccatgggctccaccgccggcgacgtggccgcggtggtggacgaggaggcgtgcatgtacgcgatgcagctggcgtcgtcgtccatcctgcccatgacgctgaagaacgccatcgagctgggcctgctggaggtgctgcagaaggaggccggcggcggcaaggcggcgctggcgcccgaagaggtggtggcgctgatgtggtggctgtcttcgtcccattgttcaatgccagactctcaagtacaacatgaagtcatgggctgggagaggctttacccttgaggagttgaaggctgctggcattccaaaaaggcttgctccaaccattggcatttttgtggatcacc

SEQ ID NO: 261211 - DNA, 488 bp, Zea mays
aggacgcgtgggcggacgcgtgggcggacgcgtgggcggacgcgtggggcacaaccccggcggcaaggagcggtacgagcgcgagttccgcgagctcgcaaagggcgccggcttctccgggttcaaggcccccgacatctacgccaacgcctgggccatcgagttcatcaagtgaatacggctacccccgtcgccgcgatgagatggcatggctgccacatgcatgcttgcttgcttggtcctcgtatcgtacgtcgccgtcgtcgtcttcttctgggtattgcgctgctacctcgctgctctcgccctcggggatgcatggacttttgcctaactttctttcttcatatcatgccctctggctggcctaggctgcccccgatccatgctggccggtacgtcctgtcgagctcttgcatgtcgtggattctaaattcttcttttgagtccccacaaaaaaaaaaaaaaaaaaaaaaaaattattaaaa

SEQ ID NO: 261212 - DNA, 342 bp, Zea mays
cgccatcagcagcttgcgcgctcctcgagcccagcagagaaaggccggcagcgctaatcgtagtagccatgggctccaccgccggcgacgtggccgcggtggtggacgaggaggcgtgcatgtacgcgatgcagctggcgtcgtcgtccatcctgcccatgacgctgaagaacgccgtcgagctgggcctgctggaggtgctgcagaaggaggccggcggcggcaaggcggcgctggcgcccgacgaggtggtggcgcggaggcccgctgcgcccagcgaccccgccgccggcgcggccatggtggaccggatgctgcgcctgctcggctcctacgacgtct

SEQ ID NO: 261213 - DNA, 1409 bp, Zea mays
ccggccgggaccggaccggccgggccgtcccacgcgaccggttacgctcacgcgtccggatcgccaataatggagtttccgcaccaccaccaccaccacggccatcgccgcgacgacgacgaagacgaccgcagaggcccgcctcccccggtctacggcggctacggccagccaccgccacccgacccgtacggccgcgcgcccgtcgaccccgatccgtacggtcgacctccgccccagtccgcgtacggtggggccggggacgcctacggccacagcggccaaggctacgcgcccccgccggcctacggcgccgggggcgggtacggcaacgtcgtccacgtcgcgcacgaggtcggcgacgagaggccttactacggcggcggcggcggcggtcttggtggcgcctacggaggcggtggctccgagtacggccacgagggccgaccgcaccacggcggcggcggatcccagtacggccacgagacacgcccgcaccacggcggcgggggcggcgccccgcctgtgaggcagcagacgtacaggatctactgcaaggctggggaggaccagtacagcctcgcctcccgcgacggcaaggtctgcctcgtgcgcacggaccgtgatgacgacgcgcagcactggatcaaggacatgaagtacagcaccagggtgaaggatgaggaaggctaccctgccatcgtcctcgtcaacaaagccactggagaggctctcaagcattcccttggccagtcacaccctgttcttctgacccgccataatccagactccctggacgagtctgtcctgtggacagagagcagggacgttggggatgggttccgctgcattaggatggtcaacaacatctacctgaactttgatgctttacatggagacaaggaccatggtggtgtgcgcgacgggacggcccttgtgctgtgggagtggtgcgagggagacaaccagcgctggaagattgttccctggtgaacaaggaaatgtgtgaccgagcccgcaccaaggaggagctcctgccgtaataagtgaagtgattggtactgaagtttctggaaataagaggctcttctgagatgcctgtttgtgtgagtatttgcgtttccattccgttttcatgataataaaacgcattgattattaatatatgtaatgtgatgctacactgagtggcagcgttggtatatatttgtaagaattaagaacccattgttgttggactaagcgtgacgagtgatgtactgatgtatgaacctttgcttgatgcatatgctcttctgctcctaccgtgggcttcgatgagtcgattatatatatgaaaaacaaaaaaataaaaaaaaaaaaaaaaaaaaagaagaaaaaaaaaaaaaaagggaaaaaaaggtgtgagg

SEQ ID NO: 261214 - DNA, 1130 bp, Zea mays
ttttccgttcacgcgtccgcggacgcgttcattccacccccgtctcctccgatcggacggaccaccgggccagcagcggggcggatcgcgtcagcagccatggtgaaggcctaccccacggtgaacgaggactacctcaaggcggtcgacaaggccaagcgtaagctccgcggcctcatcgccgagaagaattgcgccccgctcatgctccgcctcgcatggcactccgcgggcaccttcgatgtggccaccaaaaccgggggccccttcggcaccatgaagaaccccgccgagcaggcgcacggagccaacgccggactggaaattgccatcaggctgctagagcccatcaaggagcagttccccatcctatcctacgctgacttctaccagcttgctggagtcgtggcagtcgaggtaaccggcggacctgatgtccccttccaccctgggaggcaggacaagcctgagcctccaccggaaggccgccttcctgatgccacccaaggttctgatcacctcaggcaggttttctccacacagatgggtttgagcgaccaggacattgttgcgctttctggtggtcacaccctgggaagatgccacaaggacaggtctggatttgagggagcctggacgtccaaccctttgatctttgacaactcttacttcaaggagcttctgagcggagagaaggaaggccttctgcagctaccaagtgacaaagccctcctctctgatccatccttccgcccacttgttgacaaatacgcagcggacgaggatgctttctttgctgactacgccgaggcccacctgaagctttcagaattgggatttgctgaggcgtaaagtgagagagaacgaaccagaagagtgtggtggttgtcgtcggccggcaggccttgtgtttttgttgtctgcttttctcttgaatgaagatgtgatgaactctgctgaagatgtagtgtgtatgttgtcatggttcatttttctattttatttatctataatatctgtcggagaagctttgatatgaagcgggatctggttcggaacactgattaacgatgccaatgtattattattatttaattatttttatttattttatattattttattttttt

SEQ ID NO: 261215 - DNA, 676 bp, Zea mays
ggtaatttgaacttatatggtcatctggtgcctgagcttggaaaattggagcatcttcgctatttgttatgatcaccgtagcaggttttctccacacagatgggtttgagcaaccaggacattgttgcactttttggtggtcacaccccagttggtggaatcagggaagatgccacaagaacaggtttgggtttgagggagcttagacgtccaaccctttgatctttgacaactcttcaaggagcttctgagtggagagaaggaaggccttttgcagctaccaagtgacaaagccctcctctctgatccatccttccgcccacttgttgacaaatacgcagcggacgaggacgctttctttgctgactacgccgaggcccacctgaagctttcagaattgggatttgctgaggcgtaacgaaccagaagagtgtggtggctgtcgtcggccggccggccttgtgtttttgttgtctgcttttctcttgaacgaagatgtgatgaactcagctgaagatgtagtgtgtatgttgtcatggtttatttttctattttatttatctatctataatatctatcggagaaggtttgatatgaagcggaacactgaatctttttttaactttttttatattctgtattataatagtaatttctttttttttattaaatataa

SEQ ID NO: 261216 - DNA, 444 bp, Zea mays
gctaccaagtgacaaagccctcctctctgatccatccttccgcccacttgttgacaaatacgcagcggacgaggacgctttctttgctgactacgccgaggcccacctgaagctttcagaaattgggatttgctgaggcgtaacgaaccagaagagtgtggtggctgtcgtcggccggccggccttgtgtttttgttgtctgcttttctcttgaacgaagatgtgatgaactcagctgaagatgtagtgtgtatgttgtcatggtttatttttctattttatttatctatctataatatctatcggagaaggtttgatatgaagcggaacactgattaacgatgccaatgcctccacatccaaacccgttatgtttttgcatgcaggtgggtttcaagcaacacttataacaagtgtttgaaacatacaccagggtcctttcta

SEQ ID NO: 261217 - DNA, 1646 bp, Zea mays
caaaactcgcagcaacgaattgggcatatgccccccacctccaccccccacttttggcactttcccttccggccccctctcctcggcgcgatctaaatccggtccggcgatggacggcggggggcagcccccggacacggagatgacagacgccggcgcgggcggcggggggcagccgccgccgccgccgcagcagccggcgggcggggccgggatgatggagaacatccacgcgacgctcagccacggtggccgcttcatccagtacaacatcttcggcaacgtgttcgaggtcacctccaagtacaagccccccatcctccccatcggcaagggcgcctacggcatcgtctgctcggcgctcaactccgagacggcagagcaggtggccatcaagaagatcgccaacgccttcgacaacaagatcgatgccaagcgcacgctccgcgagatcaagctgctccgccacatggaccacgagaatattgctgcaataagggatatcatacctcctgcgcagagggctgcattcaatgatgtgtatattgcatatgaattgatggatactgatctgcatcaaattattcgttcaaatcaagctttgtcagaggagcactgtcagtattttctttatcaaattcttcgtggcttgaagtatatacattcagcaaatgttcttcaccgtgacttgaagcctagcaatcttcttttgaatgcaaactgtgacctcaagatatgtgattttgggcttgctcgcaccacctcagaaactgattttatgactgaatatgttgtcacaagatggtatagagcaccagagcttttgttgaactcctctgaatatactgctgccatcgatgtgtggtctgtgggctgtatatttatggaactgatggaccgcaaacccttgtttcctggaagagaccatgtccatcagctacgtcttctaatggagctcattggcacgccaaatgagggtgatcttgattttgtaaatgaaaatgcaagaagatatatccgccaacttcctcgtcaccctagacagtccttacctgaaaaatttccacatgtacaacccttagcaattgacctagtggaaaagatgctaacttttgatcctagacagagaataactgttgaaggcgcacttgcacacccttacttggcatcacttcatgacataagtgatgagccagtctgctcaatgcccttcagcttcgacttcgagcagcatgcattatctgaagaacagatgaaggatctgatctaccaagaggctcttgcattcaacccagattaccagtagccaaagttcggttccagccggtgattggcttcattgacatggagattttttccccacctgatgtcagtgcaaaaagtcaccaactccgattgctagctgtaaataactgccttacctgaagatactccattcctctgattaaaagctggtgacggtgtcattaagggtagaaaagaacgagcttgtgaaggtcaaatttctgcgaagccatggatttctgtgcttacaatatgttgttttcaatcggactttccttcctttttcttgtcaaaaacgtctcgatgttgtctgtgagaggtagttcgtgaacgatggctgcctgaattcagtggttgtcatc

SEQ ID NO: 261218 - DNA, 429 bp, Zea mays
aaagttcggttccagccgggtgattgccttcattgacatggagatttttatcccacctgatgtcactgcaaaaagtccccaactccgattgctagctgtaaatgattgccttccccgaagacccgcccattccttccttgattaaaaaaaaagcaggagacggtgccattcaagggtagaaaagaccgagcttgtgaaggtcaaatttctgcgcagctatggattcttgtgcttaccatatgttgtttttaatcaggccttcctttctttttcttcttaagtacttctcggtgttgtctgtaagagaggtagctcatgaacgatggctgcctgaattcagtggctgtcgtcaaagttaacagttctagtcgccttaagaattcttgttttacccccttcattgtttatataaaaggccctgtataacag

SEQ ID NO: 261219 - DNA, 1225 bp, Zea mays
ctcacgcgtccgcccacgcgtccgcgcctccccagtccacaacttacgccgccgctcgctccaccgcgcaagaggctgctgctgccgctcacccacccccgctcgcgcagaaggccgccgcagctctcactactggtgccctaaacgccgatatccctcttcgcctccctttcctcctcagcacccaaaaccccgaccttcagggttccgccgccatgccgcagggagaccacatcgagcttcaccagaagcgccatggcaagcgcctggaccacgaggagcgcaagcgcaagcgcgaggcgcgcgaggtgcacaggcgctcgaaggacgcccgcaatttgattggtgctaagggcaagaggttcgccaagaaacgctatgctgagaaggcgcagatgaagaagaccctgaaaatgcacgatgaatcaaataagcgacagaaggttgatgatgatgtccaagagggtgctcttcctccgtatctactcgatcgtgatcagacacagcgtgctaaggtactcagcaacacaatcaagcaaaagaggaaggaaaaggctggcaaatgggatgttcctctgccaaaggtcaggcctgtagctgaagaagaaatgttcaaggtgctacgaactggcaagcgaaaaaccaagcagtggaagagaatggttactaaagccacctttgttggagctggatttacaaggaaaccaccaaagtatgaacggttcattcggccaactggtctgcgtttcaccaaagctcatgtgactcacccagagctgaagtgcactttcaaccttgacataatttctgtgaagaaaaacccaaatggtccaatgtacacttctcttggtgttatgacaaggggaacgatcattgaggtaaatgtcagtgagcttggtctggtaactcccgctggaaaagttgtttgggggaaatatgctcaagttacaaacaacccggagaacgatggctgtatcaatgctgttttgctagtgtagagccatagtgagattttgtttatggtgatgaatcgtcccatttgtatctgctcttgataagatgctcccttttgaccgatctcatggctattcccaggagtttgttttgcaccgtggtccatgggcgagcattctatatccttgctatgtgcgacaagccgacaaatgacttggctattatagcctgctataaagttgactaatccaaattagcaacatttttcttg

SEQ ID NO: 261220 - DNA, 468 bp, Zea mays
aaaaacccaaatggtccaatgtacacttctcttggtgttatgacaaggggaacgatcattgaggttaatgtcagtgagcttggtctggtaactcccgctggaagaggtgtttgggggaaatatgctcaagttacaaacaacccggagaacgatggctgtatcaatgctgttttgctagtgtagagccatagtgagattttgttgatggtggtgaatcgtcccatttgtatctgctccgatatgctattttttgaccatgtcatggctaatcccagtagtttgttgtgcaccatgggcataatgagcattctgtattctcgctgtgtgctacaaacatatatggagtaatataaattagcagtatttttttcgcgtttttttgagctccccccacttcctcaaaaccctagacagtccttacctggaaaatttccacatgtacaacccttaacaattgacctggtggaa

SEQ ID NO: 261221 - DNA, 306 bp, Zea mays
tcgcgcgagcggccgctcgcgatctagaaccttcctctctcgcagcaccggctctcaacctccgccgccgctcgcccggggcgtcacccacccgcgcagaaggcccccgccgctcaaactaccggtgccctaaaccccgatattcttcttcgcctccctttcctcctcagcacccaaaccccgaccttcagggttccgccgccatgccgcagggagaccacatcgagcttcaccagaagcgccatggcaagcgcctggaccacgaggagcgcaactgcaacgcgaggcgcgcgaggtgcacaggcg

SEQ ID NO: 261222 - DNA, 1125 bp, Zea mays
cccacgcgtccgcccacgcgtccgcccacgcgtccgcggacgcgtggggtggagtcattccgtgacatccggtccttcccagaggtgaggaaccaggaagatgagctcgccttcgcccagatgatcaaaatgatcagggtgcggcacaccaatgtggtgcctgcggttgcattgggtgtgcagcagctgaagaaggacttgggcggtccaaaggcgttcccccctggaatccatgagatccatcagtttcttgaccgcttctacatgtcaaggattgggatccggatgctgatagggcagcacgtcgctttgcatgaccctgatccagagcctggtgtgatagggcttataaacacaaaaatgtcacccatgacagttgctcgaattgctagtgaagatgcacgtgctatttgcatgcgggagtatggatcatctcctaatgtcgacatatatggtgatccggcgtttacattcccatatgttacaccacatctacatctcatgatttttgagctggtgaagaactcccttcgcgcaccacaggaacggtctatggattctgataagcttgcacctcacggttcgaatcatagttgctgatcgagcacaggacgtgactattaagattactgatgaacgtggtggtataccaacgagtggtctctcaagactttttacgtatctctataggacaccagaaaaccctcctgatcttgatgtacataatgaaggagtaactatggctggatatggttatgggatccctattagtcgcctttatgctcgatatttcggtggggacttgcagatcatctctatggaaggatatggaactgatgcttacctccacctttcacggctgggagattcggaggaacccttgccgtaatttattcaaaagaaccattcctgtaattaggatattgcttctgtgctggtatgcaagtatagttctgaaggccagccacctgttcagctgttggtgtcccaacttgttgtctttattgttcattcatcatctcaatggattgtgatcgtaattcctaatcgttttatgactgatttgtactgtcattataattgtcgaacctccaaaaaaaaaagttgccgtcgagcatccccggt

SEQ ID NO: 261223 - DNA, 732 bp, Zea mays
tcctcgcgtccgctcagctggcatcgccatcgacggcgtgccgccatagacggcctgacaccccccccgctcccgcccccgcccccgccctattaatcccttcatcatcccaattcccacaaacctcgcgcgcggcggagggagaaggaaggatggcgtcggagccggtggcgcgggcggtggcggaggaggtggcgcgctggggcgcgatgcgccagaccggggtcagcctgcgctacatgatggagttcggggcgcgccccacggagcggaccctccttctcgccgcgcagttcctgcacaaggagctccccatccgcatcgcgcgacgggcgctcgacctcgactcgctccccttcggcctctccaccaagcccgccatcctcaaggtgaaagattggtatgtggagtcattccgtgaaatccggtcctttccagaggtgaggaaccagaaagatgagctcgccttcacccagatgatcaaaatgatcagggtacgacacaccaatgtggtgcctgcgattgcattgggtgtgcagcagctgaagaaggacttgggcggtccaaaggcgtgcccccctggaatccatgagatccatcagtttcttgaccgcttctacatgtcaaggattgggatccggatgctgatagggcagcacgtcggtctgcatgaccctgatccagagcctggtgtgatagggcttataaacacaaaaatgtcacccatgacag

SEQ ID NO: 261224 - DNA, 690 bp, Zea mays
gttagcaaaaatcaatagcttcgattattcatgatctggtatgaagtatgaactgtttgactaaaccgtgcctttgcagattactgatgaaggtggtggaataccaaggagtggtctctcaagaagttttacgtagctctatagtacagcagaaaaccctcctgatcttgatgtacataatgaaggagtaactatggctggatatggttatgggattcctattagtcgtctttatgctcgatatttcggcggggacttgcagatcatctctatggaaggatatggaactgatgcatacctccacttatcacggctgggagattcggaggaacccttgacttaatcgattcagaagaagccattcctcattcctgtagttaggactctattgctttctcaattaccgtgctggtatgcaaatattgttctgaaggccagtcacctattagttcagctgtccatgccctatttgttatctttggtgttcattcatcatctcgatggaatgtgatcataattcagaatagttttgcttctggtgtgcactgtcatgataactgttcaacctccaataatggtatctgtcgagcacccgaggcattgaatttgagtaatggaattcaccataattgttcaacctccaataaagtctgtaactccaattcttcaaagcatgttttttagttcgac

SEQ ID NO: 261225 - DNA, 680 bp, Zea mays
gaacattcttgcatgttaaagcatccgcttacaggactaatttttggtctatttgcgtctgcaaaggtgagagattggtatgtggagtcattccgtgacatccggtccttcccagaggtgaagaaccaggaagatgaactcgccttcacccagatgatcaaaatgatcaaggtgcggcacaccaatgtggtgcctgcggttgcattgggtgtgcagcagctgaagaaggacttgggtggtccaaaggcgttcccccctggaatccatgagatccatcagtttcttgaccgcttctacatgtcaaggattgggatccggatgctgatagggcttataaacacaaaaatgtcacccatgacagttgctcgaattgctagtgaagatgcacgtgctatttgcatgcgagagtatggatcatctcctgatgtcgacatatatggtgatccaggttttacatttccatatgttacaccacatctacatctcatgattttcgagctggtgaagaactcccttcgtgcggtacaggaacggtatatggattctgataagcttgcacctccagttcgaatcatagttgctgatggagcagaggatgtaactattaagattagtgatgaaggtggtggaataccaaggagtgggctctcaaggatttttacgtatctctatagtacagc

SEQ ID NO: 261226 - DNA, 528 bp, Zea mays
cacccatattccattttggttatcctcttgcgtcacacctcctccctcctggcctcctcctgcggcccacttatatataccaccacgtcgatgcgctgctccgccggcatctccatcgccggcgcgccgccgtagatggcctgacatttttcacttcatttgtcatcccaattccacaaacctcgcgcgcggcggcggagggaaacaaaaaaaaaaaggaaggatggcgttggagccggtggcgcgggcggtggcggaggaggtggcgcgctggggcgcgatgcgccagaccggggtcagcttgcgctacatgatggagttcggggtgcgccccacgtagcggaccctcctgctcgccgcacagttcctgcacaaggagctccccatccgcatcgcgcgacgggcgctcgacctcgactcgctccccttcggcctctccaccaagcccgccatctcaaggtgagagattggtatgtggagtcattccgtgacatccggtccttcccagaggtgaagaccaggaagatg

SEQ ID NO: 261227 - DNA, 845 bp, Zea mays
agggaggagaggaggcgaggtgagagaggacgaagagggcgcatcgtgggttgggtgatcacggcctgatggggtcgtggcgcaaggcctacggcgccctcaaggactccaccaaggtcggcctcgccaaggtcaacagcgaattcaaggaattggatattgcaattgtgaaggcaaccaaccatgttgaatgccctcccaaggaacggcacgtcagaaaaatactcttggcgacctcagcaaaccgccctcgcgcagacctctcgtactgcatatacgcattgtcaaggagattgtccaagacaaagaactggatagttgcgctcaagacattgatagtggtgcataggcttctgagggaaggcgatcccatgttcaaggaagagttcctggcctactcatccagagggaacatcttgcacatagccaatttcaaggacgactcgagccagtcagcttgggattgctccgcatggattcgcgcctatggatgcttcctggaggaacggctcgagtgcctcagggttctcagatacgacatcgaaaccgagcgtctcgtcagatatccccagacttccagcaaggtacatagtaaaaccaggaccctgcctagcccggaactcttggagcagttgcctgcactgcagcagctgcttttcagggttgtcggcgtccagcctgaaggcgctgcctgctcaaattaccttattcagtacgcactagccctggttctgaaggagagcttcaagatctactgctcaattaacgatggcatcatcaatctcgtcgatatgttcttcgaaatgccgaagtacgacgcaatcaacgctctggcgatttacaaa

SEQ ID NO: 261228 - DNA, 2029 bp, Zea mays
gccaccagaagtaagagaaaccacgcgtgtcagccagccattggatcaccaccattcgcgctgttcggcgtgcgcacccgatcccgtctccgtgcggctttgtgagtagagaagggaaggggaagcaggagcaggaggggttcgtcatcgcgtggtggccgcgccgctctgttcctccgtcccctcctccttccggctctcgctgtcacatgtcgtgtggtgtgggggcgctctgatccggatggtgcagcgccgcgggatcgcccacggccatgattgatcgcgaacgagcagaggaaatgcaagttaataatgaggcaccactagggtgcctcaagccaaatatttctcagtataactctccagagcagataggtggtgttgaagggtttcctgagaataatgaaaaaaggaatgatattgttgctgcggaaaaaatctgggaggcgactccaaaccaaggccttagcaggcccatctaccgacaagaattttatgcctggccatatatttattcagattatcaaatcgtgcgtcagccactaccttatggttttgacaaccaattttatcagataaatagggaccacggtttccctattgagaacagggttcaatatcttccattcaagatgctccctcaaggtcacccccatgatgcacagcttcaggaatttcagtattttgtggttattgactttgaagcaacctgtgacaaggtgaacaatccatttccacaagaaatcatcgagtttccatctgtcttggttaacagtgcaactggaaaactcgaagaatgcttccaaacatatgttcggccgacgtatcatcaatttttgactgatttttgcaaggagcttactggcatacaacagattcaggtggacagaggtgtgcctctaggtgaagccttactcatgcacgataaatggctagaggacaagggcatcaagaacacaaactttgctattgtgacctggtctaactgggactgccgtataatgctggagtcggaatgcagatttaagagaatcaggaagcccccttattttaacaggtggatcaacttgagggtaccgttccaggaagtgtacggggacgtccgctgcaacctgaaggaggcagtccagctggccgggctcacatgggaggggcgcgctcactgcgggctcgacgacgcccgcaacaccgctcgcctgctggcacttctgatgcaccggggcttcaagttctccatcaccaactcactggtgtggcaacctgccgccgctccgcagtcaaccgccgccacctgccacttctccccggaccgctctccggacccagtcgtcgtccagctccagcaccagcagcagcagcacaagccgaaggaggcgctggggtctcccgcgtcgctggtgaacccatcgtacgccacccccgcgggagggaaggacagagccatgtactgctactgcggggtgctgagccggtggagcgtcgtgcgcaagccgggacccatgcaggggcgctacttcttcgggtgcgggaactggaccgccacccggcgcgccatctgcccgtacttcgcatgggcctcgtgaatagcaaagcaagcagagatctgggctggtgctttaaccgagggaggcgcgccatgttgctgcggctggctgctgcgcctcccagttccgtatatattattattgttattattatggtataataactttgctcgcgagacaaatggaggttatctaggtagtgtctctaacctgtcgtactgacttctgtcgatagaagagaatggggccagatgctgcttaggtgtgatctatcctatccatccatggataataaagaagtttgtggattgctgttttattaacttgatggaactcctccgtaggtgtggtttgtgcaacttggattttgaaggcttgtgcgtctgtgagtgtttgatcaaatcgaaggtggtgtttgtttgctgaatgaaaaaaaaaaaaaaaaaaaaaaaaaaaaaaaaaaaaaaataaaaaaaaaaccccac

SEQ ID NO: 261229 - DNA, 801 bp, Zea mays
gaaagcccccaggggccagggctagcagcggcggcgtatccctaatcccacctccagtctctgggcaccaaatttccggcggcgatggcggcggctgtggcgaggtcagggttccggcgcatgttctccgtctctgccttcgcgccgccgaaggcgcccgccgcgcgccccaaggccgacccatcccccaacctcttcgtctccggcttaagcaagcgtaccacaagtgaaggacttagagaagcctttgcggagtttggtgaagttttgcatgctcgagttgtgaccgatcgtgtcagtgggttttctaagggatttggctttgtaaggtatgctacgaccgaagaggcagccaagggaatagaaggaaaggatggaaagttccttgatggatgggttatttttgcggaatacgctaaacccagaccaccgccggaggaaacagggatgaattcgcagccccagcagtcatggggagctccatcaggttcctggggtgcacagtagatgaagtgatattgtgagagcccctccctgtccccagccctggggctcgtagcggatcgtgagggatgaatttgtgtgtggtgtgtcacaggtgtgaatgcctttgttgtcccaatattcctaccgtgttgggagtggtcgcttgctcgcgtccacgtctttcacatgaattggttactgtggtagttgtagttctggatacggtaccaaaacaaaagtattgctgtcaacaatctgcaacagccgggaaaacagtcgaaaacctttgcaaataatgcctgctgccgtgcaaaa

SEQ ID NO: 261230 - DNA, 777 bp, Zea mays
cccacgcgtccggtggaacccgccgcaagttactgatggcctccctgatgcgttttgtggagggtgggttggattcttctcatacgatacagtgcgttatgttgagacaaagaagcttccttttagcaaggcaccgcatgacgacaggaacattcctgacatgcatttaggcctctataccaacgtcattgtgtttgatcatgttgaaaagaaaatgcatgttatccactgggtgaggacggactgctaccaatctcttgacgaagcatatgaagatgggacaaatcggcttgaatctttgctatcaaaattacattgcttcaacgtcccaacgctttcttctggttctataaaacttaatgttggaggctttggatcggcgacgctaaagtcaaacatgtcaaaagaagagtataaaaatatcgttgtccaagctaaagaacacatcttggctggtgacatttttcaagctgttttaagccagcgttttgagagacggacattcgccgacccctttgaaatctatcgtgcattgcgcatcgtaaatcctagtccatatatggcctatctacaggcacgaggttgtattctcgtggcatcgagtcctgaaattcttacccgggtacaaaagaggacaataatcaatcgtccgcttgctggaaccataagaagaggcaaaacaaaagcagaagacaaaactttagaacaattgcttctgagtgatgaaaagcagcgtgctgaacatattatgcttgtagaccttgggcgcaatgatgt

SEQ ID NO: 261231 - DNA, 450 bp, Zea mays
cccacgcgtccggaaaacacatgttattcattgggtgaggacagactgctatcgttctgttgatgaagcatatgaagatggaagaaatcggcttgaagctttgttatcaagattacattgcctcaatgtcccaacactttcttctggttctataaaactcaatgttgaaaactttggcccagtaatgcaaaaatcaacgatgtcaagcgaagaatataaaaatatcgttgtccaagctaaagaacacatcttggccggtgacattttccaagttgttttaagccagcgttttgagagacggacattcgccgacccctttgaaatctatcgtgcattgcgcatcgtaaatcctagtccatatatggcctatctacaggcacgaggttgtattctcgtggcatcgagtcctgaaattcttaacccggtacaaaagaggacaataatcaatcg

SEQ ID NO: 261232 - DNA, 1567 bp, Zea mays
gtatttatattctctccttaattcccgtgtttctcctccgcctccgctcctccgcaaccccttcccctcctccgccgaagcctctcctccggccgccgaaaccctagcctccgccgctgccgtcatggcaagcagcaacgtctcgaccgtttacatctctgtcattgatgacgtcatctccaaggtccgcgaggatttcatcacctacggagtcggtgacgccgtcctaaacgagctccaggctctctgggagatgaaaatgctacactgtggcgcgatctcggggaacatagaccgaaccaaggctgctgccgcgtccgtcggaggcaccaccggcacgacaccgcccgtgcacgacctgaacgtgccgtacgaggccacatctgaggagtacgccaccccgaccgctgacatgttgttcccgccgacaccattgcagaccccaatccagactcctctgccagggacagacacagcgatgtacaacatacccactggcccttccgattatgccccctcaccgatcagcgatgtcaggaatgggatggcaataaatggggcagacccaacagctggtcatccaagtccctacatgccaccaccttccccttggatgaatcagaggccgctgggtgttgatgtgaatgtcgcttatgtggaaggccgtgaagatcctgacaggggcgtgcagcctcagccactgactcaggattttttgatgatgtcttctgggaaacgcaagagggatgagtatcctggtcagctcccttctggttcttttgtaccacaacaagatggaagtgctgatcagatagtagaatttgttgtgtcaaaggaaaatgcgaatcaactttggagttccatcggcaataagcttgaaacaccaaccaagacaatcactccagttattccgcagcgtgatgggattcaagataactacaatgatcaatttttctttccaggagttccaaccgaagattataatacccctggagaatctgcggagtatcgagctcctacacctgctgttggaacaccaaaacaaagaaatgatgctggagatgatgataatgatgatgatgatgatgaacctcctcttaatgaagacgacgacgaggagttagatgaccttgagcaaggggaggatgaacctaacacacaacatcttgtacttgcacaatttgataaagtgtcaaggaccaagaatcgttggaagtgcaccttgaaggatggaatcatgcatttgaatggcagggatgtcctttttaacaaggcgacaggtgagtttgatttttgattttttggatgaagatgagctattttagaagcagctgtatggacatatctttgtcttgacataaggacggggaggtgacgaagtgttcttggtggggtcctggcagtatgactgcgtcgtgttttcctattgagtctttgtttcaccctcttgtttgtcaccgcaattgttatcgctgtaaagaagttaccgcttgtgctgtggacattttctgagatgggtgtctcacatccccagcgtaactaatgctagttatacatttttgtctcc

SEQ ID NO: 261233 - DNA, 645 bp, Zea mays
cgcgtccgcacacgcgtgcgcggacgcgtgggcggacgcgtgggcggacgcgtggccggacgcgtcatcgcgtgcgtacattaatctaagcgatcttcatccagccttctgctctgctccctcgaaatggaggcgacgagcaaggcgatggcttcaggcctcctcgttctgctgcttctcatcaacacaggctttgtcctgcccgtccattccgaggactgctgggccgacacccgcgtcatctgcaccaagacgcacaactgccgggacgacacttgcgcggggcgcggcatgccggacggccgctgccactgggagttccccaacctggtgcccttctgccagtgcctgcgccccaactgccactagtccgggcgcctcggattggctcacttcgccggcgatgatggatggtgcccaactgcgactgcccagtctgctccattcgttgttgtttaaggcataatatataaactgccaaattcacatgtattttgggatatttgttatcatactatgaaatgactgtgaatcgttgttctgatttggtctatcaccacatgttttccttgcatgaagtaatatacgatatttatgtaaaaaaaaaaaaaaaaaataaaaaaagggcgtctggacgcgtgggtc

SEQ ID NO: 261234 - DNA, 1485 bp, Zea mays
  unsure (1)..(1485): unsure at all n locations
atgaagggggtgtttgcaactcgcgtttctggttctgcagatctctaccaggtgaacagggggaagccttaccatagtgtgaactttgtaattgctcatgatggatttactttatgtgaccttgtttcatataactccaagcacaatgatgcaaatggagaaggtggtcgtgatgggtgcaatgacaactacagctggaactgtggcattgaaggagaaacaaatgatttgaatgtgctaagtcttcgttcaaggcaaatgaagaacttccatgtggcattaatgatttcccagggtactccaatgatgctgatgggagatgaatatggtcacacacgttatggaaacaacaatagctatggacatgatactcacataaataattttcagtggggccagttggaagaaaggaaggatggccatttcaggtttttctcagagatgatcaagtttcggcataaccatcctatattgagacgagacaggtttctcaacaaaaatgatgtcacttggcatgaaaatcgttgggagaaccaggacagcaaatttttggcatttacgatacatgatcacagttctggtggagacatctatttggcattcaatgctcatgagtattttgtggatgctgtaattcccccaccaccacaccataaatcttggagtcgtgtggtggataccaacctggaatcaccaaaggatattgtcccagaaggggtgccattcacaggttcagggtacatgattgctccctactcttccatcttgcttaaggcaaagccttagaatggcggaggcaagtcattctcaagtgagcacgaataatggtgttgtgatccctaactttgcaagctcttagccaactgtactgcaagtatagcaaactttggtatgtgaagtcggaccaacccttgcggaaatcaacggaagccatggtttgctaaaggtatactcatggagaattggagatatggcaaacacatacgcaagtaacctcncacacatctaagcaagaagagcctttcattaggggatgcatggctcgaggaaactatatttgcatttggttgattcatttttatttgttgcacatgtcagtatgtcacctgtgtgtgtcatccgcttatttgcttaaaaattggacattcctttgttacatatttgtgttgtactgtgttggagctagcgttcctggtattctagctatattgcacgggggtgggaggacgggggacgctttgtcgccgtggtcttaggtctatcagcaatggttttctttagatttctcctcctgtatcacttttttgcgtcacatcatcaatattttattctatacctttttttatctctaaaaaaaaaaaaaaaaaaaaaaaaaaaaaaaaaaaaaaaaaaaaaaaaaaaaaaaaaaaaaaaaaaaaaaaaaacaaaaaatataaaaaaaaaaaattttacaaacacaaacttacaaaagtttaacataaaata

SEQ ID NO: 261235 - DNA, 751 bp, Zea mays
cggacgcgtggggccgacggtctcggtctcgcaggggcagggctgggcggtcgacggaggccaattctccaacttcctccctccgtcgatcatccagcaccagcaggagaatcccgtcgaatccccctctcaaccaagggcgcgcgcgcgtgcgtatgcctcctccagatccaaagcaacagacagcgagggggcaccggggtccgccgcatgtttgcgatttatggaggatcatgctttcttgcttactacattagctcctgacgcgccgccctcccctcgcgttcattgatttctgttataattactaccgagctactatctccacattattattggtaaagaaagaaagggcgcctcctctaatttgatgggcattccgtttccttctcaacttcaacgccaacaacagttgatgctactatggttggaaatcgggcatggttcggagggcttttcagcggctcaggcaaaaggcgacaagtcagtgcagagaagatagtgcttgatctaacccctgtacaggaacagagactgcaaagtctgaaggaaaggctaaatgtaccttacgacgaaactcggacggatcatcaagattcgcttagggctctatggaatgcctcctttcccgatacagagctcactagcttagtttcggaacagtggaaagacatggggtggcagggcgtcaacccagcaactgatttcaggggctggggatttgtttcgcttgagaaaccttttgtttttg

SEQ ID NO: 261236 - DNA, 676 bp, Zea mays
ttccacgcgtccgtcctccgaggcagcggcggcgggggcgggggcggtgggttcccgggggtggcgtgggaggtgttgcggcggcacttctctaagaagcggtccgtggacgtgaggcggatcaaccccaaggtgcccaaggaggaggccgtcgccatttccggccgactcctccagatcctctccgaccatgggcccctcaccgtcggcaacacctggaaccacgccaaggatgctggcatcgctggtctgaacagcaagacgcacatgaagatcctgctgaaatggatgacggggagaaatgtcgtgaagctgacctgcgtgcacgtgggcaacgcgaagaagttcctctactccccgtccactgaaagcagcagcagcagcgccggcgcatcaccgtcatccacatcggcctcgcagtgacggtcagtcgctgttaagccttggtgtggttcttgatgttgctttgtggatcgatggaggttgcctctggtcattcggatcccatgtttaaccttgatgacgaacattggaaaaagcattttgttttatggactggaatagtctgcaaaccatcacgatagcaatattgttctgctgctcctcagctgaggatgctgccctgtcctgaactcctgattttgcttttgatctactatgtgatgatttgctcttc

SEQ ID NO: 261237 - DNA, 470 bp, Zea mays
cccacgcgtccgcccacgcgtccgcccacgcgtccgaaaaaaagaaaaaaaaaaaacagagagtagagtagactacgacagcgtccggcgaggaggcggaggcgaagatgaggaagaagctcggcacccggttccccgcggctcgaatcaaaaagataatgcaagcagatgaggatgttggaaagattgcactagcagtgcctgttttagtctcgagggctcttgaattgtttttacaagatttaattgaccggacttatgaaattactcttcaaagtggagcaaagacactgaattccttccacctgaagcaatgtgtgaagaggtacagttcttttgatttcctaactgaagttgtcagcaaggtaccagatcttggtggcgctgattcctgtggagatgaaagaggattacctagaagaaggtaaggtcatttgtaatcaacattttatgattcaattggctcacgt

SEQ ID NO: 261238 - DNA, 660 bp, Zea mays
gcgagaacgccacacgagaaaagaaacccaagcattcgccatcaaaaaaaaaaaagagcagaaaaagtagagtcgactacgacagcgtccggcgaggaggcggaggcgaagatgaggaagaagctcggcacccggttccccgcggctcgaatcaaaaagataatgcaagcagatgaggatgttggaaagattgcactagcagttcctgttttagtttcgaggtctcttgaattgtttttacaagatttaattgaccgtacttatgaaattactcttcaaagtggagcaaagacactgaattccttccacctgaagcaatgtgtgaagaggtacagttcttttgatttcctaactgaagttgtcagcaaggtaccagatcttggtggcgctgattcctgtggagatgaaagaggattacctagaagaagaaagtcaaatggcagtgacccagagaatgatgaatcaagatctagtaaaatggccataagaaatgcaaacatcagccccagaggacgtgggaggggtcgaggcagaggacgaggtcggccaccaaccaagagaaaggaggttggttacgtacaatttgaagatgagagcagcatgtttgctgaacatggtgagcccttgccaggagaggatacagttcaagagatcaatggc

SEQ ID NO: 261239 - DNA, 1788 bp, Zea mays
cctcccccccgcgcctcccgaaacttctcctttctccatcctcaaccctactcccccttcatccgcacgaacgaagcagcgcgagcgaggagcagacgatccttcccgacctcgaagcctaccccccttccagctgcggccatggcgaccgtcatgcagaagatcaaggacatcgaggacgagatggcaaggacacagaagaataaagccactgctcaccatcttggtcttcttaaggctaaacttgcaaaattgcggcgggagttgctcactccaacatccaaaggtggtggtggtgcaggtgaaggatttgatgtgacgaagagtggagatgcacgtgttggtttagttggctttccttcggttgggaaatcaacattgttgaacaagctaacagggacattttcagaggttgcttcctacgagtttacaactttaacatgtattcctggagttatcatgtataagggtgctaaaatccagcttctagatctcccagggatcatcgaaggtgctaaagatggaaagggcagaggaagacaggttatcagcacagctaggacatgcaatgttattttgattgttcttgatgccataaaaccaataactcacaagcgtcttattgagaaggagcttgaaggatttggcattaggttgaacaaaacaccacccaatttgactttcagaagaaaggacaagggtggaatcaacttcacatcaacagtgacgaacacacatttggaccttgatacagtaaaagcaatctgtagcgagtacaggatacataatgctgatgtctccctgagatatgatgctacagcagatgatctcatagatgttattgaaggaagccggatttacactccttgcgtatatgttgtcaacaagattgatcagataacactcgaggagctggaaatcttggacaaacttccccattactgcccggttagtgctcatcttgaatggaatcttgatggacttctggagaaggtatgggaatacttggatttggttaggatatacacaaaacctaaagggctgaacccagattatgaggatcctgttatcgtatcatctaagaagaaaaccgtggaagatttctgcgacagaatccacaaggacatggtcaaacaatttaaatacgctctggtatggggttccagtgtgaaacataagcctcagagagttggcaaggagcatgagcttgacgatgaggacgtcgttcagatcatcaagaaaatataggcgtatcatgtggtggaacgaaacctgtttttttctgcaaaactgggagcgttgaggattttgttgagtagtagcctcgcgagaagagcttgaactcggcctttgcttgttggtgaggctcatatgtaatgttccctgttctcagaaaatttgctttgatccaaagacaatgtgagtcggcatttacttatatacaacgagtcatgtagctgtgatgtaacttcctctaacttggtgccatgtggactggagtcaccgatgtgtgctgccaagtgtctggcccaaccgttgaacacgtggagagatgcctctccatatctttagaggagggatataaggtgatttgatgatttatttattaagggttggtcccttaaaaaaaaaaaaaaaaaaaaaaaaaaaaaaaaaaaaaaaaaaaaaaaaaaaaaaaaaaaaaaaaaaaaaaaaaaaaaaaaaaaaaaaaaaaaaaaaaaaaaaaaaaaaaaaaaaaaaaaaccccccaaaaaaaaaaaaagggggggcccccccaaaggtttcccc

SEQ ID NO: 261240 - DNA, 1136 bp, Zea mays
  unsure (1)..(1136): unsure at all n locations
ccgcccccggccgcacgcacccagcgatcagcgcagattccttccacgccccccctcctttccaggtcccctcgcccgcgctctcagatctcgcgcgcctcccacaagggaaaccttgagccatgggcacagttgtggatgccgctccagcagttgtggctgaggtcactgagaacatgttgggtggcaagaaagttacagttgtatttgttctaggtggtcctggaagtggaaaaggcacacagtgtgccaacatcgtggagcactttggattcacccatcttagtgctggagatcttctgcgtgcagagattaaatctggctctgagaacggaaccatgattgagaacatgataaaggagggaaagattgttccatcggaggtgactataaagcttttgcaggaggcaatgataaaaagtgaaaatgacaaattcctgatcgatggatttccaaggaatgaggagaatcgtgcagcctttgagaatgttaccaaaatttctcctgcatttgtgctattctttgactgttctgaagaagatatggagaaacgactcctggggcgcaatcagggaagggttgatgataacattgaaactatcaaaaaaaggttcaaaacctttgttgactcaactctgcctgtcattgagcattacaactcaaaggacaaggttaaaaagattgatgctgcaaaaccaatccccgaggtgtttgaagacgtcaaagccatttttgccccatattctctaaaggctgaatagagcaatctaagggacatgataaaggtgatacatggtgtctaggcaccacataaacatatctgtgattatgatggaccctttaatatagaacaaaagttttggctcatttgagctaccagcgtaccagtaggcaattcgatttgttaccagcaacaagtgatctgattcccagtggtcctgctagagtaacattttttaccactgtctgttgtctatgtatcctttgatattgtgttgtaccaatgtgcaatttactctatggactgatggaacattgtgccatcccatccaccagatttattgtggcgttatggaaagcatagaaccgctgccatattctttaatttgtacgctgaaatatactcgttggcnccg

SEQ ID NO: 261241 - DNA, 442 bp, Zea mays
ggtcgaaataccgggtcgaccacgcgtcggggggtcattcgccatcctggcccgggggaaaggggggtccccggtttgaatagttgatttccatttcagggtgcgcatctgcgcgcgcctcccacaagaagggtgcgcgaggtgctcttgctgtgtgatctttgtcgccttgtgacgctcgggaccgggttattggcgggagtttgtcagaataatacataaagaacttgtgccacgagatcgggggacttcagatcagggaaaccttgagccatgggcacagttgtggatgccgctccagcagttgtggctgaggtcactgagaacatgttgggtggcaagaaagttacagttgtatttgttctaggtggtcctggaagtggaaaaggcacacagtgtgccaacatcgtggagcactttggattcacccatcttagtgctg

SEQ ID NO: 261242 - DNA, 465 bp, Zea mays
tcgtgggtcgatacaagcctctaaactgagtgcgaccagcacagattcgttccacgcctacctcctgccctcgcccgtgctctcagatctcgcgcgcgccccgcaaagggtaactttgagccatgggcacagttgtggatgctccagcagttgtggctgaagaggtcactgaaaacatgttgggtggtaagaaagttacagttgtatttgttctaggtggtcctggaagtggaaaaggcacacagtgtgccaacattgtggaacactttggattcacccatcttagtgctggagatcttttgcgtgcagagattaaatctggctctgagaatggaaccatgattgaaaacatgataaaggagggaaagattgttccatcagaggtgacctataaagctgttgcaggagggcaatgataaaaaatgaaaatgacaaattcctgatcgaacggattttcaaggaatg

SEQ ID NO: 261243 - DNA, 514 bp, Zea mays
aggtatactccctctatattgcacctgtcctaaatgatttcgtctggttcttgccaccataagtgagattctcatagaatcttcataatcattttgcaggcaacacacaaacatatatgtgattatgaacccttcaatatagaacagaagttttggctcatatgagctaccagcgcatcagtaggcaattcgatttgttatcagcaatatttagatctgattctcaggggtcctgctagagtaacattttaccactgttgtttatgtatatcctttgatgttgtgttgtaccaatgtggaatttactttaggactagtttggacggggaaatggaggagacccatgggacagagatccccttgttaatttgaataacaagtggattcctgctccatatattccctttattttcctgttcaccaaaccagcctttatggagcaaccagaccttgtgcgatcccaccagatttcttgcggcattatggaaagtatccccctgctgccatattcttt

SEQ ID NO: 261244 - DNA, 1993 bp, Zea mays
  unsure (1)..(1993): unsure at all n locations
ttcccaaccgactcccagttccactctcgcttccttccctccctccctcccacgcaaatggtggccgctcgcctccgcctctcgctgctactctccgtctgcctctcctccgcgtgggcgcgcccacgcctcgagccggccatccgcctgccgtcgcagcgcgccgcggcggccgacgaaacggacgacggcgacgtcgggacccgctgggctgtgctcatcgccggctccagcggctactacaactaccgccaccaggcggacatctgccatgcataccagatcatgaagaagggcggacttaaggacgagaacatcgttgtcttcatgtacgatgacatcgcgcatagcccggaaaatccgaggcctggtgtcatcataaatcatccccagggtggcgacgtctatgctggggtgccaaaggattacactgggcgagaggtcaacgtcgacaatttcttcgctgttctgcttggcaacaaaactgctctcaggggtgggagcggcaaggttgtggacagtggccccaatgaccatatatttgttttctacagtgaccatgggggtcctggcgtccttggaatgcctacgtatccatatctctatggtgatgacctcgtagatgtcctgaagaagaagcatgctgccgggacctacaaaagcctggtcttttaccttgaagcatgcgaatctgggagcatctttgagggcctcctgccgaatgacataaatgtgtatgcgaccaccgcgtcaaatgcagaggagagtagctgggggacgtactgccctggcgagttcccgagccctccaccggagtatgacacttgcttgggagacctgtatagtgttgcttggatggaagacagtgatttccacaatctgcgaactgaatctctcaagcagcaatacaacttggtcaaggataggacagcggttcaggatacattcagctatggctcccatgtgatgcaatatggttcattggagttgaatgttaagcatctgttttcgtacattggcacaaaccctgctaacgatgacaacacgttcatagaagacaactcgttgccatcattctcaaaggctgttaatcagcgcgacgctgaccttgtctacttctggcagaagtaccggaaattggcagacagctcacatgagaaaaatgaagctcggagggagttgcttgaagtgatggcccacaggtctcatgttgacagcagtgttgagctcattggaagccttctctttggctctgaggacggtccaagggttctgaaagccgtccgtgcagctggtgagcctctggtcgatgattggagctgtctcaagtccacggttcgtacttttgaggcgcaatgtgggtcgttggcgcagtatgggatgaagcacatgcggtccttcgcaaacatctgcaacgctggcatccttcctgaagcagtgtcgaaggtcgctgctcaggcttgcaccagcattccttccaacccctggagttctatccacaagggttttagcgcctaagaatcataaggtgaggcgaaatatttcagccgctccaccgcaacgaactggtttacattaccagtcctcaggggggtcctagttcttgaaccataggtgaagcagacttataccactattatagctgttccaccgtcgttccagattacatagctatgcccaatttccggtgtacatatatagtcggaaagttatttggcaattgtattggtcgttgctgtatatattccctatagtttgttagcagatgtgtagtttgtaattccataaaaatgaagaacgcgttactgctatttctatgtagccgactgatgctcatgtgaaactttaccccattcttgttgggaaatggactatccgtggtggaattcttgcatcgaaaacaattcccgggtggtcctttattcaaggtgaaccgtctgtccttttccaaaaccaccaaaaaaaaaaaaaaaaaagaagaataaanaaagaa

SEQ ID NO: 261245 - DNA, 813 bp, Zea mays
cacaaaccctgctaacgatgccacacgttcattggagaccacctggtggcattattgttaaaggcctgtaattaacgccaaccttaccctggcttactttgggcaaaagtcccggaattggccgaccggttaacttgaaaaaaggaacttgaggagtgcttgaatgatggccacaggtctatgtggcagcagtgttgagctcattggaagcctttctttgctctgaggacggtccaggggttctgaaagccgtccgtgcagctggtgagcctctcgtcgatgattggagctgtctcaagtccacggttcgtacttttgaggcgcaatgtgggtcgttggcgcagtatgggatgaagcacatgcggtccttcgcaaacatctgcaacgctggcatccttcctgaagcagtgtcgaaggtcgctgctcaggcttgcaccagcattccttccaacccctggagttctatccacaagggttttagcgcctaagaatcgtaaggtgaggcgaaatatttcagccgctccaccgcaacgaactggtttacattaccagtcctcaggggggtcctagttcttgaaccactattatagctgttccaccgttccagattacatagctatgcccaatttccggtgtacatattatagtcggaaagttatttggcaattgtattggtcgttgctgtatatattccctatagtttgttagcagatgtgtagtttgtgattccataaaaatgaaggacgcgttactgctatttctatatgtagccgactgatgttcatgtgaaactttaccccattcttgttggga

SEQ ID NO: 261246 - DNA, 516 bp, Zea mays
  unsure (1)..(516): unsure at all n locations
cggattcgtggtttacccccctccgtttgccaacgactccgggctccactgtcgctcgctctcgctcccttccctcccacgcaatggtggccgatcgcctccgcctcgcgctgctgctctccgcgtgcctctgctccgcgtgggcgcgcccacgcctcgagccgaccatccgcctgccgtccgagcgcgcggcggccgacgacgccgtcgggacccggtgggccgtgctcatcgccggctccaacggctactacaactaccgccaccaggcggacatctgccatgcataccagatcatgaagaagggcggacttaaggacgagaacatcgttgtcttcatgtacgatgacatcgcgcatagcccggaaaatccgaggcctggtgtcatcataaatcatccccagggtggcgacgtctatgctggggtgccaaaggattacactgggcgagaggtcaacgtcgacaatttcttcgctggtctgcttggcaacaaaactgctctangggtgggagcgg

SEQ ID NO: 261247 - DNA, 555 bp, Zea mays
acatgcgatccttcgcgaacatgtgcaacgctggcatccttcctgaagcagtgtcgaaggtggccgctcaggcctgcagcagcattccgtccaacccctggagctctatccacaagggttttagcgcttaagaaggacgcgtggggcgaactccatgacgctgcagctctcagggaggtcttagttcttgaacgaccataggtgaagcagacttatgtataccctgtcacattgcgtacctatggccagtttccggtgtacatatatagtcggaaatttattcggcaattgtattggtcgttggtgtatatattccctatagtttgttagcagatgtgtttgtttgtaatcccgtaataaatgaagaatgcatgatgttcatgcggaactttacctgattcttgttgggcaatggatgaatggacaatcggatccatagtggaattcttgcctcaaaaaaaaaaaaaaaaaaaaaaaataaaaaattaaaagaaattagtataatcaaatgcttgaatgaagtatcctagcagaattcaaaagtgcaggttgggg

SEQ ID NO: 261248 - DNA, 217 bp, Zea mays
gattgttctcagaaaaatctctttacctctttaatttctttccaacaatttatgcattcatttcgacgaacaaaccaactgattggcttctttatctcccacaaaagtaccggaaattggcagacagctgcacctgagaaaaatgaagctcggagggagttgcttgaagtgatggcccacgggtctcatgttgacagcaacgttgagctcattggaa

SEQ ID NO: 261249 - DNA, 1019 bp, Zea mays
tacacacacgtctgccaacgcgtccgagcctgtacattctctctctcctctctcggccttcttcgcgtgtttccctctttttcttaggccgccctctacacttctcgacataaccatcgagagggcggtcgagagaaacgagagcggcagacaccatggggagctcgaggaccatcgttgcgtcccccctgctcctcctcgccctcctcctcctggctttcgcggccaccgccgaggcccgcgttgtccccgagctgtttggcgaggaccaattccagcggacatgcaaccaggtgcacttcaggaagatgtgccagagcttgacgaggctcccgagggtgacaacgccgcgcgaactgctgctagcgtcgatgcgcgtcgcggcggagaaggccagggaggccaagagccgggtggacgagttcgcggcgaggaaccacgagggccggccgatggagtccatcctcggagcctgcagcaacgggtacggcaacgttgtgcagacgctcgaggaggcgcggaagatcgtcgccacgcggccggcggcgggcacccaggcccaggccgacgacatgaacacgaagctgtcggccgccgtcacgagcgccagcgactgccacaacgccttcgccgacttcccggcgattaggtcccccttcttgcccatgcagcggaacgtctaccgcctcgtcgacaacgttctcaacatcttcgtcgtcgtcaaccagccggagcacgcgcacaagcacgggcactagccgcgtgcgcgctggccggcctgccggttgtaagagccgcgatggtgttgtatcgatctcctttctgcacttgaatatatatgtgaacaaggcttgagaaaaatctgtattgctagttgtagtgtaacttgatcaggttactgctaacacggaatttcaggtttagcttcttgttcttggtttcaaaaaaaaatgtgtctcgccaaaagtacgacttcactttttggcagccggatgttagctgttgaaaattaactcatt

SEQ ID NO: 261250 - DNA, 443 bp, Zea mays
cccacgcgtccggtgatcaacctggcgcaactgcagaagcggacggcgatgggcctggggctcgacttcgacgagtggctcggagcacgtgtcgtgcacgttcccgggctcggcctcggcctcatgtctcctctctaaagagctcgccgcgcagcgcgatcagcacaggaacgagatggaccggctgatccaggaacatgcggacaggctccggcgcgcgctggccgacactcggcggcggcactaccgttcgctggtcggcgcggcggacgcggcggctgctcaacgggtaagggagaaggaggcggaagcctcggatgccgcgcggcgccgcgcggacctggaagaccgggtggcgcagcatgaggcggaagcagcggcgtggcaggccaaggacgccgcggatcagtccacggccgcggcgctccacgcgcagctgcagc

SEQ ID NO: 261251 - DNA, 594 bp, Zea mays
gccgcaaagagggctgaaggagaagcgaggaaaggtgaggccgatagatagaggagctgcggcgccgccggcgagcgaagagtggaggatccgatccgaagcgagaggactgaatcctgcggccgggagggacgcgggaccacgacgagcgtcgtcgtcggtgccaagcaacggcagttgtccctgtccagagcacaggtaagatggttaacgcgatcaaggggctgttcatctcctgcgacgtacctatggcgcagttcatcgtcaacctgaacgcgtcgatgccgccgtcggagaggttcatcgtgcacatgctcgaccctaccaacatgttcgtgcagcctcacgtggcgcacatgatcaggagcaagatcggggagttcagggaccagaacagctacgagaagccgcagtagtggaggatctaccgcgtcctacactcctacctcgggacttgctttcgttgcctgtattatttctgctgtgagctgagcacctcagtggaaacgagtacgccaaatagatcccacctgtggccttgaaatcatactgctatgtgctataaacatgcagagggcactgctactgtgctgc

SEQ ID NO: 261252 - DNA, 706 bp, Zea mays
cgtcaacaacagacagtacagaggtaaattggaaaaaacatctgtgttaaaagcagtatgctctgggtttgaggagacaactgaacctgatgtctgtttgcgcgaagatatcgagacaaatgaatgtttggagaacaatggtggttgctggttagacaaggctaccaatgtttctgcgtgcaaggataccttccgtggtcgtgtctgcgaatgccctattgtgaatggtgtgaagtttatcggtgatgggtacaaccactgtgaagcttctggccttggtaggtgccagatcaacaatgggggctgctggaatgagactaggaacgggaagagtgtgtctgcctgctcaaaccaagaagctaaaggctgcaagtgcccagcaggtttcaagggcgacggagccaacagctgcgaagatgtggatgagtgcaaggagaagcttttctgccagtgcaaggactgcgcttgcgagaacacgtggggaagctacgagtgcagctgcggcggcggcaactcgctgtacatcagagagcatgacacttgcatcagcaaacattccagctcgacgccgagctggggcttcctgtgggtggttttcttgggccttgccttggccggagcaggagcgtacgccgtgtacaaatacaggctacggagctacatggattcaaagatccgcgcgatcatggcccagtacatgcccctg

SEQ ID NO: 261253 - DNA, 1692 bp, Zea mays
ttcacgcgtccgcagggggataaaggtgagccgagtccacgtagcaaccgtgagcggccactgcccactgcgttggccgcggtagcagctagcagtccaaggcagagctctcacgcggacggcggacctggccacctgggggggcgcggacggagccttcgctttcccccctaccctccctttcgaacgactaccgaggaggcatccgaggtggccagccacgatgatggccgcggcggcgctgaggccgcacaagtcttcgccggcgcgggtgcccacgcggtgcgtggccgcgctctgcgccgcctgcttcctcgtcggcgtcggcgtcgtcaacaggtactggcctgttcctgagcctcatcccggttgccccgacaaggctggccctgaccatctcgagggccgtgttgaaccaagcgtcacagactcgcgaagtcgtcatggcgttggacaagacgatatccgacatcgagatgcgcctggctgcggctagagccgcccaggcgatgagccagggcatgtcaccgggcgactcggactcggagggcgaccagggaaccgcgcggcgtaggatgtcttttgtcatgggcgttttcaccactcttgctaaccggaagcggagagattcaataaggcagacgtggatgccacagggtgatcagttgcgaagattggaagacaagggcgttgttatccgttttgttgttggacgcagtgcaaatccaaacctggaaaatgaggtcgaccatgcaattgatatggaggatgaagaatacggtgatatcttgagaattaatcatgtggaaggctatggagggctccctatgaaggttcagatgtttctttcgactgctcttacaatgtgggacgctgatttctatgtaaaagccgacgataatgtccatgtcaacattggtatcaccagatcgattttggcgcgacacaggatgaaacctcgggtgtacattggctgcatgaaatctggacctgttgttgctaagaatgactccaagtattatgagccagaccattggaagtttgggactgagggtaacaactactttaggcatgcaacacgtcagttgtatgctgtaaccagggatttagcaacttacatatcagcaaaccggcatatcctgcacaagtattcaaatgaagatgtatcatttggctcttggttgatcgggttggaagttgagcatgttgatgagagaagcctttgctgtggtactcccccagactgcgaatggaaagggcaggccgggaacccatgtgcggcgtccttcgactggaactgcactggcatctgcaatccggtggagaggatgacagaggtaccccgccgatgttgggaaggccttggagccgaagggcacgcacagtctttgacttttgacagccaatagttggcgcttggcggatcattgtcgcaccattttcttcctcttctttagggccctgtaattaatatgcggagatgaacttgtatgcaatggctcggtttttcagatgtgcagcaatggcatcgtttcccggccagttcgcgtgcggaaactggggtatagaattaggagttccatctgccagtgagtctctaataactggagatgcctcactggacgtccgatcaaactggggtagcctgtttgattctctgatgaaacaattaactgtctgtctgagttctct

SEQ ID NO: 261254 - DNA, 733 bp, Zea mays
cccacgcgtccgcccacgcgtccggcgcccgcgtactgctcccttcttcctcgttgctccgcccccttttgtcgtcgcgtcctcctctcgaggcctcggcagtcggcacgaggacgcgcgatcccgtcaccgctcacctccttctccaaacactgactccgcttcccgtccccatcccgctgcgcaagatcgggaggggacgaagagaggtcgaccgggaggagatgcaccgagaccgaggcgtctctgcggcagcgatacccggtgaccggaagcggatcggcgagcctatggacagatcgtctccatctacgtcgtgggggttctccggagggcgcgagaaggagcggatcggcgtgggcaagcagccggagatgcctcgctccggcggcggatccaccgccatgtccaagagcaagctctctgacgcagaatcagaaactgacagcgaagaatcagatgtgagtggttctgatggggaagatacttcgtggatttcatgggtctgtagcttaaagggcaatgaatttttctgtgaggttgatgatgactacatacaagatgatttcaacctctgtgggctaagcaaccaagttccatattatgactatgcacttgatctgatattagatgttgaatcttcccatggtgatatgttgacagaagagcaaaatgaacttattgaatcagctgctgagatgctctatggattgattcatgttcggtatattat

SEQ ID NO: 261255 - DNA, 1407 bp, Zea mays
ccgtctccttcctgtcgtctccccttctcctgtcgcctccccttctccaatcgcttcccgatcccagccaatatctcagacggaatcgatccaaagctatcctagggttccgccgtcccgtccagatccgggctcgtcgatggggaaggagggcgtggtggcagggccggcggcggatgggagtaaatcgcggccggagtgcatcaactcgtccaacccgtaccacgagtgcactgactactgcctccgcaagatcgccgaggccaggcagcgcctcgacgacgagctccccgactcgtggaagcgcccgcccgagcaccgcaccgtccaccgggactgcatcaacgcctgcaacccctaccacgagtgctccgactactgcttcaagcgcatcgccgacgccaagtcagggcttgagcgtggggagcaacagccaccagctgacgtggccaccgctgccggcacgtctgatgccgtggagcagcagcaacttgaagataacgatgccgacggacaggagggcgcagccgcggatgacggctacccgcagatgacggaaaagcagaagaagctgttcgagctgcgccttaagatgaatgaagcgcggaaagcgaatcagcaggcaatggttgccgagaagaaaaggatggaaccgcggggcgagagccgaggtgtttctaagcagaagtggctggacgacaggaagaagaagatcgggaagctgctggactcaaatggccttgatatgtccaaggcgtacatgctcgatacgcaggagactgcagaagccaagtacaagaagtgggagaaggaacctgctccatatgggtgggatgttttcaatcaaaagaccttgtatgatgcatacaagaagaggaccaaggatatagaagttgacatggaggcttacaataaagccaaggaagctgatcctgaattctaccgtgacgcctccagtctccagtacgggaaggtgtccaatgtccctgaagaaaacattgacaagatggtcaaggaactcaaggagcgggaagagaagcggaaatcgttcagcaggaggcgcaagttcaacgaagacaaggacattgactccatcaatgaccggaacgagcacttcaacaagaaggttgagcgtgccttcggcaagtacacgctcgagatcaagaacaacctcgaaagaggtactgcgctgccggactaataaaaccttacacggcagctatcttcgaccgtttttcaagctaaccagtcgactagaggcgtgtgtccctgctgctgttttccttttcgcacggttacttgtatgcttgtaacttaacttgaggccccagttccattgtgacttgtaacaaaacctggactgggttgtgtaatgacgcgaggctcaaccaaacatttgtgtatccc

SEQ ID NO: 261256 - DNA, 462 bp, Zea mays
aaggtttaagcgcgcgttcgccaagtacacgctcgagatcaagaacaacctcgaaaaaggtactgccttgccggactaaaactgtacacagcagctcggtatcaagaacagcatgggaagagaggtaaggtactggcttgccggactaaggaccttacacagcagctatcttatggcgctcaagctaaccactcgcctagaggcgtgtgtccctggtgttttccttttcgcatggttacttcttgcctgtatgctcggaactcgtggccatggttccattttgatttgtaagaaaccggggactgggttgtcatgacgttaggttgaagtaatgtacagaccaagttgtgcctgaatggaatggttgatttgtaattgtgtatatgccgcgacgaggtttatgtaatttaaaatcaattctgagcccaaaaaaaaaaaaaaaaaaaaaaaaaagggcggccg

SEQ ID NO: 261257 - DNA, 657 bp, Zea mays
  unsure (1)..(657): unsure at all n locations
atcctctcncagtatccacgggctcgcacgcagtcggcgccgccctgcccgtctccttcctgtcgtctccccttctccaatcgcttcccgatcccagccaatatctcaagacggaatcgatccaaagctatcctagggttccgccgtcccgtcccgtccagatccgggctcgtcgatggggaaggagggcgtggcggcggggccggcggcggaggggagtaaatcgcggtctgagtgtatcaactcgtccaacccgtaccacgagtgctccgactactgcctccgcaagatcgccgaggccaggcagcgcctcgacgacgagctccctgactcgtggaagcgcccgcccgagcagcgcaccgtccacccggactgcatcaatgcctccaacccttaccacgagtgctccgactactgcttcaagcgcatcgccgacgctaaatcccctgcctgcggtgcggggctggagcgtgaggagcgaccgccaccagctgatgtgtttgccgccgccggcttgtctgatgccgtggagcagcatcggcctgtagattacgattccgacgaacaggagggcgcagacccggatgacggctacccgcagatgacggagaagcagaagaagctgttcgagctgcggcttaagatgaatgaagcacg

SEQ ID NO: 261258 - DNA, 1118 bp, Zea mays
ggatgccggtcgtttctctgctgcttggcttctttacaaggctcaagaggagctcattaatgtcgctaagctgtatggggttaagctaaccatgttccacggacgaggcggaactgtgggaagaggtgggggccctacccatcttgctatactgtcacaacctccagaaaccatccatggatcacttagggtaaccgttcaaggcgaagtcattgagcagtctttcggagaggagcatttgtgctttaggacactgcaacgtttcacggctgcgacccttgaacatggtatgcaccctccaatttcgccgaaaccagaatggcgtgctttgatggatgagatggctatcgtcgccacaaaggaataccggtcaatcgtatttgaggaaccgcgctttgttgaatatttccgccttgcaacgccagagatggagtatggcaggatgaacatcggaagcaggccatcgaaaagaaagccgagtgcgggcatcgagtcgctgcgcgcaatcccttggatcttcgcttggacgcagactcggttccacctgccggtgtggctgggtttcggcgcggcgttcaagcatgtcttggacaaggacatacggaatctccagacccttcaggagatgtacaaccagtggccgtttttcagggtgacgatagacctggtcgagatggtgttcgccaagggtgatcctggcatcgcggcgctgtacgacaagcttctggtttcagaggacctgtggccattaggggcgcgtctcagagccaactacgaagaaacaaagcagcttctcctgcaggtcgctgggcacaaggaccttctggagggcgacccgtacctgaagcagaggctgcgcatccgtgactcgtacaccacggcgctgaacgtttgccaggcctacacgctgaagcgcatcagggaccctggcttccaggtgaagccgcggccccacctgtcgaaggacatcatggacatgggcaagccggcgtcggagctcgtgaagctgaacaccaccagcgagtacgccccggggctggaggacaccctcatcctgaccatgaacggcatcgctgccggtatgcagaacacgggatgaacccagtgtgcctgtcttc

SEQ ID NO: 261259 - DNA, 1225 bp, Zea mays
ctctctctctctctctctccttcccagttccctccgtcctctccagttccacagaaggctccgtgcctagatcgtcccgtggagaatgtgttggggatcaaggagtggttgattggatccatcccctcgcgtgcttccctcatcaagtttcaaatccccatctgcgcgaggaactcctctctcaaggggtttgaggggaaatcgctcgtaactgtgcaaacacttgttcctcgatcccccctcaatcaatcgagccgtggtgtttgttgtctctctctctctttaagatggttgcacggaggaatccatccattattgaagaaggtagtggatctgaagaaatccaggtggagctggagcgtcctcgccgctcccagaccggtcatggtagaggccaagctcggggagatgttggtgggagtagttctcaacaacctgaaatcgtccatgccgctcgagaagaacctgtccctcagccacctctccatccatcttcatcacgggctgctgcagctgccgcctctcgccccatgagccgtggtaagagaagcaagaagagaggtgttcgtgcgctcatcaggggtttaaatggaatctatgctatctgtcgtgagagttatgttcaaatcgccgagctaaaaaggaaaaatgtcgagtacaatgagaactttaggagatttatgttagagtcggacaactttaggcgttatgttggtcgtgtacctctgcgtcctgctccaccatacaatcctccgccgcctatgcccgacactctggatcagtgggttcagcagacatatggtgttcctttcgacgaagatatctctgatgatgaggaagaaatctctgatgatgaagatgagtccttctggtgaacatggtcattatggtggcttcttcttcttcttggttcttgttgctaaaagggagagaagttcgtgacatttgatctagtcttttgttgctggcagttgtgagagtgagaacctaaactatgtgggatgtaataactttatgattatgttgtctcaaaacacctggcctgtaatagataattaggtgaacttgttcttattatgctactactcgtttcattatgccgtgaatcctctttatgctaagctttatgtatattgttactgtatcatttgggatctactattcaaaaaataataaaaagggcaaaaaagatcaataaaatggatatcaagctgagtgtccatga

SEQ ID NO: 261260 - DNA, 498 bp, Zea mays
actgccgtaccgctgcggcataattggctggacgaacgcctcctgcgatctctgcttccctcctctccagttccacagaaggctccgtgcctagatcccgtggagaatgtgttggggatcaaggagtggttgattggatccatcccctcacgtgcttccctcatcaagtttcaaatccccatctgcgcgaggaactcctctctcaagatggttgcacggaggaatccatccattattgaagaaggtagtagatctgaagaaatccaggtggagctggagcgtcctcgccgctcccagaccggtcatggtagaggccaagctcggggagatgttggtgggagtagttctcaacaacctgaaatcgtccatgccgctcgagaagaacctgtccctcagccacctctccatccatcttcatcacgggctgctgcagctgccgcctctcgccccatgagccgtggtaagagaagcaagaagagaggtgttcgtgcgctcatc

SEQ ID NO: 261261 - DNA, 440 bp, Zea mays
ttctttctctctctctctctctccttcccagttccctccgtcctctccagttccacagaaggctccgtgcctagatcccgtggagaatgtgttggggatcaaggagtggttgattggatccatcccctcacgtgcttccctcatcaagtttcaaatccccatctgcgcgaggaactcctctctcaaggtatctttcctcgatctacctttctagcgagtttgggttgaatccctttggagtaaataaacgaaaggttcatactgccttattctctaatggattcattatttggtttgaatttgataatttgggggaggggaaatcgctcgtaactgtgcaaacacttgttcctcgatcccccctcaatcaatcgagccgtggtgtttgctgtctctctctctctttaagatggttgcacggaggaatccatccattattg

SEQ ID NO: 261262 - DNA, 345 bp, Zea mays
cggcccgagccacgcgtgggaacgacatcaggaacgcggcggcgttggtgactcatcggacccggcacggggtggcgggcgcgcggcggcgctggcgagcccctccatcctctacaccaaggacgtgctcatcgggcagagcccgaccccggcgttcgacagcccgccgccggagaccgtggccaacaaggcaggcggggggccctgttggagagagctcctggagccgggtgtcaggcgcgcgctcttctgtggcgtcatgattcacatcctgcagcagttgtctggcatcaatggtgtgatgtactacacgccccagatccttgaccaggccggtgtgagcgt

SEQ ID NO: 261263 - DNA, 641 bp, Zea mays
tactcggttggaattcccgactcgacgccacgcgtccgaagacaaaatatgcggttcctgtttactgagaagttcgtgcaagtttgtgaaccgggaagtggccaggcataatagagtgattctatcagatacgatgagaattatctacttgtttgtactggacgcttgcccacaagagctcgagattaccgatgagttaaaagccagtgtctgcaagctgctaaaggacgccataaatctcagcagttaactgctgagcattacggagcagaagtttgctagttttcttgtccttgtagttctaatagcgtgctgtcagcatttatctggacttatggaggaaattgccgaggcccatgtttgacgtcgcgctcgcaatcgctccctgtgaaggttggagtggtgaaccccagcgacttccttctgatccgtgttttcttttgtgcaactaatatgaagatgaagtacagagtatgtaaaaacttaagatgcatatcgctctgtagctcctttttcttattgatgtacgtactcatataccatggtactgttatcgtttgctgcctcgcctccatttcgttaaactttggtgaactcaggttcaatcaaataaacaagagatacatgccacactttgtaaa

SEQ ID NO: 261264 - DNA, 463 bp, Zea mays
gcctaccataaaaagagaatctttcaaagatggcgtccaagaagatggtcctcgccgtggcggcactgctgctagtcacgctcgcactgcaggtcgcccctcctgcgatcgccatggactgcaaggccgggtgtgccgagatcaagaactccccactcggcataagcatcgaggagtgtctgaagaggtgcgaggggatcgccactgagcagggacctagggacccttacaaggataacaaacttgatatcccataaacacttatgacttgctgatatatttgtgcctatccaatcatttgtgatagatcaatgcatctttgtgttaaaaatagatagatcaatacatctgtatatatgctcactccgttcttttttatttgtcggcgtttagttcagaaatgaactagcggacgacaaatattagagaacggaggtagtactatgcaagcctacccatgaaa

SEQ ID NO: 261265 - DNA, 1027 bp, Zea mays
cccacgcgtccgcccacgcgtccgcggacgcgggtccaagctgctctcgtccctagaaataaagcagctcctccgcggggcggcgaactactacccatcgccaaaaccctagccccgatccggtcgaggagcactacttcttggcatggcgggcacccctagccaggcaagcctcctgctccagaagcagctcaaggatcttgcgaagaaccccgtggatgggttctccgcagggcttgtagacgatagcaacgtcttcgagtggcaggtcaccatcatcggcccgcccgacaccctatatgatggaggctacttcaatgcaataatgaccttcccccagaactatcccaacagcccgccatcagtaagatttacttctgggatgtggcatccgaatgtttatccggatgggcgtgtttgcatttctattcttcatccacctggtgaagatcccagtggttatgagcttgcaagcgaacggtggacaccagtgcacacggttgaaagtatagttctgagcatcatttcaatgctctctagtccgaatgacgagtctccagcaaatattgaagctgccaaggattggagagagaagcgggatgagttcaagaagaaggttaggcaatgtgtccgcaggtctcaggaaatgctgtgaaggaggaacatgggggagttgaatgagtctgcaatcggtgtgctgcaattcacaaccaattatctcatgccagcattcttttgctttcccctgtatattttttcaaccggtgtcactcgtatagtggtgttgggtctctttagacaaactcgggacggttgcttatcctaaaaattcgattgtactgcgtggcatgaaatgatcgattcgaagaatattttgaacatgctgccacctaatcaaaaaatttcatgtttaacttaaaaaaaaaaaacaaaagaaaaaaaaaaaataacaaaactgaaaaaaaaaaaattacaaaaaaaaaaacattatattattaaataaaaaaaaaggggcggccgttttaaa

SEQ ID NO: 261266 - DNA, 507 bp, Zea mays
cttctttataaataaagcagctcctccgggggcggcgaactactcctcgtcgccaaaaccctagccctgcttctttcgccatggcgagcagcgctagccaggcgagcctcctgctccagaagcagctcaaggatcttgcgaagaaccccgtggatgggttctccgccgggcttgtagacgacagcaacatcttcgagtggcaggtcaccatcatcggaccgcctgacaccctatagtacatacaaagaaaagaaaccgattgctgcatgagaggttgaattctatcgtcttcatttttacaaccggaagatgaaagctaggttccaaaactacatcagaaggggaaaaactctgatcctttggttaatgaggactccaactgggacaatgagtaggttgactcattgcatggaggccctgaaggtgagcgtgggttgtgaccttacgtgggaacttgtggataatgccatttgagcatcagaagcacttcgtgtccgaaactttcca

SEQ ID NO: 261267 - DNA, 911 bp, Zea mays
ttgacgcgtgggcggacgcgtgggcggacgcgtgggcggacgcgtgctcgcccccataaataaagcagctcctccgggggcggcgaactactcctcgtcgccaaaaccctagccctgcttctttgccatggcgagcagcgctagccaggcgagcctcctgctccagaagcagctcaaggatcttgcgaagaaccccgtggatgggttctccgccgggcttgtagacgacagcaacatcttcgagtggcaggtcaccatcatcggaccgcctgacaccctatatgatggaggctacttcaatgcaataatgaccttcccccagaactatcccaacagcccgccatcagtaagatttacttctgagatgtggcatccgaatgtttatcctgatggacgtgtttgcatttctattcttcatccacctggtgaagatcccaatggttatgagcttgcaagcgaacgatggacaccagtgcacacggttgaaagtatagttctgagcatcatttcgatgctctctagtccaaatgacgagtctccagcgaatatcgaagctgccaaggattggagagaaaagcgggatgagttcaagaaaaaggtaaggcaatgtgtccgcaaatctcaggaaatgctctgaaggagaaacatatggggagttgaacgagtgctgcaacttcacaaccagttacctagccagcattcttttgcttttcccctgtatattttccattcagtgtcattcgtatggtggtgttgggtctctttagacaaactggggactgttgcttatcctaaaaattcgattgtattgtgtggcatgaaatgatcgatgtcaaagaatattttgaacatgctgccacctaattatacttttcatatgaacatcataaagaagtgatgtttgcagcatt

SEQ ID NO: 261268 - DNA, 1182 bp, Zea mays
tcccacgcgtccgcccacgcgtccgagagaacgcaggctgaggcaccataccagtcaaccaccaccgcttcgttctcctcccacaccgctcgccttcgcctccttctggttcccatcttctatcatccccgagctccagttctccacacctcacgtctataaataataaataaggcgcccgcggtgcccatcaattcgtgtcaccgcgtcccgagagcgcaaatcattccgcgcgacgcaaaaaccctagcccagccaccgatccctctcatggcaaccaccaccacccaggcgagcctcctcctgcagaagcagctcagagatctcgcgaagcacccggtggatgggttctctgctgggctggtcgacgacagcaatgtcttcgagtggcaggtcaccatcatcggcccgcccgacaccctatatgatggagggtacttcaatgcaataatgagcttcccagaaaattacccaaacagcccgccatcagtcagatttacctctgaaatgtggcatccaaatgtttattcagatgggctggtgtgtatctctattcttcatccacctggtgaagatccaagtggttatgagctcgcaagtgagcgttggacacctgtgcatacagttgaaagcatagttctgagcattatatcaatgctctctagtccaaatgacgagtctgcagcaaacattgaggcagctaaggaatggagggataagagggaggatttcaagaaaagggtcaggcgcatcgtgcggaaatcacaggaaatgttatgaagaaaatggaatactggggaagtcaaccgtgccatgtcaggctacgagattttgctttcaacctcaaaatgctcatctgacatcttgtgtattttccatttagcgtctgttcattggtgcaccagaaatgcattgggacgtggtgtatcgtgtggcctgggctctactaatgtttgacaatcctgaagtgccaccagtggtgaacctggtataagcaggcgccattcatgtcagctaatcgttgagaaaacatatcagtgaaatcgtgcaactgttagtgtaatgaggcagttcctgcttacatattattactcgtgctacctgtctacagtgtcttgaatgcatggaatgtcttgaattttacctgttttccttggtgtaagcatggtatgcaataatggg

SEQ ID NO: 261269 - DNA, 961 bp, Zea mays
ttttcgcctccggaagtattgacgtggaccattggggtcattttaaaacaaatcacgcaattacctcccccgcctccggaagctgagcaccacttcatggccactccggctccccctagcccagcaagccctccgctccagaagcagctcaaggatcttgcgaaaaaccccgtggatgggttctccgcagggcttgtagacgatagcaacgtcttcgagtggcaggtcaccatcatcggcccgcccgacaccctatatgatggaggctacttcaatgcaataatgaccttcccccaaaactatcccaacagcccgccatcagtaagatttacttctgggatgtggcatccgaatgtttatcccgatgggcgtgtttgcatttctattcttcatccacctggtgaagatcccagtggttatgagcttgcaagcgaacggtggacaccagtgcacacggttgaaagtatagttctgaacatcatttcaatgctctctagtccaaatgatgagtctccagcaaacattgaggcagctaaagaatggagggaacagagggaggatttcaagaaaaaggttaggcgcatcgtgcggaaatcacaggaaatgttctgaaggaaatgggagtgctggtgaagttaaccatgccatgtcaggctgcaggattttgctgccaacctcaaagtgctcatctcacaccagcgtcttgtgtattttccatctatcgtctgttcattggtgacaattgcctccagaaatgcattgggacgtggtcggcttgaaggttctgtttgtgttgtgtggcttgcgctctactaatgttcggcaaacctgaagtggtaccggttatcgtaaatttggtggtgaacctggcataagcaggcaccattcatgtcagctagccgttttgaaaacatatcaggccttgttcgtcccttatcaaaatcaattggtttgccaatat

SEQ ID NO: 261270 - DNA, 366 bp, Zea mays
tttcactcgtccggtcagatttacctctgaaatgtggcatccaaatgtctatcctgatgggtgggtttgtatctctattcttcatccacccagcgaagatccaaacggttatgagctcgcaagtgagcgatggacacctgtgcacacacttgtaggtactgatcacagcacattcaactccacacagattgtccatgtttcttttagtcaccatgatttatcactaggtcattgtgtttgtggccaacgagtattgctctaacagttatgttcccatagctagctggattcattgttgtgttttgttcagggtactttcaccacttctggtatggttctgcctgtaatgtgccagggattattata

SEQ ID NO: 261271 - DNA, 1354 bp, Zea mays
  unsure (1)..(1354): unsure at all n locations
cagcactccaggagtcagtgcaatacttttcgttccattagcaaaggcaaacattaatgttcgagctatagctcaaggttgcagtgaatacaatatcgctgatgtattgaagcaagaagattgtgtaagggctctgagagctgctcactcaaggttcttcctctccaaaacgacacttgcagttggcatcattggacctggtttaattggtagaacactccttaaccagctcaaggatcaggttgctgctctcaaggaaaatatgaacattgatctgcgtgtcattggaataactggctcaagtacaatgcttttgagcgacacgggaatagacttaacccagtggaaacaacttctaaaaaaggaagcagaaccagctgatattgatagttttgttcatcatttatccgataatcacgtatttccaaacaaagttttggtggactgcacagcagatacaagtgttgcatcccactattataattggttaaagaagggtattcatgtcatcacaccaaataagaaagcaaattctgggccacttgatcagtacctgaaattgcggactctgcaacgtgcctcgtacactcattacttttatgaagcaactgttggtgctggcctcccaatcattagtaccttgcgaggtcttctggagacgggtgacaagatactgcgtattgagggcattttcagtggaactttgagttatatatttaataatttcgaaggaacaagggcattcagtgatgtcgttgctgaagcaaaagaggcgggatacactgaacctgacccaagagatgatctatctggaactgatgttgcccgaaaggtcattatccttgcaagggaatcaggtttgaggcttgaactttctgatattcctgtgaagagccttgtgccagaaacacttgcagcatgctcgtcagcagatgaattcatgcagaagctaccatcctttgacgaggactgggccaggcaacgcagtgatgctgaggctgcaggcgaagtcctgcgttacgttggagcggtggatgcggtgaacaggagcggacaggtggagctacgcaggtacaggagggaccacccgttcgcgcagctctccggctccgacaacatcatcgccttcaccacctccaggtacaaggagcagccgctgatcgtgcggggtccgggtgccggcgcggaggtgacagccggtggcgtcttctgcgacattctgcggctggcgtcttacctcggtgctccttcttgagcttcgagctacaggtgccagtttcaggaagcagtcggagacacactgccatgcatgatgcctnccctacgtgtttgggctatgctcacatgttgtaat

SEQ ID NO: 261272 - DNA, 683 bp, Zea mays
gttcctgataaatctcaagcaagtgttcctactgtgagggatggtggtatcttcaagttccttggtggtccaaaaccaggagatgttgagtacaacttgtcttctgctattcactgctatggtgcagccaagggagcattgttcgcatttcctgtgcattcagtagaaacttccatggttcttaagaaaagaggctggggatttaatgaactgggccgttgtagacttgagaatagaaatctggttagcgccgagattgcttttgcggatgctattaaagcatttgaagaggtgtttgaccacacaaatgttatactgatcaactgtaacttaggtcatggtaggagagctttagcagaggaatgtgtatccaggattgatgaatttcagaaacatgatcttcctgaaggcacatatatgcaatcctttaagtcggccaagtcagaatattttcaagcaataaactactattccgcagctaagaggcaactgaagtatgtcaatactgaggccgataaagtactataccatgaggtttacacacagtatgcccatacctacctgaggcttggaatgcttttggcaagggaaagcttcttaactgacagttatgaaggtggacttgtcaatgagtcatctaacagaacagctgtagagatttcagcgagtgatgtttttcggga

SEQ ID NO: 261273 - DNA, 875 bp, Zea mays
ctcgtcacgactcaccatcatgatttggtaaacaaagcaggaggaagccggcggtgtaggcgacccatggctccacagacgaggagagagaggttggcgggggaggcgcggccgagctcgtcggggctaacaccggcgaagccgggggcggtcgaggtgcagcgccgacgggcgggcagcggttggacgagccgtcggatctccatctacgcctcccgagtctacttcctcctcatcatgctccagatcccgctcttcagggtcccttgtagagctggcacatgcacaactcctattcaagtaacatcatctcagttggtctcaaatgatatattcccagcagctgttgtgaaggccatgctctaccctggagctaccgtgagcagcctaactaaaagcaagacatttccgagttggaatgacctgtttgacatgtacaacctgacagaagcaaaaaatgcttctgcagtagttgatctccagcgtctagagatacttgccggaagctacttctgtgttgctggagcgctcattggcatcataaatcctgggaggatgactttgtttggtacccttttgattatctggggtatggtgaaagaagcactatttgggaagccagtgaacagtgatctgactcaatcaactcatgtctacccaaccattttgattgcacttatctgtgcattcatgtcgataacttacaacgtaaagaagacagcaagaagtagtactcctgtttctatcgctaagccactgataagttctgccaagtcaaaactgaagtagaccctgttacaactttaatccttgtaactcattccaaatatttatttatccttgtaactttcaatcctatagcattcagttttttc

SEQ ID NO: 261274 - DNA, 2280 bp, Zea mays
atcctttgttggacgcgttcccctcctgcacgcaaccggatctcgtcctccagatcctggatggctccccctccttgataccttgcctcgcgagtgctctcgagctaggactgggagaaaacaacaaacccgcgttggatcctgtatcggttagtccttgccttcaaggttcatgttgttttgttttggtggtcgagcatcgcatgttctgcttctggttccagatctggagaaatttctaagtcgtcgtcgtcgtcgtcgttcggttcggagcggatctgaggcgacgatggctggaggcggcgggatctcttggtctgcagtcctgcttcacctcgatggatgatgtctctgcgctgataattattggatcaatttcgataattattagtagatctatgagatatgccgcctggaagaggcgaggtaagctgcagcatgtaaaagtctgcgtgcgtcgacagcaaaaaagagaaaaaaagatgtgacatcctagaggaggcctttgccatgatgggtgcgctcgcatggcaggccaggtattaataaaaagatgattattgtgtgccgggggaggagatcgcacgggggttgatgtttttggccccggggtctcctccctcatcttgttccgtgttcctgtatccgttgtttccgcgcctgttggtccgctgcgcacgccggatttttgcatcgagcacggagatctacaacaaaaacatggagctacgacgcgattcccaaggtacaatcggtaattatgttcaaacaatttttaagtcgttctgcgctccttctattacgagcaacgttttatattctgtgcttgcataatgaatcgaagaaatcctgacaccaatcgaactgaagatcctgaaacgcacgttaataccgttgacgtccgcttcacccagctcgattttcagtcttgtaatactaatcgctccatgagtctgaagtgtgcaaaaatttaggtcgcagctacacaaatttacatgctggttctgttcaacccgtgaatctcctattttggaaaggtcacagcgtttttatttcattctatattatatttcagtctggactaatgttgagatctccatatgtatctacgtctaagcatttttcatttgtatttaccatgttggtcaattgggatatttgtttcttgtatgttagcatgtttgaaccatagcaattggtggacgtgtgtagagaagattgcaaaactgcagtatgatggattccactattcatcaaccgagatcatggcgcgcttcaatcgtggctacgctgatggggaattgatccgttatggctcgtggctgtggagatgtggaactcattggttatagtgtgcttcaatcatgggtcatggcgatgctgatggaactgatttgttaccaaggtttaagttttcgctaccgttggacggcctgactggtactttgccctgttgactgtttgagaacgtactgcccaggtttacttaatacttgctgctttttgacggtactgtacatattgttcgacaatttatttcttggcagttcaattcgtccatttagaatttctaggggcacgagagcatgtgttaccctggagatcaatttcatgctgctttttgtaattgatcatgctgctttttgttacaaagttccctattctattttcaatttgattgagggttgcaaaattcatggcgttgtgagggaattgattccagtgaaggcgatggcgactggtaatttgatatcggtgggttgggaattagactatctccaccagattgtctatattcaaattacgctctacaaacaatataatttactctatgggtctgctatattgtagattgtactgtttataaattgtagttttaatatctccttgtagattgcattgtttatcaattgtttatagattgtttataaattgtaggtgttttaattatatatggtcattcatataatagagttttgggattaagggcccctttggtagggctctggcttctccaaaaacggctttaactctggctcacgagggattgagggcaggaccaaaaaataataatctggactggtgggaggactatagtgcaaaaataacgtgagccgaagccgggtgagccacttttttttagttcattttggaaaagtacttcactggtgaagccatctgaaaaagaggtgtttgacataacttttgcatgagccagagccgaagctgaaaaacattttttaccatatgcagcataaaatcttcctaaaattttagttt

SEQ ID NO: 261275 - DNA, 1621 bp, Zea mays
cgcccacccgtcccgtcgggcaaaccattgttggacgcgttcccctcctgcacgcaacctcatctcgtcctccagatccaggatggccgtcctccttgagaccttgcctccccgagtgctctcggtgagctactttgtttcgatttatcaggaaatccgtttgcttcatgttgtgcaggctcatatctgattgctggattcggcaaacccgcgttggatcctgtatcggttagtccttgcctgcaaggttcttgttgttttgttttggtggtcgagcatcgcatgttctgcttctggatccagatctggagaaatcgcgaagtcgtcgtcgttcggttcggagcggatctgaggcgacgatagatggaggcggcgggatctctcggtctgcagtcctgctccacctcgatggatgatgtctctgcgctgataattattggatcaatttcgataattattagtagatctatgagatatgccgcctggaagaggcgaggtaagctgcagcatgtaaaaaagagaaaaaagatgtgacatcctagaggaggaggcctttgccatgatgggtgcgctcgcatggcaggccaggcaataataaaaagatgattattgcgtgccgggggaggagatcgcacgggggttgatgtttttggccccgggttctcctccctcatcttgttccgtgttcctgtatgcgttgcttccgctcctgttggtccgctacgcacgccggatttttgcatcgagcacggagatctacaacaaaaacatggagctacgacgcgattcccaagtatgatggattccactattcatcaaccgaaattatggcgcgcttcaatcgtggctacgctgatggggaactgatccgttatggtgtgcttggatcgtggctgtgtggagatgtgtggaactcattggttataatggtgatgctgatggaactgattttgctcccgttggacggcctgattggttactttgccctgttgactgtttgagaacgtaccgcccaggtttacttatacttactgctttttgacggtactgtacatacagttcgacaatttatttcttggcagttcaattcatccatttagctaggggcacgagagcatgagttcccctggagatcaatttcatgttgctttttttttgcgaagttccattttctattttcaatttgattagggctagtttgggaacttattcttccaaggtttcctaaggaaaattagttcattttttttttgggaaaatgaagtttccaaaagggtttcaaatccatggtggtgtgggaattgattgcagtaaaggcgatgggtaagctgataccggtgggttgagaattagaccatcagtagcttactctttcccatatttaaactataatctacactacaaaatagtgcaaaaggtgttcatagtgacctatgaataatataatctacactacaaaaatagtccaaaaggtgtttgtagtgaccatatatgggtgtacattgtacctttttacattgtatttgtagtgatcatatatgggtgaactactgtacttttttatattgtagatcgtattatttatagtgtgcagtttgaatataggtaagctgatggtctt

SEQ ID NO: 261276 - DNA, 656 bp, Zea mays
cggacgcgtttgtttacacctgggcggacgcgtgggcggacgcgtgggcggacgcgtcgacgggcccggaacaaaccattgttggacgcgttcccctcctgcacgcaacctcatctcgtcctccagatcctggatggccgtcctccttgataccttgcctcgcgagtgctctcggtgagctactttgttttgatttatcaggaaatccgtttgcttcatgttatgcaggctcagatctgattgctggattcggcatcttacgggcttgaatagagctaggactgggagaaaacaacaaacccgcgttggatcctgtatcggttagtccttgccttcaaggttcatgttgttttgttttggtggtcgagcatcgcatgttctgcttctggttccagatctggagaaatttctaagtcgtcgtcgtcgtcgtcgttcggttcggagcggatctgaggcgacgatggctggaggcggcgggatctcttggtctgcagtcctgcttcacctcgatggatgatgtctctgcgctgataattattggatcaatttcgataattattagtagatctatgagatatgccgcctggaagaggcgaggtaagctgcagcatgtaaaagtctgcgtgcgtcgcagcaaaaaagagaaaaaagatgtg

SEQ ID NO: 261277 - DNA, 1137 bp, Zea mays
cccacgcgtccgcccacgcgtccgcccacgcgtccggttggtccgctacgcacgccggagttttgctccgagcacggagatctacaacaaaaacatggagctacgacgcgattcccaaggtacaatcgtaattatgttcaaacaatttttaagtcgtcctgcgctccttctattacgagcaacgttttatattctgtgcttgcataataaatcgaagaaatcctgacaccaatcgaactgaagatcctgaaacgcacgttaataccgttgacgtccgcttcacccagctcgattttcagtcttgtaataataattgagaactccaatgaactgagagttactaatcgctccatgagtctgaagcgtgcaaaaatttaggtcgcagctacacaaatttacacgctgttctatattctatattctatattatatttaggtcgcagctacccgtgaatctcctattttgaaaaggtcactgcttttttatttcattctatattctatattatatttttgtaatattcagtctcgtttaattgctttcagacttaatgttagataattgtttacattttctacaattcagtctggactaattgctttgggactaatgttggagatatccatatgtatctgcgtctaagcatttttcatttgtatttatcatgttttgtcaatagggatacttgtttcttgtaagtctgttagcatgtttgaaccatagcaattggcggacgtgtgtaaaactgcagtatgatggattccactattcatcaaccgaaattatggcgcgcttcaatcgtggctacgctgatggggaactgatccgttatggtgtgcttggatcgtggctgtgtggagatgtgtggaactcattggttataatggtgatgctgatggaactgattttgctcccgttggacggcctgattggttactttgccctgttgactgtttgagaacgtaccgcccaggtttacttatacttactgctttttgacggtactgtacatacagttcgacaatttatttattggcagttcaattcatccatttagctaggggcacgagagcatgagttcccctggagatcaatttcatgttgctttttttaagcgaagttccattttctatttt

SEQ ID NO: 261278 - DNA, 981 bp, Zea mays
  unsure (1)..(981): unsure at all n locations
ctttttcgttttcccacgcgtccgcattgttggacgcgttcccctcctgcacgcaacctcatctcgtcctccagatccaggatggccgtcctccttgagaccttgcctccccgagtgctctcggtgagctactttgtttcgatttatcaggaaatccgtttgcttcatgttgtgcaggctcatatctgattgctggattcggcaaacccgcgttggatcctgtatcgatctggagaaatcgcgaagtcgtcgtcgttcggttcggagcggatctgaggcgacgatagatggaggcggcgggatctctcggtctgcagtcctgctccacctcgatggatgatgtctctgcgctgataattattggatcaatttcgataattattagtagatctatgagatatgccgcctggaagaggcgaggtaagctgcagcatgtaaaaaagagaaaaaagatgtgacatcctagaggaggaggcctttgccatgatgggtgcgctcgcatggcaggccaggtaataataaaaagatgattattgcgtgcctggggaggagatcgcacgggggttgatgtttttggccccgggttctcctcccttactctggttccgtgttcctgcgtccgctgcttccgctcctgtcgttcagctacgcacgccggatttttgcatcgagcacggagatctaccacataaacatggagctacgacgcgattcccaaggtacaatcggcaattatgttcaaacaatttttaagtcctcttgcgctccttctattacgagccacgttttatattttgtgcttgcataatacttcgaagaaatcctgtcaccaatcgaactgataatcctggaacgcacgtttttaccgttgtcgtccgcttcacccagctcgcctttcacgtcatataataataattgtgaacttccatgaacttcaccaaactgagttactaatcgttccatgagtcanaagtgtgcaaa

SEQ ID NO: 261279 - DNA, 540 bp, Zea mays
caagaacaaaccattgttggacgcgttcccctcctgcacgcaacctcatctcgtcctccagatcctggatggccgtcctccttgataccttgcctcgcgagtgctctcggtgagctactttgttttgatttatcaggaaatccgtttgcttcatgttatgcaggctcagatctgattgctggattcggcatcttacgggcttgaatagagctaggactgggagaaaacaacaaacccgcgttggatcctgtatcgatctggagaaatttctaagtcgtcgtcgtcgtcgtcgttcggttcggagcggatctgaggcgacgatggctggaggcggcgggatctcttggtctgcagtcctgcttcacctcgatggatgatgtctctgcgctgataattattggatcaatttcgataattattagtagatctatgagatatgccgcctggaagaggcgaggtaagctgcagcatgtaaaagtctgcgtgcgttgacagcaaccaagagagaaaaagatgtgacatcctaaaaaaaaaaagaaa

SEQ ID NO: 261280 - DNA, 444 bp, Zea mays
ctcaaacagtcaacagggcaaagtaccagtcaggccgtccatcggtagcgaaaacttaaaccttggtaacaaatcagttccatcagcatcgccatgacccatgattgaagcacactataaccaatgagttccacatctccacagccacgagccataacggatcaattccccatcagcgtagccacgattgaagcgcgccatgatctcggttgatgaatagtggaatccatcatactgcagttttgcaatcttctttacacacgtccaccaattgctatggttcaaacatgcttgggagtcgcgtcgtagctccatgtttttgttgtagatctccgtgctcgatgcaaaaatccggcgtgcgcagcggaccaacaggcgcggaaccaacggataccggaacgcgtgggcgagacgcgtggaaggacgcgtgggcggacgcgtggg

SEQ ID NO: 261281 - DNA, 563 bp, Zea mays
acgcccacgcgtccgcggacatcgtgggtgacatatatgactttgctaacgcgcatcgctgaaaagatgatgatcgagtgccgggggagcagatctcacggaggttgatgtctgtggccacggattctactcactcatctcgttccgtgaccctgtatgcattgcttccgctcctgttgttccgctacgcacgcccgatttttgcatcgagcaccgagatctacaacaaacacatggagctacgacgcgattcccaagtatgatggattccactattcatcaaccgaaattatggcgcgcttcaatcgtggctacgctgatggggacctgatccgttgtggtgtgcttgaatcgtggctgtggagatgtgtggaactcattggttaaagtgtgctttattaataatggtgatgctgatggaactgattttgctcccgttggacggcctgattggttactttgccctgttgactgtttgagaacgtaccgcccaggtttacttatacttactgctttttgacggtactgtacatacagttcgacaatttatttattggcagttc

SEQ ID NO: 261282 - DNA, 429 bp, Zea mays
tcggttttctcattggcctagatgctcatttgaaactgccagctataactggcgatagccaggacttgccttttcttacatgtatttttcttacaggtcttcattgaagtagccttcctaactgatgtgtcactcttcatcaacaagattttgaatgcttttgtaacttgtttcaaaccatgcttgttcctttgacagccattagtcaagatgtatccttattgggagtgaatagacccactcatcttataacctacaaactctttggaggcagagcgctccagtattatcgcggagctgaagcaattgagtgataatattttactgttgatggagataaaatttcaagatatttcatcgtttcgtatcgatttcaggttgtaatggaagttgtttttaatctacgcaattttcactgttaaggtgttg

SEQ ID NO: 261283 - DNA, 711 bp, Zea mays
ctcgagccgtaccgtccgacccggctccctcggtccctccctcggtccctcccggtctcgcagttcctccccgtcgtcttccaccgcaaatcgccgaagcaagcaggcgagctcgggaccagatccactgcgggcagctggagcggaagggccatggggacgccgccgcctttccaggagtccggccactgcgacgtctgccgctgcaccttcaacaccttccgccgccgtcatcactgccgcagctgcggacggacgctctgtcacgagcattcttcgtactacatggctctcccgcagtatgggatatatacagacgtcagagtctgctacggttgcttcaacaaatcctccagccaaggacacgctgataatccggtgtcagctggtagcatttctggagcagctgactctttttcagggctgagtttgggtaaggaggatgattcgtcgcctatgaagaattcaacggttcagagcacggcagcccttattgagtgcaaatgtgggatgcctttgtgtatatgtgaagcaccaaaaccagaaccttctcctacacctgtaaagaatatcaacaccgttcccccaaccacacagtcaaatccaaggccaaagaagcctgctaacactcaacagaaggcttcagctacttccagtagcaactcaagcccattcttaaatattggataaatgacaacgatagcaatgata

SEQ ID NO: 261284 - DNA, 1248 bp, Zea mays
gatacggcctccattatttataaagaggatatagaataaaaaaaagagacgtccttggcgtggtgtcctcgtcctcgtgcccatctctgtcccaatcaaactgattgatccgtcgcccgcagggccacagcagccgcggcgaggtcgtccgtcggattcggaggctcagttattactgaaaagataatacagtacctatggcttctctggacgccgtgcgaggagacctcgccctgctgattctgtacctgaacaaggccgaggcgcgggacaagatctgccgagcgatccagtacgggtccaagttcatcagcaacggcgagccagggcctgcgcagaacgtcgacaagtccaccagcctggcccggaaagtgttccggctctgtaagttcgtcaacgacctgcacgctttgatcagccctcctgccaaggggactccgctcccgctgatcctactcgggaagtccaagaacgcgatgctgtcgactttcctcttcctggaccagatcgtgtgggcggggaggacaggaatatacaagaacaaggagcgggcggagtttctcgggaggatagcgttctactgcttcctcggctccaacacctgcacggccatcatcgagctagccgagctgcaacggctgtccacgtcgatgaagaagctggagaaggagctgaagcaccaagagctgtacaagaacgagcagtaccgcatgaagctgcacaagtcgaacgagcggctgctggcgctcgtcaagtcgagcctggacatcgtggtggccgtggggctcctgcagctggccccgaagaaggtgaccccccgcgtcacgggcgcgtttggcttcgccagctccctcatcgcttgctaccagctgcttccaagcccaccagcaaagcagagcaagtgaggactcccactccaagcactgtttaccaggaaaataatcccccccggataggtttgatttggttgccacatccccttgtatggcagactagactaatatatgtaatcatcatcataataattgataaaccatcccactatggataggtttggtcactccaagcactgtttaactgtattcatcctccaaaagcatgctaatgcccgtttagttcgatggactaaacattaatgtctctattttagtctctaaattgtcaaacgatgagactaaaataaagactaaactgtttaggatatagtcactcaaaaggactaaaaatgactaaaccatattaattcta

SEQ ID NO: 261285 - DNA, 462 bp, Zea mays
  unsure (1)..(462): unsure at all n locations
gtcctcgtcctcgtgcccatctctgtcccaatcaaactgattgatccgtcgcccgcagggccacagcagccgcggcgaggtcgtccgtcggattcggaggctcaggcggaactgcaccccatggaaatggaatcgagcgaacttacacgctgcttcgcaaccgtattatgcagttattactgaaaagataatacagtacctatggcttctctggacgccgtgcgaggagacctcgccctgctgattctgtacctgaacaaggccgaggcgcgggacaagatctgccgagcgatccagtacgggtccaagttcatcagcaacggcgagccagggcctgcgcagaacgtcgacaagtccaccagcctggcccggaaagtgttccggctctgtaagttcgtcaacgatctgcacgctttgatcagccctcctgccaaggggactccgctcncgctgattctactc

SEQ ID NO: 261286 - DNA, 478 bp, Zea mays
cgcaccttctgttggctcctcctccgtcctcccccaagcgccccctctcggccggtcgaatttccggggagggggattggggggatttgatatatatcgagagagtagtgtttgtcccccgattcctcatgcgtggcgcccaaaacctagagatccttttttgcgcccgaaaccttcctgagctggtccgattcggtgccgttagaggggatctgtgtacctcgccgccggccggcgctgtcgatctggttgtcttccacggcgggtctccaccccgtggctatggaatcgagagaacttacacgctgcttcgcaaccgtattatgcagttatactgaatagataatacagtacctatggcttctctggacgccgtgcgaggagacctcgccctgctgattctgtacctgaacaatgcccgagcgcgggacaagatctgccgagcgatccagtacgggtcaaagtcatcagcaacgcg

SEQ ID NO: 261287 - DNA, 729 bp, Zea mays
gtgagagactgagggcctattctttccttctcaaactcaaattcttcctggaatgcaggaaagccctgcctcccctctactgattctgaaagtggacttccatctgcgcgtcggttgatctattctactttgctgagttggactacattacctccatgtcgagactgcgagctctgtggcaggcttcctttaacgccacaaagagagctcttgtatggagttcagatgatctaattccgccaagtgaaagatgtatcttcaatttcaactcaaaagatgagctgaaaaggtggcatttgtactcagattcagagtatggaggtttgtcttctgcatccttagaaataactgatggcgcttcagttggagatactccattaactggtgtgttttctggtaacctttctttggatatgtctgaagagtcaacatggaggatcaggcgctatggattctgtgggatgcgatcaaagaagtttgatgggttcattgaccttgatgcatatgatacaatagcaatgaagatcaaaggggatggaagatgctacatatctacagtgtgttttctcacacaagactcactcttgaatattaaatgtccagtcagtattgttcttcagaatctgaaatcttaataagtacagatatacacggagaattgggtgaattcacccgggcaacaagaagacaactcgtggcaggcttttgtgtacatacctcctcaagaca

SEQ ID NO: 261288 - DNA, 1631 bp, Zea mays
caactaccccccaccgtgagggacgcgaccaaacacacgcccctcttcgcacctgccaccaaccccgacgagcggcgatgaccggcacggtgtccaagctggcggcgccccgtccggcggcaccgccgctccggccggcgtccctccgcaccgccgccctcgccttcgccccctccccgcgccgggtccgcgtctccgtcgccgggcgagccaggagccccatcattgcgatggcttcggccaaggaaggaaacggtgcaccgaccaagaggactgcgcttcatgatctctacgagctccagggcctgtccccgtggtacgacaacctatgccgccctgtcacagacttgctgcccattatcgccagcggcgtccgtggagtcaccagcaacccaacgattttccaaaaggccatttcatcgtccagcgcatatgatgatcagttcaagcagctcatttcggcaggaaaggacgcggagagcgcttactgggaactcgttataaaggatatccaagatgcgtgcaaactttttgagcccatctacgatgagactgatggggctgatgggtatgtctccgtagaggtgtctcctaggttggcaaatgacactcaaggaactgttgaagcggcaaagtggttacacaaagtggtcaaccgccccaatgtctacataaagatcccagctactgcagaatgtgttccttccatccaggaagttatcgctaatggcattagcgtcaacgtcacgcttattttctcaattgcgagatatgaggctgtgattgatgcttacctcgatgggctagaggcttctggcttgagtgacttatcccgagttactagcgttgcatccttctttgtcagccgagtggacacccttattgacaaaatgcttgacaagattggaacacctgaggcacttgccttgagagggaaggctgccgtagcacaggccaaactagcaaatcggctctaccagaagaaattctctggcccgaggtgggaggcgttggccaagaaaggtgccaagaaacagaggttgttgtgggcatccaccggtgtcaagaacccagcttatcccgacactctttacatcgacagtctcattggacctgacacggtcaacacgatgcccgaccaagctttgcaagcattcatagaccacggcactgtttcgaggacagttgatgcgaatgtgtccgaggcggaaggtgtatacagcgccttggagaagcttggcattgactggggcgaggtcggaaagcagcttgagctggaaggcgtggactccttcaagaagagctttgacagcctactcgtgagcctgcaggagaagggcaacagcctcaagacggcaactgtgtaaaactgagaagattgggtaccggcgggtgaacgattttactaaataaaatgctagcttgctggctctcttagtttttacgatgtacctttgctctccattttctgaatcgggattgtattctaggcttgcctggccgtcattgtgtgaccaacgttcatggcttgtaacaagggatcggacgtaaacggttggaaaacatctctgttactttctatacgatttttatttgccccaaaaaaaaaaaaaaaaaaagaaaaaaagaaa

SEQ ID NO: 261289 - DNA, 532 bp, Zea mays
ttttctcgtccgcgaaagagcctccaaaacctcgcaacaaccccgtgacacccacacccatccgccctgcccctcctcgcgctccccaccaaccccgacgagcggcgatgaccggcacggtgtccaagctggcggcgccccggcctgcggcgccaccgctccggccggcgtccctccgcgccgccgcaatcgccttcgccccctccccgcgccgggtccgcgtctccgtcgccgggcgggccaggatcccctccgtcattgcgatggcttctgccaaggaaggaaatggtgcaccgaccaagaaaacctcgcttcacgatctctacgagctccagggcctctccccgtggtatgacaacctctgccgacctgtcaccgacttgctgccccttatcgccagcggtgttcgtggagtcaccagcaaccctacaattttccagaaggccatctcatcctccagcgcatatgatgatcagttcaagcaagctcatttcgggcggaaaggacgcggcgagcgcttactgggaactcg

SEQ ID NO: 261290 - DNA, 565 bp, Zea mays
gtctcgaggacagttccgtggtctatgaatgcgtgcaaagcttggtcgggcatcgtgttcaagcattcatagaccacggcaccgtttcaaggacagttgatgcgaatgtgtctgaggcggaaggtgtatacagcgccttggagaagcttggcatcgactgggaagaggttggaaagcagcttgagctggaaggcgtggactccttcaagaagagctttgacagcctactcgtgagcctgcaggagaagggcaacagcctcaagatggcgagtgtgtaaagctgagaagattgggtacctgcgagtgaacgattttactaaataaaatgctagcttgctggctctcctcttagtttttacgctgtacctttgctctcaattttctgaatcggctttgtatcccaggcttgccagaacgtcattgtgtagccactgttcatggcttgtaattgctacggggtatccgataacgtcattgtggatgatgcctgtttgccctgactcttgaactcaatgtcgccatgtggtttctatgcattaacgtgaactgagaaaaaaaaattaaa

SEQ ID NO: 261291 - DNA, 449 bp, Zea mays
agatcacccacatgtacaaagggaagaccgtcatgaccgaggacgagcgctacgaatcgcttcggcattgcaagtgggtcgacgaggtcataccggacgctccatgggtgatcaaccaggggttcatcgacaagcacgacatcgactacgtcgctcacgacgcgctcccatacgctgacacgagtggagctgccaacgatgtctacgaattcgtgaaagccatcgggaagttcaaggagacgaagcgcaccgagggcatctcgacgtcggacatcatcatgaggatcttgaaggactacaaccagtacatcatgcggaacctcacccgcgggtacagccgcaaagatctcggcgtcagctacgtcaaggagaagcagctgagagtcaacatggtgatcagcaagctacgggagaaggtgaaggagcaccaggagaagatccacagcgcg

SEQ ID NO: 261292 - DNA, 956 bp, Zea mays
aatatctcccctcccttccctcttctggtctccgccccgctccttgcctccgatccccaattcctccttcggatctcgcattcagcgcagcgcaggtgtgaaggaagggggacgcggaggaagatggggctcgcgttcgggaagctcttcagccggctcttcgccaagaaggagatgcggatcctcatggtcggcctcgacgccgccggtaaaaccaccatcctctacaagctcaagctcggcgagatcgtcaccaccatccccaccatcggtttcaatgttgaaactgttgagtacaagaacattagcttcactgtctgggatgtcgggggtcaggacaagatcagacctctttggaggcattacttccagaacacccagggtcttatctttgttgtggacagcaatgaccgtgaccgtgttgttgaagccagagatgagctccacaggatgctgaacgaggatgagctacgtgatgctgtgctgcttgtttttgccaacaagcaagatcttcccaatgccatgaatgctgctgagattactgacaagcttggattacactccctgcgccagcgacactggtacatccagagcacttgtgccacaactggcgagggtctgtatgagggcctggactggctgtccagcaacattgcgagcaaggcttgaggcctaccttgaatatcaactgcgaactgactaggagctccggatgtatcatggaaactcaggacagaatcgcagttgcaacctgttagatgtcttctaccggcactatatatattttttgtttgatgtgtaatgatgttactgttcaacgtttattaccctactatactgttggatgttctttggacctgtttcatttcgcacaaggattggacttccaatatcatgctacattttacattcggatttatcttgaaattatcttttacaaatacagttgattatta

SEQ ID NO: 261293 - DNA, 906 bp, Zea mays
aaagcgcggcgttaatatctcccctcccccttgccctcaggtctgcccaccgcccccgatccaccattcctcctccggatttcgcagtcagcggtggtgaaggtagcgggcgcggaggaagatggggctcgcgttcgggaagctcttcagccggctcttcgccaagaaggagatgcggattcttatggtcggtctcgacgccgccggtaaaaccaccatcctctacaagctcaagctcggcgagatcgtcacaaccatccccaccatcggtttcaatgttgaaactgttgagtacaagaacattagcttcacggtctgggatgtcgggggtcaggacaagatcagacctctctggaggcattacttccagaacacacagggtcttatctttgttgtggatagcaatgaccgtgaccgtgttgttgaagccagagatgagctgcacaggatgctgaacgaggatgagctacgtgatgctgtgctgcttgttttcgccaacaagcaagatcttcctaatgccatgaatgctgctgagatcactgacaagcttggattacactccttgcgccagcgacactggtacatccagagcacttgtgccacaactggcgagggtctgtatgagggcctggactggctgtccagcaacattgcgagcaaggcttgaggcctaccttgaatatcaactgcgaactgactaggagctccggatgtatcatggaaactcaggacagaatcgcagttgcaatctgttagatgtcttctaccggcactatatatttttttttgtttaatgtgtaataatgttcctgttcaacgcttattaccctactataaagatgaatgttctttggaccaaaaaaaaaaaaaaaaaaaaaagggcggccgcccgggaattcggacggt

SEQ ID NO: 261294 - DNA, 1047 bp, Zea mays
tcgctgtacgcgtgggcggacgcgtgggcgcagcaaaaggaagcttggctcggttcccctcctgcggcctattggcttctggcctcgtataaaaaaggcgaggacgcgctccaccgccagaatcatcgtcaccccggagcctctccttcccggtctcctccgcccgttgccttcgtcccctccatctccggctgcgtcgccggcgagcccgacaccgcgaatcggatccgccgacaaggcgagagggaagagatggggctcacgttcaccaagctgttcagccggctgttcgccaagaaggagatgcggatcctgatggtgggactcgacgccgccggaaagaccaccatcctctacaagctgaagctcggcgagatcgtcaccaccatccccaccatcggattcaatgttgaaactgtggagtacaagaacatcagcttcactgtctgggatgtcgggggccaggacaagatcaggccactgtggaggcattacttccagaacacccagggtctcatctttgttgtggacagcaatgatagggaccgtgttgttgaagcaagggatgagcttcaccgaatgctgaatgaggatgagttacgtgatgctgtgttgcttgtgtttgctaacaagcaagatcttccaaatgctatgaatgccgctgagatcactgataagcttggactgcattcacttcgccagcgtcattggtacattcaaagcacttgtgctacaacgggtgagggattgtatgaaggcctggactggctgtccagcaacattgcaaccaagtcctaaattgtcaagcgaggtttggatcatctaggagcttttggatgatgatgatgatgatggtgctggatatttagggttgggttggtatttccgtatgtaagatgtatgcccctgagctcggcagtttttgagctctgcttaagattctcacagttaaattgttttatgtaatttgggccttgagatgtttctgaaccaaacagctaaaagagttcagttgagttaactggttgccattattacattatgaga

SEQ ID NO: 261295 - DNA, 992 bp, Zea mays
cgagaaaagcccgcccgtcagaccgcaccgcggccacagcctcgcgtcgtcgccccacagccacgcgagccttcgccgatccgcgagcgcagatcgccgaagccaggcggcggagagggagctcgaggcggcggaggaaggcgttcgccacagtcgctgatttccctggggaagagatgggtctctcctttgggaagctgttcagccgcctcttcgccaagaaggagatgaggattctcatggtcgggctcgatgccgccggtaagaccaccatcctctacaagctcaagctcggcgagatcgtcaccaccatccccactatcggattcaatgttgaaactgttgagtataagaacattagcttcactgtttgggatgttggtggccaggacaagatcaggcccctgtggaggcactactttcagaacacacagggacttatttttgttgtagacagcaacgacagggaacgtgttgttgaggctagagatgagctccacaggatgctgaatgaggatgagctgcgtgacgctgtgctgcttgtatttgcaaacaaacaagatcttcccaatgctatgaatgctgctgaaattactgacaagcttggtctgcattccctgcgacagcggcactggtacatccagagcacttgtgctacatctggtgaagggttgtatgaggggcttgactggctttccagcaacatctccagcaagtcttgaagcttttcggcagggctcctagcgagaggatgtctgaacaacttatggctgctttttttttacatattattactaagacacaagctacagcagatatagtacttgtgaaaaaaagaaacttctgagctcttttgagggattgatactagattggattgtgtttttgtttttgggtcgataccatcgcctgttcggttccacaaaattgactgtcaactatatttacctatgttcggagattgtatgataaattaaattgaaaaaaaaaga

SEQ ID NO: 261296 - DNA, 1079 bp, Zea mays
ctaccaccgcaccacgcgctcccgtttccgccgatccgagcgcgcagatcgcggaagcccagcggctcagagtccagggggagggagctcgcggcggctgaggaaggcgttcaccaccgtcgcggtgagtgctcccagtcaagcgcctcttccttcgtagtgtcaacaattccgccccgcgcccgcgcggatctgattgtctcgatcgtccaatcgagcggatttcattgaggaagagatggggctctcctttgggaagctgttcagccgcctcttcgccaagaaggagatgaggattctcatggtcgggctcgatgccgccggtaagaccaccatcctctacaagctcaagctcggcgagatcgtcaccaccatccccaccattggattcaatgttgaaactgttgagtacaagaacattagcttcaccgtttgggatgttggtggccaggacaagatcaggcccctgtggaggcactactttcagaacacgcagggacttatttttgttgtagacagcaatgatagggaacgtgttgttgaggctagagatgagctccacaggatgctgaatgaggatgagctgcgtgatgccgtgctgcttgtatttgcaaacaaacaagatcttcccaatgctatgaatgctgctgaaattactgacaagcttggtctgcattctcttcgccagcggcactggtacatccagagcacttgtgctacatctggtgaagggttgtatgaggggcttgattggctttccaacaacatcgccaacaagtcttgaagcttttcagcagggctcctagcaagaggaagacgtctgaacaacttatggatgctttttacatattattacaaagatactccctctgtcttgatttactattccttttgggatagtggttgattcatataatatttgatgtatgtgtttaatagatatgtctagattcaccatcatctattttaatatggacatagatataaagagctaaaccgaatactattttggaaccaagggagtatcgatagtagagagtgtgggtcctaaaaacccccccaaaatctgagctttcttt

SEQ ID NO: 261297 - DNA, 480 bp, Zea mays
gggtcgaggcacgcgtccgaaccgcaccaccgcaccgcggccaaggccaatagcctcgcctagcgctcactcgctcgccccactaccaccgcaccacgcgctcccgtttccgccgatccgagcgcgcagatcgcggaagcccagcggctcagagtccagggggagggagctcgcggcggctgaggaaggcgttcaccaccgtcgcggatttcattgaggaagagatggggctctcctttgggaagctgttcagccgcctcttcgccaagaaggagatgaggattctcatggtcgggctcgatgccgccggtaagaccaccatcctctataagctcaagctcggcgagatcgtcaccaccatccccaccattggattcaatgttgaaactgttgagtacaagaacattagcttcaccgtttgggatgtgggtggccaggacaagatcaggcccctgtggaggcactactttcagaacacgc

SEQ ID NO: 261298 - DNA, 777 bp, Zea mays
caatgtgccaggaaggatatatgggctggtgggctgggacttagggtcttgtccttctttggtggcctttgtgctgttgctttaaagtttcttataatcatatggcatcttcttgcctcgctttatgatcacctaggaactgccttgccttggtgcctgagtaatctcgaatatatcgtatagatctttggtcttcagtactctaatgaagataagacaaattctcttgaaaatacaaatcttgtgatagtgaaatgaaattcattttgtttgtatggcatgatgagctacgtgatgctgtgctgcttgttttcgccaacaagcaagatcttcctaatgccatgaatgctgctgagatcactgacaagcttggattacactccctgcggcagcgacactggtacatccagagcacttgtgccacaactggcgagggtctgtacgagggcctggactggctgtccagcaacatttcgagcaggcttgcacatcaaatgcgaactgactaggagctccggatgtatcatggaaacttaggacagaatcgcctctacaacctgttaggtgtcttctaccggcacaatatattttttgtttggaatatgtaatgatgttacggttcaacgtttattctaccctactatactgttggatgttctttgggcctgtttcattttgcacaaggattgctgagttccaatatcatgcatgctacattttaaattcgtacaccatcgcaaaccctaggatgtataccaaattataggatattccaac

SEQ ID NO: 261299 - DNA, 540 bp, Zea mays
cggacgcgtggcgagacgcgtgggcggacgcgtgggcaccattcctcctccggatttcgcagtcagcggtggtgaaggtagcgggcgctgaggaagaacgggctcgcgtacgggaagctctacagccggctcttcgccaagaaggagatgcggattcttatggtcggtctcgacgccgccggtaaaaccaccatcctctacaagctcaagctcggcgagatcgtcacaaccatccccaccatcggtttcaatgttgaaactgttgagtacaagaacattagcttcacggtctgggatgtcgggggtcaggacaagatcagacctctctggaggcattacttccagagcacacagggggaccatttatgttgaggatagaactgaccgctaacgcgatcaacacgacagagttgagatgctgaacaggccgctcttggatgagctcccccactgctgtgctgctagtcatcccgaatccgagaaccattttaccgccttgaatgcgtgtcagatcactgacaggctccggcttacactccc

SEQ ID NO: 261300 - DNA, 2280 bp, Zea mays
ccaatagtggatactttgtctccaagtctcaaaacccaattcgacccacttggaaccggccttgttccccgttggaccctaataaaattccccattccaactcacacagatctcgcacccggcagtggcgacgaatctcgcggggcggaggtggtggcgcgacagaggcggtgtcgactccgacgaactcgcagccaccggtggatacgcaccagcagcaccggcgcactccaccgacgttcatatttaaggacttggtttggataattctactcgtcaacaaaagtgattaaaaatggtggttcttgcagcttcaatcgtttcaaagtcgggaaaagcacttgtttcaagacagtttgttgacatgtctcgcataagaattgaaggattacttgctgcgttcccgaaactggttggaactgggaaacagcacacttatgttgaaactgaaaatgtgcgttatgtttatcaacctattgaaggattatatcttctacttatcacaaacaagcagagcaatattcttgaagatctggacacattgaggctcctctccaagcttgtgcctgaatactccccttccttggatgaggacggtatttgtaaaacagcatttgagattatatttgctttcgatgaagccatctctcttgggaacaaggaaaatgtgacagtgcaacaagttaaacaatattgtgagatggagagccatgaagagaaggcacacaagctgatgatgcaagccaaaatcaacgaaaccaaggatctcatgaagaagagggctaatgaacttgacaaaatgaggatggaaagaggcaagcttgacaaaggaggatactcatcaatatctggtccacgcgtgattgaaaaaacgtttagtgacatgagcatcagtggttctggatttggtagtggttctggattaggtggactgagcactgacatggactcatttgccagcaagcccaaaggtcgtccatctacagcagctactgcacctggtaaaggttttggtatgaaattaggcaagacacagaagacaaatcaattccttgagtctttgaaagctgaaggagaagtcattttggaggatgtacaaccaagtgcagtttctacaagatcatctgctcttccaccaagtgaccctgtcacagtgaacatagaagagaagctcaatgttgttgttaaaagagatggtggtattagtaactttgatgttcaaggaacacttgctcttcaggttcttaatgatactgatgggttcatccatttgcagattgaaagccaagatatgcctgggcttagcttcaaaacacacccaaatatcaataaggatttgtttaacagtcagcaaattttgggagcaaaagatccaaacaggccctttccgagtggtcaaaatgaaactcctctggtgaaatggagaatccaggggatggatgagtcatctttacctctgtcagtcaattgctggccgtcagtatctggaaatgaaacctatgtgaacattgaatatgaagcttctgagatgtttgatctgcacaatgttgtcatatctatacctctgcctgcagttcgggaggctccaagtgtcagacagatagatggagagtggaagttcgactcaagaaactctgtgttggaatggtctattctccttatcgatcagtcgaatcgcagtggttccatggaatttgttgttcccccagctgacccatcatcgtttttccccatctccgttggattttctgcatcgagtactttcagtgatctgaaggttactggaattcttcctctgaaggaaggcaaccctcccaagttttctcagcgggctcgtttgctcactgctaactaccaagttgtttaacgcttgtaccgcgagtgttggtccacttgaatgctccaatagcagatgttattgccgtggacttatgcaagccatggcacgggagattattttgtgtttggaaaatttctttactatgcgcttctcattgttatagcatattgcacaaatgttgttctaatgtattgcccccagagaaataagtaatgttcttgcattttgttggcatgcattttgtacccgtctctttcctcctatgaggatgttgtcaggacagtgttatctcctgggcttggtgtaatgtgatcgtagcatctccacctgatcccttgtccctactgccactagtcaacttttggcaacagatccggtggtcttatttatcttattttctattttaaacttcgctctacaaacaatgttttacacggttt

SEQ ID NO: 261301 - DNA, 526 bp, Zea mays
tcaagaaactctgtgttggaatggtctattctccttattgatcagtcgaatcgcagtggttccatggaatttgttgttcccccagctgatccgtcatcatttttccccatctctgttggattttctgcatcgagtactttcagtgatctgaaggttactggaatccttcctctgaaggaaggcaaccctccgaagttttcccagcgggctcgtttgctcacagctaactatcaagttgtttaatggttgtaccgttgtccgagtgttgatccacttaaatatattcgaatagcatatttttgtgacatggcatgctactggcatgaacttttgcaagtcatgggatggaagatcattttgggttttgaaaacctttactatgtgcttctcattgttagcatgttgcacaaatgttctgatgtgttgctaccagagaaataagtaatgttcttgcctttcgtttgcctgcattttgtacccgttctttccccttgaggataatcttttaaggacggtgttatcgtcc

SEQ ID NO: 261302 - DNA, 492 bp, Zea mays
  unsure (1)..(492): unsure at all n locations
gtttaagagggctaatgagctcggtttaangtggatggaaagagcgctcccttgcctcccgaggacactcatcaatatctggtccacgcgtgattgaaaaaactttcagtgacatgagcatcagtggttctggattaggtggactgagcactgacatggactcatttgctagcaagcccaaaggccgtccatctacagcagctactgcacctggtaaaggttttggtatgaaattaggcaagacacagaagacaaatcaattccttgaatctttgaaagctgaaggagaagtcattttggaggatgtacaaccaagtgcagtttctacaaggtcatctgctcttccaccaagtgaccctgtcacagtaactatagaagagaagctcaatggtgctgttaaaagagatcgtggtattaataactttgatgttcaaggaacacttgctcttcaggttctcaatgatactgatgggttcatccaattgcagattg

SEQ ID NO: 261303 - DNA, 435 bp, Zea mays
ttttcgcgtgggcggacgcgtgggcaaggattggtttaacaacggccttctgcgcgtcctccaagtgaccctgtcacagtaactatagaagagaagctcagggtcgttgttaaaagagatggtggcattaataactttgatgttcaaggaacacttgctcttcaggttctcaatgatactgatgggttcatccaattgcagattgaaagccaagatattcctgggcttagcttcaaaacacacccaaatatcaacaaggatttgtttaacagtcagcaaattctgggagcaaaagatcctaacaggcctttttcgaggggtcaaaatgaaactcctctggtgaaatggagaaatcaggggatggatgagtcatttttacctgtgtgagccaattgctggccggctgtatctggaaatgaacctatgtgaacattg

SEQ ID NO: 261304 - DNA, 383 bp, Zea mays
tcggagagccatggagaagaaggcacacaagctgatgatgcaaaccaaaatcaatgaaaccaaggatctcatgaaggggagggctaatgagcttgacaaaatgaggatggaaagaggcaaacttgacaaaggaggatactcatcaatatctggtccacgcgtgattgaaaaaactttcagtgacatgagcatcagtggttctggattaggtggactgagcactgacatggactcatttgctagcaagcccaaaggccgtccatctacagcagctactgcacctggtaaaggttttggtatgaaattaggcaagacacagaagacaaatcaattccttgaatctttgaaaagctgaaggaaaaagtcattttgggaggatgtac

SEQ ID NO: 261305 - DNA, 414 bp, Zea mays
gatcagtcgaatcgcagtggttccatggaattgttgttcccccagctgatccgtcatcatttttccccatctctgttggattttctgcatcgagtactttcagtgatctgaaggttactggaatccttcctctgaaggaaggcaaccctccgaagttttcccagcgggctcgtttgctcacagctaactatcaagttgtttaatggttgtaccgttgtccgagtgttgatccacttaaatatattcgaatagcatatttttgtgacatggtatgctactggcatgaacttttgcaagtcatgggatggaagatcattttgggttttgaaaatctttaaaaaaaaaaaaaagaacaaaaaaaaagaaaaaaaaaatagagaagagtggaagaaaagacacaaggcgatgaagaga

SEQ ID NO: 261306 - DNA, 172 bp, Zea mays
aacagggccaacagagatcttgttcatatttcattactttcaatgcagaacaagttctgggcgtgggtatttgtaccattgcgacatcacactgctagccatgttctgtatcctgttgtgtggtaactgggaagcatcaaatatggacatcggttttgattttttttctgct

SEQ ID NO: 261307 - DNA, 2718 bp, Zea mays
gggaatgccgccttagagaatggccaccatcaggctgaagctgacgcagatgaatggagggaaaaggaagaggacttggccaaccacgggcacagtgcgccaccgccaggcatgcagcaggtggatgagcataaggaggaaccaagacaaagcattcactgggagaggttcctacctgtgaagacactgagagtcttgctggtggagaatgatgactctactcgtcaggtggtcagtgccctgctccgtaagtgctgctatgaagttattcctgctgaaaatggtttgcatgcatggcgatatcttgaagatctgcagaacaacatcgaccttgtattgactgaggttttcatgccttgtctatctggtatcggtctgcttagcaaaatcacaagtcacaaaatttgcaaagacattcctgtgattatgatgtctacgaatgattctatgagtatggtgtttaagtgtttgtcgaagggagcagttgatttcttggtaaaaccactacgtaagaatgagcttaagaacctttggcagcatgtttggaggcgatgccacagttccagtggaagtgaaagtggcatccagacacagaagtgtgccaaactaaatactggcgacgagtatgagaacggcagtgacagcaatcatgatgatgaagaaaatgatgacggcgacgatgacgacttcagtgttggactcaatgctagggatggaagtgacaatggcagtggtactcaaagctcatggacaaagcgtgctgtggagattgacagcccacaacctatatctcccgatcaactagttgatccacctgatagtacatgtgcacaagtaattcaccctagatcagagatatgcagtaacaagtggttaccgacagcaaacaaaaggaatgtcaagaaacagaaggagaataaagatgaatctatgggaagatacttaggaataggtgctcctaggaactcaagtgcagaatatcaatcatctctcaatgatgtatctgttaatccaatagaaaaaggacatgagaatcacatgtccaaatgcaaatctaaaaaggaaacaatggcagaagatgattgtacaaacatgcctagtgcaacaaatgctgaaactgctgatttgattagctcaatagccagaaacacagaaggccaacaagcagtacaagccgttgacgcaccagatggcccttccaaaatggctaatggaaatgataagaatcatgattctcatatcgaagtgacaccccatgagttgggtttgaagagatcgagaacaaatggagctacagcggaaatccatgatgagcgaaatattctgaaaagatcagatcagtcagccttcaccaggtaccatacatctgtggcttccaatcaaggtggagcaagatatggggaaagctcttcaccacaagataacagttctgaggccatgaaaacggactctacatgcaagatgaagtcaaattcagatgctgctccaataaagcagggctccaatggcagtagcaataacgatgtgggatccagtacaaagaatgttgctgcaaggccttcgggtgacagggagagagtagcgtcaccattagccatcaaatctacccagcatgcctcagcatttcatactatacagaatcaaacgtcaccagctaatctgattggggaagacaaagctgatgaaggaatttccaatacagtgaaaatgagccacccaacagaggttccacaaggctgcgtccagcatcatcatcatgtgcattattacctccatgttatgacacagaaacagccatcaacagaccgtggatcatcagatgttcactgtggttcgtcaaatgtgtttgatcctcctgttgaaggacatgctgcaaactacagtgtgaatgggggtgtctcagttggtcataatgggtgcaatgggcagaatggaagtagcgctgtccccaatattgcaagaccaaacatagagagtattaatggtaccatgagccaaaatattgccggaggtggcattgtaagtgggagtgggagtggcaatgacatgtatcagaatcggttcctgcaacgagaagctgcattgaacaaattcagactgaagcggaaagatcggaactttggtaaaaaggttcgctaccaaagcaggaagaggcttgctgagcagcggccacgggtccgaggacagtttgtgcgacaatctgagcaagaagatcaaacagcgcaaggttcagaaagatgacacgtaatttctaatacaacgtatcatcttcttcggcagatctgagaattaggcggttcttcctattgcgcatcttcgtcgacagatctgagaattaagtggtccttcccattgctgatagtagcccactgattcccaacgttagagtacacaataaataagactctagttgtcaatttctgtggttgactgcagatgatcaccctagcgctatggagtcaacaatgtaatatttatatactatgttcgtgccttggcgccttggcggtttgcaatcttcagtttcctttctgagagattcttggccaagtgccttgaggaggagcaaactagcagcgtcgccattgctatattaatagctggaatcatgtagtagtagttcatccattcattcgaagatcgtgttccaaatcaacccaagtaggggtttgcttctcctctttccaaaaaaaaaaaaaaaaaaaaaaaaaaaaggaa

SEQ ID NO: 261308 - DNA, 514 bp, Zea mays
  unsure (1)..(514): unsure at all n locations
acccacgcgtgcgnggacgcgtgggagagtccttcttactgcattttctttctttggttctttgggtcggnttgggttgctaggcacttctgtgctgttgtaatatgggccacggggtctctcaatagctttgtcataaaacaattctacttccccttaatatagtacatgtgactctgacatgttatcgaacaaaaaaaaacattgctcgctctaaattttatgagatctggcatgatttcaaactattcttctttttcaaaatcctgttttctgactgcagtttttacaagattttatggtcttgccgcttcatttttctgactgtttgcattggaccgataccttctgatggccttgtccgcctattttcaggttcgctaccaaagcaggaagaggcttgctgagcagcggccacgggtccgaggacagtttgtgcgacaatctgagcaagaagatcaaacagcgcaaggttcagaaagatgacacgtaatttctaatacaacgtatcatc

SEQ ID NO: 261309 - DNA, 496 bp, Zea mays
ctcctgaagacagaagctgctttgaacacattcagactgaagcggaatgatgcgtactttgctaaaacggtttgctaccaatgcaggatgaggcttgctgagcaacctacacgtgtcctaactcagtttctacgacagtctgagcagtattatcaaacatcgcatggttaacaaagactacacgtaatttctaatacaacgtattatattacttcgccatatctgagaattatgcggatcttcctattgcgcatcttcgtcgactgatcttacaataaaatgttccttgccattgctgataggagccccctgattcccaacgtttgagcacccactatataagcctctagctgtcaatttctgtggttgactgcagatgatcaccctagcgctctggagtcaccaatgtaatatttatatactatgttcgtcccttggcgccttggcggtttcccaaaaaaaaaaaaaaaaaaaaaaaaaaaaaaaaaaaaaagaa

SEQ ID NO: 261310 - DNA, 2761 bp, Zea mays
tttctttgagagaagcacttgctcaagcacaatcttcaagaatagggctgattaggggaacttaattgagggctaaccctgttccacatgtatccattttctggtgttccctgaggccttatttcatgcctcgaagcacttgctcaagcacaatcttcaagaatcgggtcaaccgccagggcattgagagagtctctacatccagtgctgagacaaaaaatggaactttgggaagaaaatctcagtactgccgtgagcctcgaagtgttgggaataactgagaagttttcagttgctgcaggcgctcgaagcatcactactgattacgcgaagctagattgtgtaacatcaatcttaatgggtcttttatctaggaaccaatccttggctttttggaaggctttccttcctgtggtctacaatatatttaatgttcatggtgcaacactaatggcaagggagaatgaccgcttcttgaagcaaattgcttttcatcttttgcggcttgctgttttccgaaacgattcgattagaaaaagagctgttgttgggctgcagattcttgttaggaactcattcaactatttcaaaaacactacaaggttaagggtcatgttgacaattactttgtccgagttgatgtccgacgtgcaagtaactcaaatgaaattcgatggttctcttgaagaaagtggtgaagctcggcgccttaggaaatcactggaggaaatggctgatgtgagaagcaaggatctgttaaaagattgtggcctccctgttactgcattggaggcggcccctgaaggctcctctgataataggtggtcttgggtagaggtgaaacatttgtctaaatgtctagtccaggcccttgatgctggtctggaacacgccctcctgggttctgtagtgactgtagacaggtatgcagctgccgagggtttctataaactagctatggcctatgcacccgttccagatcttcacattatgtggttgcttcatctgtgtgatgcacaccaggagatgcaatcatgggctgaagcagcacaatgtgcagttgctgtagctggcgtgatcatgcaggcacttgttggaaggaatgatgctgtgtggagcaaggagcatgttgcttcgctgcgcaagatttgccctattgtcaacactgatgtgagtgcagaagcatctgcagctgaagtcgagggatatggtgcatccaaattaacagtggactcagcggtcaaatatcttcaactagccaataaacttttcacacaagctgaactctaccatttttgtgcaagcattcaggaactcataattcctgtgtataaaagcagaagggcttatggacagctggccaaatgccacacatcgctcacaaacatctatgagtcaattcttgaacaggaggctagccctataccattcattgatgccacatactaccgagttggtttctatggtgagcgttttggcaagctcaataaaaaggagtatgtatttagagaaccacgggatgtacgtctcggtgatattatggagaagcttagtcatatatatgaggttaaaatggatgggagtcacactttacatataattccagattctagacaagtcaatgctgatgagttgcagcctggcgtctgctatttacagatcactgctgttgatcctgtaatggaggatgaggacttgggtagcaggagggaaaggattttttctttatctactggtactgtacgtgcacgtgtttttgaccgttttcttttcgatacaccattcacaaaaaatggaaaaacacaaggtggtctagaagaccagtggaagaggcgtacagtgctccagacagagggttcctttcccgctttggtgaaccgtctgccagttatcaaatctgaatctctggagttctctcctgtcgagaatgcgattggaatgatcgaaacaaggacagctgcattgagaaatgagctagaagaaccacggagttctgaaggtgatcaactcccaaggcttcagagcttgcaaaggatactccaaggaagtgtggctgtgcaggtcaacagtggggtattaagtgtgtgcactgcattcttatctggtgagccagcgactaggctcagatcccaagaactgcagcagctcatcgctgcattgcttgaattcatggctgtctgcaagcgtgcaatccgtgtgcatttcagattgataggggaagaagaccaggaattccacacccaacttgtcaatgggttccagtcactcaccgctgagctatctcactatatccctgctatactctccgagctatgatagaactgtagcaagccagaaattaggtagcatgtgaatggttgttcattcattcagttgcaggttcccaccaaatgtccatatttccattagctttggttgtatagttctaggaaccggaaattaactagtcttcgaagttctgtaccgtattgcagaaccgattcctgattttggagtgtaaagtctgtataatacctagtgttatctgttatgcaccagttatatgctgagttccttgttctacctattttgcggtttgctactgtatcacagcgagccgacattttacaacagttatatgtaatgttctgtagtgatacaatagtgcctattctgggtgatatgtagtttttttcctgtaggaaattagctgctgacgagggcatcctcgcaatttgtttatgcacgatttgaagccttgtgttattgaagtcgttcccat

SEQ ID NO: 261311 - DNA, 436 bp, Zea mays
gcaagcgtgcaatccgtgtgcatttcagattgataggggaaaaagaccaggaattccacacccaacttgtcaatgggttccagtcactcaccgctgagctatctcattatatccctgctattcgctccgagctatgattgaactgttacaagcccgaaattaggtagcatgtggatgattcattctttcaggtgcagggtcccaccaaatgtccatatttccattagttttgggtggataggtgcaccgattcctgattttggagtgtaaagtttgtatgacctagtgttttctgttatgcaccgggtatatgctgagtgccatgttttttgcgggttgctactgtatcacagcgagccgacattttacccccggtatatgtaatggtctgtagtgatacaataatgcctattctgggtgatatgtaatttttttt

SEQ ID NO: 261312 - DNA, 478 bp, Zea mays
cagaaacacaaagaagtgaatttgggtactccaggagcatcgtcttcaactcggactaacaggtctactatacctggaaattctaccatgggtgtgaggccagcttatggtcatgttaatggagggcagatacatggtcttaaaaaccttggttgttcttcggtacctgatgctcagccatcaggttgcccatctgagtctgttattagtaggaggaggtttgagttcatgagaaagagggcctttgaccaggaaagctcttccagatcagtgaacttaagcttaggtcattcaactcctacagatattcgcagaatcagaatgaatgaacaatcactttgtcaacaaataccacgaagcagcagcagaagccatcaggaatcggcaggttcagttaggacaagacgaccttctcctcatgccactaggatgagtgttcctgatggaagagcagatggcgtgctttctctgcacgagt

SEQ ID NO: 261313 - DNA, 576 bp, Zea mays
cggctcgaccaccgcaccgcacaccgcagcccaagttctcctctgcatctgaaatatcttgccacctgacgcgacagcgacaagatccaagaactcgctcgcgcgcacggacagggccggaacccagggatcgagactgaacagcagtccgagacgccatgaacgtggaggaggaggtcgggaggctcaaggaggagatccataggctcggccagcagcagcccgatggctcttacaaggtcaagtttggcgttctcttcaacgacgatcggtgtgcaaatatctttgaagcactagttggcaccttgagggccgccaagaagaggaagatcttgacctacgaaggcgagctgcttctgcaaggtgtccatgacaacgtggagataaccctgttgcccccacctgcagttgctgccgcttgaagcgaagagcaacaccaagttctcgattccatacaactcgtatgcttgtattctgccgtgcctatattagattctctcgaaccatttggtgttcctttgaaactgctatcgtgtgatgtatgaaattgtggtgctcaagaaatgccttgcttgc

SEQ ID NO: 261314 - DNA, 855 bp, Zea mays
gcctcttccccttccccgcgtgccgcgtcaaacaaatctaggcttccaagcgagcgaaagcctacctccgccagccgatctaccaacatcctctccgccgattggaggcacctgcgaagatgccgcagcggcactcaaagaacaacaacgacctcgccttcttcacgtacgaggagaagcggaagctcgggtacggcacgcagcgggagcgcctggggaaggactccatcaagcccttcgacgcctgctgcctctgcctcaagccgctcatcgacccgctctgctgccccaagggccataccttctgcaaggagtgcatccttgagtgcctcctcgcccagaagaaggacatcaagcgtaagctagcagctcacgaggcccagaagaagcaagagaaggaagaggaggaggaaaagctaattctgcagaaggctaaggagttggatgcctttgatcagcagaatcatggggctgttccccagtaccatgatcgcagtggttcccaaggcaagaatgggtttcatggagcgaacagtgtgaaggtcacttcttttgaagaggaagccctccgtaacatgaaggcattctggcttccttcagctactcctgaagctacggtcaaggtagatgcaccctccgccgacactgtctgccctgaggggcaggagaagctcaagttgaaatcgctcttccctatctcatttatggaggaaactgctgatccgaagaggaagaaggcaatggaaaagagctatatgtgccctagttgcaaatccactctcacaaatacaatgtccctcgtggcggtcagcgcctgtggccacgtcttctgcaagaagtgctctgacaagtttc

SEQ ID NO: 261315 - DNA, 450 bp, Zea mays
ctcaccgcgtcaaacaaatctagggttccaagcgagcgaataccttcctccgcctgccgatctccccgcatctctcgggctaagacgattcgaggcacgagcgaagatgccgcagcggcattcgaaaaacaacaacgacctcgccttcttcacgtacgaggagaagcggaagctcgggtacggcacgcagcgggagcgcctgggaaaggactccatcaagcccttcgacgcctgctgcctctgcctcaagccgctcatcggcccgctctgctgccccaagggccacacattctgtaaggagtgcatcctcgagtgcctcctctcccagaagaaggacatcaagcgcaagctagcagcacatgaggcccagaaaaagcaggagaaagaagaggaggaagagaagctaattctgcagaaggctaaggagttggatgcctttgatcagcagaa

SEQ ID NO: 261316 - DNA, 1264 bp, Zea mays
taccgttcagtctctcttctctgtctgtcttgctccgtgcttcccggcgcgaaccctagccgagattagattggaggcgagcgccaccaccgaccggaggaagaggacgacacgatgctgcgggttgcggggagaaggctctcgtcttccctctcctggcgccccgccgcggcggtagccaggggccccctcgccggcgctggcgtccccgaccgggacgacgactcggctcgcggacggagccagccgcggttctccatcgactcccccttctttgtcgcttccaggggtttctcttctactgaaacagttgtcccaaggaaccaagatgctggcctagctgacctcccagcaactgtggctgctgtgaagaatcctaaccctaaggtggtttatgatgagtacaatcatgaaagatatcctcctggagatcccagcaagcgtgcatttgcttactttgtcctgagtggtgggaggttcatatatgcatcactgctgcgtcttctcgtactgaagtttgtcctgagcatgtcagcaagtaaggacgtgcttgcccttgcttcactcgaggtggacctctccagcattgagccagggaccacagtgaccgtgaagtggcgtggaaagccagtcttcatcaggcgccggacggaggacgacatcaagcttgccaacagtgtggatgtggcatccctgcgccacccagagcaggatgcagagcgtgtgaagaatcccgagtggctggtggtcattggcgtgtgcacgcacctcggctgcatcccactacctaatgccggagactttggcggctggttctgcccatgccatggttcccactatgacatttccgggaggatccgcaagggccctgcgccgttcaacctcgaggtcccgacctacagtttcttggaggagaacaaactgctcataggttaagagctcaaaagctacctgtctatttatctacttcactcaggtgaatccctgctgtgctgttatattgtttcttctttttaccgtttggctattttttttgctccaagaagatcattgtcatgccaaagtgcgttttttaaagtacaaaataatgtggtactttgctgatgctaaaatgtaagtgtggagctcatttggaacatcggttctctggggtaccgcaggaagaacattgattatacatctttctggcacattctcatgtcaagaataagcacccgctattatttttcgcattcatgtaaaaaaattttacataacatataat

SEQ ID NO: 261317 - DNA, 381 bp, Zea mays
ctttggcggctggttctgcccatgtcatggttccccctataacatttccgggaggatccgcaagggccctgccccgttcaacctaaaggtccctacctacagtttcttggaggagaacaaactgctcataggctaagagcttgaaagccacctgtctgtttatctacttcacccaggtgaatccctgctgtgctgttatattgtttcttcctttgacagtttggctagtgtttttttttgctccccgaggatcattgcaattccttgatggtcgactgttatatgccaaagtgcgtttttcaagtacaaaataatgtgctactttgctgctactaaaatgtaagttgggagtaatttgcccctccagttttctgagatgcc

SEQ ID NO: 261318 - DNA, 620 bp, Zea mays
tcgcccacgcgtccggtccttctcctctcctttcctctccccgcgcccaacagcctcgcatgtgcatctgaaaagttgagatcgacagttcctgagcacagggcgcgatggacgtcccggccgtggcggaccctggaacggagcgaggcgaaggcgcgctgatccagtgcccgtactgcgactcggaggcgatgcacaagctggcgcagatcctcctcccgggcctcgccgccgtctgcgtggacggcaccacggcggacccgttccgcagcccgtccgcggcggccgtggacctccgcaaggagatggtggactacatcacgcagcggacgacagcttcatcgcggacgcgctgatcgagtcggaggcgaaccaggacgcgcccggggccgaggtgcccgacgaccccttcgagaccgtgtccgtcttcatggacgacttcgccagcaccaagcgcaacatcatcggccacgtctccggctggctgctcaccgacagccgcgatgacaagatcgacgacttcgtgcaggagatggaggccaccaagttctggccgctggagcgccgggaggacgtcgccgagctcctgctcaagaacgtcgacctcaagaccaggttcc

SEQ ID NO: 261319 - DNA, 600 bp, Zea mays
ctcgagccgcttcgcaacggtgccgcggcttcggacagggctctcgcgacgcgatcggccatggcggcgtctctgcgggcctcgtcctccctccgctcgcgcctcctctcgttctcctcggggtgttctctgtgtccgtggcgtctcctcctctcctcacctgtccactcggacgccccccaccagaccgaaaccctcgctttcgacgagatccagctgtcgccggagaagccggctaccgccactgccttcgtcctgcacggcctcctcggttccggccgcaactggcgctccttctctcgcgccctcgtctccgaactccgtaaccgctccccttcagacgagtggaggatggttctcgtggacttgaggaaccatggcagatcggctgggatcaaggggctcggcccaccccacaacatatctactgccgccaaggacctcgctgatttagtgaaggcccgtggttggccatggccggatgttgttgtgggtcactccatgggtggaaaagtcgctctagatttcgcggagagctgctctcgcggtgtgtatggagattctgctaatcttcccaaacagctctgggtccttgattct

SEQ ID NO: 261320 - DNA, 595 bp, Zea mays
aatctcttgatctggctactcagacttcagctgctgaaggctttcagatgatttctggtggctgtagaggaaatgttcagagtcaaattgatattttccaaatgagaccgggaagaaatatgaaactgcccagttccagtaagtttagctctagatctctagaagaaaaacaaaatcagtgcacagctgcctgctcaaatgatgcaacacaaaataaaggtggtttgagggaaagcttgtgggtaactcggcttttgccaaaagcatcagtagaattgatggaggcaacaccatgcaatgtagagaatgctgttagtccacaggctgtgggtgacaagttgtgttgtccacctcttcagaattttaatttggagaaggaactaaataatatacaatacttcactggaagaggaagcagcgatggtgtaacaagtagtaaatgtccagcaacgcctccagaggaacctaagcaatctgaaacaatggcttctgtttttgcaaagagattggatgcacttagacatgcaaacacctctgcagtaagcttggctatcgcgtgtgagcatggaagtcccaaactgagaaaccacaaaac

SEQ ID NO: 261321 - DNA, 1132 bp, Zea mays
ctcatgcaagtgctcgcgcgatacttggtgaagatggcacggagctgcaactgccatcaccttcaatggtagaccatatctagggagcaactcagccaggaagtggagcgtgtcgcaagctctgggccttcaggaactgctgaacctgctgagatgaaacggctacacactgaacattcacctggtgatgaaacttcaaaacttgttggaactgatctaggactgcaattgtcaccttctggtgatgccatggtagatatatctaataagccacccagctgccaagacgtaaaggaggccccgagcagtgacattttgggaaatgatgaaaattcagacaccgagaagactcctgctgccttgcatggacggctgaacaccgaacttgctcctagtggcagaaatacagaatttagtgaagctgacactggaaaacaagagacacccgtgtctgctgaggctatggtagaatcatcgagcgagcctcgcagccatgaggcaaaggaagctccaacccctgacctgtctggggatgatgaaaaagcgaagtcagcaagggctgctgttgttgcggaactttttggagatgcaacagaaggtggttcggatcagccattgccgtctcctagagaacaaggcaaggaagcagaggccgatggaggcttttagagtaaagttgcaaatattgtatcaagagatactagaatcggtgtaagtaagaactgctaatagtgcttttagttgtaactggtgtaagcttctactcagaatcaaaagcgacgtgctgagattacagcaacagtggcctacggcagtttactactgttttgtgcaatattgctgctgagttttgttgagacaggcaattgatctgtcatctgtctcgtcctgcatcgaagttggcagccccatggtgaggtgctcccgccttaacctggaagcgctgacagagggaagaacaatactctctggtttcctaatgttttcctgttcactgttttgatttgatgctgcattgcagtagtgtgacttagtaacataatggtgcgtttggatagacggacataccgatccagaatcatctgaccctaaatattgagtacaagcccccattatctgtttggtctgcttt

SEQ ID NO: 261322 - DNA, 1154 bp, Zea mays
cagccacctgtaacaagcgcaggaaggattcctcaccgaccgcaatggaagaggactgcagcaattcgaattcggacaaggcccaagacatggatgtgatccacaccttcgagccatcatggatgaatgacttctcaggtgtgatgcgccatgcttctggaccagtaaccgctgcaaaaacgatatacgaggacagcaagggctacttgatcatcgttagcctgcctttcgctgattttcagaaggtgaaggtttcatggaagaacactctcacaaatgggattgttaaggtatcatgcactagcgttggtcggatgccactcctgaaaaggcatgatcggactttcaggttggcggatcctgctcctgagcattgcccacccggagagtttgtccgggagatcccactccctacccgaatccctgaagacgccactctggaagcgtactgcgatgaaacagggacagggctggagatcattgtcccgaagttccgcgttggccctgaagaacacgaagtgcatgtgtccatgaggccaccctcgtcctggtgccaatgaaacctgtttccaagcttgcggggggagacacgcatacggtgtggaggtttgccgtaaggctaaggctactgcacaacaaatgcagctcagttttgctaattttgatgggaaaccagtcgttaattgattgaagcattctggtagttggccgccgcagcgtttggaacattttaggaaatatgctacccggtcccaaggaacatgcttgcattacttagttcttgtatggggatacacctagtgtgttacatttcgtttccgttgtgtcgaaagactgggtgtctgcccgatgtgccccgacacgagcaacaatctgtttgtggtgtacacagaatggcaactggatgtataggggcatttatagtcattttccatagcttcaggtttgctttgtgggcatcgtgtaagattcgtctcagattgatggaaactaggaagaaaaagaagatggcagtgtctttaggatttggcaaagttgtaatgggggattaggcggtgctgtagcattctgtctagtttccaggaatttgtagaagacaaatgtaaatctgttgttccgtcatcaatatagaaaagtggtctgtgtctaccagc

SEQ ID NO: 261323 - DNA, 483 bp, Zea mays
gggattgttaaggtatcttgcattagcgttggtcggatgccattattgaaaaggcatgatcggactttcaagttggcggatccttctcctgagcattgcccaccaggagagtttgtccgggaaatcccactgcctacccggatccctgaagatgccactctggaagcataccgcgatgaaacggggacaggcctggagattattgtcccaaagtaccgtgttggccctgaagaacatgaggtgcatgtgtccatgaggcctccctcgtcctggtgccaatgaaacctgtttccaccgaggtgtgtgatggatgatgcccttgcagtagttattactggtccatccttgttggcgcctgactgatgttttgttttctcctaaccctatagcttgcgcggggagacacacatacggtgtggaggtttgccgtaaggtaaggctactgcacaacaaatgcagctcagttttgctaattttgatggg

SEQ ID NO: 261324 - DNA, 419 bp, Zea mays
ggcaaaaacccacaccacacttcgttccccttgtcccaattgctcctccacttcccccaccgcccaccagtgatctcgccgccgcgacgcgaggcaccacggccggcgccggccgccttcctccagaaagtatcccccgtgcgcccgaatcacctcttaatttcgttcttagccgctgcgtttcacagaggtcgcgacatgcccgcctcggcggctcctcctgcccagcccgcggcaccgccccctcctcctcctcccgccgctccggcccccccggaggatgtggaggcgactgccggttcaccttcgagggcttcagcagtggggacggtgaactggggaacggccaccctcgttggcgtcttcgctgggctgctatacggggggagcagggaggcctccgcttccgtcagtaagga

SEQ ID NO: 261325 - DNA, 1608 bp, Zea mays
tcgtgggccgatacacgggttaagcgcacgcgtccgcgagagctctcagaaggcactagcacgcaaaaaccccacgagagagacgaatcttccgaatctctcggtggcgatggcgctctccgaccgctcccgcgagtcgctcctcccgagcttcctctacgcctcctcggcgcgctctttcgctgccacaggagccgccgcgcgcctccctgtctcctccccagcgcctgccacggctggagcaggaggcggcgtgccgttctcgatccaggcgcccaaggagaagatcgagatgtactcgccggccttctatgccgcctgcactgccggaggaatcgccagctgcgggctcacccacatggccgtcacgcctctcgacctcgtcaagtgcaatatgcagattgacccagcgaaatacaagagtatctcatctggatttggtatcctgttaaaggagcaaggggccaggggtttcttcaggggatgggtgcctactttgcttggttacagtgctcagggggcttgcaagtttggcttctatgagttctttaagaagtattactcggacattgcagggcctgagtatgcccaaaagtacaagactctaatctacctcgcaggatctgcatctgctgaggtaattgctgatgtggctctctgcccttttgaagctgtgaaggtacgtgtgcagacacaacctggatttgctcgtggattgagtgatgggctccccaaatttgtccgatctgagggtgttcttgggctctacaagggaattgttcctctctggggtcgtcagattccttataccatgatgaagtttgcttcctttgagaccatcgttgagcttatctacaagcatgctgtgcctgttccgaagtctgagtgcagcaagactacccagttgggtattagctttgctggtggttacattgccggtgtcttctgtgctattgtttctcacccggctgacaaccttgtgtctttcctgaacaatgccaagggagctacagtgggagatgctgttaagaagcttggtctctggggtctcttcactagaggacttcctcttcgtatcgtcatgattggtacccttactggtgctcagtggggaatttacgatgcattcaaagtgatggttggactcccaacaacgggaggtgttacacctgccccagcagcagaggctgaattgaaagccagtgcttgattttttttttctgtgttccctgagatcatatttggtggagtggaattgtatcagccagtcgagagcttagttcccgaatctttttttaatcttaacggaaaatttgtccgtcatccttctgatgagaggaactcattaaacaggcgaaataggtcttttttgcgctgggaaaagtttacgcttgatgcataataatttgtaggacggcaacgctcttagagcgcaggttttgttcacctcctgtaccgaggaatgcttaaagttacatttcacattatggtctttatgaaagagtccccctcggttgatgttcccaaaaaaaaaaaaaaaaaaaaaaaaaaaaaaaaaaaaaaaaaaaaaaaaaagggcgccgctcgcgtctgaaccaacgcgacacg

SEQ ID NO: 261326 - DNA, 971 bp, Zea mays
  unsure (1)..(971): unsure at all n locations
tagtataggtgagctgctggcctgcggtaccgattcggagtttccgggccaggctacgcgtcacgctgtccgctgtggctttcagaagctgtggaggtacgtgtgcagacacaacctggatttgctcgtggattgagtgatgggctccccaaatttgtccgatctgagggtgttcttgggctctacaagggaattgttcctctctggggtcgtcagattccttataccatgatgaagtttgcttcctttgagaccatcgttgagcttatctacaagcatgctgtgcctgttccgaagtctgagtgcagcaagactacccagttgggtattagctctgctggtggttacgttgccggtgtcttctgtgctattgtttctcacccggctgacaaccttgtgtctttcctgaacaatgccaagggagctacagtgggagatgctgctaagaagcttggtctctggggtctcttcactagaggacttcctcttcgtatcgtcatgattggtacccttactggtgctcagtggngaatttacgatgcattcaagtgatggttggactcccaacacgggaggtgtacacctgccccacagcatagctgaattgaaagccagggcctgatttttttgttcagtgttccctgagatcatatttggtacaggggaattgtatcacccagtctagagcttagttcccgcatccttttttaatcgtaacggaaaactcttgtccgtcatccttttgatgagaggaactcatttaacaggcgaaataggtcttttttgcgctgggaaaagtttgcgcttgatgcataataatttttaggacggcaacgctcttagagcgcaggttttgttcccctcctgtaccgaggaatgcttactaagtcccatttcccaatatggtccccaccaaaaaaaaaaaaaaaaaaaaaaaaaaaaaaaaaaaaaaaaagggcggccctcgcgat

SEQ ID NO: 261327 - DNA, 1983 bp, Zea mays
agcgcagagggactttttgtgtaaaatgcggtgggaaggtgcgctgcacctgcaagcagaggtgtgctctactgacagagtttgaactctcaagaggaggcgaggcagaaccgcaatcgcgaccgcgacccgcaggtgacatacatacggtgcgagcgccggaagccggaagcaccggtgacgaagccttccgtgtcatcactcatcaggatctcagggttttgtttcgtttcgcgggcgttgggaatccatccatggcgaggaagatgctcatcgacggggaggtggcggccgtcgcggatggtgggcactatgactacgatctcttcgtcatcggggcgggcagcggcggcgttcgcggctctcgcaccgccgcctccttcggagctaaggttgcgatttgtgagctcccattccaccccatcagctcagagtggctaggaggacatggtgggacttgcgtgatacgtggttgcgtacctaaaaagatactcgtgtatggtgcatcattccgtggagaatttgaggattcgaagaattttgggtgggagattaacggagatattaacttcaattggaaaacgctattggaaaataagactaaagaaattgttagattaaatggtgtgtatcagaggatccttaccagtgccggtgtgacaatgattgaaggggcaggcagtctagttgatgctcatactgttgaagttagccagcccgatggttcaaagcaaaggtataccgcgaagcacattttgatcgcgactggtagccgtgctcaacgtgtcaacatacctggaaaggatctggctattacttctgatgaggccttgagcttggaggagcttccaaagcgcgctgtaatcctgggtggcggatatattgctgttgaatttgcttctatctggagggggatgggtgctgaagtagatttgttttatcgaagagatcttcctctaagaggttttgatgatgagatgagagctattgttgcaagcaaccttgagggaaggggaatcaagttgcatccagggacaaatctctctgagttgagtaaaacggctgacggaataaaagttgtaactgataaaggagaagagctcattgcagatgttgtcctatttgcgacagggcgcacaccaaactcccagagactgaacttgcaagctgcaggcgttgagattgaccgggttggagccatcaaggttgacgaatattctcgtacttctgctcctagtgtatgggctgtgggtgatgtaacaaaccggattaatttaacacctgttgcattgatggaggcaacttgctttgctaaaactgtgtttggtggccagcaagttaagcctgatcacagagatgttccttgtgctgttttctccattccaccactatctgtagtgggcctcagcgaagaacaggccttggaggaagctaatggtgatattcttgttttcatctcatcattcaacccaatgaagaacagcatatccaagcgccaggagaagactatcatgaaactggtagttgatgctgaaactgacaaagtacttggtgcatccatgtgtggaccagacgcacctgaaattatccagggcatcgctattgcggttaaatgtggagccaccaaagcagacttcgacagcactgtcggaatccacccttccgctgctgaagagttcgtgaccatgcgcaccgtgacgaggcgcttgagcccgacatccaagccaaagacgaacttgtaagcaagaaattggtgttttggggaaatgttacaccggacaaatactctggtttcatcacgttggtaatttttacgtcattggaactggaaccatgtatattgaaggaataagttgtttttttcatggcaacacaccgaaaataatgagaccgtggactttcttgatacaaataatgagctcaagcagagaacgtttatggttggttctcaaaaaaaaaaaaaaaaaaaaaaagggcggccgc

SEQ ID NO: 261328 - DNA, 519 bp, Zea mays
tgagttgcatgctatcctttttggatgatcagcgattcattgctccttatttctcccaggtatttgctacgttggttggtagaatgagccaatcgccagacgcaattgttcgagcatcagcatcgtctgcgctgggcattctgatcaagagatctaacatgctgaggtcactggtttcacgatatgatcgagcagattcatcacgcaattcccagagcggtgattctaacaccaagacaccatcagagtttcaagaacaggcagaaggaaatccgaatgatggcgcaagtggagcggcaataaaggggactgaagccgatcactgatgtaaatttactcgtatatacgtatagtgttctagctatgcatgcttgtgtatatgctgtacttccctcgcaaataggaacaggagagcaaatttatgctgccatgtcaatagatcttcagttcacctgtaaagcaaccactcacagttagccgattatttattgaatcaaattttatttaaaagaaaatttt

SEQ ID NO: 261329 - DNA, 428 bp, Zea mays
tgggcatacaagagccaagaaagtgggttaatgcatgcttgtgggcacgatgcgcacacaacaatgctcctaggagctgctaagctacttcaagctcggaagggtgacttgaagggtgctgtaaagcttgtgttccaaccatcagaggagggctatggcggagccgactacgtcttgcaagaaggtgctcttgacggcgtgtcagccatatttggcttgcatgtggacccagcacttccagtaggtgtcgtcgcatcaaggccaggaccattcactgcgacagcgggtcggttctctgcaactattcgtgggaaaggtggtcatgccgcagtaccccatgaatccgtcgaccctgttgtggttgcagccactgcaatcctcagccttcagcaaatcgttgctcgtgaagtggatcccctccatggtgc

SEQ ID NO: 261330 - DNA, 914 bp, Zea mays
aaaacagggctttcctgtgacatatgcgtcaataatcttttagcagttgttaacacagaacttttgcgagattatggacaaatagataaaaggttacagcagttggcattcattgtgaagcattgggctaaaactcgacgtgtaaatgaaacttatcaaggaacactttctagttatgcctatgtgattatgtgcattcacctcctacagctgcgaagaatactcccatgtctacaggaaatggaggccacttattatgtcaaggtggaagaaatcaactgcgcttactttgaccaagtggacaagctaaataattatggtgctcacaacagagatacagtatcaaggctgctctggtcctttttccattactgggcatatgagcacgattacacaagagatgtcatatcaattcgtactggaaggattatcagtaaggaacggaaggactggactagacgagttggaaatgacgggcatctcatatgcatcgaagatccgcttgagatctcccatgatctcggtcgcgtagttgacaagttcaccatcaaaatactcagggaggaattcgagcgagcagctaatatattacagttcgatccaaaccccagcgtaacactctttgagccctacgtgccccctccatcgccgagcctgttgcaagaagaaactgcgaatgctgcagaaattgaactatgatagcgtttggttcgtccccaggtattgtaataggaaatagaatcaactcaaggattttgatccttgcatcactggttgcagcctttggttggatgtgtaaatggtattgtttaccgttacagctgtttggtttctatctcagggatcacaagtcagttcccgaacttaaaaatcattcgtggtatgttctatttcaactcaagggatcacaagtc

SEQ ID NO: 261331 - DNA, 3199 bp, Zea mays
cccgttgccgcctgccggcgtgcgtgacccgggtcccattccatatccggtgccattttttaatactactagtctcgttcgatcggaatcggcttcccgtcttggctgcatttttctatccccgcgtggccgcgtgtagtcctagtctctcgccagcaccatcatcatcaatcacggcggcgaccccgccccgcctcgatcgcccacgctgcccgactggaaccggacgctgctgctgctgctgctaggctgacagcgacgacgagggggccatggctcagatcttgctccacggcacgctccacgccaccatcttcgaggccgagtcgctctccaacccgcaccgcgccaccggcggcgcccccaagttcatccgcaagcttgtggaagggattgaggataccgtgggtatcggcaagggcaccaccaagatatacgccaccgttgatctggagaaggcccgcgtggggcgcacccggatggtctccaacgagcccgtgaaccctcgctggtacgagtccttccacatctactgcgcgcacatggccgccgacgtagtattcaccgtcaagatcgacaaccccatcggggcctcgctcatcgggagggcttacctgcctgtcgaggacatcctgggcggagacgagatcgacaagtggcttgagatatgcgatgagaagcgcgagcctattggggacagcaagatccacgtgaagcttcagtacttcgacgtaggcaaggaccgcaactgggccaggggtgtccggagcaccaagtaccctggtgttccttacaccttcttctcgcagaggcaggggtgcaaggttactctgtaccaggacgctcatgtcccggacaacttcgttcccaggatcccgctcgccgatggcaagaactacgagccacacaggtgctgggaggatatctttgatgccataagcaaggcccagcatctgatttacatcactggctggtccgtgtacaccgagatcaccttggttcgggacaccagcaggccgaaacctggaggcgatgttactcttggggagttgctcaagaggaaggccagcgaaggtgtccgtgtccttatgctagtgtgggatgataggacttcggtcggcttgcttaagaaggatggcttgatggctacccatgatgaggagactgcaaattacttccatggcacggacgtcaactgtgtcctgtgccctcgcaaccctgatgattctggcagctttgtccaggacctgcagatatcaactatgttcacgcaccatcagaagatagtagtggtagaccatgagttgccaaacgagggctcccagcagaggaggatcgtcagcttcgttggcggaattgacctttgtgatggaaggtatgatacccagtatcactccttgtttaggacacttgacactgtccatcatgatgacttccaccagccaaactttgagggtgggtcaatcaagaaaggtggtccgagagagccatggcatgatatccactcacggctggaagggccaattgcttgggatgttctttacaactttgagcagagatggagaaagcagggtggtaaggacctccttgtgcgtctcagggatctttctgacattatcatccccccttctcctgtgatgttcccggaggacagagatacctggaatgttcagctctttagatccatcgacggcggtgctgcttttggcttccccgagactcctgatgaagctgcaagagctgggcttgtgagtggaaaggatcaaatcatcgaccggagtatccaggatgcatacgtaaacgccatacggagggcgaagaacttcatctacattgagaatcagtacttccttggaagttcatacggctggaagcccgaaggcatcaagccggaagaaatcggtgctcttcacttgattccgaaggagctctcgctgaagattgtcagcaagattgaggctggggagcggttcactgtttatgttgtggtgccaatgtggcctgagggtgttccagaaagcgcttctgttcaggcaatccttgactggcaaaggagaacgatggagatgatgtacactgacatcgcacaagctctcgaagccaacgggatccaagcaaaccccaaggactatctcactttcttctgcttaggtaaccgtgaggtgaagcaggagggagaatatgaaccagaggagcacccagaacctgacactgattacatccgggctcaagaggctaggaggtttatgatctatgttcatgccaaaatgatgatagtggacgacgagtacatcatcattgggtccgccaacatcaaccagaggtccatggacggtgccagggactccgagatcgccatgggcgcgtaccagccgtaccacttggcgactaggcagcctgcccggggccagatccatggcttccggatgtctctttggtacgagcacctgggaatgctggaagacgtcttccagcggcccgagagcgtagagtgtgtgcagaaggtgaacgaggtcgccgagaagtactgggacctgtactcgagcgacgacctggagcaggacctcccgggccacctcctcagctacccgatcggtgtcactgccgacggcagcgttaccgagctgcccgggatggagaacttccccgacacccgcgcccgcgtcctcgggaacaagtcggattacctcccgcccatcctcaccacatagagtgcacactgcaggcagcgccatggctgctctcctctctggcctcaccttggtgtccctgtgtttgtgtttgggacactggaggttcagattgcagtgttgatattatatcccccctccgtccagagggattcgacgttattgagtcataataaaatgcattgtgcacggtgggagactgggaggataggaattatagttgtttattacagtacgactgcttactgcatccagattgtgttgtcccttgtctggtgtagcttctgttgcttgctgcgttgcagtgccggaagtgactccagatttcagaacttaaacatgattgcttgttcaagtgtgtgctgctaaatgtcaaactgtcgatgtcatgctacaacaccaatattgataatctctcatctttctataaagccctctaaaccaaaaaaaaaaaaaaaaaaaaaaaaaaaaaaaaaaagaataaaaaaaaagaaaaaaagaaatgtaga

SEQ ID NO: 261332 - DNA, 467 bp, Zea mays
tactgggacctgtactcgagtgatgacctggagcaggacctcccgggccacctcctcagctacccgatcggtgtcactgccgacggcaccgttactgagctgcccgggatggagaacttccctgacacccgtgcccgcgtcctcggcaacaagtcggattacctcccgcccatcctcaccacataggctgcaggctgcaggcagcgccatggcttctctgtttgtgtttgagatactgaaagttcagatagcagtgtttttatagttattgagtgataataagtgcattgtgcatggtgggacgataggagttagagttgttcataaatcataactactatgtactgcaccagatgacgagattgtgttgccccttgtctggtgtagcttgtgtagctttctgcgttgcagtgctgtttgtaaaggcgacttcagagttcagaattaaaacatggttgttttttccc

SEQ ID NO: 261333 - DNA, 318 bp, Zea mays
tgcaggcagcgccatggctgctctcctctctggcctcaccttggtgtccctgtgtttgtgtttgagacactggaggttcagaatgcagtgttgatattttaccccctccggccacatgatttagtcgttttggacggagggagtagacgttattgagtcataataaaatgcaatgtgcacggtgggagactgggaggataggaattatagttgtttattacgactgcttactgcatccagattgtgttgtcccttgtctggtgttgcttctgttgcttgctgccttgcagtgccggaggtgactccagatttcagaac

SEQ ID NO: 261334 - DNA, 320 bp, Zea mays
gagacattttcggggtgtcattaatttggaggattgtaatcttgaggataatttagacgatgaagcatgctccaagaagttcgaaggattccagaaaggcatatatggtagataccggaacagattctagccttatgttcaagattacccacaagattgcatataaaaatgtgttgaaagctcatagcgctgttatactgaaagctgaaagcatgagtgataaaactgaatggatcgccaagattaagggcatcgtcgacccaaaaaggctttctgcaaagaaaccaagcgcttcagaaagcggtgccccaatgaggcaa

SEQ ID NO: 261335 - DNA, 1538 bp, Zea mays
  unsure (1)..(1538): unsure at all n locations
gcgnccacgccgtcggccacgccgtccggtttgaatattccttcctgcttgattggaaatcccaacttggagggcttcaaaccttaatatccaacaatctatgattacttgtggcttgctgaagatggcatgaagatgcagggttataatggcagccaactttgggatacagctttcacagttcaagccattgtggctaccaaccttattgaagagtttggtcccacccttaaactagcacacaactatatcaagaaatcacaggttcttgacgactgccctggtgatctgaatgactggtaccgccacacatctaaaggcgcatggccattctcaaccgcggatcatggttggcctatatctgattgcactgctgaaggactaaaggcttcattattgttatcaaagatttctcctgaaattgttggtggaccgatagaagctaatagattttatgatgctgtcagttgtctgatgtcttatatgaatgataatggtggttttgcgacttatgaactcacaagatcctatgcctggctggagctgatcaatcctgctgagacctttggggatattgtgattgattacccgtatgttgaatgtacatcagcagcaattcaggccctgacatcattcaaaaaactataccctgggcaccgcaggaaagaggtggataactgtatcagcaaagcttccaatttcatcgagagtattcagaaaagcgatggttcatggtatggctcttgggccgtttgtttcacatacggcacttggtttggtgtgaagggactaattgctgctggtagaacatttgagaacagtcctgcaattagaaaggcatgcgactttctgttgtcaaaagaacttccttccggtggctggggagaaagctatttgtcatctcaagaccaggtttacaccaatctcaaaggcaaccggcctcatgcagcgaacactggttgggccatgctggcgctgattgatgcaggacaggcccagagagatcccgcgcctctacaccgagcagcaagggttttgatcaacttgcagtcagaggacggagaatttccccagcaagagatcataggagtgttcaacaagaactgcatgatcagttactcccagtacaggaacaccttcccgatctgggctctgggagagtaccggtgccgagtcctgggggctgctggcaagcggtagtgacccggcctggccccgtcaacttgactgaaaggcgctttgttgtcttggcgttctatctcggcaacgccgagggctgtcttgccggccgcctagctgtctcatgaatcaatcagcttttttgtgagtagctatgcgcggtagttggaaattggaataatgcagctatgcttttttttagggttgcgctcctagttctaataatgtactacgtatattggaagcagaataaatgttagattgaaccaatggtggcctttaaaagaaatacgaagggaaaaattaaatatggacaattaaaatgttaaaatattctggggagaagccatttgaggttg

SEQ ID NO: 261336 - DNA, 737 bp, Zea mays
  unsure (1)..(737): unsure at all n locations
gttttggctctcggtacttggtgtatttgaatggtctggtaacaacccggtaccaccagaagtatggctactgccatatctcctcccatttcacccagggaggatgtggtgtcattgtcgaatggtgtatttgccaatgtgctacatctatgggaagaggtttgttggccgaatcacaccactcctgttggaattaagaaaggaacttttcaaagacccttacagcaagattgattgggacaaggcccgcaatctatgtgctaaggaagatctgtactatccacacccatttgttcaagatgtgttatgggccactctccataaattcgttgaaccagttatgatgagttggcctggcagtaaattgagggagaaagctctggagacagccatgcaacatgttcactatgaggatgagaacactcggtacatttgcattggtcctgtaaacaaggtattaaatatgcttgcttgctggattgaagatccaaactcagaggccttcaaactccacatcccacgagtctatgactacttgtggcttgctgaagatggcatgaagatgcagggttataatggtagccaactttgggatacagctttcatagttcaagccattgtggctaccaaccttaccgaagagtttggtcccacccttaaactagcacacaactatatcaagaaatcacaggttcttgacgactgccctggtgatctgaatgactggtaccgncaca

SEQ ID NO: 261337 - DNA, 496 bp, Zea mays
catcaatcagcgccacatggcccaactagtgttcaccgagcagcaaaggtttctaccatggtggtgacgggtgacggagaatttcctcagcaagagatcataggagtgttcaacaagaactgcatgataagctactcccagtacaggaacatcttcccgatttgggctctgggtgagtaccggtgtcgagtcttgggggctggcaagccttggcggtgaacgggaggtgtgtgtgtgtgtgtgtcatggatcagcttttgtgagtagccatgtggaagttggaataatgtagctacgttacgttcagggggttgcgttactagtggtcctagtaataatagtgatggtgatagtaatgtactcctcattattacaatctcaaagcggttcatgccattgccatgcacatctcagatccgagtcacgcacttgagagagttcaaggattgcaagtatagttgggagaatcaaatccaatcggcttattgtctgctcc

SEQ ID NO: 261338 - DNA, 694 bp, Zea mays
  unsure (1)..(694): unsure at all n locations
cgctctttctgtgtttgtgtcttatgctggtgataaaactagtagcctcatgctgatggctcaacatgatgtcgttttaacaacctatggtgtcctctcagctgcatgcaaaacggaatgcaacagcatttttcacaggatggattggtataggattgtgcttgatgaagctcacacaatcaaatctcctaaaactaaaagtgcccaagcagcttatcgattaaagtcggaatgcagatcgtgccttacaggcacaccattgcaaaataatttggaggacctctacaggcttctctgcttcctacatgttgaaccatggtgcaatgcaaaatggtggcagaggcttattcagaaaccttatgagaatggtgatgatagagggttgaaacttgttagagctattcttaggccactaatgctaaggaggaccaaggaaacaaaagacaagattggcaatcccatactggttccacctccagctcgtattgaagttgtagagtgcgaacaatctgaccatgaacgtgatttctatgaagcacttttcaggagatcaaaggtccaatttgacaaatttgtagcacaaggcagtgttctgaacaattacgctaatattctcgagctacttctccggctaagacaatgctgcgatcacccttttctggttatcagccgagctgaccctaanaagtatgct

SEQ ID NO: 261339 - DNA, 591 bp, Zea mays
ccctgatgctgggggtggcgttcctgctgctcctgggcctcggccacgacctctgggtgcacctcttcaccaccagcgaggctgtggtcagcgccttcgcctccatgacgccgatgctcatcggctccgtcgtgctggactccacgcagggggtactctgcggcgtcgccaggggctgcaggtggcagcacctggcggcgtggaccaacctggtggccttctatgtcatcggcttgccgctcgccatccttttcggattcacgctcgccttccaaaccaaggggctgtggatggggcagatatgcagcctcctctgccagaactacgtcctcttttttatcaccctgtgaaccaactggcaggagttagacctgaccatgttcaacaaggacaacgattttgtgtgctaggaatctagaaagagtttttattttcttttttgccatgtgctgttgctgaaacattgaaccatcagcatcaggcttcgacagagctgtctggtgtttgctcatcaattcatcatcagtgtaatactacagattataacatttggaatctcgaagataggaattaaaaatgttctgatacgcc

SEQ ID NO: 261340 - DNA, 882 bp, Zea mays
ctggtaaagaaagaagcgaaccaggtacttgttgttgagcgcgacagagacagaggcggagttgcggagaagatggcgagcggcacatgaagagggagatcagcgagacccacgacaccctccgcttcggcctcaatgccggcgtcaaggccgacctcgcgccgccgcacccgctccagtccagcatccaatcggtaaggattcgtcgctctccttcgtttcgtggttcacgcgtggtgtcgcatcgggcggctcgacgaggcggacaaagccggtggccagtgcgtccaccacctaggggcgcgaccgactcgtcttccccaccggtctggtgctccatggaggtggctgtctccattggtaccacgcagggccaggcttgttccactggctgcagcgtggacaatgacgtgaagccgaagctctagacggcgatcaaagcagaggaggaacaccagctgagactactctacacccgagtgtcacagtggtggcccatgaatacgcaggctggagctgcgatctcgtcgcagaccatgggtgcaatgggtgcagagacttaggtggatggttctaaatgttcacggcaaaaaaatgtgtggcgcatgggtttctatcctgagggtgcgcagatcggtcgccattagaaagatgcagcttcaactactttggaccaggtgcaaactcatggcagttctgatagggcaccctacacaaatctggagtttgaacacacgacagcatcaatgtggtgaataatttctcaaaccctcagtatgtattccctaatgctggataaggcgctctcaaaaagcgaggctgtggtcagcgccttcgcctccatgacgccgatgctcatgcggtccgtcgtgctgaactcca

SEQ ID NO: 261341 - DNA, 648 bp, Zea mays
  unsure (1)..(648): unsure at all n locations
cccacgcgtccgcccacgcgtccgcccacgcgtccgcggacgcgtgggctttactcgtgggccaatttatcagttgcaggtactaacggtgccaggctaccagctttgactatgtgatttcattacttgttgtatttagaaaatctaatattatgaaggtcaactttcttattttactgaaagtctaaaacacactacctattaacatatttgtgcctgctcaagtgcagaaaaatggtcaaaatcttccttgtgttgtcttagcaatgctttggcactccatatattctattataattaggcagggttggagaagaaaagcgcatcacagggaatatctatggcacttttatactcatgttcttgtgtttcttgtttacagcctacacaaatctggagtttgaacacacgacatgtaatatgcttatcttttgtggatggactattcggttggcttttgctgattgaattggagctgcacttgtagtttggtaacgtttatatacataactatgcggattgcgttagctagaatatgtcttccagtaccagggtgacaatgggctctaaattttcccctgaaatttacgaatccgatccggttatgatcaggntatatttatatctattattgaactaaaattaatt

SEQ ID NO: 261342 - DNA, 758 bp, Zea mays
  unsure (1)..(758): unsure at all n locations
ttgtcgcgtgggcggacgcgtgggcggacgcgtgggtttggaccaggtgcaaactcatggcagttctgatagggcaccctacacaaatctggagtttgaacacacgacaggtgatatgcttatcttttgtggatggactgttcgcttggcttttgctgattgaattggagctgcacttgtagtttggtaacgtttatatacataactatgcggattgcgttagctagaatatgtcttccagtaccagggtgagtgggtgacaatgggctctaaattttacactaaaatttaagaatccgatcgggttatgatcaggntatatttatatttattattgaactaaaattaatttagggctctaacaaattgtggagaaacattttgaatcgtgatccattatcacccctaccagcaccacatacatacctcccgttgtggtggttaaccctacgtgcagaccttgtcaccttattttggatcgattccctgttgtatgtggcttgtgctaaaacaagaaacacttgcaactttactagaaattatggtcagactctctttctctgtgttcgtttgattgttgctctggctgtctcctgctaaccaattttgtgggaaattcaacctttgaagcatcaatgtggtgaataatttctcaaaccctcagtatgttttccctaatgctggataaggcgctctcaaaaaggtcagttcctatttgatggtgcattcattatttggttgtgcatggttaatggtgc

SEQ ID NO: 261343 - DNA, 730 bp, Zea mays
cccgcaaagaaagaagggaagagttctcggcttctcgcgagtcgcgacagagagaggcggagttgcggagaatatgcagagcagcagcatgaagagggagatcagcgaggcccacgacaccattcgcttcggcatcaacgccggcgtcaaagccgacctcgccccgccgcacccgctccagtctaccatccaatcggagaccaagttctgggcggacaagaagaagttcgggacagatgccatatacggatccgccctcaacatccgcaaggatctcgatgcccaaatcctctccaggttccaaaggccccctggtgctttgccgtcatctctgcttggatacgaggcactgacaggttccctggatgattttggatttgaagattatcttaacatgcctcatgattctgacagtttccgtcaacctgacatgcaccatggaatggaggttcgccttggtttgtccaagggacctatctgtcctagcttcaattgaggcagtaatgtaattctgctgcaagttcacctctcagtccagtacttcagtcaatagaccatattaagatggtgaaatatgaaaactggtagcttgcatctgttcaatgttatgttttaatcaacgctgaatttaatatttgtcaagtttgaacttttctggtttccttgccactgcgaggccatggaagcgaccaaatttatatatgtttgatgcgggttgtccatggttgcc

SEQ ID NO: 261344 - DNA, 488 bp, Zea mays
gaagaaaagcgcatcacagggaatatctatgacacttttatactcatgttcttgtgtttggtgggtgcagcctacacaaatctggagtttgaacacacgacaggtgatatgcttatcttttgtggatggactgttcgcttggcttttgctgattgaattggagctgcacttgtagtttggtaacgtttatatacataactatgcggattgcgttacctagaatatgtcttccagtacctgggtgacaatgggctctaaattttagagtgttgtagatttgttttgttgcaaatgtggcatggcatggcttggcttgcagcttcgagtactggtcgttcgagatccttgtgctgtttgcagggctgatgcccgactctcatctcagcacttccatcattgcaatgtgccagttcaccgaaaccatatcatacatgatcacctatggcttcgccgctgtcatcagcacaagggtgtccaacgagcttgga

SEQ ID NO: 261345 - DNA, 381 bp, Zea mays
ggggctgcgggtggcagcacctggcggcgtggaccaacctggtggccttctatgtcatcggcttgccgctcgccatcctcttcggattcacgctcgccttccaaaccaagaactgcgtcctcttttttatcactctgcgaaccaactggtaggagttagacctgaccatgttcaacaaggacaacgattttgtctactaggaatctagaaagagtttttcttttcttttttgccatgtgctgttgctgaaacattgaaccatcagtatcaggcttcgacagagctgtctggtgtttgctcatcaattcatcatcagtgtaacactacagattgtaacatttggaatctcggagataggaattaaaaatgttctgatacgcc

SEQ ID NO: 261346 - DNA, 654 bp, Zea mays
ccctgcgtttccttacttcctggtaaagaaagaagcgaagccaggtacttgttgttgagcgcggagagaggagaggcgcagagcatcgacgatggcgagcggcagcatgaagagggagatcagcgagacccacgacaccctccgcttcggcctcaatgccggcgtcaaggccgacctcgcgccgccgcacccgctccagtccagcatccaatcggaggccaagttctgggcggacaagaagaagtttgggacagaggccatctacggatccgccttgaacatccgcaaggatctcgatgcccaaatcctctcaaggttccaaaggccccctggtgctttgccatcatctctgcttggatatgagccactgacaggttccctagatgattctggttttgaagattatcttaacagtaagacattctgtcatttgtttttgctaagtcattttccttcccttatcgcatgcataagcatttttgcattgatttatgaccatcttaatattcttaggcaaaaagtgctgctgtttttaatcgtcttaaccttctgtagttagcggtaattctattgtactcggggaaaccctttgaggtaaaaaaaattatctagcttaatttaatggaaaaagtccaaaaatagtaccggctcgag

SEQ ID NO: 261347 - DNA, 500 bp, Zea mays
atcattttagatgcacttagagaaacaggacaaaggggaatcattagccgtggttggggagctcttggaagtttttcagaagttccagttgatgtcttcatcttggaggattgccctcacgattggctcttccctcggtgtgctgcagtggtgcatcatggtggagcaggtactacagcagcagggctgatagctgggtgtcctactactgtagtgccgttttttggagaccagttcttctggggcgagagagttcatgcacgaggagtgggtcctgcacctatatctatcgcagaacttactgtagaagcactatcagatgcaataatattcatgcttgatccagaggtaaaatcacgaacaatggaactggcgatagcaataggcaatgaggatggtgtggcagcagctgtagatgcatttcatcgtcacctgccttcagaattgccgctgtcgccgcccgcacatgtggaggaagaacgcacagacttctttcaatg

SEQ ID NO: 261348 - DNA, 925 bp, Zea mays
gttgactagacttttgatcacaatgcaacaaagaataggggcagcaaaaactgatatggaggatctcatagcacgactaaatcaggaagcagctgttaaagaatatcttactacaaaggttaaggatttggaggttgaattggaagccgcaaagcaaaagggtagagagacactgcaacaagctatcctgactgaaagagagaggtccgcccagatgcagtgggatatggatgagctccgtaggaagtactctgagatggagtcaaacctgaaggccgaacataatgagaaaactcgtgcagagtcagagaaaacaaccgctagtgataaaaatgaaacattacttgaagaattagaaatcaaacgaaaagaagtcgagactttgaaacatcatcttgtagaagctgaggcaaagtccaaagctgataagaaagttcttgtcaaagaggtcaagtctcttagaaactcccaaactgagatgaagaaagtgttgaatcagtatcttgaggagaagactggtttagagagagttattaatagagataaacagacagcagcacgtacaaagttatcccgagtaaaaattcttcatgagtgtcgactgctgcgggagcggctacaagactgcagtgctaaatttctagcagaagaacaagacaactttactattgatccatcatccttgcctgatgcattagatcttctagcaacatcagacaatagaatacgcctactcgttgctgaggctcaacttctagcacgagatgatgaacaaggctcttctgatggtggcgacgattctgatagtagatcctcattaactatgagcagtgaagatgcaaaagttaccgatgaagatactactaaaatgctttctgatctgctcattgacaatgcgcatctgagactacgccttaatgctgtc

SEQ ID NO: 261349 - DNA, 667 bp, Zea mays
taactagcagtaaaactataggcctatttggtttgctgcataaatttccacactttgcctaactttttctgcctaaggttagttcttcaatgcgaacgactaaccttaggcaaagtgtgtcacagttagccgtgaaccaaacatgcccatatatacatcattgttgcaaataatatcgccacaaaattacacatctcctcataaccacattactttcttattcttagcaaggatgccatggtaacttcactccgcatccgcaaatatccaaggctgcaagcagcacctgttatttgaattaggacttatagactatacagagacaagcataagtatatagtatcaacttcttgaactattgacacctttaggtagaaggttggtacatggttgtgctcttctggagtgcccaagccttgtgcttcagcttgatgaagtccgaagctattgtatccacatccttattcttgtcatttttcgtcccatagccatacccaccggttcctggttccttcatggcattagcttggttatcctgaaatttaacgtgtttccactgggcttgggaacgagggggctgggcttgagacattggtcttgcttagttgtttaagaaaatggaagtgacaattcgcgtccgcggacgcgttggcagaacgtctgttta

SEQ ID NO: 261350 - DNA, 1013 bp, Zea mays
tcgcctacgcgtccgcgtttcgctagccctcgttcccgttcggccttgacaaccccaccccaccccacccccaagtcccaagcagcaggatcgagccgaatcctccgcaactcgccgccgccgggaccgaccgacccggtcctatcgatcgaggatgtcgtacgcctacctcttcaagtacatcatcatcggcgacacaggcgtggggaagtcgtgcctgctgctgcagttcacggacaagcgcttccagcccgtgcacgacctcaccatcggcgtcgaattcggcgcccgcatgatcaccattgaaaataagcccatcaagctccagatttgggacacggctggccaagaatcattcagatctattactagatcatactacagaggtgctgctggtgcccttttggtttatgatattactaggagggagaccttcaatcatctcgcaagttggttagaagatgcaaggcagcatgcaaatgctaacatgactgtgatgctgattggaaacaagtgtgatctttctcatagacgtgctgtcagctatgaggaaggtgaacagtttgccaaggagcatggtctggtctttatggaggcatctgctaaaactgcacaaaacgttgaggaggcattcattaagaccgctggtacaatatacaagaaaatccaagatggcatatttgatgtatcaaatgagtccaacgggatcaaagttggctacgctgttcccaactcatctggaggtggtgctggctcgtcctctcaggctggtggctgctgcagttgagtggtggcagcaagtcatacaaatgcacaaggttctccctgcagtatctggatgtttgcccatagctggacccggatgatttggtctttcagccaccatggttcaatccataagcaaatcatcttcagtggttaactgtccttttgcaattcacgattactgctccctatgtgtcttctgtaaccaaattgaaatcaagtttatggtattcatttgttcaacatgt

SEQ ID NO: 261351 - DNA, 593 bp, Zea mays
  unsure (1)..(593): unsure at all n locations
gctggccgccgcagtccggccggattccgcccgccacccgttttttctttctccagatttgggacacggctgggcanagggtgcttgtattagccttgcagatactgacagaggcgctgctggcgccggttttggtatgacacttcttgccccgcatttctatcatcatgaccaccctctggaggtttctatggcttcttcttcaagggtagctttacaataatgcttgtagggaacaagtgcgtttctaccttacaggcgtgcggtgagctatgaggaaggcaagcagttttgcaacaaatatggccttatcttcatggaagctctcttgcgaagactcggaattttttgtcgaggaggcatttgttaagactgctggagcagatctacatgaagattcaagatggtgttgttttcgatgtatctaatgagtcctatggaattaatcaaagttggatatgcaatccctgcgcaatctggaggtgctggtagcttcgtcttctcagggtggtggctgctgcagctaatctgctaacgccgcttaacaaacgctaattgtcttggataataaccagctgcgctggaaaaaagtt

SEQ ID NO: 261352 - DNA, 1309 bp, Zea mays
ccttcacgtaatctcgcgtctcctccgccgcccccgtcttctcctcccctcttgctaaagcaaagcgaacctgcaacccgcaattattcctcccccgcacgcgaaatccgcccgcagctcttcgtccccggaggaccaagcctgcgcaccagagatgtcgtacgcctacctgttcaagtacatcatcatcggcgacacaggcgtcggcaagtcgtgcctgctgctgcagttcaccgacaagcgattccagcccgtccacgacctcaccatcggcgtcgagttcggggcccggatgatcaccatcgacaacaagcccatcaagctccagatttgggacacggctggtcaagagtcattcagatccataactagatcatactacagaggcgctgctggtgctcttttggtttatgacataactaggagggagactttcaaccaccttgcaagctggctggaggatgcgagacagcacgccaatgctaacatgacaataatgcttgttgggaacaagtgcgatctgtctcacaggcgtgcggtgagctatgaggaaggcgagcagtttgcaaaagaacatggccttatcttcatggaagcctctgcgaagaccgcacagaatgtcgaggaggcatttgttaagactgctggagcagatctacaagaagattcaagatggtgttttcgatgtatctaatgagtcctatggaatcaaagttggatatgcaatccctgggcaatctggaggtgctggtagctcgtcttctcaaggtggtggctgctgcagctaatctgctaacgccgttaacaaatgcatatctgtcgtgtgtcacataccagctgcgctgtgaaaaatagttattgctgctccagggtgccttgttatttgacgcaccaatggatcctgtgcctgatcgacttgagagattcagtttatttacgtcaggtgtttataaaccccctgtaaatccctagattcttccctgttttccgtcattaggccctcaacaatcgtgtgtccgcttgcatgtgtaaataaggcccatctccatattgtttgatatgatattgcctcgtaattacacatctccagataattacattactttcttatccatatgctatcaacaatgcgttcactccacaaatatccaaggctgcaagcagcatctgttatttgaactaggacctatagactatatagagacaagcataagtatatatagtattgacttattgaactagcaacacctttaagtggaaggttggtacatggttgtgctcttctggagtgcccaagccctgtgcttaa

SEQ ID NO: 261353 - DNA, 1170 bp, Zea mays
cataaaaattgtacttgtacacgataatttgggacgatagccctgaaccatatagagcttccaaagttaacaacacatcatcatgcaagttgtacacgatattttgggccaagacgacatcctgttcctgtacggatatagtgaaattgttgtagaggtctttaacgcctaaacctactcgaccatagtcagaattagttatatttactaaatctagaatgttgggtagtaaaagggaggcaaccggagctatccagcaatgatttacagatttacatgtaccgcagtctccgccttttccccccgtgttcagaaagaaacgactacattagcaccacggattcgaacgggagcagccagttgtcaatgagtcacctgccccacctaagctcggatgatggcgtttcagcagaagctgtgataatcgacagcggctctggtctgaaatctccaggagtctgggtcctggtatggttacctctcagcatccaattccaaatgacggttagctggttcttgtaagcgtttatttcaggcagcgtgagtcaaaagaggctggtatttggtgtaatctatcccattcaacctaacacagcataagatttgttccggcagttcttcagctttatttccctgaatagttagcccaacatctagaacacatgcttttagcctgtccaaaaatgttgcaaaacctttccttgagatgtagctaaatctgtgcatgtcaatgtcgatctcgaagtagttatcacccaggtaaaactcatgctgtggtctagaaaggacaggcttctcgttatacgcatgcattagcttcctctccgctgcactcaaaggaagatcctccagattagccaccctgccaagtatcttcagccgctctcggaatggtatagtcgtttccattggaaatgcttttatcttctctacatgatcatcaaccagccttctgatactttcaatgaatgaatgtggaagctctttcgagtaaccatcagaaagcctaaagtacaaaacaaagctcatcccttccccatctgtctcattctgaaataatgaagctggatacaatggcacctgtacattgaccaccaaaagaggtgggagcttgctggagagttgaatgtcaggaagttggacaaatcgagatatatgattgagtttatg

SEQ ID NO: 261354 - DNA, 1857 bp, Zea mays
gaagatgtgtacaggggaagtgacaagggcatactggctgacgtcgagcttctgaggcagatcactgaggcttcgcgcggcgccatcaccgccttcgttgagaagaccacaaacagcaaagggcaagtcgtcaatgttgccaacaacctcagcaagatacttggtttcggcctgtcggaaccatgggtgcagtacctgtccacgaccaagttcgtcagagcggacagagagaagatgagggttctgtttgggttcttgggggagtgcctgacgctcgtcgtgcaagacaacgagctgggaagcttgaagcttgccctcgagggaagctacgtcgagcctggccctggcggcgacccgatccgtaacccgaaggtgctcccgacagggaagaacatccacgctctcgatccgcaggccatcccaaccacggctgccttgaagagcgccaagatcgtcgtggaccgtctcctggagaggcagacggctgacaatggcggcaagtaccctgagacggtcgcacttgtcctgtggggcaccgacaacatcaagacctatggtgagtcgctagcccaggtgctgtggatgattggagttcggccagttgccgacaccttcggccgtgtcaaccgtgtggagcctgtcagccttgaggagcttggacgcccgaggatcgatgtcgtcgtcaattgctcgggtgttttcagagatcttttcatcaaccagatgaacctgctggacagggcagtgaagatggtggccgaactggacgagccagcagagatgaactacgtgcgcaagcacgcccaggagcaggcggaggagctcggcgtgtcgctaagggaggcggcgacaagggtgttctcgaacgcatcaggctcctactcgtccaacgtgaacctggcggtggagaacgcgtcatggaccgacgagaagcagctccaggacatgtacctgagccgcaagtccttcgcgttcgacagcgacgcccctggggcaggcatgaaggagaagcgcaaggcgttcgagctcgccctggcgacggcggacgccacgttccagaacctcgactcgtcggagatctcgctgacggacgtgagccactacttcgactcggacccgaccaagctcgtgcaggggctgcgcaaggacgggcgggcgccgtcctcgtacatagccgacaccaccacggcgaacgcccaggtgaggacgctgtcggagacggtgcgcctcgacgcgaggaccaagctgctgaaccccaagtggtacgaggggatgatgaagagcgggtacgagggggtcagggagatcgagaagcggctcaccaacaccgtcgggtggagcgccacgtctgggcaggtcgacaactgggtctacgaggaggccaactccacgttcatcgaggacgaggcgatgaggaagaggctcatggacaccaaccccaattcgttcaggaagttggtgcagaccttcctggaagccagtggcagaggctactgggagacaacggaggagaacctggacaggctcagggagctctattcggaggttgaagacaagattgaggggattgacaggtaaattgatttgccagatcggtcggccgatcggttccagcattcaacccataacgagcttggaactcttctgcctcattgggactcttgtacaatgtctgggtgtgtgatttatatatatataaagttgtaacatgtaatactggaggatacaatctttaacaaagagggtggcggttgttccattcaaaaatctgctcgaatctaaactaggtggccgtaaaccaatacgttgagcacccaatgaactgggcggtcgttatagatgggcctgccttacgta

SEQ ID NO: 261355 - DNA, 496 bp, Zea mays
acgcgttcgatcatggaaatgtacatgctgctggaatggtttccagcatacatctaaataactaatccgggggatatcaaccttcaggtgattgtgcatctgaaaattcgcgttggtgtgtggtccctagtcccagtcaccgtgcacagggtctgatgatcaagaagtgtgtcctgtcctgtacaagtctgcagtcatcaactcatcaccccgttgtctgcatgactacgggcctgtttggtttggtgcctaacttgccatacttttctgcctaaggttagtttttcaattcgaacgactaaccttaggcaaagtgtggcagatttagccaccaaccaaacagcccctacattcatcagcggtcagcctttggaccaaactctggaagacctagctactctcttttcctgagagttaccagtaagtgtatccagttctgtatgcagtcatcatcgtgttgtttacaccactgggttgtagccagtgatgatcattc

SEQ ID NO: 261356 - DNA, 645 bp, Zea mays
cggccgccctttttttttttttttttttttttgaaaagaacatttctgctgtgatcaacaatgaaacaatcaattacagtagggagaagaaaaagaatcagctcgccattctttctttaaccgagaggaggggcaaacgaaaagagacaccagacttccaaccgtgaagacttttcactgctgccaactgcatgccattggtacaccaacgtacattccaccgttgctacttgccccaaaattgattaccatggctgcatggcaccagtgtgctgctgtgaagccattgagtaggagagagaattcacattcctgactttttggacgaaagaattctatcagaagcagcaagcggagctctaacagagccctcctccataaggactcccgccttaccgaaaaagtgattagtaagaaagattctccttcacgcttaaggcctgtttggttatgcctaagttgccacactttgcctaacttttatgcctaaggttagttcttcaattcgaacgactaatcttaggcaaagtgtggcacatttagatacgaaccaaacagccccttaatcctcggtgtcacgagagccagacggctcagggaagatctccttggattgcctcctgcgggaggaagaatggtccccat

SEQ ID NO: 261357 - DNA, 769 bp, Zea mays
ctcatggaaatgtatcttatgctcgaatgtagtccatcatatgtaagacggattaatccaggggggatcagcctccaggtgatcgtgcatctgaaaattcgtgtcggtgtgtcgtccctaggtccagtcaccgtgcacagggtctgaagttatctcgatgtgtgtactgtcctgtacaatagttactgctccagggtgcttcgttactcgatgcacccacgggtggcagtgccgggcatgtttggatcgtagcctcacttgccacactttgcctaacttttctgcctaatgttagtttttcaattcgaacgactaaccttaggcaaagtgtggcacagttagccgcgaaccaaacaggcccatgtagtacattcattgttgcaaataatatcgccacaaaattacacatctcctcataaccacattactttcttattcttagcaacgatgccatggtaacttcactccgcatccgcaaatatccaaggctgcaagcagcacctttaggtagaaggttggtacatggttgtgctcttctggagtgcccaagccttgtgcttcagcttgatgaagtccgaagctattgtatccacatccttattcttgtcatttttcgtcccatagccatacccaccggttcctggttccttcatggcattagcttggttatcctgaaatttaacgtgtttccactgggcttgggaccgaggcggctgggcttgagacattggtcccttgcttaaggtattgagaaaatggaagtgacaat

SEQ ID NO: 261358 - DNA, 559 bp, Zea mays
ccaaattttatacggctccctatttggaaaaattgttaccctgcaaggacccggtccgaatttatttcccggttcaaaagctccctaattggcgggcaccccttttttttttttttttttttttttgcccatatatacatcattgttgcaaataatatcgccacaaaattacacatctcctcatactcacattactttcttatttcttagcaacgatgccatggtaacttcactccgcaatccgcaaatatccaaggctgaagcagcacctgttatctgaattaggacttatagactatacagtgacaagcataagtatatagtatcaacttcttgaactattgacacctttaggtagaaggttggtacatggttgtgctcttctggagtgcccaagccttgtgcttcagcttgatgaagtccgaagctattgtatccacatccttattcttgtcatttttcgtcccatagccatacccaccggttcctggttccttccggacgcgtgggcggacgcgtgggcggacgcgtgggcggacgcgtgggcggacgcgtgggt

SEQ ID NO: 261359 - DNA, 433 bp, Zea mays
tgattactacactacagagcagagcgttgctgaaacctgtgtggcattactattcagagacgattgtatttcaacttcaaggggggaaatgagagagagagcgcgagagagagattggcctgtttggttcactacctcagttgccacactttgcctaacttttctgactaaggttagttattcaattcgaacgactaacattaggcaaagtgtggcatatttagtcataaaccaaacatgccatatatgttctgtacaatatgattggcaacataggtgctgctgctgtacaaggcagcggacaccgttactgtaactgcaaccattggaagagtgcatcctcaaacagtgtgttgtttccatgtagagcgtgcccccaacatgttgggttggaggtgatcaggtttccagcgcgtgcgtgcttggttgtcaa

SEQ ID NO: 261360 - DNA, 731 bp, Zea mays
tggttgaaggatccagggcacaaggcgattgctaccttgccgatattgctggttgggagtaagggtgaccggtctaacaggcgtccagtgagctatgaggaaggcgagcagttcgcaaaggaacatggtcttatcttcatggaggcctctgcaaagaccgcgcagaatgtcgaggaggcatttgttaagactgctggagcaatctacaagaaaatccaagatggcgttttcgatgtatctaatgagtcttatgggatcaaagttggatatgtagtccctggccaatctggaggtgctggtagctcttctcaaggtggtggctgctgcagctaatctgctaacgcccttatgtacaaaggcatatctgcggtgtagctgcgttatctctatgttgctgtagcgtaaaagggttactgctaccagggtgctatccagcaatgatttacagatttagggcatgtttggttctttacctcaattgccacattttgcctaacttttctgcctaaggttagttattcaattcgaacgactaaccttaggcaaagtgtggcacatttagccacaaaccaaacatgcccttacatgtaccgcagtctccgccttttccccccgtgttcagaaagaaacgactacattagcaccacggattcgaacgggagcagccagttgtcaatgagtcacctgccccacctaagctcggatgatggcgtttcagcagaagctgtgat

SEQ ID NO: 261361 - DNA, 491 bp, Zea mays
gcaacccgcaattattcctcccccgcacgcgaaatccgcccgcagctcttcgtccccggaggactcaagcccgcgcaccagagatgtcctacgcctacctgttcaagtacatcatcatcggcgacacaggtccgtgccgccacgttggccctcttccttcctccgtgctccgattggatcctcgcgcctcccaacctgagtccgccgcggcaagatggagatccaatctagtccgcttgcccgcttgcgacgacggtgacgtccttggctttcctattgctgcaggcgtcggcaagtcgtgcctgctgctgcagttcaccgacaagcgattccagcccgtccacgacctcaccatcggcgtcgagttcggggcccggatgatcaccattgacaacaagcccatcaagctccagatttgggacacggttggtcaagagtcattcagatccattactagatcatactacagaggcgctgttggagctcttttg

SEQ ID NO: 261362 - DNA, 390 bp, Zea mays
aaccgaccagccagcgaggaatcctgatttggagcactggacgggacgcgttgccattagctgtcgcgtcagttacgttttgcttgccctgttctcgttcggccttgacaacccggaaatcctccagccctctagtccccaacgacgcaggaagcaggatcgagccgaatcctccggaactcgccgccggggccaaccgacctcacactattgatcgaggatgtcgtacgcctacctcttcaagtacatcatcatcggcgacacaggcgtggggaagtcatgcctgctgctgcagttcacggataagcgcttccagcccgtgcacgatctcaccatcggcgttgaatttggcgcccgcatgatcaccatcgacaacaagcccatcaaact

SEQ ID NO: 261363 - DNA, 467 bp, Zea mays
gggagtgcttgaagctcgtggtacaggacaatgagctgggcagcggcagaggctactgggagacatcggaggagaacctggacaggctcagggagctctactcggaggttgaagacaagattgaggggattgaccggtaaaccgatttgccagattcaaaggaatgcagcccataacgagcttggaactcttctgcctcattgaggactcttgtacaatgtctgggtgtgtagctttatatatatatatatatatataaagttgtaacatgtagggcatgtttggttcgctgcctaacttgccccaatttgcctaacttatgtgtctaaggttagttcttcaattcgaacgactaaccttaggcaaaatgtggcatagttagccacaaaccaaacaggcccgtaatactggaggatacaatctttaacaaaaagggtggcggttgttccatccccaaagactcagtc

SEQ ID NO: 261364 - DNA, 484 bp, Zea mays
cttctgcatcacgtgtccacgtgcaagatggtaccgtactattcctttttttgtgtgtgtgttgatgagacatcgtaatctcttatatgctttgcattatgtaatgttttctctaaatgttacagtccaacgggatcaaagttggctacgctggtcccaactcatctggaggtggtgctggctcgtcctctcaggctggtggctgctgcagttgagtggtggcagcaagtcatacaaatgcacaaggttctccctgcagtatcttgatgtttgcctatagctggacccggatgatttgttctttcagccatcatgtttcaatccataaacaaatcatcttcagtgtttagctgtcctttatacttgtgcaattcacgattagtaccctatgtgtcttgtgtaaccaaattgaaatcagttttatggtattcatttgttcaacatgtatatatgcttctctggctagtcatgtttctctgcaacc

SEQ ID NO: 261365 - DNA, 565 bp, Zea mays
tctccacgcgtccgcttgaagaggcggatggagatgcactggaggctatcttatctatcttatataatctgagcatggatccagagaatcacccagcaataattgctgctggagcagtgcctctgttgaagcggattgttcgtacagaagccccacaatggagtagtgcaattcagctgttgagaacattgcctgtatgacattgatgaagaaaatggccattcatcgccaacaaacattataaactgcacttagggcctgtttggttttgatggctaacttgccacactttgcctaacttttgtgcctaaggttagttcttcaattcgaacgacttaccttaggcaaagtgtggcacagttagccacaaaccaaacaggccctacatcctgctgctgctactggcgccctttcgggtgggtcccatctccttggcaaggttccgcagcacgtacttctggatcttcccagtggaggtcttgggcagctcagcgcggagcaccaccgtcttgggcaccatgtagtgcggcatgcggtcccggcaccaggcgatgacatccgccgc

SEQ ID NO: 261366 - DNA, 391 bp, Zea mays
ggtcgacccacgcgtgcgatgggttatccatgagaatcttgccaaaaaatttggcataaccatcgagccccctgatagtgtaatgaagaaagggggaaaaagacaagagaatgaaactgttgaagatggaaggaaaaagctcaagacagatgaagaacatgcttatgtgctgattaagtatccaataaatgatctgctggtgaggcccaatgcagatgatccgtctttatttaaaaaacctcttctggctacaaattttatagtaccaagatgttctgtgggacatctccttattgtatgacacttatgctcgtcttttgggaaggctttgaatatgcctccaatttcgctaacacatctggacaatgcaatttgccacaaagaaaacaat

SEQ ID NO: 261367 - DNA, 1295 bp, Zea mays
atattttgtccttaactcaaacccgccagcccgcccctcttcgcttccgttcctgtcctctcctctgtccctctacggtgcttctgctcgccggcccaaaatcgcctcatcgaccacgcccccttccaggctcccgtctccatgggtctcctctcaaacaggattgggagggagagcctcaaggcgggggatcatatctactcctggagggcggcgtgggtctacgcgcatcacggaatatatgtgggcgatgataaggtgatccatttcacaagaggaagaggacaggaggtcggaacaggaactgtcgtcgatattattcttgtgagttccaccccaaaacgaagcaacacgccttgcccggtgtgcaccgacgaaaccagcgacagcagcacagagacgaacggcgtggtatcctcctgcctcagctgcttcctagctgggggtgctctctaccgtttcgagtacgcagtcaacccggcgctcttcctcgccaaagcgcgaggagggacgtgcacgctcgctccctctgaccctgacgacacggtggctcgccgcgccagatacctgctgagcaacggtttcaggtgctacaacctgttcaagagcaactgcgaggacttcgcgatatactgcaagactggccttcttgtcgctgagcagggcgttgtcgggcagagcgggcaggctatctccatcatcggtggacctctcgccgcggtggtctcgaccccattccgcttggttaccacgaacatctatgggatggcggtgatggccgtcggggtgtactgcgcgagcaggtatgcagctgatattggcaaccgccgtgatgtggtgaaaatggaagtcgaggacctgacggccggactggccagcggcaggatatgtgctgtggagaacatcgcccagctggtggctccggaggcagaaggcccggccgatgccacggccacggccacgctggctgcttaacggaccattgtgccattgttgctgtgagagagatgtgcgtcagccaacatgtgtgctattgctttggcttatttgtgttcagaatccacttaaactcggtcgaagtgagctttccgttcggcaacgtctgtactcttacgaatctcgatcgtgtatgtctttaagtattgtgttgtgtttcaaagataaaaaaaggtgacctttgtgtatgattttttatacacgttgtctcttagctgcattgatagtctaaggtctcagaattgtaccatgcaaaaaaaaaaaaaaaaaaaaaaaaaaaaaaaaaaagggcggaccga

SEQ ID NO: 261368 - DNA, 447 bp, Zea mays
tccgcccacgcgtccgcccacgcgtccgcccacgcgtccgcccacgcgtgcgtcctgtcctctcctctgtccctctacggtgcttctgctcgccggcccaaaatcgcctcatcgaccacgcccccttccaggctcccgtctccatgggtctcctctcaaacaggattgggagggagagcctcaaggcgggggatcatatctactcctggagggcggcgtgggtctacgcgcatcacggaatatatgtgggcgatgataaggtgatccatttcacaagaggaagaggacaggaggtcggaacaggaactgtcgtcgatattattcttgtgagttccaccccaaaacgaagcaacacgccttgcccggtgtgcaccgacgaaaccagcgacagcagcacagagacgaacggcgtggtattctcctgccctagctgctttctagctgggg

SEQ ID NO: 261369 - DNA, 467 bp, Zea mays
atgctgggtatgaatatgcgatgaacgagttgtttgttacatcgattgataagtttcagcctcgactgttgtttcttgtggtcggccaagattccagtgcggaatatatgtgggcgatgataaggtgatccatttcacaagaggaagaggacaggaggtcggaacaggaactgtcgtcgatattattcttgtgagttccaccccaaaacgaagcaacacgccttgcccggcgtgcaccgacgaaaccagcgacagcagcacagagacgaacggcgtggtatcctcctgcctcagctgcttcctagctgggggtgctctctaccgtttcgagtacgcagtcaacccggcgctcttcctcgccaaagcgcgaggagggacgtgcacgctcgcttcctttgaccctgacgacactgtggcttgccgcgccagatacctggctggcaaacgtttaggtgctacaacctgtt

SEQ ID NO: 261370 - DNA, 713 bp, Zea mays
tccacagtcgccttcgttcccacctctcgtcgtcgtctccgtgcaccactcggcccccactgtcggccgcgccttccagccacctcgtgccgctcggccaccccgcccgtcctccactgcccctatggctgccatgggcgagcgctgcccgagcagccgaccgccctttccccgccgtcttcagctgccgcgcgctgccccgcctccccgccaggcctccactgcccacttctccggcggctacagcggaaggcaaggagaaggacagcgggcagcggttgctggatctagcaagcacagggcgtcttctccatccgccacctctcggcgcatcatcagctgaggctgagctctctcattcaccgctggctcttgctcttgtgttcataagtaacttcgcattgccttgcccccttgtcctgctccctcctcccctccggatctccccgcctgctccatttaattactgactcgtacccttccccgcattcgccttcttgtttcttccatcccacccgtatcagccaccggttcccaatgcccaggtaggcagcccagcactgtgtggtcgtctgatccgcggcggcgcgcccgtcgttacctacgcgaatggctcctccagcaggggcaggggcagggacggaggggaggccggcgcggcggcgcggcaccggcaccagccctggacgcaccatggtgtgggtcgagccgtc

SEQ ID NO: 261371 - DNA, 814 bp, Zea mays
cggtcgcgtgggcgcgcaggtggcggccccatctttcgcttcctcccttcctccgccaccactcaccccttgatccgttctgcctcctaaatttggcgtcaccaagcaaccccactcatgccgttctcaaaaccctacccgaccaatccgtccaattccaaggctgtcggctttgcgttatgagcgccgggtcaggggaggggcggaggatcagatcagcagccgcacgagcattgagcgatatggcttctatgtaggatgcaactggacatcgccgtccactcgtctagctattgatgctgaagtcccgatgcttcatgccaccgcgatggtggctggttgatctccgtgagtttcaggcatttgctcaggtgttttcatttcataatatagctactactactttaatgatgggtaagagattaggtggttgtactgtacaaaagattcatgtgttttactggccgtcaagtttcccttaaattaatgcctaattgcatttgttggggttacgtactaatgccttgaaaggactgtgtaatattccagaatattgtgttcattttcataagtaaaatttgtttgggtgaagttgattttcacatatatttgagatctatttagacaagccttgatgaacttggttgtttagcatagttcggctttcacaaatcacaatgtttagaatctttttatacgcatggggcttatatgatgaagcttcactgctccactactatttgacatacaatatgtttagaatgttttttataattgagctttcacaatgtttagaatcttttattcttataat

SEQ ID NO: 261372 - DNA, 450 bp, Zea mays
cggcctatccccatcaacaacgcaaatttctaaaccgctcgctctggtccagccagaggcacagtcgccatcgcccccacctctcgtcgtcgtctccgtgcaccactcggcccccactgtcggccgcgcctcccagccacctcgtgccgctctgccaccccgcccgtcctccactgcccctatggctgccatgggcgagcgctgcccgagtagccgaccgccctttccccgccgtcttcagctgccgcgcgctgccccgcctccccgccaggcctccactgcccacttctccggcggctacagcggaaggcaaggagaaggacagcgggcagcggtagctggatctagcaagcacagggcgtcttctccatccgccacctctcggcgcatcatcagctgacagtttcaggcatttgctcaggtggtttcatttcataatatagctactac

SEQ ID NO: 261373 - DNA, 464 bp, Zea mays
  unsure (1)..(464): unsure at all n locations
aacccaccccccgncgncgaccccgggcgggacttataaaccactgtttgcggcgcctcccagccacctcgtgccgctcggccaccccgcccgtcctccactgcccctatggcatgccatgggcgagcgctgcccgagcagccgaccgccctttccccgccgtcttcagctgccgcgcgctgccccgcctccccgccaggcctccactgcccacttctccggcggctacagcggaaggcaaggagaaggacagcgggcagcggtagctggatctagcaagcacagggcgtcttctccatccgccacctctcggcgcatcatcagctgaggctgagctctctcattcaccgctggctcttgctcttgtgttcataagtaggcagcccagcactgtgtggtcgtctgatccgcggcggcgcgcccgtcgttacctacgcgaatggcttctccagcaggggcaggga

SEQ ID NO: 261374 - DNA, 600 bp, Zea mays
atcagagaagacgcgcatcttgtcccggggagggagctcgtcgaaaatgcccgcagctccgtccacccggccgacctcttcggggggctgcagtgaccagaaccgccggtgggtctccggcagcagtggcggcagcgggcgcccgtcccccgcgcagaggctccaccactcgggaggcgccgagaacagcaggtcgtccccgcgctcccccgtggcccggaacgcggccgggaggggaggctccgcctcgcgggacaacacgacgttccgcagcctcgagcgcctcaccatcaccaccagcaggaggaagtgagctgccgaggaccacgccgacgaattctgagagtggaaggcggttactaggccgaggaacttttgcgggatcctatgctctctgcagctaaagcaaatcggcaaatagatgatggatggatggttacaaggctgccatgaaaatgcaccctttccccaaaccccagcgtatagtataacgctctccccaaactccaagagggaagacaactccaaagtacaatgcaatcttgattctgtcgatctggcactagttttaaggtgttattgcagaatccctccatttga

SEQ ID NO: 261375 - DNA, 444 bp, Zea mays
  unsure (1)..(444): unsure at all n locations
ccacaatgtatataaagtcgttgaagcaagaaaaggaagcatgcttctggcactagccatgctctttccttttggtttgctcttggctggagttcttgtctggtcctacctttctccttcagatataatgagaacccaaccacatttgctaattattggaactggttttgcatttggatttcttgtgggaagaatgattctggctcacttgtgtgatgaacccaagggtttgaaaacagggatgtgcatgtcccttgcgtattttccatttgcaattgcaaacgcgttgactgcccggcttgatgatggaaatccactcgttgatgagcagctagtgctcctgatgtactgnctatttacagtggctctgtacatgcattttgctacattcagtattcatgagatcaccaatgcactcgggatccactgcttcangatcactag

SEQ ID NO: 261376 - DNA, 778 bp, Zea mays
  unsure (1)..(778): unsure at all n locations
ctgcttattctccataggtgggggggtgcgtggaaatacacactcgttgtcctccccccacaagcatcataggagcatttacttggagggcgacgcgatcaagcgacggaagcgctacgcccgccctttggttgatcttcagatgaagatgtactattacgaggggatggagccttggagcccgaagaaaaagatgcctggcgatgtgccggagggagccgtgctgatccgggaacacacagcgacgaccaacctgttcagctgcctctggttcaacgaggtgaacctcttcaccccacgcgaccagatcagcttcggctacgtggcgcgcaggctcggcgacgctctcgagctcttcatgttccccaactgcgagtacaactcgctgttcgtcctgcacaggcacacgagggagcactcgtctaaggtcgagtgggccaaaacggtcgacgagatcgtggagaaggggctgagggagagtaaaggagggttggggctgtggactccgtaccctgcggacctcagctccgtggaactccctgctgtaagaagaacttcgccggcaggataaggctaggctgtcaaagaccacaaagctcccagcctagcctgccgatcctgtgatctttgattcgttcatggttgtacagagtagaactccactgtttgtttgttttttttggcgtagattctgtaggctgacgcttggagtttgttgcttccagttctgtacaacactcatctacggaggtagcacagaaggatttctcccanaagg

SEQ ID NO: 261377 - DNA, 919 bp, Zea mays
gtaatccatcgatctttgagggatgccgagatggctcttgatcaactcagtttgcttggacaatggatttccttgactcttgtccaagaattggctggtctggtgtctgatgataaactggtcgatttgcttgatttggctctatctgccgacatggtgaacacagtgaagacactacgagacatcacagaaaccggcgttgagcctttagcactgatgtctcagcttgccacaataattactgatattcttgctggttcctatgcatttactcgagaaaggcccaggagaaagttcttcaaacgtcctaccttgtctaaggaagatatgggaaaactacgtcaggccttgaaaacactatctgaagctgaaaagcagttgagggtttctagtgacaagacaacctggcttacagctgctctgcttcagcttgctcctgataagcagtacctgctgcctagttcatcaactagtacaagtttgaaccatggtttgctggttggttcctttcctgataggggtatagggagggcctcagcagttgagcataaatgtaacctggcaggcacgtcttatggggaaaggaactgttgaacacacagaaaatggtcatgtgttatcaaccagttctgtcaaaggaaatgagggaactaaaaacagaaaagcggacaatgaaatgatctggcaagctgtgcttgaaagtatccaatcagatacattgagaaaaatgatggctaaagaggccaggctagactctgtcagccttggaacagcaccaacagtgcaactaataattagctcacatatcagtaagtccaaagccgaaaactacagagctcagattctgcaggcatttgagtctgttcttcgttctgctataatacttgaaattcgatatgaatcaaagaatgatgcaaaa

SEQ ID NO: 261378 - DNA, 1395 bp, Zea mays
gtcgccgtgccgtcccctccccttctctctctcctcgctccccacgccacgcatcgcctcgtcggaacggaaggcggcagcgctgcgagcaagggagggagggagcggggatgaggatgctgtcgaaggcgtgctcgattgtggcctcctccctcccgcgctgctcctcctccgccgccgcccccacgatgagggggcagccgtccttgctgccaagcgtgcggaagcaatggcccgggaagccactgctgtatggaatcggcaccctgttggtcatgccactgaggacactgtatggagtgggtcgtgtttttggcgcaggacggtttctctgcaacatgaccaacgtctcttcgtcgctgcaaattgagcttgtaccatgccttcgagataactatgcgtatatcctgcatgatgttgatactggaacagttggagtagtggatccttctgaggctatgcctattataaatgcattggaaaagagaaaccagaacttgacttatatactgaacacccatcatcactatgatcatactggtggaaacttggaattgaaggcaaaatatggtgcaaaggtaattggttctgagaaggataaggacagaatacctggcattgacatcacgcttaaggagggtgacacatggatgttcgctggccatcaagttcttgtactggaaactcctgggcatacaacaggtcatgtgtgctattatttcgctggttctggagctatatttacaggtgacaccttgttcaatctatcatgcggaaagctttttgaagggactccacagcagatgtatgcctcactccagaaaattacagctctacccgatgatacaaaagtatactgtgggcatgaatataccttgagtaatgcaaagtttgccttgagtgtagaaccgggaaataaagcattgcaggaatatgctgcaaatgcagctgagctgcgtaataagaatatacccacggtgccaacaacaattggaagggagaaggaatgcaatcctttcttgcggacctccaatccagaaattaagagaacactgtccgttccagatcatttcgatgaagatcgggtgcttggagttgtccgtcgagcaaaagataacttctgactaacaaaaggaaatgctcgtgacgtatgacccatatcttgttaaagttcagacagagaacctaagtcacaataaacataggaggaaatgaaggtatatatgtttgagctagattttgaaatgcttcggcaaaattatgtcgagtgtatgtagcttgggcagtgcagtgcttgtctatagcaaccaatgattcttttgaccactacaaataagcgtgttctgctatcatctactctttgtaaaaaaaaacgccacgtagcccgttcatagt

SEQ ID NO: 261379 - DNA, 1305 bp, Zea mays
cagctttccactcgcctcgctcgcccctttcgcgtccaccgaccccgaccccgaccccgatccccgccggtgcttcgccaccccgatccccacgcgcgcgatggcggagccggctccggctcccccggtgaccgcgccgctggtggggctgctgtacgacgagcggatgtgcgcgcacgcgacgcccaacggggaggaacacccggagaaccccgagcggctgcgctccatctggcgcaagctcaacgccgcgggcgtcgcgtccaggtgtgtggcccttaaggcaaaggaagctgaggacaagtatatagcttctgttcacagcaagaggcatataaagctgatgaaggaaattagctcaacaatatatgatgccagcaggaacaagattgctaggaaattcaattccatttacttgaataagggttcctcggaatctgctgttcttgcagctggttctgtcatagaggtagctgagaaagttgctgcaggtgagttaagttctgctattgctctagtcagacctccaggccaccatgcagaacatgatgaggctatgggattttgcctcttcaacaatgtggcggttgcagctaattatctcttaaacgagaggcctgatttaggtatcaagaagatattgattgtcgattgggatgttcaccatggaaatggcacacagaaaatgttttacgatgatcctcgtgtatggttcttctcagttcacagatttgattatggaagcttctatcctgctgaaggggatgcttctcattgtttcatcggggaagaagctggtaaagggtataacatcaatgttccctgggagcatggcaagtgtggtgatgctgattatattgctgcatgggaccatgtactgcttcctgtcactaaagtttttgatcctgatataattctggtatcagcggggtttgatgcagcattgggtgatcctctcggtgggtgctgcattacaccaaatggatatgcactgctactaacaaagttgttaggatttgctcaaggaaggatagtgatggcccttgaaggaggttataaccttaggtccatagcgaactcagtttgtgcttgtgcaaaagttctcttgggagacaaattcacattcaacactccagagatgcaaccatttgaatctacatggagagtaatacaagcggtacgcaatgaattgaagacatgctggcctgttctgagtagcaagttgccagaaaatgtatcattgaggattaagcctgcaccaagcgagctctacgcttcttctgattccgaatctgatagtgaaga

SEQ ID NO: 261380 - DNA, 1221 bp, Zea mays
aaaaccgggcgcccagccttccaagggggcctggaaagatccatgcttgtggacatgatgctcacacaacgatgcttgttggggcagctaaattgcttcatgctcggaaggatgatctgaagggtaccgtgaagcttgtcttccagccaggagaagaaggctacggcggcgcttaccatgttctcagagaaggtgtcctggatgacgtgtctgccattttcggcttgcatgtggatccaggacttcctgtaggcaccgtttcgtccaggccagggccgtttctagcagcagcaggtagatttctggtgacggtcactggaaaaggcggacatgctgcagggccacaggatgctgtggatcccattgttgcggcatcctctgccatcgtcagccttcagcttcttgttgcccgcgatattgatcccctccatgctgcagtggtctcggttacgttcatgaaaggacgtgatgcttacaacgtcattccagagtcagcatccttcggcgggaccttcaggagcttgacaacagaaggcttttcgtatctcatgaagaggatcaaagaggtaaccataccgatgaaggaagcactcatatctatttctccaccaatgtgttgtgcagtggatcagtccagatttaaaacagcatacaaaaatgatatatttatatacctctaatcgaagatcatagaaggtcatgccgccgtccaccgctgcaccgccgccgtcgacttcatgcaggagaagctccgcccgtacccagccaccgtgaacgacgaagggatgtaccgtcacgccagagaagtggcagaggccatgcttgggcaggacaaggtgagtgtaggcgcgcagatgatgggcgccgaggatttctccttctacgcggagaagtttgcaggggcgttcttcatgatcggagtccgcaacaagagcatggaggaggcaatgcatcctctccactccccgtacttcgtgatagatgaggacgtgctgcctgtaggagctgccttccactctgcagttgcgatggagtacctgaacaaatactcaacgacccggcaaactgagctgctgcgcattgagctgtgatagattattgcgcttgtaataagggttacgaggccgaggtcatgttgcacaaaagaaactctgcattgtgcccatggaataaatacagtttctccaaaaaaaaaaacataaaaaaaagaatatataatat

SEQ ID NO: 261381 - DNA, 628 bp, Zea mays
cggacgcgtgggttttcggcttgcatgtggatccaggacttcctgtaggcaccgtttcgtccaggccagggccgtttctagcagcagcaggtagatttctggtgacggtcactggaaaaggcggacatgctgcagggccacaggatgctgtggatcccattgttgcggcatcctctgccatcgtcagccttcagcttcttgttgcccgcgaaattgatcccctccaggctgcagtggtctcggtcacgttcatgaaaggaggtgatgcttacaacgtcattccagagtcagcatccttcggcgggaccttcaggagcttgacaacagaaggcttttcgtatctcatgaagaggatcaaagagatcatagaaggtcatgccgccgtccaccgctgcaccgccgccgtcgacttcatgcaggagaagctccgcccgtacccagccaccgtgaacgacgaagggatgtaccgtcacgccagagaagtggcagaggccatgcttgggcaggacaaggtgagtgtaggcgcccagatgatgggatccgaggatttctccttctacgcggagaagtttgcaggggcgttcttcatgatcggagtccgcaacaagagcatggaggaggcgatgca

SEQ ID NO: 261382 - DNA, 787 bp, Zea mays
cccacgcgtccgcgcaaattgctccaagaaatccatcgagaggccgtcggcggcggcggcggtggctgcttcaagtgcggcgagcctggccacatggccagggactgctccagcggcggcggcggctacggcggtggcggcggcggtggtggtggcggctgctacaactgcggccaggccggccacatggccagggactgcccaagcggtggcggcggtggcggagggaggttcggcggcggcggcgggggtggcggcgaccgctcctgctacaactgcggcgaggccggccacatcgcccgcgactgccccacgtgaggtgtgtccgcgtccgtccgtccagccagatcagatcggatcgctccaccacctgctggtctgatggcgccgcccccttctagatctcgcttaaaaaacacccccctctcgctgtgtgtcggagtaccgctttagttttgccgatccgggcacgagtgcccgctgcctctttcctctcatgcgtaagaggatcccgtccgccgttttcagatttcgttcggttcgtagaagaactctcaagttaagttaagttatcatggtgtgtgcttggtcgttgttcgtcgtcgtcgttaaggttttaagagatgatttggtcctgtgttgccgaggggaagtcgaatctgcttttttctttttttgtggtttgttccaccagactgaggaaggagatgagatgattattctcccagattataatcctgcctgcttgtgcttgatttggttaccacaaaaaaaataaaataagaaa

SEQ ID NO: 261383 - DNA, 376 bp, Zea mays
aaaaaacatagccctctcgatgtgtgtcgcagtaccgctttagttttgccgatccgggcacaagtgcccgctgcctctttcgtaagaggttcccggccgcccccctcagatttcgttcggttcgtaggaagaactctcaagttaagttaagttatcatggtgtgtgcttggtcgtcgtccgtcgttagtcgtcgtcagttaaaggttttaagagatgatttggtcctgtgttcccaaggggaagtccaatctgcttttcttttcccccccgctggtttgttccaccaccctgaggaaggagattaattgctttttctcccaaaaattattaaaaaaaaaaaaaaaaaaaaaaaaaaaaggcgcggccgcccgggaa

SEQ ID NO: 261384 - DNA, 939 bp, Zea mays
ccaccctcgtctccgtgcccgcgcccgcgcccgcgccactcacatcgtgatcgagacgacccgcgtcctccgcggtccgcgcccgtgcaccatctcgcctcgcattcccgaaagtatctgtattccttgatcaacatgtcgcgggaggagaatgtttatatggccaagctggctgagcaagcagaacggtacgaggaaatggttgaatacatggagaaggtggctaagaccacagatgtgcaagagctcactgttgaggagcgtaaccttctatctgttgccttcaagaatgtgattgcggccccccgtgcctcatggcgcattatctcctccatcgagcagaaagaggagtcccgtaagaatgaggaacatgttgcacagatcaaggaataccgtggcaagattgaggctgaattgagcaacatttgtgatggtatcctaaagctgcttgacacgcaccttgtgccttcctccactgccacagagtcgaaggtgttttacctcaagatgaagggtgattatcacaggtaccttgctgagtttaagactggtgctgagaggaaggaatctgcagagagcacaatggtagcttataaggcagctcaggatattgcattggctgaactgccacctattcatcccataaggcttggacttgcacttaacttctcagttttctattacgagattcagaactctccagacaaagcttgcaatcttgccaaggaggcgtttgatgaggtatttttctattgctgtactgggtttctgagttataactatcttcggtgttgttagtttgaatctgggctgaaagaaaaggtgcaaattgcatatggattgatctttgaaaactcaagcacagtgattttaccattttcaccgtagatattgtttgatccttctattgcttggtactcatatggactttactttcag

SEQ ID NO: 261385 - DNA, 498 bp, Zea mays
acggcattggcgcgttgaccgcacgacctgccgattccttcgagcgatatagggcgcccccgtccacaccacccctcgtctccgccctagcgccactgagccactcaacgtcgagatcgagacgacccgagtccgccgcgcccgtgcaccaccgaccgtcgaactcccgaaagtaactctatttcttgatcaacatcaacatgtcgcgggaggataatgtttacatggccaagctggctgagcaagcagaacggtacgaggaaatggttgagtacatggagaaggtggctaagaccgtagatgtggaagagctcaccgttgaggagcggaacctcttatctgttgcctacaagaacgtaattggggcccgccgtgcctcatggcgcattatctcctccatcgagcataaagaggagtcccgtaagaatgaggaacatgttattcagatcaaggagtaccgtggcaagattgaggctgaattgagcaacatttgggatg

SEQ ID NO: 261386 - DNA, 363 bp, Zea mays
  unsure (1)..(363): unsure at all n locations
aggcagctcaggatattgcgttggcggaactggcatctactcatcccataagacttggacttgcacttaacttctcagttttctattacgagattctgaactctccagacaaagcttgcaaccttgccaggcaggcgtttgatgaggctatttctcagttggatacgcttggcgaggattcatacaaagatagcaccttgatcatgcagctcctgagggacaacctaaccctatggaccgctgacagcacaacggaggacggcatcgaggagggcaatgaggcctcgaagggtgatgctggtgagggtcagtagtctggtanaacctcngattgatggttcggcatgttttgaagtctactgt

SEQ ID NO: 261387 - DNA, 369 bp, Zea mays
gcgtgtggaactacgtcgtcacggcgcacaagcccaccagcgtcaggcactcctgcgtaggcaactttaccagccccaaccagctgaaccttattatcgcgaaatgtacccggatcgaaatccatttgcttacccctcagggcctccagccgatgcttgatgtgcctatatatggaagaattgcaacgattgagctcttccggcctcataatgagactcaggactttcttttcattgctacggagaggtacaaattctgtgttctgcaatgggatgcagaaaagtcagagctaatcaccagagccatgggtgatgtttctgatcgcattggccgccctactgacaatggacagattggaatcattgacc

SEQ ID NO: 261388 - DNA, 3229 bp, Zea mays
tgtcaaacttctatgatgctgagaagacaaagaactttttgtggaagcaaaactacctgatgcccgtccactgattaatgtttgtgattgctttggttttgtgccagatctcactcactatctgtacacaaacaacatgcttcgatatatcgaaggctatgttcagaaggtgaatcccgggaatgctccattggtagtggggcaattacttgatgatgaatgccctgaagattttatcaagtgtttgatcctctctgttcgttctctcctccctgttgagcctttggttgatgaatgtgagaagaggaaccgcctacgtttgctcactcaattcttggagcacttgtgagtgaaggtagccaagatgtgcatgtccataatgctcttggtaaaatcatcattgacagcaacaacaatcctgagcatttccttactaccaacccattttacaactctcgtgttgtgggtaaatattgtgaaaagcgggatcctacacttgctgttgttgcttacagacgtgggcagtgtgatgatgaacttattaatgtcactaacaaaaactcattattcaagctacaagctagatatgtggttgagagaatggatggtgatctgtgggataaagttcttcagcctgagaatgaatatagaaggcaactcattgaccaagtggtttcgactgcgttgcctgagagcaagagccctgagcaagtgtctgctgctgttaaggctttcatgactgctgacctgcctcatgaactgattgagcttcttgaaaagattgttcttcagaattccgctttcagtggaaatttcaatctgcagaacctgctcatcttgactgctatcaaggcagatccatccagagtcatggactatgtcaacagacttgataactttgatgggcctgctgttggagaagttgctgttgaagcacaactgtatgaggaggcttttgctatattcaagaagttcaacttaaatgtgcaggctgtcgatgttctcttggacaacatccggagcatagacagggctgaggagtttgccttccgtgttgaagaagatgctgtttggagccaggttgccaaagcccagttacgtgaaggtctggtcagtgaagcaattgagtccttcattcgtgcagatgatgctgcacacttccttgatgtcatccgtgctgccgaggaagctaatgtgtacaatgatttagtgaagtaccttctgatggtaaggcaaaaggcacgggaacccaaagtcgatggagaactcatctttgcatatgctaagattgacaggctcagtgacattgaggaattcattcttatgccaaatgttgccaaccttcaaaatgttggtgaccgtctgtatgatgaagaactatatgaagctgcaaagatcatctatgctttcatctcaaactgggctaagctggctgttaccctggttaagctgaagcagttccaaggtgctgtggatgctgctcgcaaggctaacagtgccaaaacatggaaggaggtctgctttgcttgtgttgacgccgaggagttccgtcttgcacaaatttgtggtctcaatattattgttcaggttgatgacttggaagaagtcagtgagtactaccagaatagaggatgcttcagtgaacttattgctctcatggagagtggtcttggacttgaacgtgcacacatgggcatcttcacagaattgggagttctatatgctagataccgctctgagaagcttatggagcacatcaaacttttctccacccgtctcaatattcctaagcttattcgagcttgtgatgaacagcagcactggaaagaacttacctacctgtacatacagtatgatgaatttgacaatgctgccaccactattatgaaccactctccagatgcatgggatcatatgcagttcaaggatgtttgcgttaaagttgcaaatgttgagctatactacaaggcagttcacttctatttgcaggagcatcctgatctcatcaatgatatgctgaatgtgcttgcacttcgtttagatcataccagagttgtagacataatgcgcaaggctggtcagttgcatcttgtgaaaccatatatggttgcagttcagagtaacaatgtctctgctgtgaatgaagccttgaatgagctttatgttgaagaggaggactacgagagactccgtgaatcagttgacatgcatgacaactttgaccagataggtcttgcccagaagcttgagaagcatgaattgctggagatgaggaggattgccgcctacatttacaagaaggctggcaggtggaagcaatcgattgctctatcgaagaaagacaacatgtacaaggattgcatggagacatgctcacaatctggtgaccgtgaactgtcagaggacttgcttgtgtatttcattgagcagggtaagaaagaatgctttgcttcttgcctcttcatttgctacgacctgatccggccggatgtcgctcttgagcttgcatggatgaacaacatggtggactttgccttcccgtacctgttgcagttcatccgtgaatacactagcaaggtggatgatttagtgaaggacaaaatcgagtcacagaatgaagaaagagccaaagagaaggaggagaaagatcttgtggctcagcagaacatgtatgcgcaactgcttcctcttgctttgcctgctccgccaatgcccggcatgggtggccctccacctccgatgggcggaatgggcatgcctccgatgggcgggatgggcatgccgccgatgggccctggtccgatgccagcattcgggatgccaccaatgggaagctactgagatgtgtttttgcagagagcttagatgatgatttgaattgttcctgtgtaagcagaggcggaacctcattggagctgtagatggtttacagtttgggaaatcaatattctttattgtaccaggaaacttttttttgggcgagtgagtgaaatcagcctgacccatagtttgagaagcgcaacctgtgatatgttttacgatgggatcggaaataggatgattaggttgtttcagcatgagctgttaaaagctggtaccatgtgtatgtatagtggtgtgataaaatcttttgcgtgtcggcagagtgaagatagacaaatgtatgtttccttgttacgacctgttaatctatatattagcccgacttgtagttcaaatgccctacatt

SEQ ID NO: 261389 - DNA, 635 bp, Zea mays
cggaattcccgggtcgaccgacgcgtccgcatggatgaacaacatgatggactttggcttcccgtacctgttgcagttcattcgtgaatacactagcaaggtggatgatttagtgaaggacaagattgagtcgcagaaggaagaaagagccaaagagaaggaggagaaagaccttgtggctcagcagaacatgtatgcacagctgcttcctctcgctttgcccgccccgccaatgcctggcatgggtggccctccacctccgatgggcggaatgggcatgcctccgatgggtatgccgccgatgccagcatttgggatgccaccgatgggaagctactgatttggttttgcagcataagtggaacttcattggagttgtagatggttgacagtttggaatcaatattcttcattgtaccaggaaactttttggcgagtgagtgaaatcagtcttacccgtagtttgagaagtgcaacctgtgatatgtttacgatgggatcggaaataggatgattaggttgtttcagcatgagctgttgaaagctggtaccatatgtatagtgtgataaaatctttgtagacattttccccgcatgatacttgtcggcccccccatatatatatatatatatat

SEQ ID NO: 261390 - DNA, 706 bp, Zea mays
ggctaaggtttcacttgccaaaaaaattctggtaccataaagaatattaattccaaactgtaaccatccatgcctccaatgggtggaatgggtatgccgccgatgggccctggtccgatgccagcattcgggatgccagcaatgggaagctactgagatgtttttgcagagagcttagacgacgatttgaatcgtccctgtgtaagcgaaggtggaaacttcattggagttgtagatggttacagtttggaattaatattctttatggtaccagaatttttttggcaagtgaaaccttagccagagtctgagaattgcaacctgttataccgtaggatcggataggatgggggtgattaggttggttgagcgagctgttgaaacctggtaccatttgtatagtgtgatgaaaactttgtagacattttgcttgtataatactcctacttgttggcacagtgaaggacaaacaaatgtatgctgacttgttatgtcctcttgattgcaatttgttagtatgtgttttcttgaaaaaaaaaaaaaaaaaaaaaaaaaaaaaaaaaaaaaaaaaaaaaaaaaaaaaaaaaaaaaaaaaaaaaaaaaaaaaaaaaataaaaaaaaaaaaaaacctaaatacaattaactaacaaaaaaatatacaacgtaatgaactaggaaaaccctgctaaaaacccaacttaatcac

SEQ ID NO: 261391 - DNA, 773 bp, Zea mays
gcttcttgtctgttcattcgctactacctgattcggccagatgtggctcttgagcttgcatggatgaacaacatggtggactttgccttaccgtacctgttgcaggtggatgatttagtgaaggacacgatcgagtttcataaagaagaaagagcctaggagaaggaggagaaagaccttgcggctcagcagaacatgtatgcgcagcgggttcctctcgctctgccggcgccgcctatgcccggcatgggtggccctccacctccgatgggcggaatgggcatgcctccgatgggcgggatgggcatgccgccgatgggccctggtccgatgccagcattcgggatgccaccaatgggaagctactgagatgagatgtttttttttgttgggcagagagcttagatgatgatttgatatgttcctgtgtaagcagaggcggaaacctcattggagttgtagatggttacattttggaattaatattctttatggtaccaggaaatttttggcgagtgaaatcttggccagagtcatcggataggacggggatgattaggttggttgagcatgagctggtgaaagctggtaccatttgtatagtgtgatgaaatctttgtagacattttgcttgtgtaataataatacttgttcgcacagcgaaggacaaacaaaaaaaaaaaaaaaaaaaaaaaaaggggaaaaaaaaaaaaagaaaacccataacccgggaattaaattcgggtgggaaactgagagggtcacgttttttc

SEQ ID NO: 261392 - DNA, 1756 bp, Zea mays
tcgttcacgcgtccgcccacgcgtccgcccacgcgtccgccatcccgtcgcatcccatcccactaccacccatctcgtcgtccgccgattcgatccggttcttccaacccaggggcagtgatggcgacgaagaggagcgtgggcaccctcggcgaggcggatctgaaggggaagaaggtgttcgtgcgcgccgacctcaacgtcccgctcgacgatgcccagaagatcaccgacgacacccgcatccgcgcctccgtccccaccatcaagttcctcctcgagaagggcgccaaggtcatcctcgccagccacctgggtcgtccaaaaggtgtcaccccaaagtacagcttgaagcctcttgttccacgcttgtctgagctccttggagttgaagtcgtgatggccaatgattgcattggtgaagaagttgagaagttggctgccgctttgccagaaggtggagttctgctcctagagaatgttagattctacaaggaggaagagaagaacgaacctgagtttgctaagaagctagcatctgttgctgacctttatgtcaatgatgcttttggcacggcacacagagctcatgcttcaaccgaaggagttaccaagtatttgaagcctgctgttgctggcttcctcatgcagaaggaacttgactaccttgttggagctgttgccaacccaaagaagccatttgccgctattgttggtggatccaaggtctcaagtaagattggtgtcattgagtccttgctggcgaaggtcgatatcctcatccttggtggtggtatgatctacacattttacaaggcacaaggatattctgttggaaaatctctcgtggaagaggataaacttgagctcgcaacttctcttattgagaaggcgaaggcaaagggggtttctcttttgcttcccactgatattgtagtagcggacaagtttgcagccgatgctgagagcaagattgtccctgccactgctatccctgatgactggatgggtcttgatgttggccctgatgccaccaaaacattcaacgaagcattggacaccaccaagactgttatttggaacggccccatgggagtgtttgagttcgagaagtttgcagctggcactgaggcgattgccaagaagctagctgagcttacaaccacgaagggtgtcactaccatcatcggcggcggcgactctgttgctgctgtcgagaaggctgggctggccgacaagatgagccacatttcgaccggcggcggtgcgagcttggaactcttggaaggcaagactctacctggtgtccttgccctcgatgacgcctagatccgctgctgctgctgctactcaggttctgccagctttgcgtgtcatcttgtttcggaccttggtgtagcactgcaaggctaaggtttactcctccgcacatggacttttggggataggcttgccaccgtgttttgctagatgagtcgtggaataagcttttacttcctcgctgctgtgggtgaagtgactggaattcggaaatttggaactaacaaaaccccccgtggatttgtatgatatgttttgttcgacagtttgcgtcccatctttcactgtggtatctggtatggtatgttttgttctgacactgacaaaaaatgtgttgccgttgctattcgttcctgctacctgtggcgccagatgaattgggaacaaggttatctagcttagttggttaaaaaaaaaaaaaaaaaaagggcggccg

SEQ ID NO: 261393 - DNA, 1781 bp, Zea mays
ttgtctcagtacattaactttatgagggccgcattttggagggagggctgtggtcttaatggacaaacagagggtcatgtgcaattccgaactgcagagcctgaatcagcttctgtgcttgggcttcataatgcatcattgctagctgaaaatatgcactctactaggcaaattattgttgaacaggctggtgcattgctgtctcaactctcaactcagctgggagatctagagaatgtaactgattctgcagtacgaagggacattcaaagtagtgcagttcgcacgggttctctatttcagaaccttggttctttgcttctggaacttgggcgcaccacaatgctcctgcgtataaatccgtcatcttcagaagcggttgtaaactctggaccagctctttatatatctccatcagggccaaatcctcttatggttcaacctgttccatttccaggaaggtctgtccaaatgggtactttgttttctagtctgggttcacaaggatctgttctacatccgagagatgttgatatccatgtccgcacaagtgggtccgtgcctggagccagtactaacccaagtgattcagctggtgcgcaagcgcatcaaaatgtgaataggccaggagatgcttcgcatgcaaatattggtgaagcgttttcaggggttgcaggtggcactcctttttcagttgagtccggagttagactattgccacttagaacagtggttgccatgcctgctggcatcagtcgtgctccatcagggtcgtctagtggtgggcttggtattatctatccatttctcactagggttcgacaaagggcaaacactaatggtaatgatgaaaggaatggtcaatctccaaatgaatcggctcgtagtagcacccatcttaatcagcaatcaattccgcagtcatctcaaactcatgaagcaggtaatctgagatctccagttgatgtcaatgttggagatggctctgagacctcacctgggcagcagaatggtctggtcactctctctcagataatggacttttttggatcaatgctcccaggcgaaaatgttcgaggaaatacttcaagccagcaaccaccaatggcttccaccgagcagggagagggtagaaatcttgcaacaccagaagtgtcaggagccagtgaggaggccctacgctttgctggcatggtcagacaaattatgccatttatctcccaagttgaaacacagaatcaaagtgccccaccagacagcagcagcacacctgcacaggctgcatctgggagtgcagacagagctagggatgtcccaaatgattctacgagttcccgtcaacataaccgcgaccaaattgatgagcctaattctaaaaggcaaagaactagtgactgattggaatctacttgtgagctgagaatcttgccagttcttgatttaccccagcggatgatcaaaataaggacttgagacaaatggtggcagtattgagacaaaaatggattagctgtggtatatacttggcactgagggcactagacgaggcacctatgccttttttttttgagggggcgcatcttataagctgttatttttttagtgcaacgagcatacatgctgctggcatccaatccccaatatgtacaagttttaatcaaagcctccgctctggtcattgccgtagcatacggaggactcacgcaatcaatcataaagttacgagaatgtatagcttaaaaaaaaaaaaaaaaaagggcggccgcacgggaatccggacg

SEQ ID NO: 261394 - DNA, 519 bp, Zea mays
gggagtgcagacagagctagggatgtcccaaatgattctacgagttcccgtcaacatagccgcgaccaaattgatgagcctaattctaaaaggcaaagaactagtgactgattggaatctacttgtgagctgagaatcttgccagttcttgatttaccccagcggatgatcaaaataaggacttgagacaaatggtggcagtattgagacaaaaatggattagctgtggtatatacttggcactgagggcactagacgaggcacctatgccttttttttttgagggggcgcatcttataagctgttatttttttagtgcaacgagcatacatgctgctggcatccaatccccaatatgtacaagttttaattcaggttgtgatcatttacgcaacgaatcaaagcctccgctctggtcattgccgtagcatacggaggactgacgcaatcaatcatattgttactaaaatgtacaccttaagattgtatgttttttgtttaaaaacaaaagaaaaagga

SEQ ID NO: 261395 - DNA, 858 bp, Zea mays
ggttgtccgtcaacgcgcagcccctctgttttccccgttggcgcagcagccccgacgcctccgcgctctgcgggctcgctgttttataagcgcggtgaacagcacgccgtcgatactcgccggttgtttgctgtttttgcgcagccccatcgtcgtcgtcgttcaccccggtgagaccgcgacgctccgtgttcgattccgcatcgacattattttcctatgattaattatgtatgtgtgctgctttgttttatttttgtggaggagagaaccccgtgttttgcgtggagaagaaggcaagccgctcgacgctcgtcgatgtgcggagcgatgcacaaaaccgaatcgccatcgtcctcacaaacgccgtttgggtttgtttatggaccgagagatgatgatcgtgcaagtgatgtggtgccaaccacaagatgcagttggtggacgacccaaggaaggatggacttaaccagtggatgctcgccaagcgagtacctcccccagcaaacactatctaagtgttaaattaaaggtactccttaggatgattggttgatggtgtgacttggccttcatccctgccaccgggatagatggtcgagtgggttactgcttccgcaggagaggaccaggaggagtagcgtggccaggcttcgccatgttactcggttttctccgttagttatttccgctgcattaaaatttatggttattatttctgaaactccgataatgtaatcactaatgatacttattaaatttgtggtattatgttttaaaaaaaaaaaaaaaaaacagaaaatgaaaatatatagagtacttatttaacagaagggggggaaaaaaaaaaaggggggc

SEQ ID NO: 261396 - DNA, 1042 bp, Zea mays
cccacgcgtccgcggacgcgtgggcgagctcgagctctgctcggcccccctctgtgttggcgcttgtgcgacaacacgaacctcctcttttcctccacaaaacagcagccccgatcccctccgcatcgcgtgcttcgttcgacctgcgcagtcccaacccgcgccgtcgcgatggtgtttgagacagcccatgtcgtgtcgttgatctgcgcagttcgaccgtctacgcgtctcacttcgccggatctgcgcagccccaacatcgacgccgttcaccccggtgagacgacgatgatctttgtttgattccacatcggcattgttctccggtgattaaattgtgcatatgtgctgctttgttttgttttattttgtggaggcgacgaaccccgtgttttgcggggagaaggcaagtcgttcgacgctcgtcgacgttcgaagttatgcgcaaatcggaatcgccatcgtccttacaaacaccgattgggtttgtttatggaccgagagatgatgatcgagccagtgatgtggtgccaaccacaagatgccgtggtggacgacctgaagaatggacttaactagtggatgctcgccaagcgagtacccccccagcaaacactatctaagtgttaaattaaagacaagccccggttttatgcataaccggttatatatgctattttactacacttaatgtttgtaggcttggactgggcacttaagtgtaggagttgactgaaaccctagttgcatgaactcaggattcctttttgagatggatactagtatgctaggtcgagtagctgctttactaaataggatctcggtagaagtcgagtgatttttctagcactcgcgcgaggtcacgaattggttgtatccattattgatatcagaatgatgttcgtctgtggacaacggatccatggggattgtgttgtctacgagacggaaaaaattggaataaggattaaaaaaaaaaagaacaaaaaaaaaacaaaaaaaaaaaaaaacaaaaaaaaaaaaatttctttttgggggg

SEQ ID NO: 261397 - DNA, 993 bp, Zea mays
atttttgataacacaaggatgatggtctgtggacacggatccatggggatgcgttgtctatgagacgaaaattggaataaggattaacgtgcggatacctgtgtcaagcgtttgaacgtactgagcacatgccgggaaatatggtaactcggtaagcctagtacctgagtggacccgcccgcggactttacccctcacgcgacctgagacggggtctcccattctagttatggtgggtacaagtgcggtcactgcacggcggcagccggggtcagtggagcattgtatgccaaggcggtgaggcctggacgcgaacggggaatcgatggggacggttgtcttgtgtggggtcagagtaccctgacttgacgtgtgtttaggtttaccttgcaaggtttaaaaactcgattcgaatcgtctgcttctcgcagctaatgagactgcttgaccccttgtactgcattgagtaaaaaagaaatgattttttacttgagataacatgttgaattgtactaaatgattgttactatgtctgcttagagaggaggaaacctagcttaattatatatactagaactggtaaagctaaaactgtttttagactcagctagtgcttttggcaaacccaaaacccctcagccaaacagctgcatgctctagaggtagaggagtagactccctcacaccgggtaagtctagctgagtattaggatactcagccttgcttgtggcatatttttttcaggttcgctggaggacatggttgctggtgtgacttggccgttccatccctgccaccgggttggacagtcgagtgagaccctacctcagcagaggaggagcatgaggagtgatgggataggcttccccatctctttgttttttatcgttagttttattccgctgcatttcgaacaatgatcactgcttttgttaacactccgatgatgttgtaataaattaattactccttaatgtttggttttatgtttt

SEQ ID NO: 261398 - DNA, 422 bp, Zea mays
  unsure (1)..(422): unsure at all n locations
agataaatttataaatcttttaagaagaaaacactaacgggggtgccgtcgcccaaaatagcccagaaatccgctgctgctgctgctacctcaggttctgccaagctttgcgtgtcatcttgtttcggaccttggtgtagcactgcaaggttaaggtttactcctccgcacatgcacttttggggataggcttgccaccgtgttttgctagatgagtcgtggaataagcttttacttcctcgctgctgtgggtgaagtgactggaattcggaaatttggaactaacaaaaccccccgtggatttgtatgatatgttttgttcgacaaaaaaaaaaaaaaaaaaaaaaaaaaaaaaaaaaaaaaaaaaaaaaaaaaaaaaaaaaaaaaaaaaaaaaangnnnnacaaaaaaaaaaaaaacaaa

SEQ ID NO: 261399 - DNA, 422 bp, Zea mays
gcaaaagatgttgattgatataatgtttgataccatgtatgaatagctaggtactcatctagtttaaaaggatcatactaaaacttgaaaagctaaaacttaattttagactcagctagtgcttttggcaaaccaaccccctcagccaaacagctgcatgtctagaggtagaggagtagactcctcacaccgggtaagtctagctgagtattagtatactcagccttgcttgtggcacaatttttgcaggtactccttaggatgatttgttgctggtgtgacttggcctccatccctgccaccgggatagatggtcgagtgggttactgcttccgcagagaggaccaggaggagtagcgtggccaggcttcgccatgttgctcggttcttctccgttagtgatgtccatggccagtactctg

SEQ ID NO: 261400 - DNA, 470 bp, Zea mays
ggttgaggtggcttcttacacacaatgttatatttttcccgggactgataataacggggctctggtggcttataaaattgcatctcttgctgacctttatgtcaatgatgcttttggcacggcacacagagctcatgcttcaacccaaggagttaccaagtatttgaagcctgctgttgccggcttcctcatgcagaaggaacttgactaccttgttggagctgttgccaacccaaagaagccatttgccgctattgttggtggatccaaggtctcaagtaagattggtgtcattgagtccttgctggcgaaaggtcgatatccttatccttggtggtggtatgatctacacattttacaaggcacatggtttttcttgtggaaaattctttgttggtagagggatatatttttgctttgtaacctttttttattgatgtaatgcatatgtctatggggttttttttttt

SEQ ID NO: 261401 - DNA, 436 bp, Zea mays
ttctccggtgattaaattgtgtatatgtgctgttttgttttattttattttgtggaggcgaggaaccccgtgttttgcgtggagaagaaggcaagtcgttcaacgctcgtcggatgcgcggagcgatgcacaaatcggaatcgccatcgtccttacaaacaccgattgggtttgtttatggtgagccgatgcatgtcgctctcggtcgactcgattaattattttgaatggatgtgtgtaaaacgtttcggttatgcgcattggtaggatcgcgtttgctattggagaacaagagattatttgatgtgtgcgaattgtagtgagtctaattaggttttgatcgatgaagtgcacgtgtgattatgtgtgtgaaaaaaaaaaaaacataatacatcgcaatgaaatgagctacaggacatgaaaaaaaaaagggcgg

SEQ ID NO: 261402 - DNA, 548 bp, Zea mays
gggtaatctgttagtgctcagtccagaaattggagcatccatgtgctcatttgagatttttaccgtagcacttctatacgaataaaaaataaataagtgattcccaatgtacgactcatgtaattttatttgaagtttgtttgcatccatttaattctctgcttataagttcttgttattttcaattgaacatctcttaagtgtaccttgaagttaatacccttgtaaaacaatccagcaactctcaactcagctgggagatctagagaatgtaactgattctgcaatacgaagggacattcaaagtagtgcaggtcgcacgggttctctatttcagaaccttggttctttgcttctggaacttgggcgcaccacaatgctcctgcgtataaatccgtcatcttcagaagcggttgtaaactctggaccagctctttatatatctccatcagggccaaatcctcttatggttcaacctgttgcatgtccaggaaggtctgtccaaatgggtactttgcttctagtctgagtcacaagatctgtctaca

SEQ ID NO: 261403 - DNA, 675 bp, Zea mays
tccggaattcccgggtcgacccacgcggtgcgccacaccgtccgcccaaccccactctccctactccctccctctctctctatctccctctctctagcacccgatgcagcagcaacccccctccaatggagctggcgaccgagccctcccaagctcctctctcaccttggcaagctctcccatggcgtctccccctcctctacggcagtaaggaccgagagatgatgatcgagccagtgatgtggtggtaacaacaaggtgcagttggtggacgtactgaaggatgatggacttaaccagtggatgctcgccgagcaagtacctcccccaacaaacactatctaagtgttaaattaaaggtactctctcaggatgtttggttgatggtgtgacttggcctaccatccctgccaccgggatggacggtcgagtgggatgcggctccggcaggagaggagcaccaggggtagtgggctaggccttgcccgattcctcgcttccgacgacatcgatcatccgctgcactctattttgtggacttatatttgctacgcgaaaaactccgatttatgtaataactctagtactttaatttgaagtttcatgtttaattgtatttcttctgtgactcaccttcgagtgagaatgtggaatttgatcctggttaagtggctc

SEQ ID NO: 261404 - DNA, 524 bp, Zea mays
cccacgcgtccgccattcctggccgtgcccaggaagtcctgtccgtgggttggggccaaggctttccctggttggcctcgccgtgagcagcacccccgatatctgcgcgcgctgccggctcgctgttttgggaagcccagtggacaacacgacgtcgacgctcaccgggtgtttgctgtttttgcgcagccccatccccgtattttgcgtggagaaggcaagccgctcaatgctcgtcgacgttcggagctatgcacaaatcggaatcgccatcgttcttacaaacgccgattgagtttgtttatggaccgagagaggatgatcgtgccagtgatgtggtgccacccacaagatgcagttggtggacgacccaaggaaggatggacataactagtggatgctcgccaagcgagtacctcccccaacaaacactatctaagtgttaaaataaaggtaccccttagggtgattggttgctggtgtgacttggcctccatccctgccaccgggatagacggtcaagt

SEQ ID NO: 261405 - DNA, 495 bp, Zea mays
cgttcggaactcgacggcactagtcacgcgtcccctccatggttatggcgctccctgcctcgcccatagccctgcagcaagctcggctctggggctgcgcgcgcgagggagatccctccatggccgcgtccaaggtagacggccagccaaactccctcctgcgcgatctcggccagagcgccgctcgctggcctctctgttcgtgagaaggctgtgaacgtgaggtagaagaagaccccatgagcctatgacaggaccgagagatgacgctcatgcaagtggcgtggtgccaaccacaagatgcagttggtggacgacctgaagaatggtggaattaaccagtggatgctcgccaagcgagtatctcccccagcaaacactacctaagtgttaaattaaaggaccgagagatgacactcatgcaagtggcgtggtgccaaccacaagatgcagtttgtggacgacctgaagaatggtggaattaaccaatggatg

SEQ ID NO: 261406 - DNA, 511 bp, Zea mays
ggagcagtgaactcccagcttttgttgcgcagattctccaaagtgtgcttggaacaatcagtgcacaatctacgggtacaccaacatcttctgacaccggatctttagatccttcacaatcttccatcccaaatactataagagttgaactcgaccagcaacaagctcctctgctttttcagtctgaacccgcacatgagtcgtctcaaccaaatgtcatccctgatgctttgacaactatgtctcagtacattaactttatgagggactcatttaggagggagggctttagtcttaatggacaaacagagggtaatgtggaaaacagaactgcagagcctgaatcagcttctgtgcttgggcttcataatgcatcattgctagctgaaaatatgcactctactaggcaaattattgttgaacaggctggtgcattgctgtctgtaagtctcatatttcaaaatcttgctggttccagttagctaatcttagtttatcttcttaccgcttt

SEQ ID NO: 261407 - DNA, 545 bp, Zea mays
gctgttcctgcagtccaagttctccccacgccgaccttcttctccggcaagtctggccgctgccatccctcggcatcgggctggggcacacgccgagctcctcctcacgtgctccttcgccggtctgcgtcctcgctcgagcagcagcagcagcgacgcccttcgctgcgtcgcgctcgtcagaacggcctcaagtcgtcgatctgcgcagagtctacgcgatcttcgtcgaaacccgcgccccttgtcgtcgtcacgcctcgcgcatcgctcgtcggcaaagagcccaaactaatggcatgcatgcgcgacacgagtcggccaggaccgagagatgacgatcgtgcaagtgatgtggtgccaaccacaaggtgtcgttggtggacgacctgaagaatggacataactagtggatgctcgccaagcgaatacctcccccaacaaacactgtctaagtgttaaattaaaggtacctccttgctttggttgttggtgtgacttggccttcattcctgccaccgggatagatggtcgagagggttatt

SEQ ID NO: 261408 - DNA, 482 bp, Zea mays
aatcagcttctgtgcttgggcttcataatgcatcattgctagctgaaaatatgcactctactaggcaaattattgttgaacaggctggtgcattgctgtctaagagccagtggctgaggatcccggtgttcaactggtagaagttgctaagcaggagctcattgaaggaccaagagatgatgatcgtgcacgtgatgtggtgccaaccacaagatgcagttggtggacgacctgaagaatgatggacttaacaagtggatgctccccaagcgagtgcccccccagcaaaccctatctaagtgttaaattcaaggcaagccccggttttatgcataaccgtttatatatgctattttactgcacttaatgtttgtaggcttgtactgtgcacttaagtgtaggagttgactgaaaccctagttgcatgaattaaaaaaaaaaaaaaaagggcggccgtcgcgatctagaaaaataaatcgcga

SEQ ID NO: 261409 - DNA, 464 bp, Zea mays
caaggtctcaagtaagattggtgtcattggatccaccaacaatagcggcaaatggcttctttgggttggtggatccaaggtctcacccctcgtccgtgtcattgagtccttgctggcgaaggtcgatatcctcatccttggtggtggtatgatctacacattttacaaggcacagggatattctgttagaaaatctctcctctaatatgataaactaaagctcacaaacactcttattactaatcagatttctatttattcatttcttttgcttcctaatgatattctattctatgtcaaatgttcaaatccttttcaccataaaactctcaacttcataaataatattgtttacataatagtacttcatgtataccttatatcctactactcaaatataaatgtttaatcaacatcctatatcatcaactagatataattattccatacttttttttaatata

SEQ ID NO: 261410 - DNA, 471 bp, Zea mays
gacaaattgtgcagcaagccgcatgcttccggctcgctgtttggtggagccggtggagagcacgccgtgatgccgctgtgtgttcgctgtttttgcacagccccgaacatcgacgtcgttcacccggcggagaaccccgtgttttgcgagaagaagggaagccgctcgacgctcgtcgatgtgcgtagcgatgcacaaatcggaatctccatcgtcctcacaaacatcgattgggtttgtttatggaccgagaggtgacgatcgtgcaagtgatgtggtgccaaccacaagatgcagtcggtggacgacccaaggaaggatggactcaaccagtatttgctcgccaagcgagtacctcccccagcaaacactatctaagtgtcaaactaaaggtactccttaggatgattggttgatggtgtgacttggcctccatccctgccaccgggatagatggtcgagtgggttact

SEQ ID NO: 261411 - DNA, 441 bp, Zea mays
cctctctctctctatctccctctctctagcaccccatgcaacagcagcccccctcccatggagctgacgaccgtgccctcccaagctccacgctcaccttggcaagctctcccatggcgtctcccccacctctacggcagtaaggtgtaggactgagagatgacgatcgtgcaagtgatgtggtgccaaccacaagatgcagttggtggacgatctgaagagatgatggacttatccagtggatgctcgccaagcgagtacccaccccagcaaacactatctaagtgtaaaaataaaggcaagccccggttttatgcataaccgttatatatgctattttactgcacttaatgtttgtaggcttgtaatgtgcacttaagttgtaatacccaatttgtaaacattgagaaaagagtaaatctccttatatattttgcctct

SEQ ID NO: 261412 - DNA, 1269 bp, Zea mays
gcaagaacttgtggatgagtttattgtatttgagcacctcgactatggtctggatatagtgtctccaatcagacctttgaaatgccatgcatctactggcagtgtgcaaatttctggtgacattccgaaaaccttttgtcccactgatttgaactatgtaatgacaaagaatcagtcggtgcctgttggtagtgccattggcagtggctatccagtatatggtggcagactctctacttcagggaccatattcggttccattcagacagagattccttcgatccaaagttccagctatagcccaagtaatgactggttggctcaatgtccttcggcttgcattgagcaacggattccaatggaatgcaatacaatatctcagtcaaaagcttaccttatgatgcattcttcttcagctttctgtgcccctgaacatgatgcctgttctgaaactcaagctccagacttatgttcaggttcagatgttgttttcgaccccagccaatgttatccagttgctagtttttctgatcttgggatctcggatacaccactaacatcaggtttcttgaatgatataacactagcaagtttgttgaatgtcaatttgaaggacctgtcacatctcaaccgacaggaacctaccaatgatacatcacttggaggagcaagtttattgaatgctaatttgaaggaccagtcacatctctctcagtgagctggaatgcatgtgcctgacttgtgggggcatggttttgaaattctcaggccaactttccttcactcgagagcttgatagagagaattcacgaggatggaagagtagcagagaagacactggacctgccaatgtatgccaagtacaaagactcgccttatctgagaaacccttcgaagcacgggagtactatcggtgggacccaggctgagatggattccaagtgagaagccccctggagggccactagataatctgttacttattttccctatggtaaatgcgtcggtgttgatgcagaaacaattggactctctgtgagcttactcgcttcttttcggaagtagatagtattcctcgaagtggtgtttttactttgtaatatagaaaaaaaataaagtggggttgttgaaacttgagagtcaaattccgagacgttatgcacgttttgatttctgaattaatcgatcggtatcacttgtactgtttttatacgacgatgctcgaaaccattcatttgtcattttaatttgatacacttgaagtccccc

SEQ ID NO: 261413 - DNA, 391 bp, Zea mays
ctcgagtgctagagcactagcaagtttgttgaatgttaatttgaaggaccagtcacatatcaacaggcaggaacctaccaatgatacatcactaggaggagcaagtttcttgaatgctaatttgaaggaccagtcacatctcaactggcaggaacatatgaatgagacatcaccagtagcaggtttattgaatgctaatttggaggagcagtcacatctcaactggcaggaacctaagaatgagtcatcaccagaagcaggtttcttgaatgctaatttggaggagcagtcacatctcaactggcccttgcaggaatgtgagccatggattgagagacatatgttttgaccaataagttgatccttggtacaagcctgactttccatgttc

SEQ ID NO: 261414 - DNA, 899 bp, Zea mays
ccttgatgggactattcgagcatgggatttgtttcgctatcgcaacttcaggacatttaccaccccttcacctaggcagtttgtttctttaaccgcagaccagagtggagaagtcatatgtgctggaacacttgattcgtttgagatatttgtttggtcaatgaaaactggtcgattgttggatgtactcagtggtcatgaaggaccagtgcatggtctaatgttttcaccaattaatgctattctggcttcatcatcatgggacaaaactgttcgcctctgggatgtctttgagagcaagggtgcagtggaaacttttcagcactcacacgatgttcttactttagcttatcgacctgatggaaggcagatagcatgcagtactttagatggcctaattcatttctgggatccatctgatggtttgttgatgtataccattgagggacgcagggatattgctgggggtcgcctcatgacagataggagatctgcagctaatacaagtataggaaagtacctcacaacattgtgctattctgctgatggaagttctattttagctggaggaaacaccaaatatatttgcatgtatgatgttggagaacaggtgctgttgcgtaggttccagatcactcgcaatctctcattggatggagttcttgattttctgaactcaaagaagatgacagatggtggtgcactagatcttattgacgatgaagacagtgatgttgaagaaggaattgatcgacatactagaggaaacttagggcttggtttacctggatcaatggcaaatcgtggaagacccatggctcggacaaaatgtgttaagtttgctccaactggaagatcgtttgcttgcacgaccactgttggtggtttattgtcctcag

SEQ ID NO: 261415 - DNA, 501 bp, Zea mays
gtcagccgtttcatctcctgatcagcctgctagcttagtgaggaatgcttctatgcgtgggatgcccataaacggttctttcaggaaagacaactctacagaaagcttcgatttggaatgtcaagagaaacatcgggacattgttccgactagctcatcccctgaaaggaagttttcttttagttcttgctcatcaaatgggctccttttgtccaaagagagctctaaacagcaaactagcatccacaaccttgacaagtgtaatggagggcatttgcatgtatcagatgaaacattttctgaagctgctcctaagacacataaatcagcagaggaccatgatgatagatccaaacctccacttataagaggtcgatttagagttatacctgggcatgttgactcaaaggctcaaccacctggcctacagaagtgtcacagcatgcagacaatttctcgccttccatcattaagtataccctcttccgcagaaagtgcatc

SEQ ID NO: 261416 - DNA, 815 bp, Zea mays
ccgggtcgacccaaacgtcaacccacgcgtccgcccacgcgtccgcccacgcgtccggtataatcagccgcttcaattcaagaaagtaatgtggcatgtaggtgacccaatgccccacgaggaatctgtggcatcagcagcggttggttctgcaatcaaagtaaaagctgctgccattgttgtgttcacattctcagggagagctgcgaggttagttgccaagtataggccaacaatgccaattttagcagttatcttcccacgtgaaggatccgatccatcaaagtggcgttcttatggcacaacacaggcaagacaatgtttcgcagtgagaggcgtgtaccctttgatggggagtactgatgaggccgaaactggtgggctaacaaaggaagagtatgggataaaacttgcgatgagctatggtcggtcggttggcatagtgaagcctttcgacaggttgataatctttgaaaagattggtgattcttctgttgtcaagatcattgagtgtgaaggttaggcattagatgattgatacctacaacccatgctgtagtttcatgtatcgcatgggagattacctccagttccatctcacttatttaaccaagttccaagtagagtacagcaagagcacaagatatcttgttagggaattttgccctcttttcagattgtcttttgatttgacgcaataaattatgatgtcacagatttatactggaattatgatttgattatgcaaatataggattgttggcaacaaaagacagcagcatcgcgtgggtcttctcgatgcccgtctacgagga

SEQ ID NO: 261417 - DNA, 1679 bp, Zea mays
taaaggatgctaagctcgatgggtgtgtgtgattatataatggacattgtaaatccaggggagcgaaggaaaggcaaaggagaaaatttcgtagcaataaataaataaataaaattaataaaagaaaggtggcgtagaggataggaggagaaccaaggttgcgtctcgaaggttcttgcctcgttgggaagggatggcgtcggaggtggaggacgaggcggcgacgccgctgctcgccaacggtgcagccgacgtccgccggaggagggaccaggcgaaggcaattctgtccacgcaggccgtcaggatcgccaccaaggccgagcagcatgagcgcttcatctttaaggtcacacacttgctgggtgttcttggatttgggggattttgctatctcttgggtgccagaccacaggatgtgccatatgtgtactgcctgttctatgtcatatttgttccgctccgctggatttactaccgctacaagaaatggcattactaccttctggacttctgctactatgccaacacctttctccttgtaatgattctcttctacccagaggatgaaaaactttttatggtttgcttctcgtttgcagagggtccgcttgcttgggcattaattgtgtggcgttgcagcttggttttcagttcatttgacaaacttgttagtgtcctgatacatctcttacctgggattgttctattcactatccggtggtggaatccacaaacatttgctgccatgcacccagaaggaagagatgctagagtcacatggccatatgtggaggacaaatcatatctgtggacatggcttttttttgttccgctagctgcttacaccctgtggcaacttatgtatttcctcatagttaatgtcctgcgtcgacagaggttgttaagggaccctgaagtcatgacatcctacagggagctctcgaagaaagcacagaaagcgaacaacatctggtggaggctgagcggactgctgggtgaccggaaccggcaggtcatgtacatactgctccaggcgctgttcacagtggcaacaatggcactgaccgtacctatattcctgtcctaccggatgcacgtggtgttcctgatactcaaggtgtgcgcgtcgacatggaacggtggcagcttcatcttggaggtgatgcctcggcaagtagtgcagaagcagctgaagaaactggacatgaagcccatggaacaggggagctcgacacaaggtgcgccaggtggtgatggtggcacattgggtaaccaccaccagcacacatccgaggagcatatccaggagtgaggaaattgaagctggatgtaagattagattttgatgttcactgacacaacctttgttgtcatcgagtgcgctttgtgttggagtttttctttagttcttcccagtttgtgagttgtgacatctagtcatctataggtttataggctggacgatatggggtgagagattgtgcgtgcccatcttttgtcgggcttgggcaaagatatgtcgagatgtttactttctctgtagaatttcgtgaagctgttgcattgttcgtttgaagatggcgacgatgttcagatgatgcttcatgttgaaggacatatctttatttgcttcattgtacccagattctcatttgcttcatgttgaacgacagact

SEQ ID NO: 261418 - DNA, 581 bp, Zea mays
ggtcatgtacaaactgctccaggcgctgttcccagtggctacaatggccctgacggtccctatattcctgtccaaccggatgcacgtggtgttcttgatactcaaggtgtgcgcctcgacatggaacggtggcagcttcatcttggaggtgatgcctcgacaagtagaacggaagcagcagaagaaactggacatgaagcccatcgaacaggggagctggacacaaggggcgccggctgatggtacgtacattgggtaaccaccaccaagcacacatctgaggagaaaatccaggagtgaggaaatcgaagctggatgtaacaatagattttactgtttgcaaatgcaacctttgtttttttttcctgggtgttcttcgtgttggaggttttttagctctgccctagttgtgagttgtgccatctttagttttaggctgaagtctgaacgatatggggtgagagatcatgcgtgcccatggttgtcttgggattggacatgcataagttgagatgttctccttttctgtaggagttttctttacgaaaaaaaaaaaaaaaaaaaaaaaaaagggcggccgc

SEQ ID NO: 261419 - DNA, 544 bp, Zea mays
cccacgcgtccgggaagaaagacgtagaatattggatgggttcagattaaaaaggcagtgtgagctcgatggatgcgtgtgaggagtatataaaggacattataaatcaatgggagcaaaggaaaggaaaggaaaggaaagggagaaaatttcatatagcaattgtttcgcgtataggagggagaacaaaggtcgcgtctcgaaagttcttgccttgttgggaagggatggcgtcggaggtggaggacgacgcggcggtgccgggcgcgccgctggtcgccaatggtgcagccgacgtccgccggaggagggatcaggcgaaggcgattttgtccaagcaggccgtcaagatcgccaccaaggccgagcagcacgagcgcttcatctttaaggtcatttccccgaccctgcctccgtttaatctctttattaccgcctttcttgtgcagttgacgtccacaaatcttgccgctcccgtgctccctttcttttgtggaggtcattgtgtgatgtaataagtacctgcacatttattggtcgcact

SEQ ID NO: 261420 - DNA, 596 bp, Zea mays
  unsure (1)..(596): unsure at all n locations
cgccgttccgaccgatcgaggtggcgcaaagcagaggaaaaccccaggccgcaaccctcgcaaacactcaagtcctcgtcccttccgcaccctcctcttcaactccagccgctttcaccgccaatcagaggtccaccaccaccaccaccacatctcttcgcatccaaccgccccgtaggatcacaggaaacggggatggcgagcggcggggcggtgagggaggtgggctcggcggccgagctgcaggcggcggtggccggggcgcgggcggcggcggtgcacttctgggcgtcctggtgcgaggcgtccaagcagatggacgaggtcttcgcgcacctcgccgtcgacttcccccacgcggccttcctccgggttgaagctgaagaacaacctgaaatatcagaggcgtatggagttacagcggtgccatattttgttttctgcaaggaaggcaaaactgtcgatactttggagggagtaaacccagccagcctggccaataaggttgcaaaagtagctgggcctgctagtgttgctgagtctgctgtacctgctagccttggagtcgctgctgggcctgctgtacttgaanacat

SEQ ID NO: 261421 - DNA, 444 bp, Zea mays
  unsure (1)..(444): unsure at all n locations
cgcggcgccgcgcgggagcccccanaaatgccgaggaggaggcagcgtacaccttctgcgctcgctgcgccggcctcccaatcgatcgaggcggcgcagagcagaggaaaaccccgagccgcaaccctcctcaccgcacagcaactcgagtcctcgttctcttccgcatcctcctcctcgtcaactccagtcgtcttcagcccttcaccacaatcaggcccacctcccaccaccacatttcttctcatccaaccgccccgtaggatcacagagaagggggatggcgagcggcggggcggtgagggatgtgggctcgcctgcggagctggaggcggcggtggccggggcgcgggcggtggccgtgcacttctgggcgtcctggtgcgaggcgtccaagcagatggacgaggtcttcgcgcacctcgccgtcgacttcccccacgc

SEQ ID NO: 261422 - DNA, 1341 bp, Zea mays
cggacgcgtggcggacttcagcagttgcagtgccggctgcctccctctcgcgtgcgctcgccctgtgcctctcgcgtgcggaagctaggcaaaccgccggcgccctagctaggtgcccaggccatcgtcggtcccttcgccaagccatcgtcggggtctcggggattagcacccgcacccacaagatggccacaccgaacggtccttctgcttctccgatggtgtaccctgtctacctttctggggtatttccccagcaaggcggggatgatcaggctcaaggtccagggatatatgccatacaacagaaccagttagcagcggcgatgggaatgggttgctatgctccaaccacactcattcccctcacttacaatatcccaacagaaagcattggtgctcctgctggtgaagagaatgtacaggatgctaggcagcaaaatgtacctcaaagacaagttgttgtgaggaggtttcacttcgcttttcagcttgacttgaccctgatcatcaaactagctgcagtggtgtttctctttagccaggaaggctcaaaacaaaggctatttcttctcatactgtttgcctcattgatttacttatatcaaaccggagctattataccttttgttagatggcttcagcgggcgggaggtgcagctgctcatccaccacaggctcctgctcgggccgagaaccgtgctgctctgcctgcccagaatgatggcaatgagcagcccaatgaccctgcaaaccctgaccaagctgcagagaaccgtgaacaagatgctgcagctggtaacgagaatccacaagaggcagaggtagaaggcaatcggcgtaattggctggaaggtgtcttgaaagagatccagctggttgttgtagggtttgttgcatcgcttcttcctggttttcagcacaatgactaggcctcatcttgtcactgtggaataagctatgtgcagtgatttggttatggtgacataggggaagtaattatatgaagctgctcaaagctttctgtttatattgtttcaagttcaaagacttattgaaccaatcctatcatacttccagcaatacttgcagctcacatgtaaagagtagcctggcaccccatcaaatgagctatgatttgagtttctgaaatatgggatgcctacacctgaatacagaatcagcccctgttgtaagatgtctgaaacatgaaggatgtgaacgttttttcggggctgaaaccttgaataatgtgagtcgcgtcaagaaggatgctccctttatacttaagagtactagcagagcagaaaaataatgtcagagtgagatacaccaattatt

SEQ ID NO: 261423 - DNA, 541 bp, Zea mays
ccttttctaagacggcttcagcgggcaggaggtgcagctgctcatccaccacaggctcctgctcgggtcgagaaccgtgctcctctgcctgcccagaatgatggcaatgagcagcccaatgtgaccgacaaaagaattaaagctcaaggatatggagaaggacaaggatcaagttgctagggcatataagaagaaagttaaaagcaacccatgccctgcaaaccctgaccaagctgcggagaaccacgaacaagatgctgcagctggtaacgagaatccgcaagaggcagaggtagaaggcaatcggcgcaactggcttggaggtgtcttgaaagaggtccagctggttgttgtagggtttgtcccatcgcttcttcctggttttcagcacaatgactagccctcgtgtcgtcaccgtggaataagctaccagcagtgagatagttatggggacatactgacataggggaaataattaggtgaagcagctgaaaggtttctattatgcatctttgctgttaatatgttttgtttcatgttc

SEQ ID NO: 261424 - DNA, 741 bp, Zea mays
cccacgcgtccgcccacgcgtccgcccacgcgtccgcccacgcgtccgcccacgcgtccgctccttcctctcaatggcggcgccccagcaatccgctcccctgtccgggtcggcgcccaagaggctcagggcgatggccacagacgccgctgcagtgccgaatcccccagcctctagtggctgccccgcgatgaaggcggagttcgccaagcacgccgagtacctcaacaccctgaatgacaagagagaaaggcttgtgaaagctagtcgggatattacaatgaacagcaaaaaggtcatctttcaggtccacagaatcacgaaagttaacagggacgaagttctctcgaaggcagaaaatgatcttgctgcagttgttaatcaatacattgcaaaactagtaaaagaattacaaggaactgacttctggaaactcagaagagcctacacctttggtgtacaagaatatgtcgaagctgcaacactctgtagattttgcaagactggcactctattaagccttgctgaaatcaatgattctttactagcactaagtggtcaatctgttgagcccttacagttaaatgtgcttgactatcttttaggggttgctgatttgtccggagagcttatgaggctcgcaataggccgtatatctgatggggaagttgaatatgcaaaaactatctgtgcttttgtgcgggatatttacagggagctgacccttgtggtgcctttaat

SEQ ID NO: 261425 - DNA, 611 bp, Zea mays
tcatcctcaccctacagcggggtacccggtgctcctcgaacaactgcaccagataaccggctccctgcagcacctcccacagaatgcagggagaaccctcttgcgcaagtccgtccgtgtgggaatgtgcgttccctccttccgaggactcgtgagaagtcatctgtgtaagggtaagcgtaagcgaaaaagaaaaagaattaagaaaataaaagtggattggggcttggctttcccaaggttattgatgaggacatcacctgcaacatgagtacgactacaccagcagcacctccacatcaagcgccacttccttcattagccgggctagtcactcgggcctgtgccagagatcttaacttcgtcatgctactgaagaatgagggcccagaagaatagatgaccagcccaactgcggcccatagtggacgacctagggttggccgccactaggggctgcgccccctctctctatttatccaggagctgcgcctcctttgttccgcgagttttgttttacgttagccttacctactctcgaacacgcgcaaatctgcgctgtcttcgtgtattcagaactccaccctcgagtaatagattagattgctcgc

SEQ ID NO: 261426 - DNA, 452 bp, Zea mays
ggccaccatgggtttgcgtgggggaggagaatcggcggctcgctggccaggggagctcggctggaccccggcgaggccaaggttgatgaggacgtcactatgactacgactacaccagcagcacctccacatcaagcgccacttccttcattagctgggccaatcactcgggcccgtgccagagatcttaacttcgtcatgctactgaagaatgagggcccagaagaatagacgaccaacccaactgcggcccatagtggacgacctagggatggccgcccctaggggttgcgccccctctctatttatcaaggagctacgcctcatttgttcttggagttttgttttacgttagctttagctactctcgaacacgcgcaaatcagcgttgtcttcgtgtattcagaactccaccctcgagtaatagattagattgatcgcatcttgttctt

SEQ ID NO: 261427 - DNA, 1061 bp, Zea mays
cccacgcgtccgcccacgcgtccgcccacgcgtccgcagcaagacaaagatatacatcgtcatgcggcccgtcaccggtggcgaactcttcgacaaaatcgcctcgcgtggaaggctgaaagaggatgacgcaaggaagtacttccagcagctgatcaacgctgtcgattactgccatagccgaggcgtctaccaccgcgatctcaagcctgaaaatctcctgcttgatgctagcgggacgctcaaggtttcggattttggactgagcgcactatctcaacaagtccgagaggatggtctgctgcacacaacctgtggaactcccaactatgttgctcccgaggttataaacaataagggctatgatggagctaaggctgatctgtggtcatgtggagtgattctctttgtcctcatggcggggtacctcccatttgaagattcgaacctgatgtcgctctacaagaagatcttcaaagcggatttcagttgcccgtcctggttctccacaagcgcaaagaagctcatcaagaagatacttgatcctaatgctaacaatagaataactattgcagagctcattaacaacgagtggttcaagaaggggtatcagcctcccagatttgaaacagcagatgttaatctggatgacgtgaactccatcttcgatgaatccggggagccagcacagcttgttgttgagaggagagaagaaagaccatcagtgatgaacgctttcgagttaatctctacgtctcagggcctcaatctcgggacgctcttcgagaagcaaacgggttctgttaagcgagaaacaaggtttgcgtcaaggcttcctgcaaatgagatactgtcgaagatctaagcagcagcaggacccatgggcttcaacgttcagaagcccaactataagctgaagctgcaaggggagaaccctggaaggaaaagtcacctggccattgcaacattttttttttttcctgcttgtgcctagacttcctgcatggtctgttgtgctgttcttggaccctctgtgctttagactgaaaccaaagataaaa

SEQ ID NO: 261428 - DNA, 891 bp, Zea mays
  unsure (1)..(891): unsure at all n locations
actgacacaccagtgttcgtgcagagcgaggcctgatgcggcagcggcagcaaggcgaggagcaccgggagatattcgtccagtggagaccctgcgacaagaagaggtcttaggccctccgccgccacgcgcaccggcagacaaaatccgcgcaggccttcttccgacccgcaaaggcgccgcctttttcgccgattccacaggccggagcccggggagaaagacagacagacagaccggaagatgagcgcatccgtgggccggacccgcgtggggcggtacgagctcggccggaccctcggcgaaggcaccttcgccaaggtcaagttcgccaggaacgtcgagaccggagagaatgtcgccatcaagatcctcgacaaggagaaggtcctcaagcacaagatgatcgcccagatcaagcgggagatctcgaccatgaagctcatcaggcaccccaacgtcatccggatgtatgaggtgatggccagcaagacaaagatatacatcgtcatggagctcgtcaccggtggcgaactcttcgacaaaatcgcctcgcgtggaaggctgaaagaggatgacgcaaggaagtacttccagcagctgatcaacgctgtcgattactgccatagccgaggcgtctaccaccgcgatctcaaggtgagtagtactgcttaccagtcagttttatatggacaagcgtgcaggttcagcaggaaactgcgtttgattgatctctgcgtgtgtgtgtgtgtgttttccccttcctttcagcctgaaaatctcctgcttgatgctagcgggacgctcaaggtttcggattctggactgagcgcactatctcaacatgtncgagaggatggtctgctgcacacaacctgtggaactccccac

SEQ ID NO: 261429 - DNA, 823 bp, Zea mays
gcactgcttgttgttgagaggagagaagaaagaccatcagtgatgaacgctttcgagttaatctctacgtctcagggcctcaatctcgggacgctcttcgagaagcaaacgggttctgttaagcgagaaacaaggtttgcgtcaaggcttcctgcaaatgagatactgtcgaagatcgaagcagcagcgggacccatgggcttcaacgttcagaagcgcaactataagctgaagctgcaaggggagaaccctggaaggaaaggtcagctggccatcgcaacagaggttttcgaggtcacgccttccctgtacatggttgagctgcgcaagtccaacggcgacacccttgaattccacaagttctaccacaacatctcaaatggactgaaggacgtgatgtggaagccggagagcggcatcgtggaaggcgacgaggcgcggcaaaggaggtccccgtgatggggtctgcaaccaagttttagaagtagcgctgcagataactagtcatcagggagcctggcgggaactgagcctgtgactgcttccctgtttgtttggatgttttgttttttgtctaaggggctttctgactaaagtatgctggataatgcgaaccaagaatgtgcagagttttcagcaaagtaaggttgtcggattttctttcgtttgtgcagtgttgcacgtggtggagagttgcccgttgctgacgaacttgctatcttgctagctagagcctagaggataaatatgaattcaaaatacgagtagaaatatcttaaagtctgataaattttgtagagacaaaatataaagatccaacacc

SEQ ID NO: 261430 - DNA, 965 bp, Zea mays
gaacttcgatggctgtcctcgtcacggaattcgtcctcagattcacagccatggactacaatgtgcgtgaatgcagactataccactcctgctgattctgtcgccacctcggagcaagcaggtggtgaagctgaggccaccttagaaacaggtggtgaagctgcggccaccttggagcaaacaggtggcgaaaccgaagagccaaccattgtagcacctgctaatgaatatacagagcaggaggctgctcctcagcagaagtgtgcaaagatacacgacttttgcctagggataccttttggtggacttttactctccatgggccttattggatttctcttctggaggagccctgcgagtcttacctttggcgttgcacctggccttgccatattggccctggctgtacttagcctcaatgtctggaggagcgggaagtccagcttaccgttcatactggcgcaagcaggcattgccgctgccgtagcatggaagcacggccaggcgtacaccactacgaggaagctgcttccgtggggattctacgtcgcgctgagtgccgcaatgatctgcttctactcctacgttcttcttgccggagggaatccgcctcctaagaaggcgaaggcgaaggcgaaggctgctgcttgatttgatgttgaaggcattcaccggagcgtctcataattgcactacctttctctggtaaatatggttgtggtaattggtatggcctctgttgtttacttggtaaaagactgaggagataagactgtccccctatgctgcataactgttgttgtttcctttatatatacatcaataagggctgggttggttccattccatcccactacccatctcatttatggtggtaaatagggttgtccttttttttggctttggtttgaagtgtttgacgagattttgtacatttcctttttagagagaagccccttctatcc

SEQ ID NO: 261431 - DNA, 1319 bp, Zea mays
  unsure (1)..(1319): unsure at all n locations
cggacgcgtgggttttttttttttgggggaaaatctggatctttgggattataaataggtaaattacggcgaggatgattaggggcaaatgaggtaggcaacagcgaacctaaccaactgaagaaaaacctctacaaatccacctacacccgcagggctttctcaacttcatagattagggagggtacacattcatcacccatgttttatttccgacaatcaaatcccaacgagcatagcaccgaccgaactgacacatcgcatgcataatgtgttcatccctctctaggagggcaacaccgttctacaactaaaaaacccaaaccaactacaaatccaccgacccagagttgtcagttgacccattattattcctccgcctgatcaacattacacacttgtttccttcattcatctgtccgttcttctttttaggcctcttcctcaagcagcatctgatcgaagtgccacaccccgtgccccttgcccactctcctcagctgggcgacatacttggagatcttgtttatggcttccacctgctcctcgaggaactcactctcgatgaagtctgtcagctgaggatcattgcaccttgttgccacaccatgcaggttgtgcagcttctcattgaccagcttttccagggccagagccagctccatagcgtacagagcatctcctttctcagggtggtcaaactcggttaaaggcgtcacaatcgattggagcctcaccctgcctccacgtttgttctggtactccatgagcttttcagcgtgctccctctcctcgtcgctggattccttgaagaacttggcaaatcctttgagagccacgttgtcgcggtcgaagtaggcgaagagggagtggtatgcatacgaggcgttgtactccacgttgatctgctcgttgagggcggcctcgcagtcatcgacgaacttgtggcgcgcgagcgacttgtctggggactggggcacgagggcgagctcccccttgatctcctcgaagggctggaacacgaccccgctgagcacctccttccccttgcccgcggccctgcacgcggcgccagcggacggcgaggcgactccgcgcggcgccgccaccctgacgacgggagcaggggtcgcgggcgcaccggagagctgggttggcaccgcggcggccggggacggggaaaccctaagcatcatctggatgtgtcgtgtgggtgcgtgtgcgttcgcgtgaattctgggcgtgggtagtggaatggaatgggtggactggagaataggacgcgtgacgagncgcgtgggacaacaaggaaaatccgg

SEQ ID NO: 261432 - DNA, 1090 bp, Zea mays
tttcctcgcgtccgctctttcttccccacgaaaccagagcaaattccggcgagccggtgcggtgcggcggaggaggccgagggagacgccggcgcgagaaggagcatcaggaggaggcagcggagatggatccggactcggtgaagtcgacgctctctaacctggccttcggcaacgtcatcgccgccgccgcccgcgacctccaaaaggaaatggtggctaaagacaaggctcaagcagcacctgcaagccatgatgaagttgatcttgatgagctgttggatgacccagaacttgagaagttgcacgcggagagaattgctgcccttaagaaagaagttgagaagcgtgaagtgctaaaaaggcaaggtcatggtgaatacagggagataactgaaggggacttcctcggggaggttactggcagtgaaaaagtcatatgccatttttaccaccgtgaattttaccgttgcaagatcatggataagcatttgaaggcccttgccccagtctatgtgggaacaaaattcgtcaagcttgatgctgaaaatgctccattctttgtggccaaactggcaatcaagaccctgccatgtgtaatattgttcaagaagggtattgctgttgaccgattagttgggtttcaagatctcagaagtaaagacgattttccgacaagagcgttggaaaatattctcaagacgaaagggataattgatgagaagaagaaagatgacgacgatgacgatgaagaaagcgaggctaagaataggagggttaggtcttcaactgctcaagactctgactcagactgaacctgagatgaggatcgaggactcaccgtttttgcactttggattttgtttgtttgtttgttctgtgttgtgctgtactgtactgtaattgatttgtgtaaccatgtatcggtaccagacaccacaacaagaacatgtacaagagattctttagcatccattgtgtgtaaaagctagggtttgtggctgccttttatttcgtttttcctcagccatcataggatggtacggctgatgtataatagattactatttgctaaaaaaaaaaaaaaaaa

SEQ ID NO: 261433 - DNA, 455 bp, Zea mays
gaaaatgctccattctttgtagccaaactggcaatcaaaaccttgccatgtgtaatattgttcaagaagggtattgctgttgaccggttagttgggtttcaagatctcggaagtaaagacgatttttcaacaagagcgttggaaaacattctcaagatgaaagggataatcgatgagaagaagaaagatgacgatgatgatgatgaagaaagcgagtctaagaataggaggattagatcttcaactgctcaagattctgactcggactgaacatgagatggggattgaggattcaccctttttgcactttatattttgtctgttctgtactgcaattgatttgtgcgactcatgtatctataccagataaccagaacaaaagcatgtacaagagattcttaacttatctaacttatgaccacgttcaaaattgagctggcatatctcaattggcc

SEQ ID NO: 261434 - DNA, 521 bp, Zea mays
tgcctccgcgtttgttctaatactccatgagcttttcggcgtgctccctctcctcgtcgctggattccttgaagaacttggcaaatcctttgagggccacgttgtcgcggtcgaagtaggcgaagagggagtggtacgcatacgaggcgttgtactccacattgatctgctcgttgatggctgcctcgcagtcgtcgacgaacttgtggcgcgcgagcgacctgtcgggggactggggcacgagggcgagctcccccttgatctcctcgaagggctggaacaccaccccgctgagcacctccttccccttgccggcggcggcggcggacagcgagacgccgctgcgtgcgccgtcaccctggcaggagccggggccgcggccccaccagagagctggttggccaccgcggcggccggagacgcggaaaccctaagcatcatctggatggggacggaaggaggaggcgggcgggtgcgttctcgtgaattctgggcgtcgggagcggaataataggtggtgg

SEQ ID NO: 261435 - DNA, 559 bp, Zea mays
aaaacgaacgacaatataatgttcaaatataagagacaatcctccacgtaacatccatcatgtcatgtgggcaacgcaacaccgttctacaactaaaacactaaccaactggaaagaaaagaaaaagaaaagaatacgccacccagagctcagctgccgtccacgccacccttgttggccttcaggccccttcctgaagcagcatctgatcaaagtgccacacccctgcacgcaagccacgtctcaacaatatcgtaactttgggcacgagacatatatagcagatgaaaccaagtttattagcaacagactaaccgtgccccttgttgcccactctcctcagctgcgcgacatacttggagaccttatttatggcttccacctgctcctcgaggaactcactctcgatgaagtctatcagctgaggatcattgcaccttgttgccacctgttaattacaataatagcatgttacatgtagtgacccaacactcattcaatttatatctgcacatacattatccaagtctgtatatatgccttaagcgaagcacgcaat

SEQ ID NO: 261436 - DNA, 424 bp, Zea mays
gccatgccaaaaacgaacgacaatataatgttcaaatataagagacaatcctccacgtaacatccatcatgtcatgtgggcaacgcaacaccgttctacaactaaaacactaaccaactggaaagaaaagaaaaagaaaagaatacaccacccagagctcagctccgtccacgccacccttgttggccttcaggccccttcctgaagcagcatctgatcaaagtgccacaccccgtgccccttgttgcccactctcctcagctgcgcgacatacttggagaccttatttatggcttccacctttcaaaagaaaacccaaaactgctcctcgaggaactcactctcgacgaagtctatcagctgaggatcattgcaccttgttgccacaccatgcaggctgtgcagcttctcattaaccagcttt

SEQ ID NO: 261437 - DNA, 460 bp, Zea mays
gccaaaagcgaacgacaatataatgttcaaatataagagacaatcctccacgtaacatccatcatgtcatgtgggcaacgcaacaccgttctacaactaaaacactaaccaactggaaagaaaagaaaatgaaaagaatacaccacccagagctcagctccgtccacgccacccttgttggccttcaggccccttcctgaagcagcatctgatcaaagggccacaccccgggccccttggtgcccactctcctcagctgcgcgacatacttggagaccttatttatggcttccacctgctcctcgaggaactcactctcgatgaagtctatcagctgaggatcattgcaccttgttgccacaccatgcaggctgtgcagcttctcattaaccagcttttccagagccagagtcagctccatagcgtacagagcatcgccggacgcgatggtggacgcgtg

SEQ ID NO: 261438 - DNA, 407 bp, Zea mays
gggccagagccagctccctagcgtacagagcatctcctttctcagcgtggtcaaactcggttaaaggcgtcacactcgattggagcctcaccctgcctccacgtttgttctggtactccatgagcttttcagcgtgctccctctcctcgtcgctggattccttgaagaacttggcaaatcctttgagagccacgttgtcgcggtcgaaataggcgaagcgggagtggtatgcatacgacgcgttgtactccacgttcatctgctcgttgagggcggcctcgcagtcatcgacgaacttctggcgcgcgggcgacttctctggggactggggtggggggtgttgcgtgaaacgaactcgcgacctctcgcaccctaagcgggctccatatagacttgtgggtcggccc

SEQ ID NO: 261439 - DNA, 463 bp, Zea mays
cggacgcgtggcgaaaacagagcaaatccggcgagccggtgcggcggcggagggagacgcctgctcgcgaaggagcattagcaggaggcagcggagatggatccggacgcagtgaagtcgacgctctctaaccttgccttcggcaacgtcatcgccgccgccgcccgcgacctccagaaggaaatggtggctaaagacaaggctcaagcagcacctgcgagccatgatgaagttcttcttgatgagttgatggatgaccctgaacttgagaagttgcacgcggagagaattgctgcccttaagaaagaggttgagaagcgtgaagtgctaaaaaggcaaggtcacggtgaatacagggaggtaattgaaggggacttccttggggaggttactggcagtgaaagagtcatatgtcatttctatcaccgtgaattttaccgttgcaagatcatggataagcatt

SEQ ID NO: 261440 - DNA, 1084 bp, Zea mays
ggaattcatcggacgaccacgcgacggcacatctcttgcctcctctttcgcgctgtccggagaggaggggcaggaggaggccgcaccaaatctatctggggatcggagcgcgggcgacaagatgccacgcggcggcaagcccgcggcttcgtcgaagccgaacccgttcgactcggactcggactcggagtccagcaataagccggcgaacaagtccggggcgtcgtcgtaccaggcccccgccgacgccaagaagcggtacaaggacgggttccgggactcgggcgggctggagaaccagtcggtgcaggagctggagcactacgcggcgtacaaggccgaggagacgacggacgcgctcgccggctgcctgcgcatcgccgaggacatcaggcaggacgccagcgacacgctgatcacgctgcacaagcagggggagcagatcagccggacgcacgagaaggccgtcgagatcgaccaggacctcgccaagagcgagacccttctcgggagcctcggaggcttcttctccaagacgtggaagcccaagaagacgaggcagatcaagggaccagcgcaggtgtcacgagatgactccttcaagaagaaggccagccgcatggagcagagggacaagctgggcctgagcccgcgagggaagcgcgaccctcgccactacgctgaggccaccgacgccatggacaaagtccagatcgagaagaagaagcaggacgacgccctcgacgacctcagcggcgtgctgggccagctcaagggcatggccgtcgacatgggctccgagcttgacaggcaaaacgaagcgctggatcatctgcaaggcgacgtggaggagctcaactccagggtgaagggagcaaaccagcgtgcgcgcaagctcgtcgccaaataggccgcctagctcgaacgtgggagcttgcgcattcctgggtctggtttgcgccacgattcaccctcgccggctgattgcttgctgtaacatgcatgtattcgctctccattgcattgcattgggagcgttttttctgttcaacagagaatgttctttctccttgcattgttcacc

SEQ ID NO: 261441 - DNA, 1509 bp, Zea mays
cgcggagacaaagcacacaagcaaaagcaaccccgcgggccgcgctagcagtagtagccgaacgagcgaggagcctcgaatccagccaggccaggctcctcccattcctcctctcccacgagctctcaccgctcctcgcggcggcaaaaacccccttgaattccctacgcgcccgcctccaatcccgccagtccggcggcgacccagggatccatggagaggtacgaactgctcaaggacatcggttccggcaacttcggggtggcgcggctgatgcggaacaaggacaccaaggagctcgtcgctatgaagtacatcccgagggggctcaagattgacgagaatgtggcgagggagatcataaaccaccgctcgttgcggcaccccaacatcatccgcttcaaggaggtcgtgctcacgcccacgcacctcgctatcgtcatggagtacgccgccggcggcgagcttttcgacaggatctgcagcgccgggaggttcagcgaggacgaggcgaggtatttcttccagcagcttatctgcggtgtcagctactgccacttcatgcaaatttgtcaccgggacttgaagctggagaacacgctgttggatggcagcccggcgccgcgcctaaagatctgcgactttggctactctaagtcatcgctgctgcactcaaagcctaaatccacggttggaactccggcgtacattgctccggaggtactctctcgccgggaatacgacggcaagatggcagacgtttggtcttgtggagtgactctttacgtgatgctggttggtgcatacccttttgaggaccccgatgatcccaagaatttcagaaaaacgattgggagaatagtgtcaattcagtaccagataccagagtatgtccacatatcccaagactgcagacagctcctggctcggatcttcgtcgcaaatcctgcaaagagaatcacaatcagggagattaggaatcacccctggttcctgaagaatttgcccagagagcttacagaagctgcgcaacgaagtactacaagaaggacaacagtgcccccaccttctccgatcaaaccgttgaagagatcatgaagattgtagaggaggcccgcacgccaccccagtcatctactccggtggctggttttggttgggctgaggaagaagagcaggaagatggcaagaggtctgatgatgacgagcagtatggggaggatgaggactacgatggcgaggacgagtatgataaacaggtgaagcatgtacatgccagcggggattttcaacacctcctaaaatgaagctcctggcagcgatcaagtccgcaactggtgagatactgtctggatttgttgtagtttgtggtgctgagatgctgcaccctcggcgcgtacttgtagtttccttctgtctggatcaccttttttttcgcattatgtgtgctatactctgtaaattatcaaactggctttctcaatgcctatgtaatgaaccgttgagtga

SEQ ID NO: 261442 - DNA, 891 bp, Zea mays
tgtaccggtcatgctccgggtccacccagcgtccgtaaaaaggagcgaagagagagagagagacgcaggcccgccggcgacgatcgaggagggaggaacccagagacccggcggcggcgacgatggctccgcgcagctcatcggcggcgacgtgcctgtgcctcgctctcgccgcggccacgctggcgctggcccacggggcgcaaggaggaggaccatcggcatcggcggcggacctggacaaggtcacggccgagaccttcttcgacatcgagatcgacggcaagcctgcaggccggatcgtgctgggactgtttggggacaccgttcctaaaacagcagagaacttccgagcactttgcacaggggagaaaggaattgccaagtccggcaagcctctgtggtacaaggggtcgacgttccacaggatcatcccggggttcatgatccagggaggcgacttcaccaacggcaacggcacggggggcgagtccatctacggcagcaccatcttctccgacgagaacttcaagcacacccacgctaaagccggtacgctgtccatggctaactacgggcccgactccaatggctcccagttcttcatcaccaccgtagacgaaaaccggttgcccaagaagctggacgggcgccacgtggtgttcggcaaggtggtgaaagggatggacgtcgtgcgcaagatcgaagccgagggccagctcaccggcgtgcccaaggccaaggtcgtcatagccaacagcggccagctgccagcgcccgccgccgccggccatcgtgacctctgatcgatgacgaggagaacgactcacgatccatcaatccggtcgatctgtcttgttcgttaagaaaccaaacgtgtgcatggttaat

SEQ ID NO: 261443 - DNA, 443 bp, Zea mays
  unsure (1)..(443): unsure at all n locations
tcgttggtcgatacaaccctctaaaatgagtcgtgattaacgcgtccgggaggaaccagatacccggcggcggcgatcgatggctccgcgcagctcatcggcggcgacgtgcctgtgcctcgctctcgccgcggccacgctggcgctggcccacggggcgcaaggaggaggaccatcggcatcggcggcggacctggacaaggtcacggccgagaccttcttggacatcgagatcgacggcaagcctgcaggccggatcgtgctgggactgtttggggacaccgttcctaaaacagcagagaacttccgagcactttgcacaggggagaaaggaattgccaagtccggcaagcctctgtggtacaaggggtcgacgttccacaggatcatcccggggttcatgatccanggaggcgacttcaccaacggcaacggcacggggg

SEQ ID NO: 261444 - DNA, 584 bp, Zea mays
ccggcccgacccacgccgacggaagtttcagatgttccattcgtcccttcggacaggccttgggaaaccatattcagcgggtcgtctcatgttctcccgcctctcacaaaactatgctctgcattcttgtcatcgctgctggagaaacggcctgttgcaaacgagtgagccgccctagaacattgtcctctcatacaacggtaggtatactcgccagttgcagaatggaaatgcggaaggaaatccgtccgtgacgatgcatatgcccacttgaagagttcagagatgctgggtgatgccatctgaggttggttatggttatacagatatcacccggcccacgaggatcattttgcagcgatactcggcggccaacctactgatcgcagcaattttgttttcttccccgcttgacatgtaatcctggcagtaaaactagaaaatcttagtgtgctttatctgatgcgatgacccggtgctcgttaaggtgctgcgactgtttggctattgagctgtctacggcccaaccgcatttcttttgaactattttgtttttttttttcaaaaaaagcccccccttggat

SEQ ID NO: 261445 - DNA, 965 bp, Zea mays
ggccgtccgaccgggctctcctccctctttttacccgcaccccggggccgcaacgccgagaagacgcgagagggagggaggaggtgagccaccggaagcggagacgtgagcagtcgaccaaccccgtcgatccggctgcggcgcggcgtgctagatcgctaccgaccatggtggtggaggagatcgccgagggggtgaagaacctcaccgtcaccggagatgcggcggcttcaggcggagaggggcagaggaggggcggcggcggcagcagcaaccgcatccaggtgtccaacaccaagaaacccctcttcttctacgtcaacctcgccaagaggtatatgcaacagcacggcgatgtagagctatccgctcttgggatggccatagcaacagttgtgaccgtggcagaaattctgaagaacaatggatttgctgttgaaaagaaaattaggacctctactgttgaaataaacgacgaatcaagagggcgtccattccaaaaggccaagattgagataatcttgggaaagagcgacaaatttgatgagctgatggccgctgctgcagaagagaggggcgaagtggaagatggtgaagagcaggcttgaaaacagtaccgatgacaagctgctgctgttgtgctctgttagtgttgtttaatttagtttaataccgtgtgcatgagatatggcacgcgttcttgctcaactacatcaccatggcaatgtctgcaaatccatggattgatggatggatgttggttgtttcttaacattctggacatgttgttcactttggctatgtatgttttaacagtccagcgttctccttacaaaatatggcgtgctttgttgactacacagaccgtagttcctttcctgaattattgtctgcaaagataagagatatcaatgggtaactaatacccgatggatcaaaaaaaaaaaaaaatagccaaactgaat

SEQ ID NO: 261446 - DNA, 718 bp, Zea mays
tgagacttctatattatgccatcatcatgcatgaatatccattcactgttgccgaacacaagtattttgtgaaatttatcaaatcactacggccatcatttcctttcaagtctcgtatcactgttcgtaaagagatcatgcaactttataaagaggaaaagaatatgttgtatgcacagttcaaaaagctgacatgtcgtgttagttttactatggatgcatggacatctatacaaaacaaatcgtacttatgtgtcacagcacattggattgatgataattggaacatgcaaaaaaggattatcaattttatgcatgtagaagacagccatggtgggataaaattgagtgatattttttttgtaaatgtgctcaattggaaccttgataagaaaatgtttgctctttctttggataatgctgcggcaaacaaggttgcagttgatatagtgatagataatgctaaagacttgctcatatgtggtggaaagttctttcatgttagatgtgcaaatcatatattgaaccttggtgctaaagatggcttagcagtaatgggaaatgctattgcaaacattagaatgttcataacagctatcaagaggtcacctttgcaatttgaggcatttcaaaaatgtgctaaagaatgtgatctagacactaagaaagtcctttccttagatgttgctacaagatggaattctacatatattatggt

SEQ ID NO: 261447 - DNA, 1037 bp, Zea mays
  unsure (1)..(1037): unsure at all n locations
cctccggttgctgacgtcaagtcgttgacacactatggtgaaccatatgatggcaatacacgattttttaagagtactctatttgttgcagcggttcgagcctgctatggtgaatcatgcctcctccatggtgttgaatggatgccacccaagggtggaataacagaaggacaaatgcttaaattcatgggcgcaaacatacacttatctccaacacaagccaagatactgttggaggatgagactgctggttttgcatatttgaatcttcaggaagcatgtccaccattatattcaattattgggctcagggagcatattaagaaacggccaccattggctacctctgagaaagttcaacaatttgtgagggcacgggggagagaatcaatggttgcaggattttatcacgaaggctatgaagatccattgcttatgctgatgagaaggagaactgttcatgctggactagttgtgaagggtgaggaaggtgcgctttccttgacaaccaaggaaagatcagcccatgcatcaaaaggactccctgttaaccactgttcagggtttcggacaccaagcggcataaatttctctgagactgatggtattcctagagaaagcttcagggtcattgtgaatgcccaggaacttggttttgaatccactgaaactccaagaactgatagatcaattctaaggaacttggagcttggtctggcagcactaggtggcgaaaaaggagcagcgtatgaccgaatcgttcttaacgcggctatggctgaccacttactaggctgcagcggagctgaggatatcgacgctgcacttgaccgggcgagggaagccattggtagcggtgaagctctgagaaggctcatgagttacataaagatctcgcacaaagtgtcctagtgttgacccgtgagtctgtgaccatgtactgactgtacaattttggcgtgagtcacgactggatatcttcttcgcgttgtctgagtgcctttcccactcaatgttacanagccaccatgaaaaag

SEQ ID NO: 261448 - DNA, 2181 bp, Zea mays
cccacgcgtctttactaatcttgtttgggctaaggttacatcacttgctgatgtgaaagcaagcgggaattggatgtacgctgcaaagcttgatggcgaaggtgctgatatgtatgatgcagctgttgcattggctgactgcatgattgaacttggtattgcaatagatgggggaaaagacagtctttccatggcagcccaatgtgatggtgaagtcgtcaaggctcctggaaatctggtcatcagtacttacgtgacatgtcctgatataacattgacagtaacccctgatttgaagcttggtaatgatggcatccttcttcatattgaccttgctaaaggaaatcgccgtcttggtggttctgctcttgcacaagcatttgatcaaattggaaatgattgcccagacattgatgatgttctgtacctgaagaaggtatttgaggccattcaggaattgctcagtcagcgtcttatttcagcaggccatgacataagcgatggtggccttattgtgagtgttcttgagatggcatttgctggtaattgtggttttaagcttgacatagacttggaagataggagccttattgaaggactttttgcagaggagcttggcctcattattgaagtacactcgaaatatctcaacattgtgaagcaaaagcttgaaatagcaggcatttctgctaatgttattggagaagttactagctcaccagaaatagaagtttttattgatggcaatctgcatctcaaggaaaaaacttcagatctcagggatctgtgggaggaaacaagcttccagcttgaggagttacaacgtctgaaatcttgtgtaaaacttgagaaagaaggattaaaatgcaggacatcaccatcgtggtctctgtcttttactcccaaattcacagatgagaaactgttgattgcttcctcgaaaccaaaggtcgccatcattcgtgaggaagggagcaatggggacagggaaatggctgctgcattccacgctgctggatttgaaccatgggatattacaatgtcagacctcttggctgggaagtcttctctcaaggagttccgtgggattgcatttgttggtggtttcagctatgcagatgtgctggattcagcgaaaggctgggctgcatcaatcaggtttaaccaacccctcattcagcaatttcaggaattctaccataggccagacacgttcagccttggagtatgtaatggttgtcaacttatggctcttcttggctgggtgccaggatctgatgttggaggttctcttagtaaaggtggagatataacccagcccaggtttattcacaatgaatccggtcgtttcgagtgccggtttactagtgtgtccattggggtttctcctgctatcatgttcaaagggatggaaggttctactttgggtgtttggagtgctcatggcgagggaagagctttcttcccagatgaaaatgttctagctactgtagtgaagtctaatctggcacctgtgcgatattgcgatgattttaacaacataaccgagacctaccccttcaaccctaatggttctccactgggtattgctgccctttgctcccctggggggaggcaccttgctatgatgccacatccggagcgttgcttcatgatgtggcaatttccatggtatcccaaggaatggcaggttgagaagagtggtcccagcccttggctgcggatgttccagaatgcaagagaatggtgttcatagtgcagggcagtgcccagctgtagcgatgcggatggttgttttcatctgatgaccccttccttttgcggaataaagaggtgttcgacccgcagcgcgttatccaagctgataacaaacgtgtcaaaattgaagttttatacatagaaaactgccaggttttttgcgtagcctatgccaaagatgcgtaaactgtcagccccatcagggcttgtttggtaatcttggattagagtggattgaagtggtataagatatattaaagtgtaatataaactaatttccctttaaatctctaaaatacacctcaatccacttcaatccctctttatccaagcaaagcctcagtgaatttcccaatcaacgtagagaatgcttgctgcgttactcaaatctgatgcttatgcaatggtcgtttttgtgctgtc

SEQ ID NO: 261449 - DNA, 470 bp, Zea mays
ggatgttccagaatgcaagagaatggtgttcatagtgcacggcagtgcccagctgtagcgatgcggatggttgttttcatctgatgaccccttccttttgcggaataaagaggtgttcgaccagcagtgcgttatccaagctgataacaaacgtgtcaaatttgaagttttatacatagaaaactgccaggtttttgcgtagcctatgccaaagatgtgtaaactgtgcacccccatcagtgaatttcccaatcaacgtagagaatgcttgctgcgttactcaaatccgatgcttatgcaatggtcgtttttgtgctgtctgtctgatgatgagtaggtatgaattcattcgcaaccagacaagtcattagtatgaattcagtcgcaaccagacgagtcattgtaatagcttgagataattcatctggtgatgtggcaaattcttagagtcccatattttccgcatatat

SEQ ID NO: 261450 - DNA, 447 bp, Zea mays
cggagccaccggggagcgggagggcatgtttctgttcggagattcatatcgccgaagggtgttcttcaagtacgagaagaggattaggacgcgcagccctccagagaagatctttgagtacttcgcatccgtccacagcccagagggtgagatgtacatgttacctaccgacctgatgagggcgggtgttcctgttttcccctcatctgagtccaaaaatgtcagggaagggagattgaagggggagcgccaccctggcgagctacaatgtgctccatctgagtttttcatgctattcgatacaaatggtgatggtgtcatctccttttctgagtatatctcttgtacattattagatcctgatcaacttcatgggctttttgcgttgacttgacacatggggaatgtcaagcgagttaggaagtgatgcactgatgcgtctatata

SEQ ID NO: 261451 - DNA, 1169 bp, Zea mays
ggaagctttcctaaatgttgtcctcgtacataaagcaagtgcaaatggcacactagaagatatatcatcactgtctgctgcaagctgctgtagtcttgaccagctactagtttgtgttgagggagaggcacagaatatatttaatgacatccataatttgttaaccatccaccgaagcgaaatgacgcacttcactcaagaattaagggagagtttccaaataagcttggataggacaaaagaaatgtccacctatattattgggctctttgacaagtacgttgaggaaacctccaaattgcacagtcactcaaataatactcatgaagcacaaatgaaaagcattgaagactttcagatggtttatgaggagcaatcaaaatcagtggagcagaagcttttagcggagataagcagtttagtatctaaacatattactcgacaaagagagttggtgggcgttagattgagctctctgggcgatgctgcccgtggaaataaggcatttttggatgaacacacatcggccatggagtttgtcacaaaagatgctaagaggaagtgggaaacgtttgcagagcaggctgagaatgactgcaaagctggctccagcttttctgcagctaagcatagccgcatggaaaccatgcttcaggagtgcgcatgcactgttgactccgcagttcagcaatggaagaagtcacatgctgctgtcaacgatctcagcagaaagcaagttgctgaagttgaagcactcgtcaggactgcaattgagaacaacgagcaacatgaagtggaagttgcatcttctcgagctgtggctgaagaagacaccaccaatagcagcaaggacatagcccagggcgttgaaaatctgttggaaaaggcacagaaatctagttcaagagtggtctcaatggtggaggctcacttcgcagagctacagaagctgcaagagagccactccacccaggctgccggtatcaacatgcacgcagacaagtctttccaaaccagttacaaggactacgagccgacgggtgaaactccagtgaggtctgagccgagcgtgcaaagcaaaggctcgatcgagtcgctgcgagccatgcccatggagaccttgatgaacgagttccgtgagaaccatccgtatgaatctgaatcgagca

SEQ ID NO: 261452 - DNA, 615 bp, Zea mays
aacggtgactcgggcggactcacgcgtgcgcaggcaagggcgcaaccaataatagcaagtgtgatcatccgttgatccatcttgctaataaccctgcgtgcccttcgttctcgtctcgatcccgacgacgctcccttcggctccggcaaaccacatcaagtcgcgatggagatgaagaaggtcgcctgcgccgtcctcgccgccgccgcctccgccaccgtggtcctcgccgccgaggccccggcgcccgcccccaccagcgcctcctcggccgcgttcccggccgtcggcgccgtgctgggcgcctccgtgctctccttcttcgcctactacctgcagtaaaattaaaggaggatcggagggagaggctgctggctgccattgcctgtattcggttggattccgtttatatatatatttaagtactttaatttgggtctgaacatgtcgattgatccattcattttatttgctttgccatttctcccctttctgttaatttcgatatgtaaagaggggagaatgggagacactattcgtttggacatgacaattggaaattaatcaatacccatttgttagtaaaaaaaaaagaaataaaaaaaaaaaaggagg

SEQ ID NO: 261453 - DNA, 844 bp, Zea mays
ctgcaaggcttgtatgttgcaaagcttgtgcgatcattctgtaggtcatccagtgattctgaagaggaagacatttttgagtacgttgcctccacacttgtcaatatatctaaggttgaagctggaaggagaatattgttggagcctaagagaggtcttctgaagcagattattcgacaatttgattcaacaaatcaacttagaaagaaaggggttgctggtacaattcgtaactgttgctttgaggctgatactcagcttctgagtttgctttctttagcagaatatctctggccagctctacttttgcctgtagccggaaagaagatctatagtgaagaagacagatcaaaaatgccacttgagctatcgagtgcactctctcatgaacgggaagttgttgaggattctgaaattcggcagcaggcattagaggctatttatatgatcgtattgcaggatggtggccgaaggtccttttggtcagttaatggcccacgaattctgcaggttggttatgaagatgaaaaggacccgaaagtgatggaagcatatgaacttattggttccctgcttgttgggaagggtgaagatgtacaagataacaagaaggaacaaggagagaagcctcaatgagccccgccgctgataaaaacggtgctgtatttttgtttgtctagaaaacatccctcgccgtgtgcaatagcaatagtatgatatcccaacttgtcaactgttgcaactgcaagagctctgcagtgttgcttttgtaattgacgaatgtatctggaaaatttgcacgtattggccgtcttttccttgggtttgagctctctgacaattc

SEQ ID NO: 261454 - DNA, 453 bp, Zea mays
ccaaaatgatatggcttgtctattctaatgtcaactgttgcaacacaaattactcttgggatagacttctgacaaatagcttggcactgtttctgaaggaggcctaggtgcttacgtcagatggtctcttgttgaatccggctttaattcatgactagagactttagagtattatcagtccttgttgaggttcagcctttgctgacaccaatgtaattaacatctaaaaatattctttgaatcagcttgtgattcatcagcatgacgttagttgtcatgtacaatgtacaaaatcttgctaacaggacaggtctgtttcctcctctacgttttgtcattacatggatgaaaattaattggtgtgccaattggaggaaagaattgttctagtaaatgttgatggtagacgtgactttcactcaaaaaaaaaataaaaaaaaaaagggcgcgcgc

SEQ ID NO: 261455 - DNA, 438 bp, Zea mays
gactagtagtaggacccttggaggagcagtcgcgtcacggacatgcggacacagcgggatccagcaccaagagcctaggaaggccaggggcaggggtcctcgccctcgccgcaatggagctgctggccaaggcgcccgtgctgggctgcgccgggaagatgcagaggcagcggcaacgggggtccgcgctgggcaggtggatttgccgtgccgtggcgccgccgagggtgcggctcagggacggccgccacctggcgtacgccgagtccggggccagcaaggaggacgcgaggttcaaggtcgtcttctcccacggcttcaccggctcccgcctcgacaccgttcgtccggcgccggaagttgcggaggagctgggcgtgtacatggtgggtttcgaccgcgccgggtacgggcagagcgaccccaacctcaccggtc

SEQ ID NO: 261456 - DNA, 552 bp, Zea mays
cggacgcgtgggcggacgcgtgggcgatgacatcccacccacgcgagaggtctgaaacccaagggcaaaccaaccgaccgattaacccaccaccgcctcgcctcgtctccgctctcttcctcggacaaagccggggccgttcggcgggaggcaggggacgcacgggcaggcagccatgaacggcatcaaccccaacggcgggttcctgtcgtacgggaacatggagagctatgcgatgtgggtggcgaccggcgtggcgtcggccttcttcgcgtccctcgagcgctgctcctgcatccacctccacaccgcggaggacgacggcgacgaggaggaggaggacctcgaggaggcccgccgctccttctcccgcccgatccctgagtactactacgaccggtccggctcctccgcctccgtcgccaagatgtgacctgaccgaaccgcgcctccctccgcccaagaaatgcgtggtgatacgatccgtttcttgatctattatgtgctcttgcttgattcgttgagtctctagccaagaagatgaacaacaac

SEQ ID NO: 261457 - DNA, 600 bp, Zea mays
atctacttctcctagagatcaatggtctggtatctgaagtcaagcaaatcttacctggtatggttcggcgacatcggcattcagatagcactggtagcacgacttcctccagaagcaatccaatgcgagaagacatgttgaaccgatcaaacacacatcgtgctagaagtcagtttttagaaaatcacctggcaaagttatttgagcaaaaaatggcactattcaccaaagttgaatacacacaggaatctgttatttctactgtcctcaagctctgcctgaaaagcttgcaagaatttgtccgtcttcagactttcaacagaagtggatttcagcagattcagctggatatggaatttctcaagacctctcttaaggaatttgtggatgatgaagcagccattagctttttactcaaagaggtgaacaatgctgcccatgagagatgtcttgacccaatccctcttgagccccccatattagataagctcataaatgcataacttgcataaatttaagagagaaacccatatatgcggcagctatgcacagatgggtgtctgttactagaattcagttctgtccattttaatgcactat

SEQ ID NO: 261458 - DNA, 820 bp, Zea mays
aattccgggtcgagcacgcgtccgaccattgcccattgccattccttccttcctccacagagaaatccgatccgcggagatttgacccaaccagatcatatcacacacgtaatcccatcccattccgcccgcaacagcagcaccaccggtgggaagaagaagatgaagaaggccacttcgctctccgagctgggcttcgacgccggcgacgcgtcgtcgggcttcttccgccctgtgtccggcgactcgtcgacgccgacgtcgcagcaccaccggcggaggctgaccaaggtgtcggtcatcggcgcgggcaacgtggggatggccatcgcgcagaccatcctcacgcgcgacctggccgacgagatcgcgctggtggacgcggtcccggacaagctccgcggggagatgctggacctgcagcacgcggcggcgttcctgccgcgcacgcgcctcgtgtccggcaccgacatgtccgtgaccaggggctcggacctggtcatcgtgacggccggggcgcggcagatccagggcgagacgaggctcgacctgctccagcggaacgtggcgctgttccgcaagatcgtgccgccgctggcggagcagtcccacgacgcgctgctgctcgtcgtgtccaaccccgtggacgtgctcacctacgtcgcctggaagctttcgggcttcccggccagccgcgtcatcggatccggcaccaacctcgactcgtccaggttcaggttccttctcgccgagcacctcgacgtcaacgcccagaacgtacaggttcgtaaggagtaatgacatctgcccggacgcgtgg

SEQ ID NO: 261459 - DNA, 416 bp, Zea mays
cgcacgcgtccggcagattgtaatgaatatgtgccgtgcacgtcagcctagtttgaaggttggcgtgcctcaaattttgtaaagcctatgtgcttctccgttgtatttctactcgtcctattttcccatggaaaactcacgggaaactttatctagcttagctctagtttggaaactcaaatcccttcgtggatggaaggggtttgagggacaaattagtttattttcatcttaatcccttctaatccccgggtgatttgagtttacaaactagcctttagagtaaagatttaccacattggcaatgaaagatgatggcctgtgaactaggtgaagatttactgcattggtggtgataagtgatagcctgaccctgatgagtatagtaattcgacgatgtaatgtgcataagtaac

SEQ ID NO: 261460 - DNA, 530 bp, Zea mays
  unsure (1)..(530): unsure at all n locations
ccggacgtaaggcggcgatggtggtggttaagaacaagaaggtggtgctaaggaggcgcgtcaccgggttccccacggaagaagacatggagatcacggtggacactatcgagctgggtgtgccagcggggctgacggccgtgctgatcaagaacctctacctgtcctgcgacccctggatgcgcggtcgcatgagcaagcatgaagacggcgccaccgtgccagcctcggactttgtcatcggagaggccatggtgaatttcggtgtgggcaaggtggtcggctcgacgcaccctgagttcaccgccggtgatcttgtctgggggctgagtgggtgggacgagtacaccctcgtcacccagccggaatcgctgcacaagatcaaacacaccgagctgccgctctcctactacacgggagttcttggcatgccagggctcactgcgtacgcgcngttcacccatgtcgccaggcccaagaaaggcgacttcgtgtacgtctcggcggcgtcgggcgccgtcggccacatc

SEQ ID NO: 261461 - DNA, 520 bp, Zea mays
  unsure (1)..(520): unsure at all n locations
agctgcgggcgccgaatgcacgtctactaaacggccgtccattccctccgctctttaacttcaaacatgagctagcaaatgcctccccggacctcatcaacaggcttgtaccggagcacattagacggcagaacggtgtcaactttgggcatatcgggagctaggagggcaggcggctgccatggtctagtttttggtcttggtaccccatgtgcagggccggttgcaggtgaaggtgatattgctgcaccatctgggagaggaggggctcagcagtacctgagagagctgaaactatgtaaattatctgaccgcgaaggagtacggccagtgttaagccagtaaactggcgcatgttggtccagagtagttaaggtaagaatgtagcaggtggagactggtaaatgcctagggtcgtttttagttgttaccagtattttgtaatgtaatgttcgtcggtacttcccagcagtagtgtagctgctcctgttttgttcgcccgccatgatgtanatgatca

SEQ ID NO: 261462 - DNA, 462 bp, Zea mays
ctgagaagaacacacaaaatgagggttcttgtagagaagctgttagtctctgtgtttttagcagcattctattcagggtgcatggtcgtgtctctagaatatgatcacacggcaagcatcgagtgccttggcgacccaatgaaacccttgtacaagggcggcattgtccagaacagcgagttcaacagcggactgatgggctggtcgacacaccggaacgtcaaggccggcgtgagcagatcgccgtccggcaacaagtttgcagtggtgcatggggcgggaagctacgtgagcagcagcggcaagctcctaccgtcccacagcgtgtaccagagaatccagatgcagagcgacaggcactactcgctatcagcatggctgcaggtgtcgaacggcacgtcggcacatgtgagggcggtgatcaagtcccccaacggcgaacgcgtcatcgctggtgccatc

SEQ ID NO: 261463 - DNA, 441 bp, Zea mays
cggacgcgtgggcgacagcagcggcgggcgacggggaacggggaacccctgtactgtatttcgtcgtcctttgccatggcgtcgtcgatgatgagttctcgcgcgggcgcggcggcggccggaggaggagaacaccgccgtcagcacgtcaccgtggcgtgcggtgggctgacgcggccgagtaccaggcccgtgccgggcgcagctggcccacggcccgggacgccgaggccgcggggacctgctgcagctgcgggcggctcttcgtcttcgtcgccgacggggcgcgcggggccggagtgcaactggtggggcgctgccgcgcggcagcaggcgacgccgaggcggtcgaggagcgccagggccgcggtcgcgcgcgtgcccacgggcaaggggaaccgcgagctggtgagactggcgctcacgccgtccgtcgtgcgc

SEQ ID NO: 261464 - DNA, 1450 bp, Zea mays
tggttttactctgttgtgaagcagcactttgtttactgatatgacaccgtctgccagaagattgttgttcacaaggatgggcccagagggaaccacttccgtcgtgctggacctcgccaaaaggtatattttgaaccggatgaggtccatgcatgcattgtcacttgtggaggattgtgccctggacttaatactgcgagggagggtatattgtatgtggtgggtctgacatgtatggcgccaccaagatacttgggattcagggtgggtacagaggcttctatgctcgcaacaccatcaccttgactccaaagagtgtaaatgacattcacaaaaggggtggaactattctcggatcatctcgaggaggtcatgacaccgtgaagatagttgacagcatccaagatcgtgacataaatcaggtctatgtaattggtggagatggtactcaaaggggtgctggagtgatattcgaagaagttagaagacgcggtctcaaagtttctgttgctggcattccaaagactattgacaatgacatccctgtaattgacaagtcatttggtttcgacacagcagtcgaggaggctcaacgtgcaataaatgctgctcatgtggaagctgtaagtgctgagaatggtataggtcttgtcaagctaatgggtcggcacagtggttttattgcacattatgctactctggctagcagggacgtggattgttgcttgatcccagaatcaccattctatttggaaggcgaaggcggactttttagatacatagaaaaacgtttgaaggacaatggtcatatggttatcgttgttgctgagggtgctggacagaaacttattgctgaaaccatgcagtcaattgggaaagatgcttcaggcaacgagctgcttcttgatgttggcctttggttatctcagaagataaatgaacatttcaagaaaaacaagatgaccattaatctgaagtacatagatccaacgtacatgatacgtgccatcccaagcaatgcttctgataacgtctattgcacactgctggctcacagcgtggtccatggagccatggctggatatactggttttaccattggccaagtgaatggtcggcactgctacatcccattctataggataacagagaagcagaacagagtttcgataaccgacaggatgtgggcaaggcttctctcgtcgacgaaccagccaagcttcctttgcaacaaagtcgtcgaggaggcaaagaaggaacatgaaagagcaacgcgacttttagatggctcgccttcccatcgaaaaggttgacgtcgagaaggttgcggcttccaacttgggtcctactaccaactgaggtcgactgccgctgatatgtgcggcggatgaaccttttgcttaccacggtttcagtagctacggcgaccggtgtttctctcatccgagtt

SEQ ID NO: 261465 - DNA, 414 bp, Zea mays
tgtatttctacgatttgaaatatagtttgtttgggacgggagcgagtaattctcagactcctcatgtgcacagtcactttttcctcataatacatccaggtggggttcctcccccagttcactctataaaaaaactatcacacctacggtcacaaggtttcgtagaaatacagttaggttgggacgggagcgagtaattctcagactcctcatgtgcacagtcactttttcctcataatacatccaggtggggttcctcccccagttcactctataaaaaaactatcacacctacggtcacaaggcttctaccccgtcgatatatatatacaaatggattgcataaaagaaattatcgagggcgagaacactctgccgtatcagtcttgataactctggtgttgtaagaaccac

SEQ ID NO: 261466 - DNA, 292 bp, Zea mays
tgtttgagctggacgtgctgttggaatctgttagtgttacaattaagcgtgttgaggagttggtggtaagtatggaaggcaactcactgaaacctgatagctctatccacctcgatgaacatttgactagtttgaatatgaggtgcattgagtggctatatggtgaccatggacttgatgttgtggatgttctttcaaaaaaatgctggtgtgacattaccagttattttaaccaggctgaaacaaaagcaggaggagtggtcaatgtgccagtcagattttaataaagttt

SEQ ID NO: 261467 - DNA, 483 bp, Zea mays
ggtcgatacacgcctctacacaagcttgctcctcgatccatcaattgcaagaggagcaagataccaccaccgtagcaccacacgcaggtacgaagaaggcgacgaacatggcgaggctggccttggtagcggcggtggttctgtgcctcctgttagcgacagggccgcagggggccatcagcgccgaggggatggtgtcatttgacaatttgatcagctgcaaggtactgggcaactgcgacaagaacctgggccccgaggcctcccgcccagggaaacccgccaacgactacacccgcggctgcaacccgatcaccggctgtcgcggctgatcatatctctctggtcgatgtgcgcgcaatgtcaatgtcgcacgcgcgtgcaggtaccaggcctcagcgtgtggtgccgcgtgtgtgtatatattacacacatgcattatacattggtcgtcgatcggtactgtatgcatggcaactgatg

SEQ ID NO: 261468 - DNA, 455 bp, Zea mays
ggaatggatgcgatcaagctggaagggggtgccccatcgaggatcattgcagccaaggctattgtgggggctggaatcgctgtcatggggcatgttggcctcacaccgcaagctattagtgttctcggtggatttaggcctcaagggaagacggttgacagtgctataaaggttgtggagacagcacttgccttgcaggaggctggatgcttctcggttgtgttggagtgtgtgcctgctccagtggcagcagctgcaacatcagcattgaaaatcccaaccattggcattggggctggaccattctgtagtggccaggtcttggtgtaccatgacttgttagggatgctgcaacacccacatcatgccaaggtcacaccaaagttctgtaaacaatttggtaacgtgggcgatgttatcaacaaggcgctatcagagtacaagcaagaagtgga

SEQ ID NO: 261469 - DNA, 618 bp, Zea mays
atttaattccttgctttggttatttagactcatctactcatgaccaagatgtaggtgccgtgtatcctgatgaaagaccatgcaatggttctcaagaagctttagctcgatacagagagattgtacctcatcttcgcctttcgggtcctacgtcattcgccccaattattgaccttggccccacccattgtggagcaaagtggtggccaataccatgttttaagtaattattgctgacgggcaggtcacaagaagtgtagatactgaatttggtcagttaagcacccaggagcaaatgacagttgatgctattgtacaagcaagccgattcccattgtctataattcttgttggagttggagatggtccatgggatatgatgaaggaatttgatgacaatataccagctaggtcttttgacaatttccagtttgtcaacttcactgcgatcatgtcaaaaaagataagtcaaagcaaaaaggagacagagttcgccctttcagcactaatggaaattccattgcaatacaaggcaacattagaacttggaaatttaaggacgtcaattggaaaagtaacttaaccgatttcaatttcttcttcttttggcaggtattg

SEQ ID NO: 261470 - DNA, 2059 bp, Zea mays
aaaaaaaacaaataagggctaagaagataacccagtgcagctgcgaacagacgagttgtccgacgttccggtccaagtaccatgtatctcaagtacaggggaacgagcatttattatgttttctccagggttgaaagtgcagttgcgtgcagagaatgaatgcctaggcatgcagccactcgctctcggtcggtcgctccagtcctgctggcttcgcttatcttccccttttatttctcgtgatgacatggaatagtctatcctcgtctagctaatcaggtcgcggaaggaagcgcccagctctcgggcacgggcccgacgtcatatatgacttccctgtggcaggaccagacaagtttgatggcttccggagtcccgatccctgcgcctcgcggatcaccggccgggccaaaccagtggttctgtggagcgcccgtggtcctcgctcgaattccggcgtaggttgtcccgttaacggatctcccaagtacatcctgcaggaatagcgggtcgtttgagacaactgcagctgtcagatgcgcattcatcctttcgcaggcttctaagaccaactcaagctgatcctcagagtattctgtgactacctggaatggaccaaatatctcctttgtcacaagctcgaagttcccactttttagaatttcttctagaggaacaaatacagcagtaggcttcatggcaccataaattttgggaattgagtgattccctaacggttcaccaccaaacagaaccttcgatcctcttattttgagaaggttgttcatgtgctctatcatggcttctgtagtaactgtaaggactggaccaattgttaaatcttcaagcttccttctttcagaaagtttcttcattttctcaagcagaccactagaagaccaattcttgtgcatgaatagaacagactgagcagagcatttctgaccgctacaagcataagcatcctgatcgcaaacccatgcaacataatcaacctcttgaacatctggaccaagaattttccaatcaaaaccagcatcctccaatttaactcggcctttcaaatcagcagccaatttctctgctacccgtgaactcccagtgaaaagggtcattttcggattagcctctaacagaagcttgttcattacggcaccatcagaatttatgaaatccatatcctctgctggcaatccacaatcatgaagcaacctaatcatttgttccatcacaatgctaaccttgctgtcaaccttgagtactggtttatttcccatgtatagtgctcccatcaattgtagtaaggggatctccaacggaaaattgaatggtgtgataattgcaactgggccatatggccaacggtagccattacttctttgtccaagatggttacctggtacagcaaatgaccttgccagaaagcgtacctggtctccacaaaagttttccaaaaacttttgagaaacttgaacttctgcaagagcttgttggtagctcttgggagataccctctggataagtttagcaaagaaatctaagactgcaggttggcccagcatatgcgcagcttttgcagatatatctccatacatgaggtacctctctggagctttaagtgggttgtgaagtccatgctttgggcatttagataaactctccacgaatggctttatttctgttccctgaacctcagcaactttgatgaatttatcaccgttcaggggatcgactatccagttccagttagcagatgctgtccagctgccctgcacaaaattctgcacttccgctgggctggaacctgaaacctcttgcggagaaaccgtcgcgaatgacggcgtgtgcagccacctggacacgcacgcaaagggtgcagatcgacggacggcggcaaggtgctgccgcgagaggaggcgactcatcggcggctggcttcagtgcgctcctcacttcgatcgtcagtgacagagagtgggcggtgttgcgttgcgtccgctctctgcactccgctgccgcagtccggacgcgtgggcggacgcgtgggcgaacgcgtggg

SEQ ID NO: 261471 - DNA, 594 bp, Zea mays
aaggcacctgtttttggaaagcctcctcgctggtttagttatgctgaactggaacttgcaactggtggtttctcacaagcaaacttcttagctgaaggtggatttgggtctgttcatcgaggtgtccttcctgatggccaggctattgctgttaagcaacacaagcttgctagttcccagggtgatgttgagttctgctcagaggtggaagttcttagttgtgcacaacatcgaaatgttgtaatgctgataggtttttgcgttgaggacagaaggcgtttattggtttacgagtacatctgcaatagatctttggattcacatctctatggtcataatcgagaaacattggagtggactgcacgacataagattgcagttggtgctgctcgtgggctgcggtacctccacgaggaatgtagggttggctgcataatccatcgtgacatgagaccaaacaacatccttgtcacacatgatttcgagccactggttggagatttcggcctggcgcgatggcaacctgatggagacatgggtgttgaaacaagagttattggcacagttggttatctggcacctgaatatgcgcag

SEQ ID NO: 261472 - DNA, 1229 bp, Zea mays
gctcctgcgatgcccccatctctcctctcctcccctcccctcccctcccctccccatctcgctcttgcggagatcgaagagaagctgaggcctagcgccgcacccgccgccgcatcagccatcagccatggcgctggccgctcgcctcgtctcgcgctcccgtcagctacattcggttcaagcagcttttgcgaatggaggtgccactcaagttcgctcctttgccaaggatgcagctccagctgaccgtcctcctgttagtggggatgatctcctgaagggcatattctttgaggtaaagaagaagtttgagacagctcttggcgtccttaaaaaggaaaagatcactattgatccagatgacccagcggcagtttctcaatatgctcaagtcatgaagactgtaagggaaaaggcggatcttctttctgattctcaaaggattaaatataccattgagaccttcaccaagggcatccctgatgcacggacttacttgaatactcttcaacagctcagaataaagagtggtcttatagatcatcttggaattgagcctttgatgatggaagctcttgagaagattgagaaggacattaagaaaccacttttgaggagcgacaagaagaacatggccaccctcttggcagagtttgacaagattaacaaaaagcttggctttcggaaggaggatcttcccaagatcgaggaagagcttgaattggaaattgccaaaagtgagctgactgaacttaagaaggaatgcgttgaagcaatggagactcaactcaagagggaggagtttcaagatgaggagatgcctgatgtcaggaaattggacatcagaaacttcctgtaggcctgatcgacgataatctttgaggcccaacgcacctctggttttggtttcaagttgatcggtgctccacacctatgaatgctgctccttccctttttgtaataaaagaaactgcacggttgggtatgagttggattaaatcttgcctttctgttgttctggactcttgtggctgcagcaacaatgggatgtccttgtgttatagcatatgaactcgttacgaggcattcaggaaaatggtgatacctggtatttaacctttattttggtactcaatttggagagcaaagatccatttgtttcaaaaaaaaaaaaaaaaaaagggcggccgttcgcgatctagaaccccacgcgtccgcggacgcgtggg

SEQ ID NO: 261473 - DNA, 1130 bp, Zea mays
tttataacagcgggggagcaggcacaaagcggagctcctgcgccgccccatctctcctctcctcccgtccgtatctctctcttgctcgcactcgcggagatcgaagagaagcgcaggaggccccagcactagcgccgccccgccgccgcatcagacatggcgctggccgctcgcctcgtctcgcgctcccgtcagctatattcggttcaagccactttggggaatggaggtgtcactcaagttcgctcctttgccaaggatgcagctccagctgaccgtcctcctgtcagtggggatgatctcctgaagggcatattctttgaggtaaagaagaagtttgagacagctcttggtgttcttaaaaaggaaaagatcactattgatccagatgacccagcggcagtttctcgttatgcccaagtcatgaagactgtaagggaaaaggcggatcttctctctgattctcaaaggattaaatataccattgagaccttcaccaagggcatccctgatgcacggacttacttgaatactcttcacagctcagaataaaagtggtcttatagatcatattggaatcgaacctttgatgatggaagctcttgagaagattgagaaggatattaagaaaccactcttaaggagtgactagaagaacatggccacccttatggcagagtttgacaagattaacgcaaagcttggcattcggaaggaggatcttcctaagatcgagaaagaacttgaattggagattgccaaaagtgagctgactgaacttaagaaggaatgtgttgaggcaatggagactcaactcaagagggaggagttccaagatgaggagatgcctgatgtcaggaaactggacatccgaaacttcctgtaggcctgatcgacgataacctttgaggcattgcaaatcacccagcccacctgtgattttttttttctttggttttggtttcaagttgatcggtgctgtaagctacacctatgaatgctgctccttcctttttttgtaataaaaaaactgcaccgaggtacacaaacacagtcaaccgttgagttgagttgaatttaattcttcttgccaaaaaaaaaaaaaaaaaaaaaaaaaaaggccggccgct

SEQ ID NO: 261474 - DNA, 962 bp, Zea mays
cccacgcgtccgccgaactgagcagttcgaccaggcagccatccacctccaaccccccttcgcctgcgcaaatcgttaccatcccagcgagaaagatggcgcgcgtctccaatgccaagaagcggcagggcgccaagcccgcctccgcgctcagcagcaccgacaccagcaccgccgcaaagaggaaggccgaggacgaccgccccgtgcgcgtctacgccgacggcatcttcgatctcttccacttcggccacgcccgcgccctcgagcaggccaagatgctgttccccaacacctatcttctcgtcggatgctgcaacgacgagctaacctaccgctacaagggcaagaccgtcatgacccaggaagagcgatacgaatccctgcggcactgcaagtgggttgatgaggtcattcctgatgcaccgtgggttctcacacaggagtttattgataagcatcagattgactatgttgctcatgatgcgctgccttatgctgatactagcggaacagcaaatgatgtctatgaatttgttaaaaagattggaaaattcaaggaaacaaaaaggacagacggggtttctacttcagatctcataatgaggatcttgaaggactataaccagtatgtcatgaggaatttagcacggggctactcgaggaaagatcttggtgtgagctatgtcaaggagaaacaattgcaagttaatatgaagatcaataaactgcgggagactgtgaaggcacatcaggaaaagttgcaaacagtggcaaagactgctggtttgaatcatgaagaatggcttgctaatgcggatcgctgggttgctggtttcctagagaagtttgagcaacactgccacaatatggaaactgcgatcaaggatcggatacaggagaggctagggaaacagttgagcaaaggaataatcgctggtcttgtgcaggaaccggtgaca

SEQ ID NO: 261475 - DNA, 1762 bp, Zea mays
cacaaactcttctccaataaattacgacccccagccaagctttggagtgcggttccccccgggggcggcctcccccacttcctccctcgccccgccggtggtgcctatggagcttcacgccggcaaccgcgaccgcctcgtcgccgcgctccgcggccacatctccgcctccgcgcgcccgctccacggcctcgtcctccttcagggcggggaggagaagacacggtactgcaccgatcacctcgagctcttcaggcaggagagctacttcgcctatctctttggagtgcaggaaccagggttctacggcgcaattgacatcgcctctggacagtcaattttgttcgctccaagattgccagctgactatgctgtttggatgggtgaaataaaacctttgtcgtacttcagggatacatacaaggttgatatggtcttctatgttgatgagattgcaagggttgtgcaagatcatttcgggaaccatggaaagcctcttctgtttctgctacatgggaggaatactgactctggaaatttctcaaagcctgctagttttgaggggatggagaagtttgatactgatttaattacacttcatccaattttaaccgaatgtcgtgtgattaaatctgatctggagcttgctctcatccggtatgctaatgatgtcagttctgaagctcacattgaggttatgagacgagcaaggccaggcatgaaggaatatcaattagaaagtatcttccttcaccatgtttatatgtatggaggttgccgacattgctcttatacatgtatatgtgctactggagataatagtgctgttctacattatggacatgcggcagctccaaatgaccggactttgaatgatggagacatggcactaatggatatgggagctgaataccatttctatggatctgatatcacatgctcataccctataaatgggaaattcaacagaagtcagacaataatatacaatgctgtgcttaaggctcataatgctgttatatcagacatgcggcctggagttaattggatggatatgcacaaattagcagaacgggcaatacttgaatctctcaggaaggaacaaattgtacaaggggatgttgatgatatgatggctcaaaggttaggggctgttttcatgcctcatggtcttggccacttacttggtattgacacccatgatccaggaggctaccctgagggattggagaggcccaaggatccaggactgagctccttgcggaccacaagagaactgaaagaaggaatggttatcacagtggagccaggctgctatttcattgatgctttgctaactaaaacaagggatgatccaatttcctcaaagttcttcaactggcaagaggttgaaaagtataaaagctttggtggcgttcgcattgaaagtgatgtgtatgtgacggctcaaggatgccggaacctcacaaactgcccgcgagagacctgggagatcgaggctgtaatggctggcgcaccatggcctctgccggcttcaagttctatggtggtagcagcagagaatagcaatgacatatctaaagcgtcgtaattttctctatgctcaatccatatcccgagttgaaacaaattcgatctggattcttatattcaataaatagtgaggctgaggcgcaaaacattgttggattgatgactggaaaacatttcatacgctcacttattttgtaagctctctgttatgtgtttgagaacgatcgca

SEQ ID NO: 261476 - DNA, 1353 bp, Zea mays
cggattcagatcgccgccgcggcgactccccgagcagaagaacccgatcgaacgcggccgcggcggcgactccccgatctcagatccctgctgcgagcgaagggttccattcgagcagagatggcggcggcatgggaggtgctggctgtgttgctcgtcgcggcgcaggtggcgtcagcggcgcaggtcacggcgccagcgttcctgtgggcgcccaaaaactacggattcagctctgatgatgctaaggaggtagtccattaccaaacaatctcaccaaagagcttagctaaatctgttctcgaggaaggtggctggtcaaacttcatgtgctcaagggaggatactcagaataatgttgatgttgccattgtttttattggctcaaagctgcaatcgtcagacatatctaaagataagcaagttgatccagctttagcagacacactgaagctctccttcacacgctcagagttttccatggcattcccctacgtttccacaacagtcgacgagagactggaggactcgttgctatccagcttcgccgagaactgcaacaatggtttcggaagaaaccgcgtcacctacacagacacgtgcgccgtgagtggccaagatctgaagacgtaccacaacatggatgctatcaatgacttggtagtgtcaggaagaaccaacccgagtggacagactgatgtaatcgtcttctgcagcggcgggttcgagaagttaggcaccacggaatcggaaggggagctgctttcccagcttgtcgacttgctgaagctgtctggggctagacacacgattctctacgcttcccagccatctggttatctactggagaacccttccggctcgccagtggctaggcaccttgcggagaggactaacggtacaaaaactggcctactgagcaaatgtgacggagagtgcctagtcaaatcaactcttcttgaaggaacctttgtcggaatagtgctccttatcatcttgatatcagggctcatgtgtatgatgggaatcgatactccctccaagtttgaagctccccaggagtcttgatctcccttcgaagcagaacccttgttttgttggtctgcactgtggatagatattattcagtttccccctttgaaagcgcctttcgtataattattattatttttttactgagccatctgttatttacgatgtgctcaaacttttgacaccaaacgaatgcatgtgtgtgaggcttgtgctgtgaccagacatagcattgcctccaggtgttttctgtgaataacctggaatttcaggtgggtactgtgcatcaaataaaaaagatgaaatcttgctgttgcacat

SEQ ID NO: 261477 - DNA, 1527 bp, Zea mays
acgggtagatgccactgccgtcccctacagaagttcgatacagttcggattcatatcgcggccggtgcgaacgcacgaaggcacgaacggtagaacccgaccgagcgcggcagcgcaaacctccgatccctgctgcgagcaagggatggcggcggcatgggcagtgctggcggcggtcctcgtcgcggcgcaggtggcgtctgcggcgccggtcacggcgccagcgttcctctgggcgcctaagaactacggattccgctctgatgatgctaaggaggtagtccattatcaaacaatctcaccaaagaacttagctaaatctgttcttgaggaaggtggctggtcaacctttatgtgttcaagggaggatactgagaagcatgttgatgttgccattgtttttattggctcaaagctgcaatcgtcagacatatcgaaagataagcaagttgatccagctttagcagacacactgaagctctccttcacacgctcagagttttccatggcattcccctacgtttccacgacagtcgacgagagactagaggactcgttgctatccagctttgccgagaactgcaacaatggtttcggaagaaaccgcgtcacctacacagacacgtgtaccggtcaagatctgaagaaataccacaacatggatgccatcaatgacctggtagtgtcaggggtagcgtcaaggagagccaaccacccaagtggacagaccgatgtaatcgtcttctgtagcggcgggttcgagaatccaggcactgcgaaatcagaaggagagctgctttcccagcttgtggactcgctggacttgtcgggagccaaatacacggtcctctatgcgtcccaaccgtctggtttgctggagagcccttcgggcctgccgctgggtaggcatctcgcggagaagaagactaacggcacgaaagctgtccagggcgaaaaatgcgatggcgagtgcctcgtcaaatctagtctcctcgaaggaactttcgttgggatagtgcttctcatcatcctgatatcaggactcatgtgcatgatgggcatcgatactccctcgaggtttgaagctccccaggagtcttgatctctcccttggactgcagaatccgcgggggggttgtgacgagggcacgcggcggcgttgaggggggccggtgttctgttggtctgcactgtggatatatatcgtttagcttcccatttggaagggagtacgccttgtgtatttttttgtaccgagccaactgtcactcacgatgtgctagaattttttggtgtaatatttgcatgcgtttcgcgcctatggacaactaataagctgaggcattgcagcagataaattcatgtgctgcgtgaggcaggcttgtgttgtgtaccagacgcacagcattgttgcctccagctagtgctttctgtgtgaaataaacctgaaacccagtcccaggccaccgcaccaataaagatgggtactatgcatcaatcaaaaaaaaaaaaaaaaagggcggccga

SEQ ID NO: 261478 - DNA, 376 bp, Zea mays
ggcaacagcaagatttcatcttttttatttgatgcacagtacccacctgaaattccaggttattcacagaaaacacctggaggcaatgctatgtctggtcacagcacaagcctcacacacatgcattcgtttggtgtcaaaagtttgagcacatcgtaaataacagatggctcagtaaaaaaataataataattatacgaaaggcgctttcaaagggggaaactgaataatatctatccacagggcctagtcaaatcaactcttcttgaaggaacctttgtcggaatagggctccttatcatcttgatatcagggctcatgtgtatgatgggaatcgatactccctccaagtttgaagctcccccgaacgcgtggg

SEQ ID NO: 261479 - DNA, 968 bp, Zea mays
aaaacccgggccgaccgcacgcgtccgctggcgcgtgggccgccgcctccgacatcgtcccttcgtccccacgagcaaccgataatccgccggcgttgagatgttggtttatcaggatctcctatctggcgacgagctcctgtcggattcattcacctacaaggagctcgagaacggcgtcctgtgggaggtcgagggaaagtgggtcacccaaggtcctgttgatgtggacattggtgccaatccatccgccgagggtggtgaggacgaaagcgttgatgacacagctgtgaaggtggttgatattgttgacacattccgtctacaggagcaacctccttttgacaagaaatcatttgtgtcttacatcaaaaaatacatcaagaatctcactgctgtgttggagccagagaaagcggatgagttcaaaaagggtgtcgagggtgcaaccaagtttctccttagcaagctgaaggacctccaattttttgttggtgagtccatgaaggatgatgcgtctgtggtattcgcctattacaaggatggtgccactaatccgacattcctctatttctctcatggtcttaaggagatcaagtgctaggcgtgcggcgaaattagttacccatgttgggtactatctatgtactattattatatccaaaactatagttgtcctggctgaattgaactcaaaagggtttgtttgagaaaaaattgtcccaagattggattgcttgttaaagctcaatattgttattgaagtgttattgcttaaaaaaaaacctgaaaaaaccaaaacaaaaaaacaggaactaaacaaaattatataaaaatgaacacctcacaatgatgacatccttgaatgtactaagacccttataaagctcaagtgtacagaatacaactctaattctacgaaaatggagaccattttggtaggcccattttgtaccatgctaaattca

SEQ ID NO: 261480 - DNA, 1178 bp, Zea mays
cccacgcgtccgcccacgcgtccgcccacgcgtccgcagcagcttctgcttgctctggggggaaggagagagagagagagcgagagagagatctagtagagaggctagctaggtggtcctcgaacgaagatgttggcggtgttcagcgggcaggtggtggaggtgccggcggagctggtggcggcgggcagccggacgccgtcgcccaagacgaaggcgtcgcagctggtggggcgcttcctggccgcctccgagccggccgtgtccgtgcagctcggcgaccacggccacctcgcctactcccacaccaaccaggcgctcctccgccccaggtcgttcgcggccaaggacgaggtgttctgcctgttcgagggggtgctggacaacctgggtcgtctgagccagcagcacgggctgtcaagcaagggcgccaacgaggtgctcctcgtcatcgaggcctacaagacgctgcgcgaccgcgcgccctacccggccagcttcatgctcgcccagctcaccggctcctacgccttcgtcctcttcgacaagtccaccaactccctgctagtcgcatccgaccccgagggcagggtgccgctcttctgggggatcaccgccgacggctgcgtcgccttctccgacgacatcgacatgctcaaaggctcatgcggcaagtcgctcgcgccgttcccgcaaggctgcttctactccaacgccctcggagggctcaagtgctacgagaaccccaagcacaaggtcaccgctgtccccgccgacgaagaagagatctgcggtgccactttcaaggtggtggaagggtctactgtcctgacggcgctgcactgatctatcatcatcaggcggaggcgatgcgatgatgatgcagaactttgtacatgcgttggtggatggtggtgtaacatagtggctgccaacaagtcatgctcatgcaaaccgatgaatctatctctgtatcatcgatctcggttgcttgctagtccagactccagacatggctatatatatatagctggtgctaataaataggagtataatcgtcatatcgatcggttgcgtgtggaatgccaatcatgtgtgtaatctgttggcaaataacaaacctctgttcctcccaacaaaaaaaaaaaaaaaaaaagaatataaaaccatataaagac

SEQ ID NO: 261481 - DNA, 612 bp, Zea mays
cgtaggcgagggtctcttttccaaaaagggggggtcacgacggatcgagcatctgggccgtcggggccgcggatcggacggctgccaccgcggcccggatgtttccctgccaccataaatgcgccgcggccgtcctcgctagccgaacccttcgctgcgccgccgcctccgacatcgtctcttcgtccccacgagcaaccgataatccgccggcgctgagatgttggtttatcaagacctcctatctggcgacgagctcctgtcggattcattcacctacaaggagctcgagaacggcgtcctgtgggaggtcgagggaaagtgggtcacccaaggtcctgttgatgtagacattggtgccaatccatccgccgagggtggtgaggatgaaagcgttgatgacacagccgtgaaggtggttgatattgttgacacattccgtctacaggagcaacctccttttgacaagaaatcatttgtctcttacataaaaaaatacatcaagaatctcactgctgtgttggagccagagaaagcggatgagttcaaaaagggtgtcgagggtgcaaccaagtttctccttagcaagctgaaggaccttcaattttttgt

SEQ ID NO: 261482 - DNA, 1165 bp, Zea mays
cgcacccgtgcggcagcttctgcttgctctggggggaaggagagagagagagcgagagagagagagagatctagtagagaggctagtaggtggtcctcgaacgaagatgttggcggtgttcagcgggcaggtggtggaggtgccggcggagctggtggcggcgggcagccggacgccgtcgcccaagacgaaggcgtcgcagctcgtggggcgcttcctggccgcgtccgagccggccgtgtccgtgcagctcggcgaccacggccacctcgcctactcccacaccaaccaggcgctcctccgccccaggtcgttcgcggccaaggacgaggtgttctgcctgttcgaaggggtgctggacaacctgggtcggctgagccagcagcacgggctgtcaagcaagggcgccaacgaggtgctcctcgtcatcgaggcctacaagacgctgcgcgaccgcgcgccctacccggccagcttcatgctcgcccagctcaccggctcctacgccttcgtcctcttcgacaagtccaccaactccctgctcgtcgcatctgaccccgagggcagggtgccgctcttctgggggatcaccgccgacggctgcgtcgccttctccgacgacatcgacatgctcaaaggctcatgcggcaagtcgctcgcgccgttcccgcaaggctgcttctactccaacgccctcggagggctcaagtgctacgagaaccccaagcacaaggtcaccgctgtccccgccgacgaagaagagatctgcggtgccactttcaaggtggtggaagggtctactgtcctgacggcgctgcactgatcgatcatcatcaggcggaggcgatgcgacgatacagaactttgtacatgcgtggtgggtgtaacatagtggctggcaacaagccatgctcatgcaaaccgatgaatctatctctgtatcatgcatcgatctcggttgcttgctagtccagactccagactccagacatggctatatatagctggtgctaataaataggagtataatcgtcatatcgatcggttgcgtgtggaatgccaatcaagtgtgtaatctgttccaaataacaaacctatgttcctccaaaaaaaaaaaaaaaaaaaaaaaaaaaaaaaaaaaaaaaaaaaaaaaaaaagggggggg

SEQ ID NO: 261483 - DNA, 574 bp, Zea mays
gggtgtcgagggtgcaacacagcagtgagattctttttgaactcatccgctttctcgggctccaacacagcagtgagagaaagcggatgagttcaaaaagggtgtcgagggtgcaaccaagtttctccttagcaagctgaaggacctccaattttttgttggtgagtccatgaaggatgatgcgtctgtggtattcgcctattacaaggatggtgccgactaatccgacattcctctatttctctcatggtcttaaggagatcaagtgctaggcgtgcggcgaaattagttacccatgttgggtactatctatgtactattattatatccaaaactatagttgtcctggctgaattgaactcaaaagggtttgtttgagaaaaaattgtcccaaaaaaaaaaaaaaaaaaaaaaaaaaaaaaacaaacaaaaaaaaaataaaaaaaaaagaaaacacaaaaaaaacaaactcacaaataaccaaaaagacaaaaaaaaaacacacaaaaaaaaaaacacacaaaaaaaaaaggggggggcctttttaagggccccagtttatcatcccgggctt

SEQ ID NO: 261484 - DNA, 779 bp, Zea mays
cccacgcgtccgcccacgcgtccgctgtctcgtgggcgataatgcgccggcgctgagatgttggtttatcaagacctgctatctggcgacgagctcctgtcggattcattcacctacaaggagctcgagaacggcgtcctgtgggaggtcgagggaaagtgggtcacccaaggtcctgttgatgtagacattggtgccaatccatccgccgtgggtggtgaggatgaaagcgttgatgacacagccgtgaaggtggttgatattgttgacacattccgtctacaggagcaacctccttttgacaagaaatcatttgtctcttacataaaaaaatacatcaagaatctcactgctgtgttggagccagagaaagcggatgagttcaaaaagggtgtcgagggtgcaaccaagtttctccttagcaagctgaaggaccttcaattttttgttggtgagagcatgaaggacgaagcgtccgtggtattcgcctattacaaggatggtgccactaatccgacattcctctatttctctcatggtcttaaggagatcaagtgctagattagttacccatgttgggtactatatatgttctattgttatagccacaactatagctgccctgcctgaactgaactcaggttttttttaagaaaaaactgtccaagattggattgcttgttaaagctaaatattgttattgacgtgttattgcttagttgtcattgtctttcagctagtcattttatatttttgttttttaaaaaaaaaaaaaaaaa

SEQ ID NO: 261485 - DNA, 1619 bp, Zea mays
aaaaaccctagaactccaaaaccttcagccccacgctatggccctcgcactgcgcctccgtcgggtcctcgcggcggcctccaccgcggcacccctgctccgcccgtccacctcggtcgcccggccttgcccgctcgttcccctcgcctccccggtcgcgccgctcccgctgccgccgtggcgattcctgcccggcggcggcgccgggttcaggtccacggcggcggcggctgcgcggggcgggaccgactatgggacggacgacagcaagatctcccccgacgagatcctcttcgagggctgcgactacaaccactggctcatcaccatggacttcccggaccccaagccgtcgcgcgaagagatgatcgagacatacctccagactctcgccaaggtcgtcgggagttatgaggaggccaagaagaggatgtatgcttttagtacgacgacttatgttggttttcaggctgtaatgaccgaggaaatgtcagaaaaatttcgcggtttgcctggagtagttttcattttgcctgattcatatctatatccagaaacaaaggagtacggaggagacaaatatgacaatggtgtcatcactccaagaccaccacctgttcattatagcagaccatcaagaactgacaggaaccgtaactaccgaggaaactaccaggatggcccttcacagcaaggaaattaccagaacaaccgtcctccaccagaaggtggttaccagaacaacccgccgcagcaaggaaactaccagacataccgctcgcagcaagatggaagaggctatgccccacagcagaattatgcacaaggtggtcaggatggtagaggttttggaaggaatgattacacagaccgttcaggctacaatggaccacctgattttcgaagtcaaactcagtaccaagggcatgtaaatccagctgggcaaggtcaaggttacaacaacccccaagagcgtagcaacttctcgcaagggcagggaggaggttttaggcctggtggtccttcagcacctgggtcttatggccaaccatcagcacctggatcttatggtcaacctaatacacttggtaactatgggcaggtacctccatcagtgaatcctggtggtaacagagttcctggtgtgaatcctagttatggtggggatggcagacagggggctggaccagcatatggtggagataactggcaaagaggttctggtcagtatcctagcccaggtgaaggacaaggaaactggcagggaaggcagtaagagctgacgtgttccactgaagacaagaatggcacttgagatttagaaatctccatctgtaaaataaacgactgtgatgcattactctttttttttttcttgcatttgaactctaaacttatgggcatgcgttattaccaaacctacggatgcaaattcattttagttttttgggccaaatgttggcatttttaaatggcgcagaatgtggaactcccctttgtcttcgtgtattgtttgcaggtatgctgtccctgtaaaacacgtgctaattcctatagtattttcccgtaaaaaattaaaaaaaacacaaaaaaaaaaaaaaaaaaaaaaaaataaagaa

SEQ ID NO: 261486 - DNA, 643 bp, Zea mays
ccggaattcccgggtcgacccacgcgttcgcccacgcgtgcgtaaggtcctgtcgatgtggacattggtgccaatccatccgccgagggtggtgaggacgaaagcgttgatgacacagctgtgaaggtggctgatattgttgacacattccgtctacaggagcaaccttcttttgacaagaaatcatttgtgtcttacatcaataaatacatcaagaatctcactgctgtgttggatccagagaaagcggatgagttcaaaaagggtgtcgagggtgcaaccaagtttctccttagcaagctgaagggcctcccaatttcttgctggtgagtccatgaaggatgatgcgtctgtggtattcccctattacaaggatggtgccctctaatccgacactcctctatgtctctcatggtcttaaggagatcaagtgctaggcgtgctggcgatattagttacccatggtgggttccatttatggcccattattaaatcccaaactatagttgtcctggctgaattgaactcaaaagggtttgttttagaaaaaattgtcccaagaatggattgcttgttaaagctcaatattgtttttggaaaaaaaaaaaaaaaaaaaaaaaaaaaaaaaaaaaaaaaaaaaaga

SEQ ID NO: 261487 - DNA, 414 bp, Zea mays
ggaatattcgggtcgacgcacaccacgcgcgcgcgcatgactacaaagcgtgtgacttgagagagggtgtgtgaggtgcaaccaagcgtgtgcttatgaagggagacgacctccaactgtttcggggtaagtccatgacgcatgaggcgtttgtgacgtacttcgcctatgccaaggatggtgcccctaatcttggcactcctctattgctctcatgggctataagagagatcaagtgcttggcgtgcggcgaaattagttacccatgttgggttctatctatgtactgttattatatccaaaactatagttgtcctggctgaattgaactcaaaagggtttgtttgagaaaaaattgtcccaagattggattggttgttaaagctcgtttttgtaaccgcagtgttttacaat

SEQ ID NO: 261488 - DNA, 513 bp, Zea mays
ccacgcgtccgcgcgcctttcccgcaaggttgcttctactctaatgcccttggaggattgaagtgctgcgagaatcccaagaacaaagtgactgccgttcctgcaaacgaggaggaaatctgcggcgcaaccttccaggtggaaggggctacggtgctcacagcgctgcattaggagatgaggtgtcttcctccgtctccaggcctggactgggggcaactgtacatggtgcctggtggtgtaatgtaacataacggcaatggcatatgcagctgatcctggtctgcctgtatcatctcctcccacccgtaaagagaagttctttctgccgccatcgccatggtcagtcagagcttctctgctatagctgctggatgtgttgtgtgttgcgtctgtatcgtctctagtttgttcgacttacgtggaaacctgagatcagaccgggtatcgagcggctgcttgcatggatggaatgctgtaatcatctgtagtgacaactccattttccttgtc

SEQ ID NO: 261489 - DNA, 445 bp, Zea mays
tccacgcggtctccaagcgctccatcagtccctcgggccatccctagcttcatcccaattcttgttcgtgcagctgctcgtggcagcctgagaccaggcgcgaggatgctggcggtgttcagcggcgaggtggtggaggtgccggcggagctggtggcggcggggagccggacgccgtcgcccaagacgaaggcgtccgagctcgtcgcgcgcttcctggggaccagctgccccgccgccgtgtccgtgcgcctcgccgacctcggccacctcgcctactcccacgccaaccaggccctcctccgcccaaggtcgttcgcggcgaaggacgaggtgttctgcctgttcgagggggtgctggacaacctggggcggctgagccagcagtacgggctgtccaagggcgccaacgaggtgctcctggtcatcgaggcctacaaggcgc

SEQ ID NO: 261490 - DNA, 562 bp, Zea mays
tgtttccatctcgctataaacccttcacgccccggcgtccgcggctcgctcctgttcgccccgccggctcgcctcgcgtcgcctcactagggtttgcagttcccgtcgcgggcgaaggcggcgtcgtctcgtggcggcgccgtctccgtgtgccttcccgctcccaagcaatggccttggaagatgggagcccagctacttttactccacaagtgattgctaatgcatttgtcaaacaatactatcaaactcttcgatatgccagagaggatgcctataaattctataatgacaaaagtattcttggtcgaacagattctaatgggaaaatgatttgtgtaaccacaattgatgatatcaaggagcaacttgtgtctacagattgtgctgactgtttgatagagatcgagactgttgatgcacagccatcccatgtggatgggtgtgatctttttggttgctggatattttacaacggctgttgtgaaccagaagtttatacaatcattttttctcgctccacaggaaaatagtggctattatgttttgaatgatacattca

SEQ ID NO: 261491 - DNA, 457 bp, Zea mays
tcgagttgtttatgcttgctctgggggggaggagagagagagagagcgtgagagagatctagtagagaggctagctaggtggtcctcgaacgaagatgttggcggtgttcagcgggcaggtggtggaggtgccggcggagctggtggcggcgggcagccggacgccgtcgcccaagacgaaggcgtcgcagctggtggggcgcttcctggccgcgtccgagccggccgtgtccgtgcagctcggcgaccacggccacctcgcctactacccacaccaaccaggcgctcctccgccccaggtacgtacgtacgttcgtgtactgctggcaggcaggcaggcatcttcttatcctccatgggcactatcccctacgactacgagtattagtacttgtcggatctgtgttggatctcgcgtgctcaagcaagccgactgagatcttctactagttctttc

SEQ ID NO: 261492 - DNA, 532 bp, Zea mays
gttgtcctcacattcaggttacaaaatgagcagtaaaatatagaacatgttacaaatcttttctgtttcttatgatcctgtgagcacaaaagaacggagatatccgtatcattccccactcactagaaaaaacgattatcacaactaaacgagctaattttgtcattcggttagcacaacataaatgcccattaggtgttagtcaagaagcaagctgctaacctatgtgcatttacacaagtgtcctgtacacagttgtagtagtagtacattacatgcaagagcacccattggcactatctcagtagggtatctttcttaactgccaatcatgagcttgcaacttgcatggtgagagcatgaaggacgaagcgtccgtggtattcgcctattacaaggatggtgccactaatcccacacccctctattatatctaccggtcttaaggagatcaagtgctagttcagttcaggcagggcagctatagttgtggctataactaatacgcacgcgtgggtcgacccggaaattc

SEQ ID NO: 261493 - DNA, 721 bp, Zea mays
cttcttggacccttagccgtcgcgcgaagagatgatcgagacatacctccagactctcgccaaggtcgtcgggagatatgaggaggccaagaagaggatgtgtgcttttagtaccacaccttgtgctggttatcaggctgctatgaccggtgaaatgtcagaagaaatcaccccaggtcctgtggaggtatacatatttggccagccatccatctatggcggagacgaaggaagccttgatgacacagccctgacggtggtggatattgttgacacattccgtctacaggagctacctccttttgacaagaaatcatttgtctcttacatcaaagaatacatcaagaatctcactgctgtgttggagccagagaaagcggatgagttcaaaaagggtgtcgagggtgcaaccaagtttctccttagcgagctgaaggaccttcaattgtaagttctatcaataaatacattgcatatctattattagcttagtaatgctatgtgaagtatcctctgcaagttctatacccaaatctattggtaatacatttcatatctattgttaacttattatagcaatgcagcgtgaactactatactatctttttctaatatgaattagaacttggtattctcatacacaaatgtatatctagactttgtgatcccacgtttgcagattgtaccatcctatctttttctaatatgaattagaactttt

SEQ ID NO: 261494 - DNA, 352 bp, Zea mays
agacaagaagcagggtgctaacctatgtgcatctacacaagtgtcctgtacacagttgtagtagtagtacattacatgcaagagcacccattggcactatctcagtagctggtctgttctgttcttaactgccaatcatgagcttgcaacttgcatcactcgctgttctgttcgaaaagcaaactccatgaagaagctgctacgacccagttttgcagttcatatcgttggttgacaggagccagcacttccaatagccaactggtttcaaaagcagtgcacgtggtatcaccgtcaatggcggaatgttctgacagcttggtcaattcttctccggcaaagcgggcagttt

SEQ ID NO: 261495 - DNA, 337 bp, Zea mays
gctcttccgcctccgacatcgtctcttcgtccccacgagcaaccgataatccgccggcgctgagatgtcagatgatgaagaccttgcatttggcaaacagttctatcaaactctatgatatgccagagaggatgcctataaattctataatgacaaagtattcttggtcgaacagattctaatgggaaaatgatttgtgtaaccacaattggtgatatcaaggagcaacttgtgtctacagattgtgctgactgtttgatagagatcgagactggtgatgcacagccatcccatgtggatggtggtgatcatttttggctgctggatattttacaac

SEQ ID NO: 261496 - DNA, 523 bp, Zea mays
gagagagagagagatctagtagagaggctagtaggtggtcctcgaacgaagatgttggcggtgttcagcgggcaggtggtggaggtgccggcggactggtggcggcgggcagccggacgccgtcgccttctccgacgacatcgacatgctcaaaggctcatgcggcaagtcgctcgcgccgttcccgcaatgctgcttctactccaacgccctcggagggctcatgtgctacgagaaccccaagcacaaggtcaccgctgtccccgccgacgaagaagagatctgcggtgccactttcaaggtggtggaagggtctactgtcctgacggcgctgcactgatctatcattatcaggcggaggcgatgcgatgatgattcataactttttacatgcgttggtggatggcggttttacattatggctgtcaacaagttttgctcatgcaaacctttttatctatcttttgtttattcatcttttttgcttgctttgtccttactccattcacggctttttatatat

SEQ ID NO: 261497 - DNA, 169 bp, Zea mays
ctcaaaagggtttgtttgagttcaattcatccaggacaactatagtttgggatataataatagtacatagatagtacccaattctatagttgtcctggctgaattgaactcaaaagggtttgtttgagaaaaaattgtcccaagattggattgcttgttaaagctcaat

SEQ ID NO: 261498 - DNA, 720 bp, Zea mays
gaaggggaagagtcagcaatggaggcgaggattgcaggagtgcccgaagatgaagagtccggcctcctcccccgcccgtccgcagccggccgacggccgtcctcccgcggcccccgcttcccgcctccaccggcagcctgggcgacggtggacggccccctcgggcttccgctggaggacgcggagggccacgcccgccgcttcttcatgtggggtttcgcgtgcctccccttcctctgggccatcaactgctgctacttctggcccgtcctccgctcgtcggtcgcctcctcgcccgccgccttcgcccccatccgcccctatgttgtgcggtcggcaattggcttcaccatcttctccgttgttctggtcacctgggccacgaccttcgtcgtcggaggcgagcggttatttgggccagtgtggaatgatcttgtgatgtacaatgtcgccgacaagcttggcatctctggattcatgggatgagcctgcgatgtctccctcgcttcagctgggctcgcttcacccaagcgtggaacgatctattccatccatctccctagggattaccactgtctcatgtactttattgttgttattattattgacagactgactggtcagaacaatgtctagcatggctagctcatgttatagaaggaatatggatcgatgaaaacgatgataaatggaactcaatctgatggacaaatttgtgtg

SEQ ID NO: 261499 - DNA, 1639 bp, Zea mays
ggaaatacaacgtttctttctctgggtcctaaacaagaggctgatatttacagtgatcagtctggaggctgtgttgcattcctggcaaatattgattcagccaatgacaaagttgtcactttccgtaacaggcaatatgatcttcctgcttggtcagttagcattcttcctgactgcaggaatgtggtgttcaacactgcaaaggtgcaatctcaaacttcaatggtgaccatggttccagaaagtttgcaagcatcaaaacctgagcgatggagcattttcagggagagaactgggatttggggtaaaaatgactttgtccggaatggatttgtggaccatattaatacgacaaaggactccaccgactacctatggtacacaacaagttttagtgtggatggaagttactcctcaaaagggagccatgctgtccttaatatcgactccaatggccatggtgtccatgctttcttgaataatgtgctcataagtagtgcatatggtaatggctcacaatcaagattcagtgtcaaattgcccatcaacctgaggactggaaagaatgaacttgcccttctaagtatgactgttggtttacaaaatgcacgattcgcttatgaatggataggagcaggctttacaaatgtgaacatctctggtgtgagaactggaaccatagacttgtcttcaaataattgggcatacaagattggactggaaggggaatattataatttgttcaagcctgatcagacaaataaccaacggtggataccacaatccgagccaccaaaaaaccaacctttgacatggtataaggtaaatgttgatgttccacaaggagatgacccagttgggatagacatgcagtctatggggaaaggcttggcttggttgaatggaaatgccatcgggcggtattggccgaggaccagttctattaatgataggtgcactcccagttgtaactacaggggaacatttattccagacaagtgcaggacaggttgtggacagccaactcagagatggtaccatatcccacggtcatggtttcatccctcagggaacatcctcgtggtctttgaggagaagggtggggatcccacgaagatcacattctcaagaagagctgtgacgagcgtgtgctcctttgtgtcagagcacttcccttccatagacttggaatcctgggatgaaagtgccatgaccgaaggcacacccccagccaaagcacagctgttttgccccgagggtaaaagtatatcttccgtgaagtttgcgagcttgggaaaccccagtggaacctgtagatcataccaaatggggcgctgccaccacccgaactccttatctgttgttgagaaggcttgtctgaacaccaacagctgtacagtctccctgacagacgagagctttgggaaggatttatgccctggagtcaccaaaacacttgccatcgaagcggactgttcttagtgacgtacggagtactaagtatctcggtgtgcatctaggttccaagtatgcccgtcaaaattctaaaattgtagtgcttcttgcacggcaatgctattgtaacctggatttacccgctaatatgtttcctaaaaaaaataaattatttatttttttt

SEQ ID NO: 261500 - DNA, 487 bp, Zea mays
gccccgagggtaaaagtatatcttccgtgaagtttgcgagcttgggaaaccccagtggaacctgtagatcataccaaatggggcgctgccaccacccgaactccttatctgttgttgagaaggcttgtctgaacaccaacagctgtacagtctccctgacagacgagagctttgggaaggatttatgccctggagtcaccaaaacactcgccatcgaagcggactgttcttagtggcctacggagtacgaagtgtctcggtgtgcatctaggttccactgcaagtatgcccgtcaaaattctaaaactgtagtgcttgttgcacggcaatgctattgtaacctggatttgaatgtatccatctgagctaggttatgtttcaggagctttcttaaactaacgttgttgctgagcagcatgaaatctgattagcgcaaacaaaaaaaataataaaaaaaataaaatttatatgtattttaatataaaaa

SEQ ID NO: 261501 - DNA, 1573 bp, Zea mays
gacccacgcgtccgcccacgcgtccgcccacgcgtccgcccacgcgtccgcaaacttacaggagtatggctatggcgacggcgaagctgaactccccggctaccagcttgctcgctggcggccgcacgcgccgatctgcgcccgcccgctgcacgacggtgatccgcgccgccgcaggctcctactcggacgagctcatctccaccgcgaaatctgttgcttcccctggccgccgtattctggcaattgatgagtcaaatgcaacatgtggaaagaggttatcatctattggtttggacaacacagaagtgaaccgccaggcttacaggcagcttttgctgacaactgctggtcttggtgaatatatttctggcgctattcttttcgaggagaccctttatcaatcaactacagacggcaagaagtttgttgactgcttgaaggatcagaatatcatgcctggcatcaaggttgacaagggtttggttccattgcctggatccaacaatgaatcatggtgccaaggtcttgatggtttggcttcaaggtgtgctgagtactataagcagggggcgcgcttcgcaaagtggaggactgttgttagcatcccttgtggtccatctgcattagcagtcaaggaagcagcatggggacttgctcgatatgctgctattgctcaggataatggtttagtgccaattgtggagccagagattcttcttgatggagaccatgggatcgagggagctcttgaggtggcagagaaagtgtggtctgaggtgtttttctacttagccgagaacaatgttctgtttgagggtatcctgctgaagcctagcatggtcacccctggagctgagcacaaggagaaggcttctccagaagccattgcaaagtacacgctaacaatgctcagaaggagagtacctcccgctgttcctggaatcatgttcctttctggtggacagtccgaggtggaggcaactctgaacctgaatgcaatgaaccagtctctgaacccatggcatgtgtcgttctcctatgcccgggctctgcagaactcggtgctgaagacatggcaagggcgccctgagaacgtggaggcagcgcagaaggccctgctggtgcgcgcaaaggccaactcgctggcccagctcggtcgctacactggtgagggcgagagcgatgatgccaagaaaggcatgttccagaagggctacacctactaatgtgccagcgagatgtttccatgacataataataattgtagcgttttggtgttattattattattattttggtacgctctggtgaataataaccaaattgttggtgccaacgacatctagcagcaaattggtctttagaactcatgtagaaccttgagaacgaacatgtaatctggtgaattctattcctatatttgaggcgatggatgctaagttcccatatgcgacaagcacaacaggggcttaatgttctttaatgaaaaccgctttattcttaggcccaaaaaaaaaaaaaaaaaaaaaaaacaaaaaaaaaaaaaaaaccaccaaaaaaaaaaccaaaa

SEQ ID NO: 261502 - DNA, 846 bp, Zea mays
  unsure (1)..(846): unsure at all n locations
ccctgcacgtggaggactacccgtacgcggtggacggcatggacgtgtggcgcgccatcgagggctgggtcaggacctactgcgcccacttctaccactccgacgccgcggtggccgccgacgcggagctgcaggcgtggtgggacgacgtccgccgcgtcggccacggcgaccgccatcgcgacccggcgtgctggctggacctcgactccgtggccaacctcgccgagtcgctgtccacgctcatctggatcgcctccgcgctgcacgccgccgtcaacttcggccagtacggctacgccgcgtacatgcccaaccgccccacccggtgccgccgcttcgtgccgctgccggactccccggagatggcgcactggaggccgacccggacaggttcttcctcgacacggtgcccgaccgcttcaccgccacgctcgggctcacgctcatcgaggtgctctccaaccacacctccgacgagctctacctgggccagcgcgccaccgcggcgtggaccgacgatggggaggtgctgcagctgctcgacaggttccgggaggagctccgccgggtggagaagcggattacggagaggaacagggacccgcgactcaagaaccggaagggacccgccaaggtgccgtacacgctgctgttcccggacgtcggcggcaaggagaaggggatcaccggcaaagggatacccaacagcgtctccatatgacaattgacaagctcgctcctttttttttattgctttgttgcagaggatctgattatggatgtcggtttaatttcgttgtgagcatcattgtgttaatatgtcntattgcgatgattggtttg

SEQ ID NO: 261503 - DNA, 536 bp, Zea mays
tcgacccacgctttctggtttctggtaggattgctggactggaaggtatgattattatgaggggggccactgcttcatctttgtcctatgtaatgaacaacaaggagggccttattgcagtgtttgacctgcgtggtggcacatttgatgtgtcaatccttgagatatcaaatggggttttcgaggtcaaggcaaccaatggtgatactttccttggtggtgaggattttgatggtgcactgcttgaatatctggttagcgagttcaagaagtcagacaacattgatctgagcaaggacaagttagcactgcaaaggctcagggaagctgctgagaaggccaaggttgagctttcgtccactatgcagactgaaatcaacctcccatttatcactgctgatgcatctggtgcaaagcacttcaacattaccttgaccagatctaagtttgagtctcttgtgagcaatctcattgagaggactcgcatcccttgtgtgaactgcctcaaggatgctggcatctctgctaaggagatt

SEQ ID NO: 261504 - DNA, 319 bp, Zea mays
tttttatttttttttttttttttttgagcagtaaagttatgctataaattatagtataaatgaaataatttggaacgtataattatgtcaaaatattagctgcaaagctacattatgctagaacccagttaccaattcctagtacaaaattcctatgttccctaaataaaatttgtagcttcaaagtagtaccagctccgtggtttattttggtccgtcggtttagagcacttgagcaccatcatcagtcctgcacaatcttagagcttcaggcggaaagaatttggcaaaaatagaggggtgtctttgacagcttatt

SEQ ID NO: 261505 - DNA, 1085 bp, Zea mays
gccataaacactgaattattcaatttgcacttcacaatcaattaatcatggtagcaaaaatcatgcttagaagagtactagcacacgaatcatggcaagaatcatgctttaagggtgctatcacaggccacagagataatgcaaccaacaaccatagtttaactctcacaaatggtgccagtggcggctacctagagtgcaggaatggccaacctaaactctggaatacggtcacgaagaggtggggaaacaattgaggtagtgaaaacaggtaactgctggaagaaacggaaacagaaaccaacagctacacagaatatttctgcagtaccacaatacatctaatgcatgcccaaactctgctatcttcaatgttcaacccggcttgaaccacaagcagatactgtcgaatcttcgtactgtacttgtatcattcctcacagttcatgtctttatgcgcaccacaaacgaacatgctggaaggtttgacatgtcagcagagacagaacacgaaattcctaagttggtcaaggcacctcttatcaacccgcatgggaaatacagaagcatggtagtcgtttgggctgcagtatcacccaatgctgcagaatcattttcagttgaatctgtgttctctgtacgtggatctagagaaacacgagtaagccaccgaaaacggttatcttgaaggacaaaggtacccctgtgatttgttttcagattgtcaatctgcttcttgaacagctctgaccaaaaatctttgcagataaacttgattgcttcaagatgatcactaaatcgagggcgctccatggtatatctctcagagagctggtgcccgacctggaagccgatggcctcgatgcggcgggcagcaagctctggcttggcggcgtagaggccaccgcagtagactgccaccatctccatgaccaccgcatcaacacagctctccgcgatagccatcaggtctatcaaggccccctgcacgagaagagtgtaacgaggtgtcgaggtgctcctcagcaggcacaaagcataggtcagtgtgaccatgggtcaatttgcagtacagtcataaacga

SEQ ID NO: 261506 - DNA, 464 bp, Zea mays
gatgatcactaaatcgagggcgctccatggtatatctctcagagagctggtgcccgacttgaaagccgatggcctcgatgcggcgggcagcaagctctggtttggcggtgtagaggccaccgcagtagactgctaccatctccatgaccaccgcatcaacacagctctctgcgatagccatcaggtctatcaaggatgctcactctccgcctgcgagaagtcggcgacgcggagcgcccaggtgtcgaagaatccagaccagacggaggcgaggcctagcgcggagggcggcggctcccgagcggatggagacagtggaggcggacgtgcgcggatggaggcagcggagccggcgtgcgatggaggaggcggaggcggcccggcgaagccggcgcacgggctccagtctgtcacggcccgtggccgcccggacgcgtccgcccacgcgtccgcggacgcgtggg

SEQ ID NO: 261507 - DNA, 664 bp, Zea mays
atttgttttcagattgtcaatctgtttcttgaacagctctgaccagaagtctttgcagataaatttgattgcttcaagatgatcactaaatcgtggacgctccatggtatatctctcagagagctggtgcccaacctgaaagccgatggcctcaatgcggcgggcagcaagctctggcttggcggcatagaggccaccgcagtagacagccaccatctccatgaccaccgcatcaacacagctctccgcgatagccatcaggtttatcaaggatgtcttcacgagaagggcgtaacttcggcgctcctcggcaggcacaagcggaggtcagcgcggagatgggtcaatttgcagctctggacgtcgatttggccggagacgggtcgaattgctatgcagcgcgtcgatctgctcggagacggctcgatttacggcgtacggcgccgattcgccgaaaccaagggtggcggagcacgtttgatctgcgtgggtgcctgccgtcttcttcctctccaccaatctactgcagatacttgggcctgcctgctgcccacggttggaacgaggacggaggcggcgcaggaaggtacgggcgggacgggggacgggggctcgcgggtgtgcgtgtgacttgtgtgcggacgcgtggcgtccacccgggaat

SEQ ID NO: 261508 - DNA, 513 bp, Zea mays
aggcgagaggggcccttcttttggattttttcacttagcccttaaatggggttgtacatgctctcatgaggaggttgcgggaaagtcattttgagatagtgaaaacaagtaattcctggaggaaaagaaaacaaaaaacaaacggggctaaatgcagtaccacgatacatctaatgcatgcccaaatactgctgtcttcaatgttcaacccgcttgaaccagaagcaggtactgtcagatcttcatgctgtacttgtatcgtttctcacagttcatgtctttatgcgcaccacaaacgaacatgctggaaggtttgacatgtcagcagagacagaacacggaattcctaagttagtcaaggcacctcttatcaatccacatgggaaatacagaagcatggtagttgtttgggctgctgtatcacccaatgctgcagaatcattttcagttcactctctgttctctgtatatggatctagagaaacacgagtaagccaccgaaaacggttatct

SEQ ID NO: 261509 - DNA, 466 bp, Zea mays
ggagaatagatggctgccatcgtctaggctcagcatccgaaagacgggccatggtcggtttccttcctcaccccagcggcggccatctatccgaaaataggccgcacctcgtccgctttgctccttgttcatccttcacctgctgatggcggcagcggcgcggccatccaacgccactcttctcgcgcgcctccgggacggcacggccaagttcgagctgctggatgactctgcgtttgcgcttgcgcacgcgcccccggcctggccccgacttcactgctttgccaggattgccccctcgttgaggggtgggtggtcggcagcgttgaacaaggtggagcattacggggttcagagggttaccggcgatggccggtgcatgtttcgagcgctggctaaaggaatggcaaaaatcaaggggattcctttggccccaaaggaagaagtagaagatgcagatgattta

SEQ ID NO: 261510 - DNA, 626 bp, Zea mays
cacgaatgcgttgtttttcatcataaaatcgtacagcgaagataatgtgcacaagagtgtcaaatatggtgtttgggctagcaccacaaatggaaacaagaaactggactcagcctatcgcgaagctaaggagaaaggagagcactgtcccattttcctgttattttcggtgaatgccagtgcacaattctgtggtgttgctgagatgattggaccagtggactttgagaaaagtgtggattactggcagcaagataagtggactggtcaattccctgtgaagtggcacatagtgaaggatgttcccaataatcttttccgacatataattcttgaaaacaacgacaataaacctgtaacaaacagcagagatacacaggaggtgaaactagagcaaggaatggagatgctgaagatctttaagaaccatgatgatgatgcatcaatccttgacgactttgagttttacgaggagcgtgagaaagcgctgcaggaaaataaggcacgcctgcatcagcaacatctacgcagttctattgttattgagcccaagaaacccttgactgcacccagtgacctcgtgggccatatcaccaagagttttgctgaggctgtgcggcttggtg

SEQ ID NO: 261511 - DNA, 1122 bp, Zea mays
ccacacgtctcgaaaccctaaggctgccccaaattgttatcccaaaccctagacctaaacggctccatgctgtgagaccaccaacagtgtccatggctctggacgccccggtggagcgacgggacgaggtacagatcgcgatggggaacggaaacggcgtggcgccgtctcaaccgtcgcggccagccggtcggccaacggctgctgcggcggcagcgccatacgcggacaggcggctgcggctgaacccaaatgcggatcacaagccggaagactacagcgacgtgcgcggcgagtacgcgccggccgtgtacagcgcactcgagcggcatctcccacccagcctcatcgatgccgaccgcgatgtcaagctacacttcatgcgggacattctcgcgcgctactggccgcagggcgagcgtaacaaggtgcaaaggcacagagaatataggcagaggatactccacctttacaagcctcttcatgaagaattatacaatatgcatccttcagtgttcttcttaccaacattccttgaagcagttaggagcaatacagaagaatgctttagaagtattatgactgagccaattcctggtggttattcggttgctaggttgcagcctactttctgtgagatgttattggaggaggtagagaactttgaaaaatgggtccatgctatgaaatttaagataatgaggcctaatacaatgaacaagtatggtgctgtccttgatgattttggcctggaagctatgctgaaccagttcatggaacagttcatagctccaatttctaaagttctttatcctgaggttggtggaggaacattggactcccatcacgcttttattgttgaatatgggaaagacagggatgttgaactaggttttcatgttgatgattcagaagttacattaaatgtttgccttggaaaacaattctctggtggtgaattatactttcgaggtattcggtgtgagaatcatgtgaattcagagacacaacatgaggtgacttctcattttacttcaacaactttcttatctacccatgcatggaaatgtatgactacacacatattcctggttgggctgtactccaccatggtcgacacag

SEQ ID NO: 261512 - DNA, 577 bp, Zea mays
gcttttattgttgaatatgggaaagacagggatgttgaactaggttttcatgttgatgattcagaagttacattaaatgtttgccttggaaaacaattctttggtggtgaattatactttcgaggtattcggtgtgagaatcatgtgaattcagagacacaacatgaggaaatgtatgactacacacatattcctggttgggctgtactccaccatggtcgacacaggcatggtgctcgagctacttcatctggtctcagaataaatctgcttttgtggtgccggagctctgtgttcagagagatgaagaaataccagaaggattttccgagctggtgtggtgaatgccagcgcgaaaagagggaaaggcagagtcagtgtgttaaagcaacgaagatggcctttctcaggggttctggaggtgcagcgatttaatttgtcgtaggtcatttatgttatatactgttttgcgtcatactgaacttcatcgtttaggacttgacaggggcattgtatcgatggccagctttgtgctagtgcgtttattggtgcgatcccagttgtatgtaaatgtaaa

SEQ ID NO: 261513 - DNA, 557 bp, Zea mays
agaagacatgttcgacttgtgaagggacgcgtgggaagctcgatcgggaggctaccgttgccgctgacacgggttaaccagtgttgagatccgcactgcaccagagcttttggtgaccctacttgctacttccacttgcactcgccggattgatgaagctcctgcatgcattgcatgcggagtcttcaaggggatttcagctggcactcatgcattcaagtaaaggctccaattcgagataccggtgcgtttcaataagcaggttcaacagtatctttcgttaaaaaaaacagctctgcttttcgggcggctgctatgtcgcactgcacagtgtggcgtagcgcagcgatggcaagctaatgcctaagaaaaaaacatacgtgcatatagaaaccactgatattagtgtagacgctgacaacctacggagaaatttgtaatggcagttcagggatgtaaatctttttacgaggcaacaggtcacagttcttattgtctggtagtgatagcagtgtgcgcatttcaatatattctctgatggaattgtcttggggttg

SEQ ID NO: 261514 - DNA, 831 bp, Zea mays
ttaaagcattgtcagaactaaggcaccttcatatagagagtttggatagggctacttcaaggtaccaacaccctttggtacatagcttagatgcctttgtctctatggaacttccctaagctatgtaccaaagggtgttggtaaattgaagcatctcaatcatctagatggtctaatcattggtcatgacaacaatgcgcctgagggttgtgacttagatgaccttaaagcattgtcagaactaaggcaccttcatatagagagtttggatagggctacttccggtgcgtctgcactcgcaaacaagccattcctagaggatctgtacctctctgagcaagcaccagcaatagaaaatcaggaggatctggaggacaaagatgaaacagaaaaagaagagaaggaaggacaggaaagaagcaatggccaatgcagaggagatgagtcaaccaaagctagtgaaaagatatggaatgagctcaccccaccccagagcatcaagaagctggtaatcaagaactacaaaggcgtaaagtttccaaaatggataaaaggtcccaagctaggagactccttccccagccttgtgtttttggatcttgaaaactgcatgtcatgtactaaactgccttcacttggcctcctgagtcaactccagtccctgcaaatctcaaatgcagactcagtcatcaccatcggttcagaattccttgggaccactgtactttcatcagccactccattccccaagcttgaggttttaaagctcagaaacatgaagaaacttgaagagtggtctttaactgtggaggagagccaggtagtattacc

SEQ ID NO: 261515 - DNA, 774 bp, Zea mays
gcgggtcgatccaagcctctaaacagacgcctggtacgcgctttgatagcagatgagagtatcttaatttatggccagcagaaactgaacacctcattgtcaaagccccggcatctcacattgtgtagcatggaaaacagcttggacggtccaatttcgctgaagcagcagatgggtttaaggtcgctgatgctcttcaaaagcccaaatgtcagagcaatagatcttctcatggagtcagcttcatgcttgcgtgtattagatttgagcaagacagcagtggaggccatcccgaaatccattggtaacttggtacatttaaggtacctcaatcttgatggggctcaggtcagagacataccttcttccattggatttctcataaacttgcagaccttgagccttcaaggttgccaaagcttgcagagacttcctcggtccatcagggcattgctagagcttagatgcctttgtctctatggaacttccctaagctatgtaccaaagggtgttggtaaattgaagcatctcaatcatctagatggtctaatcattggtcatgacaacaatgcgcctgagggttgtgacttagatgaccttaaagcattgtcagaactaaggcaccttcatatagagagtttggatagggctacttccggtgcgtctgcactcgcaaacaagccattcctagaggatctgtacctctctgagcaagcaccagcaatagaaaatcaggaggatctggaggacaaagatgaaacagaaaaagaagag

SEQ ID NO: 261516 - DNA, 1180 bp, Zea mays
ccagaagatgcagtcagctggtcagagactgcaggattattcccatgggcagaggccacatgaatacatgcagcataggccgcagcagtcattgcagagtcggaggccacagcaaatgactcaggatcagaagccacaacagtctttgcagagtcaaaggactcaacagtccttgcagaataaaaggcaacagcagtcctcacatattcagaaattgcagtcctcacatactcagaaatcgcagtcctcacaagcacacagaccacagtcgctaagtaacaggtctcaggccttacgaggacaaaggcctctttcttcacagggtcaatatccggagcaaagaagagtacatgcaagtgatagagtcaaacaagctgaaaggcacattcggcctccttcgaagtccatgccatcacggccagtctcttccaatggaattcgtgatgatcatgcaaaaaggaagcaagtggcaaaaagaagatttgatgaagatgatgaagaccccttagcaatgatcagaaatatgtttgggtatgatcctagtagatatgcaggcagagatgaagatgtcagtgacatggaagccgattttgctactatagaaatggaagagaaaaggagcgcgaggattgctaggcaggaggatgaagaacaacttcgcttgattgaggaagaagagagacgcgagcaggagagaaagaggcgaaagatggcacgaggccgatagtcgaatacactcctatttggatgttataatataccaccttcgttctcgaatatttgtcgtccgctggttcatttttgaactaaaccgtgacaaataaaaaagaacgcaggagtatctggcaggcctgattgcctgaatacgaagccccatggcggatcagacaggcacttctcttgcagtcctgtttacccttaccacgatgattatctggaggcaaatcaagggaaaacgacaggtgaccaacactgggcacgtgtaacagcagactgtagttgtagtggtttagttctcgaagctgacatggactatatttaagttctcgtcagattgtttggatagcagaaggtttccattgttgcagcgcctcaccagattgtttcttcatatgatatactgattctttcagtcaagcctatataaggatgcgtaatacaagtgcccctcttgtctatc

SEQ ID NO: 261517 - DNA, 1280 bp, Zea mays
cggacgcgtgggcggacgcgtggggacaaaaggagatccttgaattgagagaaagattaaaagagcagattaggcgaaaggcaaaggctgctgctgcctgcacagctggtcgatcatcttcttcacaaatacctcaagccagggacaaatttggctctttttttgggccatccaagccggtgatttctcgtcgagtgatagaagaaagaaaatcattgaaagaactgcatagcacggttgcaagggagccaaggccttctggagtacataaggatattccatcgtcctctaaagtgcaaagtagagtaaatggacatcagcataaacaaaagattgttaatcaggtaaagaagaaggctgaggcacttaaggataaccgggattattcatttctactctcggatgatgctgacctgtcatcctctccaaaggagaaacctgctgctagatcttccttgactcaaagggctgatcgtgaggtgacacaatcaacagtaaagaggaaggcaccaacaagtcaacctgcacgcttgtcaaatggatatggacctaagaacacaatgtcaactcaaaggcatgctgaagggtaggcaaatcccatgagaagggcaggatttctcgaatacagaaagggctggtttcacgtgacaatgagaggatgtatgaaaggggttgtttcacgtgacaatgagaggatgcatagtattgcaagaaatggatccaaccaggcaagtactagcaaaaccacaatccaaaagcatccaagcaggggtcccattgctaataagcaaccgtccaaggattcgaatgatgcaactctgaggaagagcaggggtagcctcaaagcaccatcccttagagattggcagaccaaaatcctcgcaaagtcagaggatgcagtcagctggtcagagaccacagcattcttcccatggtcagacgccacatcaatccatgcagcataggacgcagcagtcattgcagagtcggaggccacaacaaatgacacagggtcagaagccacaacagtctttgcagagtcaaaggactcaacagtccttgcagaatcgaaggccacagcagtcctcacatattcagaaatcgcaatcctcacaagcacacagaccacagtcattaagtaacaggtctcaggctttacaaggacaaaggcctctttcttcacagggtcaatatccggagcaaagaagagtacatgcaagtgacagagtcaaacaagctgaaaggcagattcggtcttcttccaagtccatgccatcttg

SEQ ID NO: 261518 - DNA, 350 bp, Zea mays
gaaagattgtctggtttccttgagaaagattttcaactttttaccgatgatgaggtcatggagacaatgaagcatgtcatcaatctttccaatgtggttgataggctctgcaaacaaatgtatcagtgcattgagactgatttgttatatcctctacgcacacctcacaatatcgctccatacaaatctaagggccttgacagggcctcagagctcaatattaagctgggatcctgctgaacaaagttcacagtcaacaaaacatagtcaggaggatgaacacaggaaccaaccagcatcgattagtctggggaaacgaactcatgagttgcatggctcgagttctggta

SEQ ID NO: 261519 - DNA, 909 bp, Zea mays
cacggggccatacacgcctctacaatgactcgctatagctatttcttctcgcctctcccaccggcccggtcgcccggagtagcaagcgtctccgatccgatccatcgtgcgagcatatccacggcgatggaggcgagagcggccatgagctggtactgcggctcccttctggccgtggccatcgcgctgttcctgtccgtgtccctcggcgtgcgcgccgccggcgccggcgccggcgtcgacatcaaggtgtcgtgtgcagcgacgccggacccggacgtgtgcctgcgcgcgctccaggcggacagcgactccaagaccccgcgggacctggcggaggcggcgctccgcgcggcgacgaccgcgggcggcgcggcgggcgactacgcgcggcacgagatggacgtggtgaaggacaacgacatgtggcagtgcctgaacgagtgcgccggggagatcgaggaggcgctggaccacctggacgacaccgagggcggcctcgacgacggcaagctccacgacgtgaagctgttcctggacacggcggaggaggacacgtggtcctgcgacgtctgctgcaagcacgccccatccacgcccgtcaaaaccacgctgctcgccaagaacaaggacttcgaggcgctcatgcgcgtcgcccacgcgctcatcaagcgggccaccggtggcgccggtgacgcgccggcgccggcgcccgccgcccgcgccaagattcatcccttgcgtccgaattcgttgatcaatccgcggagcgccatacatatctcgatccatattgtatttgtgtgttgatagtatatatcgatgtggggtacgtttatatgtacctgccattgtcatttcattaggtacgttgttgcaaacttttaccacagtatttatcttcacatc

SEQ ID NO: 261520 - DNA, 1645 bp, Zea mays
aaggcggcatcatgagctctgcagtcagtagacaaattttacgtaacttgcgtggttctcttcctgcgacggaagcaaacactgcccgagacatagacagacgacgagatggccgatgcggaggacgccgccgccgcgcgccgacgggccgccataaccgactaccgcaagaagctgctcaactgcagggagctcgagtcgcgcgtcggcaccgtgagagaaagccttaaaaatgcaaagagggattttaccaagactgaagacgacttgaaatctctgcagagcgtggggcaaataattggagaggttctccgacctcttgataatgaacgctttattgtgaaggccagcagtggtccccgatatgtggtcggttgccgaagtaaagtagacaaggagaagttgacatctggaactcgtgttgtacttgacatgacgaccttgacaataatgcgcactcttccacgggaggtggatccagtggtatataacatgcttcatgaagatccaggaaatgtcagttactctgctgtaggtggtctgtctgatcagattagagagctcagggagtccattgagttaccacttatgaatcctgaactctttcttcgggtgggaattaagcctcctaagggtgttctactctacggtcctccaggaactgggaagaccctattggcaagggctatcgcaagtaacatcgatgccaactttttgaagattgtttcaagtgctattatcgacaaatacattggagaaagtgctcgtttgattagagaaatgtttggctatgcacgtgaccaccaaccatgcatcatcttcatggatgaaattgatgctattggtggtcgaagatttagtgagggaactagtgctgatcgtgagattcagcggacgttgatggagctccttaaccaattagatggatttgatgagctaggaaaggtaaaaatgatcatggccacaaatcgacctgatgttctggacccggcgctcctgcgtcctggacgtttagataggaagattgaaattccgctacccaacgagcaatcaagaatggaagttctaaaaatccatgcagccggtatcgccaagcatggggagattgattatgaagcagtcgtgaaactagctgaaggtttcaatggggctgatcttcggaacgtgtgcaccgaagctggcatggctgcaattcgtgcagagagagattacgtagtccacgaagacttcatgaaggctgtgaggaagctaaatgatgcaaaaaagctggaatcgagtgcgcattacagtgcagattttggcaaagagtaatgatgctgatgccgatgcaacggacaaatgcatttggcatgtatcatcaggcgagcccagacagatgcgatgcaaaagcgagaaaggaaccagctatttatgttcaggctacaggcagtttctctatttttcctttccttctacgtatctacaaattcagcgcggaaggatttgttcgcttcctcgtctccaagtatccctaatcactattttattacatctcgcattcttataccatattgtatcctttatttaaatatattcctttcattcttctttttttttatatcattacttcctttctttcttttctttttttttttctcattttatt

SEQ ID NO: 261521 - DNA, 583 bp, Zea mays
gtgcactgaagctggtatggctgcaattcgtgcagagagagattatgtagtccacgaagacttcatgaaggctgtgcggaagctaaatgatgcgaaaaagctggaatcaagtgcgcattacagcgcagattttggcaaagagtaatgtatgatgctggacagatgcataaggcgtgtatcatcagggagctctgtcagatgcgatgcaaaagcgaaagaaaccagctatttatgttcaggctccaggcagctccactttttcctgatattcacaattttagtgaggaggattgtcaagctgaccagtgggggaaatcagtcgagaatttagtagttctgcgccagatggcctttgcttctgtaaatcgtacgtaatctgcttccgtgcgtcttagtctggtaataactctggttggacctgttctgtttccatgtacttttggacagtgtgcctgactccgcggtaacagaggaaaaaagaacattttgtattcatcctgaactacaattccccctcatttgtactattcgcgctcacatcactgcgtcaggaaaacgactccacatgtgattaatttcggtt

SEQ ID NO: 261522 - DNA, 415 bp, Zea mays
aaaaaagctggaatcgagtgcgcattacagtgcagattttggcaaagagttatgatgctgatgccgatgcaacggacaaatgcatttggcatgtatcatcaggggagcccagtcagatgcgatgcaaaagcgagaaaggaaccagctatttatgttcaggctacaggcagcttctcttttttctttctttctcgtgttcacaattttagtgaggaggattgtcgagctgaccggtgggagaaaccagtcgagcatttagtagctttgcaccagatgccatttgcttctgtaaaccacacattatctgcttccgtgtgtcttagaatggtaataactcgtcccagctccatgtacttttgacagtgtgctcgacttgcgtggtaaaaacagagaaaagaacaatttgtgttcattc

SEQ ID NO: 261523 - DNA, 717 bp, Zea mays
aagggcgtggatgctgtggtggcggacatgcttgatctgccgtttgagcaagagagctttgatctcgtcattgaaaagggcaccatggatgtgttgtttgtggacagtggcgatccatgggaccccaatcctacaacagtggaatacgtgatgactgttctagctgtgatactcatggttttgaagccagaaggcatctttgtatcaattgcctttggacagacacactttcgacgccgattttttgaagctcctgagttcacatggtctattgagtacagtacctttggcgacagcttccattatttcttctacactcttaagaagggcaggaggtcactggagtccagcagttaccaaaacacattaccatcacctgttgctccaagaataaatatggtccacgaagagctcgagagcgaggattttatattcctcacaaaccttgatgggttgtgagtggctgcttaaacaagcatctggctaacagcctaacacatcaaaagggtgaccaggccagcgttggtgaccctgcagtgatgtttttttcctgggcggcaaatgagaatgatgcctgtaaaatgtgtaatttaggatagatttaaattttgagctttgctgtctcgtaatactataatactctatattactgcaagctagaggtctgtatgatcttgtaaaaattagtattactttccttttgaaatctaatgcttc

SEQ ID NO: 261524 - DNA, 1253 bp, Zea mays
aagagcttgacgtcgcatgcccgcctccgtagcctgggttcctttaaagtcgacccacccgtccggtaccagtcttcgcacaaatattccctcccccaaggcccgaagccccgaaactttccggatctttcttccgccgcttcatcttctttgcgcaaaactagttttgtttctcgttcttctcttcgatttcggccgaataaagatggcgtcggctgcgcgcctcctcgcgccgatctccaggcgcggcgtcgtctctgtggctctggcgggggtggagaggcggcggccggaggcggcgtcgctcctgggggcgcctgtgctggctacggtggaagcctgcgcttcgatcagggtcattcctttgtcgaatcagctggctcgatactcgacaactgcatttcagaggtttgggttttcaacttcagccccccaacaagatgataaggagacaaacaagcacacagatgatggggttaatagaagtgttggagcaagtactggagcttcaagtgaagccaataatgtgcctggaaccgagaaggcacaggaagcaggttcacttgattctatatccaagtctaacaggaagaggacagctaaacgaactgcattttctgattcagattcagaagacctagacctatcaaaggaggaccttgtgaagctgcttcttgagaaagacgaatcattgaagtctaaagatgaagagtttaaagatatgaaggataaggtcctacgcagctatgctgagatggagaatgtccttgccagaacaaagcgtgagtcagagaacaccaagaagtatgccatacagagcttctccaagagcttgttagatgttgcagacaatttgtctcgggcatcatctgttgtcaaggcaagtttctcaaagatagattcatctaacgattctgatgaagctgtaacactactgaaaaccctactagagggtgttgagatgactgagaagcaacttggagaggtcttcaagaagtttggagttgaaaagtttgatcctttgaatgagaagtttgatccaaataggcactatgccattttccaaattcctgatccttcaaaaccatcaggaactgttgctgctgttgtgaaggttggctacatgttacatgatcgtgttcttcgccccgctgaagttggtgtcactgaaggtggtccaactgaagaagagccagaggagtaatctagatcaaacggaggttgctggctgcacgtatatctatgactactgc

SEQ ID NO: 261525 - DNA, 1645 bp, Zea mays
cccacgcgtccggcgtacagcaaagaaatggcgatggcgatgcagccatcttagcccccctcccctctccctaccctccatggccgtccctcctctgctgctcgtcgccgttgccgtagccgcgctctccatcctcgtcctcgtcgtcttcgccttccggcgatgcaggcggcggcggcaacgccacccgctgcaggccgcggcggtggccccgaccccggtcgctgtccaggatgaggacatagataggcctcttctttctgaaaatcagagcgatcactctagacagaatattagttttcttggaagttctgtaggagaaccttcgaagattcaaacaaataggagtaacacttcgcctagaagtcatgcaattgctgatacagggaggacttatcctgctgaatgttgtgctacacaaggagaaactcatgtaatcaatgttgaaaatgatacttctgaagagttccgattaggaagcacgttaagacggacatcaccagcaaaattgacaacacctgctcagaagcacagaagggtttctggagatgactatcataatggaagtgttcctctgaaggatagtacatatcatagcaccctggatttagaggtcatagctggtccatctcatggaataagctgttctcggcagtcaagtaggccttctatgctcccaataactcttggaagggttcccccaagtgatttagtgttaaaggactctgaagtatctgggaaacatgctcagataaactggaatgcaaagacattaaaatgggaacttgtggacatgggcagcttgaatggaactttcttgaactcccaggcagttcatcatccagatgctgagtctaggcattggggtgaacctgctgaacttgcacatggtgatattataactctagggacttcatctaaactatctgttcaaattacactgcaaaatcaacgagttcctgctggtgttggtatggcatccgatccaatggtggcacgtagaagtggaaagaaacttccaatggaagacataagcttttgccagtgtcctctgcagggtgttgaacattttgggctctttggaatttttgatggacatggtggggatggagctgccaaagctgtcagcaagattcttccagaaaatctgggatacatgttatctcatcctgaaacaaaagaacgagtgcagtcatgttctgatgcttctgatgttcttagatatgcttttactttgacagaagatgcaatcgatcatcagtacgagggatgtacaggcacagcacttcttatttggtttgatcagaataaagattgttttgcccagtgtgctaatcttggtgattctgcttgcgtaatgagtgtcaatggcaagacgatcgatatgactgaagatcaccgggtaactagcgcgaccgaaagagctaggatagcaagaactgggcagcccctgagagacggtgaagctcgtcttagcggactaaatcttgctaggatgtttggtgacaagtttctcaaggagcaggacccgcgcttcagctcagaaccatacgtgagccaagccgttcgcatcaccaaagcgtgcacagccttcgccgacattgatagcgacgggctctgggacgtcattagcacgaaaagggcc

SEQ ID NO: 261526 - DNA, 1803 bp, Zea mays
atttgattctcctccagacaggtttgcaagactggaaagggacacaccatctccagatgggagagtatcccctgaaaggtttgcaagactggaaagggataccccacctccagacggggatatatctcgtccaggtgaaagttcacatgtccattctgagacgatggagatggagccagaatatcgcgccaatgatgataccccacctccagacgggaggatgtctcctccagttgaaagttcacatgtccattctaagaagatggagtcacaacaccatgccaaagatgttggtgagttagctcgttttgaaagcccacaggtaagacatcggtcccgatcttctgaaaaacatgaccccagccgcaaaagaacctcttcaggggagttgtctccacatgcgcgtcagaattctcctgtagaaaggaaaagacggagagagtctcgccatggtgatgggtcacctcgacagagatctgcatctccccgaagaagatctacaccccctcgaagaagatctatatcccctcgaagatcctcacacaagaggagggaatcaccaagaaggggagactcacctaggaggaggcactcacctaggaggagggagtcaccaaggaagagagactcaccaaggaggagagactcaccaaggaggagggattcaccaaagaggaggagggactccccaaggaggagggataggtcaaaatcaaggtcaccttcaagaaaacatgacacttctagacataaaaaagaacatgacagatctcggtccaggtctccccactcaagggatcatcacagacgatctccaagaaggcattcaccaagacgcagatcacccccagccagtcatcgccatcattcaccaagaagacattggtcaccacctgccaacaggaagactggattgggtaagcctggaaagaatctctttattgcaggatttagctatgccaccactgagcgagatttggagaagaaattttgcaagtttggacgtgtaacaagtgcacgtgttgttcgtgataaacgaactggagattcccgtggctttggattcttatccttggataaggatgaggatgctgatgcagcaatccgtgcttgtgacgagactgagtggaatggaaggatcattcttgtggagaagtcaaaggcacctgcatggtgaatcttccgctttgggggcgcacacgccattgttcgagagggatttcattgcttcacctttcacagattttaccattcagaaaaaaagaaactaccggtatgacatactcggtacatgtcaaagttcacccgaacctggcttttgatgctgtactaggacttgtttcagggccctgctgctgataagagggacttagtggtacttttagtgtctgcaacctctacacgtgaaatgtgatacgtgcctgttcgtgagctgtcagttctcttcttcaccttcgtctcgcgcccactgaatactgatggcatgaacggattccgggagactcaagctttgtggtgttgttgcgactcaagggttatgttagcagttcaataatctgcatattagcttttcaatgttgtgcatcctctgaatgagggtttggaaaatgtcctatatagtttgtgttttggattccagatgttgtttaattatggtcacgacacgacacctatgccccatctgttgactgttggtgatgtttttttttcctgatgacatgtcttttcatcctgtgttcttgaatctagagttgtctgtctattggcgcaatattagtgagatggaacctgagcttggatgcc

SEQ ID NO: 261527 - DNA, 745 bp, Zea mays
  unsure (1)..(745): unsure at all n locations
acccacgcgtccgcccacgcgtccggaagtcaaaggcacctgcatggtgaatcttccgctttgggggcgcgcacgccattgttcgagagggatttaattgcttcacctttcacagattttaccattcagaaaaaaagaaactaccggtatgacatactcggtacatgtcaaagttcacccgaacctggcttttgatgctgtactaggagtaagagtattaaataatgcacttccttgctgatagttgttgaaagaataagatgtaacgttgcaccttagcttgtttcagggccctgctgctgataagagggacttacgacttagtggtacttttagtgtctgcaacctctacacgtgaaatgtgatacgtgcctgttcgtgagctgtcagttctcttcttcaccttcgtctcgcgcccactgaatactgatggcatgaacggattccgggagactcaagctttgtggtgttgttgcgactcaagggttatgttagcagttcaataatctgcatattagcttttcaatgttgtgcatcctctgaatgagggtttggaaaatgtcctatatagtttgtgttttggattccagatgttgtttaattatggtcacgacacgacacctatgccccatctgttgactgttggtgatgtttttttttcctgatgacatgtcttttcatcctgtgttcttnnnnnngaaaaaaaaaaaaaaaaaaaaaaaaaaaaaaaaaaaagggcggccgc

SEQ ID NO: 261528 - DNA, 1035 bp, Zea mays
cctcctctccttcgggctcagcgtgctcatcctcctctccgtgtacgagacccggttcaggacgatgaggagcgtcagtgcgtggtccagtgacggtggggattatccattgccaatgctccggaaccttgtcatggtggctgggcattcgatctatacgagctcaagatgcggggagaccgagagtgagaattcctggttcttggagccgtaccagaagcacgctggacaggcggccaccttcctggctcacatcaaggagggggtggggatcgcggcgagggatgagggggcactcctgttgttcagcggcggggagacgaggagagatgctggcccgacgagtgaggcacagagctactgggctattgccgagtcgaaaggatggttcggaaatgatgagggtgtaagaagccgagcactcaccgaggagcatgcacgagatagttttgaaaacctcctatttagtgtgtgccgtttcagagagctaactggaagatacccacagaacataactgttgttagctacgatttcaaggaggaacgttttgcacaactgcacagaaccgcactcggattcccggaaggaaggttcttcttctcaggtacaccagctacgccttccgcaagggaggctgctctgaaaggcgaagcagctgtccgagctcagttccttgaagacccgtatggatgtctaggatctcttcatgtaaagaggctgaagcgggacccattccaccgaaccattccataccctgccggttgcccagagctgaagggtcttttctcctattgtggccctgtgccttactctgggcacctcccttggactgagtagtagtgtaatgtacatcagccttggatggagctccccactgccacttcacgatgtccagcagccttgcactgaccttgttctgaattgagggagagtatatgttacactatcaacatatggatttttaaccttttggttcctcttgatcacctggcttacggcctttactcacaattcaaacttgtgattttattttt

SEQ ID NO: 261529 - DNA, 536 bp, Zea mays
ccacgcgtccgcggacgcgtgggcttttggttaaacaggttaggctgcacttcactgatggtgcacttagattgttagctaagaaggcgatagctaaaagcactggtgctcgtggtttaagagccatcttggaaactgttcttttggaggccatgtatgaggttccagacgaaaaaacaggaaatgagcgagttgacgctgttgtggtggatgaggaggcgattggttccgttgataggccaggttgtggggctaaaattctccgaggggatggtgcattggaccagtacataacaagaaccaatgtgatgaatttacaggaaactaacgatggtttggccggggagctcgaggaagcgtacatgctgtctagaattgttagcttgtaatttgaaaggctggggaggaagcgtatatgctgagttctgaccaacttcgtacatcgtgtaacatgtctaccccaacacaggccggctactttttgctcacaaaatcacctgtactctgtctccattcctgttaagctctaacgagca

SEQ ID NO: 261530 - DNA, 637 bp, Zea mays
tccacgcgtccgcatagatgaaatagataaaataacaaagaaggcagagagtgcaaatgttagtagagatgtatctggagaaggtgttcaacaagcattgttgaaaatcctagaaggaactgttgtcagtattcctgagaaaggatcacgcaagaattctcgcaatgacagtatacagatagacacgacagatattctttttatatgtggtggtgcttttgtggacttggaaaagactatttctgaaaggcgccaagattcatccataggatttggggcacccattcgtacgaacatgagaagttctggagctagctgtccaatggttacctcatctttattagaatctgttgaaagtggtgatcttgtaagatatggtctaattccggagttcattggtcgtttgcccattctagtaagtttggcagctctgaatgaaggccagctcgttcaggttctgacagaaccaaagaattcactttccatacagtacaggaaaatgtttaacctgaacaaagttaggctgcacttcactgatggtgcacttagattgttagctaagaaggcgatagctaaaagcactggtgctcgtggtttaagagccatcttggaaactgttcttttggaggccatgtat

SEQ ID NO: 261531 - DNA, 955 bp, Zea mays
gaagagccggattgcccagaagtgttccgttcccgaccgcggaggagagcggcggacggcttccctgccgctgccggccgccttcctcgagttcctcagcgagaacggcctggaccctgcggtgtactcaatggcagccaccatcccgcgctacataaggctaaaaccaggcatggagtccaagatcgcagagattgaagccgagttgaagtgtgcccttgacaaggttttatggctgcctgggttctatgcgattccgccggaaattcagattgctggctccaaggcttatcagcaagggaagatctatggaattgatgccgcttctggagctgctatattagcacttgatgttcgaccaggaaatcatgttcttgacctctgcgccgccccaggtgcaaagctttgcatgctcgcagatacgcttggaaccactggttctctgactggagctgatgctgcaaagcaccgccttgcggcctgtcgtacaatgttgcagaagtattctcttggtgaccgtactcggctctttgttgctgatggaactttgttttcccttttacctgtgaactccaggatgcaaagaatggaagggtcaattggcgttgaagaaaatggaagcatattcccagaatggacttcaaggagatcatggaaggatcggcagaagactaggaaagcaaatgcaaatggtcaacagcacctactggcagcttcagaacctgaactgatatactatggtaaacattcaggattagttggacagtgtaaatctgatgtcttttgtccatcagttgatgatgaagcttgtacatctggctatgacaaggtcctagtggatgcggagtgtactcatgatggatccataaaacatattcaaaaatttgaattctggggatggaaaagtctagatcgccgcgtacttgatgctgaaagaactgagaaccttcttcag

SEQ ID NO: 261532 - DNA, 517 bp, Zea mays
ttccgtttgaaaatgtcaatggacaaactgaagagttgccatcagagctcctctgctcgatcaagagaccaaaattttcagttgcagaacttctagaagacctacaggtcacaccaacacaccagagctaaacattggaagccaaagttcctttcttccgggaagaaaacaatagctattctaggagacaggagtattgacagtgaggaccccttggagcatgtaattgacggatcatctagcgaggaggaagatatgctactcaaaaccacttgagtttggtgaacaaagatgagaaccagcaaactatggctgacctatttcaagaagtttttaatccaacaaacatggatggtgccatgaaatcaatgacatcaacaggagctggtaactatggaagaatgcaacagattatgcagatggaaaaatattggcatgtggaattcttgagacagtatagcagagagcacagttattcaggtggtgctgttggtagcagttggtataacttatatgc

SEQ ID NO: 261533 - DNA, 913 bp, Zea mays
acagcataggggtggttcttttgtcatgtcaccatctttgttgcaccaacatgctccaggcagatcaatcagggagcaggaagtttcatccggagtgccaccaactaaagcttcacaagctatgatggatgaaccgcttgaaaatgtcaatggacaaactgaagagttgccatcagagctaccctgctcgatcaagagaccaaaattttcagttgcagaacttctagaagacctacagggtagaagtggttcttatgttgagacatcatctttgtcacaccaacacaccagagctaaacattggaagccaaagttcctttctttcgagaagaaaacaatagctattctaggagacaggagtattgacagtgaggaccccttggagcatgtcattgacggaacatctagcgaggaggaagtatggatgcttctcaaaaccacttgagtttggtgaacaaagatgagaaccagcaaactatggctgacctatttcaagaagtttttaatccaacaaacatggatggtgccatgaaatcaatgacatcaacaggagctggtaactatggaagaatgcaacagattatgcagatggaaaaatattggcatgtggaatttttgagacagtatagcagagagcacagttattcaggtgatttaaagggaactactgttcagattatgtcaaggtcattggaaggaaagctaacagtctgcagctgcatgttccaggaaaagggcaatgatgccactataagtaatgcctcagcagacggcaccatggatgaaagcagaactaggaggactattatcttcagtccaaagatatgcaacaatgtagatcttctggttggaaacataattcatatcttcccaccatggaaggaagttaaaatacaagaagagcatgtgatta

SEQ ID NO: 261534 - DNA, 1601 bp, Zea mays
  unsure (1)..(1601): unsure at all n locations
cccacgcgtccgctctcctacccaagatcaatcgcccgcaaggagagccaggcagccagccaaatcttccacctcctccatttccagccccgtccccacaccagctcgcgtaacctcctgcccatggctggaggcggcggcgcaggcgcgggctcgtcgtccggcggcggcggagggggcggcagggagggcgactgggactgcggcagctgcggcaaccgcaactacgccttccgctcgctctgcaaccgctgcaagcagccgcgcctcctcgtcgaccccaacaccccgcgcgactccaagtggctaccccgcgccggggactggatctgcaccggttgcagtaacaataattatgcatccagaaagaactgcaaaaagtgtggcttgcccaaggaggaagcagcaatgccagcattgcaaatggcagggatgactatgccaacttatgcaacttatattgcaagactacaaagccttgctgcttctgcttctgcttctgcctataagatgaactttgggatggctgccaattcacctttgcagcagcaactacttgcaaatgcaaactggccctatgggatggctggtagatatgggatgcaatcttctggttggccatttggcaacggcaacccaaatcagtttttaggtgttccaaaggattggcgtaatggagattggctctgcagctgtggatttcataactattcatctcgtacgcagtgcaaagagtgtggtgcacctgtaccatcgggcattccctccacaacaatgaaagctacatctgatgcctcttccacattaggaactaagcggttggcttcagaggacctggccaatgactgggataataaaaggctaaatccaggaaatgacaattatccactttcaacaggagctgcaaataatttatttttgggtattgagcaaggagctggaagcagcaatggccagtctgcctttcccaaatttgacaatgggagctcaatggcattaccatctgggcagggaatgtctggtcttatgggaaaaggggcaaaatggcgtgacggggactggttgtgcaacaactgcaacaaccacaactacgcatctcgtgcgttttgcaacaggtgcaaaactcagaaagaatctgcagttcaccctggtgtgttatagcttgctgttggattattttgttccaggatatgttgctgcctgttctagctccttcctcaaggctgcggtttgagttttttcgattctgcagtgtttttgctgctctcaaatgtttgtctcgatatttcattagtgcttgttgaagttccccatttgtttatggtataagcgcttgaataaaatgtttctggaaagtaccggcctacaatctggattttggcaaaataattgaattagttgttgtacaatgaagcaaattgtcttacgttgtactttatgaactctggagtattatcactcgtcgggttgaaaaggggaactatacaatgtaatttcagtacagattattattttttcctgagaactccagttgtgctgttatgcgagttctgcccattcaaaaaaaaaaaaanntaccaaaaaaaaaaaaaaaaaaaaaa

SEQ ID NO: 261535 - DNA, 791 bp, Zea mays
  unsure (1)..(791): unsure at all n locations
aagtaatgactagtgtgcgtgtgtctattcctttctatgggtttgtgcgtgatggctggtcatggtggtggtgggtgtgggtgtgcttcggtgcgttttgctgcctactgtgctggtgggtttatgcggcaaatggatgaataggttgcagtaacaataattatgcatccagaaagaactgcaaaaagtgcggcttgcccaacgaggaagcagcaatgccagcattgcaaatggcacggatgactatgccaacttatgcaacttatattgcaagactacaaagccttgctgcttctgcttctgcctataagatgaactttgggatggctgccaattcacctttgcagcagcaactacttgcaaatgcaaactggccctatgggatggctggtagatatgggatgcaatcttctggttggccatttggcaacggcaacccaaatcagtttttaggtgttccaaaggattggcgtaatggagattggctctgcagctgtggatttcataactattcatctcgtactcagtgcaaagagtgtggtgcacctgtaccatcgggcattccctccacaacaatgaaagctacatctgatgcctcttccagtatttatgcaatgctgtacactgtgttaaacatctggcaagtggttcactggtggacgcatctncagcattaggaaactaagcggttggctttagaggaccctgccaatgactggggataataaaagcttaattcaaggaatgacaattatccactttcacaggagctgcaaataattatttttggg

SEQ ID NO: 261536 - DNA, 444 bp, Zea mays
cccccgcccggcggaatatacccggttgctcccccttggatccttgtttgcttcctgctgcctggccttctctcctccccaaaatcaatccctcgccgacaaaggagagccagccaaatcttccacctcctccatttccagccccgtccccacaccagctcgcgtaacctcctccccatggctggaggcggcggcgcaggcgcaggctcgtcgtccggcggcggcggaggggcggcagggagggcgactgggactgcggcagctgcggcaaccgcaactacgccttccgctcgctttgcaaccgctgcaagcatccgcgcctcctcgtcgaccccaacaccccgcgcgactccaagtggctaccccgcgccggggactggatctgcaccgcagcaactacttgcaaatgcaaactggccctatgggatggctggtagatatggg

SEQ ID NO: 261537 - DNA, 496 bp, Zea mays
ttctgatccttgttcgcttccggcttcgctggttctctgcgtccgcccctgccgggccttgtcttctcccccaaatcaatccctcgcccacggacccaaccaaatcctcctccacctcctccatctccagccccgtccctacccagctcgtgtaacctcccgatgtccgggggcggaggcggcgcaggcgcgggctcgtcgtccggcggcggcggcggaggtggagggggcggcagggagggcgactgggactgcggcagctgcggcaaccggaactacgccttccgctcgctctgcaaccgttgcaagcagccgcgcctcctcgtcgaccctaacaccccgcgcgactccaagtggctaccccgtgccggggactggatctgcaccggttgaactgcaaaaagtgtggcctatccaaggaggaagcagcaatgccagcattgcaaatggcacggatggctatgccagcttatgcaacttatatcgcaagactaca

SEQ ID NO: 261538 - DNA, 436 bp, Zea mays
gtgtggtgcacctgtaccatcgggcattccctccacaacaatgaaagctacatctgatgcctcttccagtatttatgcaatgctgtacactgtgttaaacatctggcaagtggttcactggtggacgcatctccaggttcgagcgtaaaaatcttaagttttgagcataaaacccctcggttataagcgtaaataccgagccaatatgaggttcatatctatggtgggttgtattcacgatcctatttttatgttaattccgaaaaatatgggagtcacatccatggggtttatatttttatgcagatccaaaaattatggcagatttgtggtggtgtaggagttgtatggttaagacttataagacttaagacttatgtatcgtgtggttgagagttgaaacttatttgtggatttgtggtgcgtggttctaact

SEQ ID NO: 261539 - DNA, 397 bp, Zea mays
cggttcttcgttttccttgctgtatatgtaaaggccaggtaatagtagaaaggattcaataacattgccgcagaaggaggtttctgtacacggtgggaagccagtaccaccggggggaacttcatggaatcgcaatttttgtagggtgtggggggagattccacgactgtaaatatgatgagatatgaaacagaaaagggggtggcagatcaacatcgaccttctgtaattagccagaataaaagaactagatgctttatattgagcagagctctcgtctttttgatcctccccccggtgtagtatcaagaatgaataaatcttctgtttcttgtctggttgtagcatgccagcatctgtaagttgtaacaattcagtgaatttatttcccttcagc

SEQ ID NO: 261540 - DNA, 496 bp, Zea mays
tgcagattagaggcagagtggtgactgctatcgcttctggtggacgttcgaaatgtccttggtgacctatctttgaattggcattgccagaaatagctcaaaagattacacggttggagaatgaagataccttgcttgattcttctggtgagactagatctcgtcacatccaaccacgatggaaacaagtcctactagccgtaatggggcccgaacaacaccagcggccggtggatgggatcgctgcccgctcctgtcgtcgttgccccattggtggaggcccgaacagcacctgcaaccggtggatgggatcaccgcaccgcccctcgccgttgttgccccatctgtggagcacctcgtggccggggatgccgcccatggcgaccaaccagctcaccctctctttccatggcgagtttcattccaggcagatggactcgcacagtgtccaagacgtgcttttactgcttggagggagggagctgagtagtctggg

SEQ ID NO: 261541 - DNA, 433 bp, Zea mays
gttgggtctttgtctatgtagtgcaacccttatttttgttttctaataccatcacaacgcatgtggagtaaaccaaacttttatacgcttcatgcttgcaaaactttagttcttattctaatgaactgctggtttgtgatgaagttttgtttagggtttaggggggggcattgtgtatgggggttgtgtttaattgctcaccccttattttgtccaccttcactggatgatatacaatagtatggtcctttcccaagaccctttagttaagaaccatgaaatgctcctgaatctccttatccaagacatcttttggtaactaccatattgcaggttggtggagcatttgcttatttgggacaaaagactcaagtttaccataaatgtatatcaccgattattactcaataactactggcttgctttttaagca

SEQ ID NO: 261542 - DNA, 497 bp, Zea mays
aatttgaggagagaaagaaagaaagagtgatcgtcatggagagcaggaggaagaatcaacagaagacgagctacattgtaatttccatccagctcctagcggccctcctactcttggagcttgtgtcgctagtgccgggggcgtcatgcgaggagttgcccttggatttttgggtgagtgcactacggggggtcggggcaaaggacgtttcaacagccgatggatgcaccaagaagaataaggacaccgtgctctgctctgcccaggctaacacggtaaccaatttcatcaaccctaccaactctgaggaacaaggctataggaccatcggggagtccatcgctaacatccctgatgatagcaccaaacagtacatcctcatcctcagcggtggcaccgtgtaccgagagaaagtattggtgagcaaaagcaagccattcgtcaccataagatcagatgacctcatcaaccctgccatcattgtgtggaacgacact

SEQ ID NO: 261543 - DNA, 641 bp, Zea mays
aggagagaaacttctcttccagaagggggcaaagctcgcggcctcgcgtcgcgccggtcgttccggtccaacgcggcgacgccaaaggctgccgtccccgggcttcctcctccccctcgccaaaccacaggaagaagcgagcagggcaccgtgttttctcgagcgatggcatcggcgcctgccgattcctacgggtgcgcggcgtgcggcgcgcccctggacctgtcggcggcgcacctgtacccggcggacttctacttcgaggccgggaacaagggcacgctgtccttctcgtgggtggacgagtcgcgcctgcggttcgcgcccgaggaccgcatccgccccttcttcgagaccctcaactactggggcatccagcggaagcgcacgcgcatcagctgcgacgcctgcggccacctgcttggccacgtctacgacgacggtccgccggccatgcagggcaccggccagttcgggatggggcccagccaggtcaatcccgcgccgccccaggtaccgcttcaagatcaaggccatcgccgccagctcctcggcacctgccgccgccgcctatgaaaagtgatgctccatagatttcttcatctggttgcgtgtcctgtgtgctgtcagtgctgtggttc

SEQ ID NO: 261544 - DNA, 745 bp, Zea mays
atcacgggttgctcctcctgatctcgatgaattcaagacaagagcaattgctgaaaggggacctggtatttctagtcaacctggtaatatcatccaccgaagggagcctagcgggaagttgtataattatgccgcggcttctaaaggggccaaggttctggatttcaataaggaggctaagggtgcttccaacatcttagataaagacaaagacaagtacctccgcaatgcttgctcagcagaggggaagtttgtcatcatagagctttctgaagaaaccttagtagatacaatcgcaatcgcaaattttgagcattattcgtctaatccaaaagaatttgaactgctgagcagtctgacatatcccacagaaaactgggaaactcttggaagattcactgccgcgaatgcaaaacttgctcagaatttcacttttcttgagccaaagtgggctagatatttgaaactgaacttggtaagccattatggttctgagttctactgtactctcagtgtgctcgacgtgtatggcatggatgctgtagaaaagatgcttgacaacttgattccagttgacaataagacaacggaacctgatggcaagactaaggaacccattgagcaaattcctttgaaagatcctgctggaggaaaagaattctcacaggaaacccttgatgaagatgaatttgaactagaagatgataaaccaaacggtgattcattgaagaatggtgctaatgat

SEQ ID NO: 261545 - DNA, 1513 bp, Zea mays
gctgctaggtggttgctgcatactggtcttccctctttctcttgccacctcgggcatcctctctggcttagaaaaaaaatatgcgcttcatagtccatacctagatcttttggtgttcagttttggtttcaagccatggcgaattctcggattggacgttacaagatgtctactctctcagacccctcaaaagaagatacttcacctgagggttcaggtactacccagagaaatggagcctggagtaacacattgaacactcttctgcagcaagcctcagtatatggtgtggccgctgggtattgtttatcagcgtccctgctctcgatcatcaataaatgggcaatcatgaaatttccatatcctggagccctgacagctctgcagtacttcactagtgttgctggagttctcctatgtggacagctcaagctcattgagcacgatggacttaacttgaggacaatgtggaagttcttacctgctgctgtgatgttctacatctccatcttcacaaatagtgaactcctgcttcatgccaatgtggatactttcattgtgttccgctctgctgtgcctatatttgtcgcgatcggagagacgctgtatcttcatcagccatggccatcgctcaagacatggctttcactctccacaatacttggtggaagtgtgatctatgttttcacagacaaccaattcactgtgactgcttacacctgggcagtggcctacctagcaagcatgtccattgatttcgtgtacatcaagcatgttgtaatgaccattgggctgaacacatggggccttgtgctatacaacaaccttgaggctttgatgctattcccactcgagcttctcgtaatgggagaatttgatcagatgaaggtcgacagctccaaggtgtcaaactggctgtcattcgatgtggtcctccctgttgctctctcatgcctgtttggactatcgatatccttcttcggattctcctgcagacgggctatttctgctaccgggttcacagtgcttggcatagtgaacaagctcctgactgttgttattaatttgcttatctgggacaagcatgcctcttttgtgggcaccattgggctcttgatatgcatgtcaggtggcgtgctctaccagcaatccaccatgaagccgaaggcgcccaaggttgagccgaaggaagagaacgacaacgacgaggagcagcagaaattgctgcagatgcagggtgttccagagagctatccaactcagaaataaagctcttcataaaccttacaacgaagtaatgctttgatggattaccttctttgcaacagcctcacctgaaacgtttttgtattggctaatacttggaaaaaagcatatggatgagtagtcatgaattaggagctacaaaatatcatgtttttgatattagaagtcgtgaggggacctaattatcactatgcaattctttattactgtattaccacttacatttgtaacgcaaaatcgttatgat

SEQ ID NO: 261546 - DNA, 626 bp, Zea mays
agattctttaatcagaatccttgccgtgttcgcggataacgcgtcagatttagaacggaacgttaattaatcgcgcgatgcggaagacaagccaagtcgaccccaagcgcggactgattcgcgaggtgatgcggatgatgaacctgaagatggataatttgaacgagtaccaagacaaaggatgatcgtcaagtgatcgtcgtctaacaaacactaacgtagtgtttattccaggtggtggacttccggatcgtacttagggatttgcccgaacttccggtaaaggcaagtaaatacagtggtggttgctaccgtttgggttgcatcctattccctgacattgagtatgcataagttttaattatgttaatcattgaattctatgatgaagtttatttgttcggaagtattaattctcaattgtctaatattgaggatgatcatgatttgggaatgatatatgtggttgattcccatcttggatgaagttgaagtatctttttgaatcatgttgtatgaagtgttgtaggcatgtcatgcacatcgcatcatccatattgcattttgaagttatgtcgtgatcttatggtccgaccgtaccagtacatttggatcatcgtacgttg

SEQ ID NO: 261547 - DNA, 612 bp, Zea mays
cttcacccccccctcttggccgccaccccctttttctcccccttggctggacgccccctccccctatggcagccatcctccattgcttcctcctccaagatctccccctacgcagcaaggatcgagaaaaggaggggcacgttgaattgaagaggaagagaggatcaaggagatgttcttccccatctcctcttgaagatttcttggggaaaccctaggtggctacactccagatcatgtctagtacatttcttcttcttcgatgaaggtgcttgttgctcatcaaggggagtgggaagtagcagcacatccaccttcattctcataataatgctgcccagacgcagccatgatttaattagaaacttcttgtcaaaggatgtttgtttttaactagtcgtgcgcactgattaattcagttcatgttgttatggttgtcttcccattgctagcagattattaatgtcttatatgttttcttatcatgatatctatttatactttgttgcttcccccgtttatgcaattttcaaaggagatgctgtcgaaattttatatatgaatgttagatgtgtagtttagtagcatcctggggtgtatgtggataccggg

SEQ ID NO: 261548 - DNA, 553 bp, Zea mays
cccacgcgtccgctccccgcttggtgtccgtcgtgtgggtgcgagtcttccatgggagtttggagggaggaagaaggaagaaaagaaggaggaaagggggataacccaaggtggtgggcttccgggtcgtacgtagggatttgcccgaacttccggtaaaggtacttgatacatgttgggaatgaggggagtagcagcacgtccactttcactctcacaataacgctgcccaggcgcagccatgatttaattagaaacttattgtcaaaggaagtttgtttttttttttagtcgtgcgcactggttaattcagttcatgtcgtatgtttatctttccttgctagccgagtaataatacttagtatgtttttgtcatgatatatgtttatactctgttgctccctcttttatgcaatcttgcaaaggggatgctgccgaaattttatatatggacgtcggaagtgtagtacagtagcataccgggttgtttgtggaacctggagtgttacagtgggtaaccattctgcagcttctgttgcttcggcaagccaat

SEQ ID NO: 261549 - DNA, 492 bp, Zea mays
gccgtcacccttttgtgccttgccccaagagatgagaggaagaaaaaaagaacagaagagaggggagatgagggcataccgtcgcccatcatcgtcgttcctctccaagaattggtggctactctccggatcatgcctagtacatctttcttcctcgatgaaggtacttgattcatgttgggaatgagggaagtagcagcacgtccgccttcactattataataacgctgcccagttgcagccatgatttaattagaaactcgatgtcaaatgatgtttgttttttaactagtcgtgcgcactgattaattcaggccattgtcggtatggttgtctttccctttgctagcagattattaatgaactgaattaatcagtacgcacgactaggaaaaaaaaaaaaaaaaaaaaaaaaaaaaaaaaaaaaaaaaaaaaaaaaaaaaaaaaaaaaaaaaaaaaaaaaaaaaaaaaaaagggggggcccccgcttat

SEQ ID NO: 261550 - DNA, 1167 bp, Zea mays
actacttcctcctccctctagatctccccccacgcagcaaggatcgagaagaggaggagcaagatggattgaagaggaagagaggatcaaggagatgttctacccccatctcttgcagattttcttggggaaaccctaggtggctacactccagatcatgcctagtacattttcttctttgatgaaggcaagtgaatgtagcggtggttgcttccgttctgacctgttgcttctatcgcctacactctaatattcagaagtatcggattctctcataattgtacgtctatggcgatgctttacttgcttgcattatactgatgctcaatcatatattgatgatgattatgatttgagtatgactcatgagattaattcacacccctgaaggtaaatgaagtattatttgaggttggtattgtatctgaaggtaaatgaagtattatttgaggtttgtgttgtatctgaaggaagtgaagtttattgataaatgtagcatgccatatacattgcatgactcatttgcatctgaagttttgtcgtgacctatggtccgaccgtaccggtacaacttagcatcgtacgttgcccgaggaggggtacgatgcggcttcatacccttagaggtatgaaggcagaggacatatgcattgcattcatatgcattcattgaagtgatatttgcagatgatgtggttttataccctcagaggtatgaagacagagtacctacacattgcattcctatgcatacattgaagtgatatttgcaggtattgttgacgcagggaagtgttatagaacctattgtggttgttcgaggaaatgagatggtattggttatagtgggactactgagttctatatctacaagcatttctgatttttaattgtgactcctttaaaatgttgatgaattcaatttgtggtttaaatatctcgtcaaaacaatttgcttgctgagatgtttcatctcactcttgcattactcagtgcaggtgcttgatgctcgtcaaggggagtgggaagtagcggcacgttgcacacactgtttaaagaaccaaataattagctttggttattgacttttgaagttcatattttgaaatatgatgtaggcataagctggttcattcatggttaatcatctttgatgagaattatatc

SEQ ID NO: 261551 - DNA, 494 bp, Zea mays
gcccccccctctctctaggcttggaggacgcccctctcactcctccacccatttgcaggcgccaccccacctcccccatcaaaccctagccgccccctcctcaagcccttctctccgaggtgccattcgtgtcccgctcggctctacgtcgcgttggtgcatgtctccaattggattttggtggagggaagaagaagggaggaaagggggaggattcaaggtggtggacttccggatcgtacttagggatttgcccgaacttccggtaaaggtacttgatacatgttgggaatgaggggagtagcagcacgtccactttcactctcacaataacgctgccgaggtgcagccatgatttaattagaaatttattgtcaaaggaagtttgtttttttttataactagtcgtgcgcactggttaattcagttcaggtcgtacgtttatcttcccctttgctagccgattaatagtacaataatacttagtatgtttt

SEQ ID NO: 261552 - DNA, 475 bp, Zea mays
gcattcctatgcatacattgaagtgatatttgcaggtattgttgacgcagggaagtgttatacaacctattgtggtcgtttgaggaaatgagatagcattggttattttgtgactattgagttctatatctacaagtatttctgatctcaattgtgactcttttaaaatgttgattaattcaatttgtggtttaaatatctcgtcaaaataatttgcttgctgagatgtttcatctcactcttgcattactcaatgcaggtacttgattcatgttgggaagagggaagtagcagcacgtccaccttcactcttataataacgctgcccaggcgcagccatgatttaattagaaacttcttgtcaaaggatgtttgttttttttctagtcgtgcgcgctggttaattcagttcatgtcgttatggttatcttccctttgctagcagattattcctgtcaataatgcttagtatgtt

SEQ ID NO: 261553 - DNA, 300 bp, Zea mays
gccctccaatacttcttcctccctagatctcccccccacgcaacaaggatcgagaagaggaggaacaagatggattgaagaggaagagaggatcaaggagatgtgctaccccccccccccatctcttgcagattattcttggggaaaaccctaggtgcttgttgctcgtcaagggaatgtggggagtagcagcacgtccaccttcactcttcataataacgctgcccaggcgcagccatgatttaattagaagcttcttgtcaaaggatgtctgtcttctaactagtcatgcacactagt

SEQ ID NO: 261554 - DNA, 1021 bp, Zea mays
ctcccgccgcctgtccctgcgctagtcgacactcgacaggctcggtttccgccctcctctcccaccgccgcgcaccgagaagatggggaagcggtggatcccgctggaggccaacccggacgtcctgaaccagttcatatgggggctgggagtccacgaggaggatgtgcagttctgcgacgtctacggccttgacgatgagctgctcgctatggtgccccagcccgttctcgccgtcctcttcctctacccgctcacctccctggacgaggagaaagaagaatcaagtgtttctgctgccacatcgacctcagcgggcaaggaattgagcaagaaagtatactttacgaagcagactgttggtaatgcttgtggaacagttggtgttattcatgcaataggaaatgcaacatctcaaatcaagctagttgaggggtcctattttgagaagttctataagcaaacggctgatatggatccagctcagcgtgctgcctttctcgaggaagatgatgagatggaagatgcacattctgttgctgcatctgctggtgacactgatgtgaactttatgagcttgatggacgaaaatcacaacccacaccccatggcccttcatcacctgaaaccttgttgcaggatgctgcaaaagtcatcaaagctagaattgcagagaaccctaactcgatgaacttcaacgtcatggctctttcaaagaagtgaagtgtactgtgatggatggattttctttggcagaatacgggcctcttttcctttcgcttccgctgggctgcaccgagtggaaggtttgcatgggcaaacatagggggaaaaaactttatatgacctgagatgtttggttgatgactcgatgtattctcgtgccttcatggagagagaaatgactgttcacgatttcaactttttccggtgtattagtagtcgaatggagacttgcattggacgagtttcactttgctgtatctgaaccattctagcttcctcgccaggttgattccat

SEQ ID NO: 261555 - DNA, 651 bp, Zea mays
cacacttttctctctctgtatgttgtgtaattcaatgtgttttcatgaacacacatgtggaatggagtagtttgaatttaaattacatttgacttgcttgtaacatgatttcatgggtaccttatttgcagttgaggggtcctattttgagaagttctataagcaatcggctgatatggatccagctcagcgtgctgcctttctcgaggaagatgatgagatggaagatgcacattctgttgctgcatctgctggtgacactgatgctaatgttgatgttaatgaacattttgtatgtttctcctgtgttgatggtgaactttatgagcttgatggacgaaaatcacaacccacatcccatggcccttcatcacctgaaaccttgttgcaggatgctgcaaaagtcatcaaagctagaattgcagagaaccctaactcgatgaacttcaacgtcatggctctttcaaagaagtgaagtgtactgtgatgggtggatttcatttggcagaatacgggtcccttttcttttcagttctgctgagtactgcaccgagtggaaggtttgcacagggaaacaaagatagggaaaaatgttgactcgatgtattatcgtgccttcttgatggatagagaaatggtggttcacgattt

SEQ ID NO: 261556 - DNA, 1118 bp, Zea mays
ttcacgcgtccggcgacccatggtgcaagcttggtcactgagtcaacctgattggacctgcaagattgatgaaggtccagcagggattgcatatgctcgctggagtcctgacagtcgtcatatattaactacatctgagtttcagctccgtctcactgtgtggtctctcgtaaatacagcatgcgtacatgtccagtggccaaaacatggttctaaaggtgtttctttcaccaaagacgggaaatttgctgcaatctgtaccagacgtgattgcaaggattacattaatttactatcatgtcactcttgggaaataatgactgtctttgctattgacacggtagacttagctggtgttgaatggtcaccatatgatagtgctattgttgtttgggattcacttcttgaatataaggttctgatatattcgccagacggaaggtgcttgttcaagtatctagcttatgaaagtgggttgggtgtgaaaactgttgcttggtcaccatgtggacagtttttagcagtgggaagctatgatcaagcagtacggactttgaatcacttgacgtggaattcttttgcggagttctcacatgcagggtatattcgtagtccttgcaatgctgctatttataaggaagtggatgacccatggcagcttgatatgtcggaattatgtctatgtgtaggcctctctcgaaacatgccagacaatggtgcagaaaatggcaccgagggaggaggctctagagttaaatatgctgtgatggatgttcccatcaccttaccttcgttgaaaccagcttttgacaagcctaaccccaaacaaggcattggtatgctgtcatggagcagcgacagccactatttcttcaccaggaatgacaacatgccaactgttctttggatatgggatatatgccgccttgagcttgccgctgtgctcgtgcagaaagatccaatccgtgctgcagcatgggaccctacctgcacacgccttgttttatgcacagagagccctcacttgtacatgtggacgccatccggtgcctgctgtgtcaacatcccctttctgaacttccgaatcgttgatttgaagtggagctcgaatgggagct

SEQ ID NO: 261557 - DNA, 1185 bp, Zea mays
tctcgagccgattcggctcgagggcctccctctttttcctcgcactccgcaagacgcaagaccacctcaccagcctcctcgtccccgatctcctcccacccgcatccaagggtttccttctcgaccgtgcggaacgagccagagaacaggtatggcggcggcgcggcacctcagatccggcctccccctcctccgcgcccacctcgcatcctccgaatccgcggccgtcgctcaggtttcgaggggcttcgcgtcgcaggccgccaagcccaccgggaaggagatcaaggttccaaaggctctgtttggcggcacaggcaactatgccagtgcactgttcctcacagcagctaaatctaatgcattggacaaagttgaatctgagattaaagctattgtagaggcttccaagaagagcccgttgttttctcaattcataaaggacttgtcagttccaaaagcgaccagggtgaaggctatagccgaaatatttgctgacgctgggttttcagatgttacaaagaatttcttggctgtcctggcggacaatggcaggctgaaatatattgaacgcattgcggagagatttgttgatttgactatggaacataagggggagatgaaggttgtggtcaggacagttatttcactcaccaaggaggaggagaaagaactcaaggaaaccttgcaggatatccttggggaaaacaaaactattttggttgaacagaagattgactacagcatcatgggaggattagtgattgaattcgggcagaaggtgcttgatatctcaatcaggaacagggcgaagcaaatggaggcgttcttgaggcaaccacttgacttctaacagccttttggataaaagaagcatcatcggaatgcagaggctgtcctgttgaaggttttcctgtgtctgcaattttaatctgtccttttgaataaaatgtttcctctaacaagtgaagggcactgtttttattgtctcgtgggccacagatgcctgctgaacaatttatgttcatttcttcttttcttaaagaagcatgcactaagaacatgaaggatgcatgccatggaaagtttttgaaagtcattgaaacgtatgagctcctcatgcaatgcattattctccttatattcatgggtttacggtgagaaaaaaaaaacaaaaaagaaaaa

SEQ ID NO: 261558 - DNA, 657 bp, Zea mays
cccacgcgtccgcccacgcgtccgcccacgcgtccgctcctcccaggcgcatccaagggggtccttctcgaccgtgcggaacgagccagagaacaggtatggcggcggcgcggcacctcagatccggcctccccctcctccgcgcccacctcgcatcctccgaatccgcggccgtcgctcaggtttcgaggggcttcgcgtcgcaggccgctaagcccaccgggaaggagatcaaggttccaaaggctctgtttggcggcacaggcaactatgccagtgcactgttcctcacagcagctaaatctaatgcattggacaaagttgaatctgagattaaagctattgtagaggcttccaagaagagcccgttgttttctcaattcataaaggacttgtcagttccaaaagcgaccagggtgaaggctatagccgaaatatttgtaacatctgaaaacccagcgtcagcaaatatttcttggctgtcctggcggacaatggcaggctgaaatatattgaacgcattgcggagagatttgttgatttgactatggaacataagggggagatgaaggttgtggtcaggacagttatttcactcaccaaggaggaggagaaagaactcaaggaaaccttgcaggatatccttggggaaaacaa

SEQ ID NO: 261559 - DNA, 850 bp, Zea mays
gggagcacggagatgagctcttctttcggaggctagtgatcactcggtcactcctctcagtttgtctttccttgtagtttgatgctctgtttctagtagcaggtagcaatgaacaaggtcatacctctctatcttgatgcttgatttatactacatagtatatataccttataagtcctggtacatacagcagaagactaggactgattagggtcgactagtcaactgatcaatgactgactagtcgcctggtcggtaccatcgtgactagggttgactagcccgtttaatagtgtatttataaatgcggctgtaaaatcaattatatgggggtacttaaccagttgattgatggatttctcgaaaaaagttgctttgtctgttgaattggtactgcccggtcggtaccgtcgtgactataaggttgattagcccatttaatagcgtgtttataaatgcggttgtagaatcaattatatggtgctactacacccgttgattgaaggatttctctgttgaattttccgacctgggcttgattagcaaatggctacagtttgttccatgtttgtcatgtattttgacagtgcctaactttgtgttggtttatgaagctgtcctggcggacaatggcaggctgaaatatattgaacgcattgcggagagatttgttgatttgactatggaacataagggggagatgaaggttgtggtcaggacagttatttcactcaccaaggaggaggagaaagaactcaaggaaaccttgcaggatatccttggggaaaacaaaactatttgggttgaacagaagattgactacaacatcatgggaggattagtgattgaa

SEQ ID NO: 261560 - DNA, 348 bp, Zea mays
  unsure (1)..(348): unsure at all n locations
ttattatttttttattcaatgactttcaaaaactttcatgacatgcatccttcctgtgtctgcaattttaatctggccttttgaataaaatgtttcctctaacaagtgaagggcactgtttgtattgtctcgtgggccacagatgcctgctccacaatctatgttcatttcttcttttcttaaagaagcatgcactaagaacatgaaagatgcatgccatggaaaggttttgaaaggcattgaaacgtatgagcttctcctgccngagaaaaaagggaaaaaaagagaaaataaaattccccttttngaaaaaaaaacatataaaaaaaatgaaaagttaatgataat

SEQ ID NO: 261561 - DNA, 251 bp, Zea mays
aggaggacaagtatgacagataggcctttggtagagaggaggctgctgaccgcgtgtacatgcacgatataatggatgacggtataaacatgagcatcaacagtatagtccctgacctccttgatgattccattgaaggggtgtaccgttttaagaaggatcctcgggcagatatgagggcagcatctgcaagactcagagaagacgatgggtctgctaaagatggtgactctcactatgccactgaagcg

SEQ ID NO: 261562 - DNA, 626 bp, Zea mays
cccacgcgttcgcccacgcgtccggtttttttttgttatgccattaggtggctgactatctgattttgtttcatttcactgcacatccagatttggtacaacaacgtccctcacccaaagctggtggagtataagaaagatcagaactgggttacaagatctggtgattatcttgtttttcctggaggtggaactcaattcaaagatggcgtgggaagatacattcagtttgttgaacagattatgccaaccatacaatggggaaggcgcacaagaactgtcttggatgttggatgtggtgttgccagctttggtggatacctgcttgacaggaatgccattactatgtcatttgccccaaaagacgagcatgaggctcagatacagtttgccctagagcgtggaattccagcatttctagcagtaattggaacacaaaagcttccgtttcctgataatgtgttcgatgttgtacactgtgcaaggtgccgggtccattggtatgcaaatggtggaaaaccatgcgtggagcttaatagagtactgatgcctggaggatatttcatttggtctgcaacccctgtctaccgtcaagagcaaagagactcagatgacttgaatgcaat

SEQ ID NO: 261563 - DNA, 753 bp, Zea mays
atctgtttctcagcacaaggctgaacaagatagatttgtcgctcagttggcatctcttgagtgtaggcatagctctgcagaaggaaagttgggagcagctcgggaacatgcagcatctgctcaagatgaggctgcagaatggaagaagaaatatgaaatggctgccgtgcaggctaaaactgcattggagagactagcatcagtgcaagaacaaattaacaaaattgcacaagaaagggaaagttctataagggcagaatttgcctcacatttggagggaaaggaagaggaaataaggaaattagttgctaagattagagaagcggagagtgaagaaagtgtattgactgaacgcttgctggttgtggaatcaaaaacacaaggccacaacaaggaaactaccggcttggagggatgaaatcaaagaactaaccaagcaagttagagtatctaagagatagagcagtatcatatgaaaagcaagctagaatgctcgagcaagaaaaaaaccatcttcaagagaagttcttatctgaatgtaagaaatatgatgaggcagaacaaagatacaagtctgcagaaagggatgcgaagaaagctgttgagttggctgatgcagctcgaacagaggctattgcataccagaaagagaggacaaggcacagcagttatctattgaaaaggtagcagttatagagagggttcaaagacaggtagacagactagagcaggaaaaggttaatctattgggcg

SEQ ID NO: 261564 - DNA, 689 bp, Zea mays
ggagataaggaatgaagcaaagatgaggagggaaaggttagaacaatctaggttgctgataccaaagtcttacaaggagaagcacgcattggctgctcgacagaagtataaacaagctgtcattcgagtccagtttccagatagaatgattcttcagggcatattcctaccaggggaggccaccggttcgctgtatgagttcgtcacatctgctctgaagcaacaaggtttgggattcgaactcatctctccagccattcctaagccacgtgtggtgcctcattttccaaacccgggagagcgggcacgcaccttgcaagaggaggagctggtcccttccgcgctcctcaagttcattcccagggagactgattccgtggtcttcaccggtttgcttgatgagcttctcgaggccagtgagccgcttcctgctgcatcacaatgaagtgtgtgtatatagcagttcgttctgttgctgtttctgcttgctgcatcacaggattacttggataacggtacgtatttgtattgtctgacatatcttgtggaaaggctgtcatactcttaaattcttttggcccattcttaactttatatgttctgtactgtgcttatctgtactttttaactttatttcattttcttgatttcttgtttattcttattttttattttatattttttttttt

SEQ ID NO: 261565 - DNA, 1430 bp, Zea mays
ggagcttgacagtgaagcgcaggcccagatgaatgaggagctgtccggatggaagcttgtggtcagtgatgtgttccgtgcgccaagcaacccgatgctgctttgtatcatggttggggacggtgttcagatccttgggatggcggttgtgaccattctctttgctgcgctccggttcatgtccccagcctcccgtggtactctgatcacgggcatgctgttcttctatctggtccttggaatcctggctggatatgttggtgttcgcgtatggaagacgatcaagtgtggggatcactctgggtgggtcgctgtgtcgtggcgggtggcttgcttcttccccggcattgcattcctgatcctgaccacactcaacttcctattgtggggaagccacagcactggtgccatccctttctcattgttcgttgtgctgcttctgctctggctctgcatctccgtgccgctcacgcttgttggcgggttccttggtgccaaggctccacatattgagtaccctgtccgcacgaaccagatccctcgtgaaatccctcctcagaagtacccatcctggttgttggttcttggtgctggcacactgcccttcggcaccctattcatcgagctcttcttcatcatgtcaagcatatggatgggtcgtgtgtactatgtctttgggttcctcttcgtcgtcttgctgctcctggttattgtctgtgctgaggtttccctggttctaacttacatgcacctgtgtgttgaggattggaagtggtggtggaagtcattcttctcatctggatcggtggcaatctacattttcttgtactccatcaactatcttgtttttgacctcaaaagcttgagtgggccagtgtctgctaccctctacatcggttactcactcttcatggtgattgctatcatgctggcaactggcacagttgggtttatttcttcattctgcttcgtccactatcttttctcatcggtgaaagcagattaagtttcttcctgctgaggattcaagtcactcaattgagaggtgagcagaatggacagtgaaaagtttgtagtcacaaatcttagttcatgtcatcttttggtatacaaaagcctggacaactattgcaagggctactaggattcatcaatggatctgtggagaggtgtttgcagcttgcacgatgtaataggttgaattgctttattctcatgtggcgttgctatagttgtttttagattaccattactatatctcaatatgtatgctaagtaccatatctgcttgaatttatgtttattgacattttccccgaatgttagatctagttatctacttatctgctgcaatgtatgtctgttgacatttgccccaaatgttggatccagttatcgccacctactaatagatctttgtagttccacat

SEQ ID NO: 261566 - DNA, 880 bp, Zea mays
tcgcccacgcgtccgctaacacaaaagctggaggttcagacacagaggcttgaactattgacttctcaaaggatggctaacgagaatgccctggcgaaaccaattgacacacgccccatcaacgaggcaacaatgtatgcggatgaaggagacgaggttgttgaacgggtgcttggctggataatgaagctcttcccaggtgggccaaagcggcgaaccagcaagcttctgtaatgaaaatagagctcctagtataccagatatttcttccatttagggtgtgtttggcatggctctgctccaccccagagcagctctactctaaaactctgggtggagcagctctgctccagagtttagattgtttctcataaccagtgacaatggcgggtaaataactcaaaactccatgactaggttgcttttttggagttttcagagcagcaaaagaggtactccaaaaaattgtactgcaactccaaaaactccatagagtttacaactctggagttagggtgtttggcatgctctggccagctcctccttggagttttgctctggagccatgccaaacaggccctcaaggcctgtttagatgaaagggggttgcgctacagcacaaggtatctagttcaaatttgaactaaatcttaactaatctgttccaaatccccgacatccaaacatgcctttatatatatatacatttcttgctttgcccggttttgctgatagcatggtgagaagctgtatattggagccattcgatgtaaccattctttatttttgtcagaagataatgtaattccctggagtatggtgcgggcggcagcctgttttggcaacgaaaagattcctcgcaaagtttaaacccctccgt

SEQ ID NO: 261567 - DNA, 802 bp, Zea mays
aaagtttctagtctagaaaaggagcgtcagcatcttcaatctactgtcaaagctcttcaaggagaaaagaagctattgaggaacattcccgtgaatgagaaggcaacaactactgtagagaaaccttgggttgattaaagagacgcattaactggcacagaagatttagatattggggaaaacagctcttcagaaacgcttaccagcactgttgacacatgggaagatgctggaatatctgttttgcgttccaacattatgtctgatttttcttccttagaagaggtctcatctagcattccagatgatcagcttagaatgattgacaacatcaattctttgatgtcagagttagtagtggagagagaagcgctgctgcgagcactgagaattgagtcatcccactgctccaatctgaaggaattgaacaaggacctaacacaaaagctggaggttcagacacagaggcttgaactattgacttctcaaaggatggctaacgagaatgccctggcgaaaccaattgacacacgccccatcaacgaggcaacaatgtatgcggatgaaggagacgaggtaagtgtccttcaccaagtatttagttggaatttggtagttgatcctaccacataatccttgatgttaattttttgtgctgtcatgttgtgttcccagagtatggttccagtgttttagcttgaataagagctagtttggaaactcaaataatttccctatcaatcccctttaatcccagagaggatttgagttttcaaactagccctaagagcttgtttgggag

SEQ ID NO: 261568 - DNA, 582 bp, Zea mays
attgacaacatcaattctttgatgtcagagttagtagtggagagagaagcgctgcttcgagcactgagaattgagtcatccaactgctccaagctgaaggagttgaataaggacctaacacaaaagctggagattcagacacagaggcttgaactattgacttctcaaaggatggctaacgagaatgccctggcaaaaccaattgacacacgctccatcaatgatgcaacaatgtatgcagatgaaggagatggggttggtgaacgggtgcttggctggataatgaagctcttcccaggagggccaaagcggcgaaccagcaaacttctgtaatgaaaatagagctcctagtataccagatggttctttcatttaaggcttgtttaggtgaagggggttgttctaggagcaccaccaagtgtttagttcaaatttgaactaaatgttgagggaatttgttccaaatccccagcatccgaacatgcctttatatatatactagttcggttacccgtgcgttgcaacggcttacaacaatacccatgtaaactattcatcaaaaaaatttcagaattttttaaa

SEQ ID NO: 261569 - DNA, 267 bp, Zea mays
cccacgcgtccggatgtttctttcatttaaggcttgtttaggtgaaaggggttgttctaggagcactaccaagtgtttagttcaaatttgaactaaatgttgaggaatttgttccaaatccccagcatccgaacatgcctttatatatatatatatttttttttctttgcccggttttgctgatagcatggtgagaagctgtatattggagccattcaatgtaaccattatttatttttgacagaagataatgtaatttcctggagt

SEQ ID NO: 261570 - DNA, 1347 bp, Zea mays
atttgaggttgccacagaggatggtacagtactcgccatgaaacttcataggctgggaaggacatcttttagggctgtgaaatctaaacgtgactatctgaggcacagaaggagctttaattggctgtacctctcacgacttgcagctttgaaagaatttgcctttatgaaggctttaggggaccatggtttccctgttccaactgctgtagattgcaatcgccattgtgtgatcatgtcacttgtgcagggatatcctcttgttcaagtgaaagagttacaaaatccagatgacgtttttgacacaattcttggtcttattgttcgtttggcagagcatggactgatacattgtgactttaatgagttcaatatcatgattgacgatgatgaaaaaattacagttattgattttccacagatggtatctgtttctcatcgtaatgcccaaatgttttttgaccgagacattgaatgtatctacaagttctttaacaaaaggttcaatctgacatcagagaaaaatgaagaacaagctgggtctgaaagtgatgatgaagggaatagcagaccttcctttttgtctgtgaaaaagactgctggttccttggacaaggaactagctgcaagtggatataccaggaaagagcaagtggagatggacaagtacattgaggaagatgctgaaagacatgattccagctcagatgatgatgacgacgacgacgacgacgacgtgggtgatgctgtgtctttggtttccttgaagatagaccaggacgattctgctgagcctgattgtaatcttgcctcaagggattcagatgtgcctggaactttttctgaagagcatgaaacaagctgtagcagtgagaagagattggaaagtccctcgggtggcaatggagaggctatgaaaccgcttgaatctgagggcaagacgctttcccagaaagacgacaacaatgatgatgactcatcagaggatgctgatgaagaagaagaagatgccgagctcacgaaacaattgaacaagcaaaggaaaaaggcaatagcagctgccagtggtcggagaaggccagtgtcgtccaggaacgcctacaagggtaagggcaccatgaactccaaaatccagaggcaggcgtgccagtggtgatggtcactcgaatgtctgcagcgcctctttcgacaatcgtaaagtagaccatgagtaggattttccatgagtgtagaaccgagggatccctgtactagaatcaactctggtcttattcttttatcacgtgtcgtatacctttttgtacacggttatggtgagatcatttgggttatgcttctgtttatacc

SEQ ID NO: 261571 - DNA, 640 bp, Zea mays
cgaaacccgctcgcgttttcttctttcagaagacgaaatccactcaggagcgaggaaagagggacagaggagggatagatccccgggctccacgcctccacaaccatccgtcccgatcccgaccagctttgagatcgcgatggcggacggccgctgctgcaccttcctggagatcctcttcgccatcatcctcccgcccctcggcgtcttcctccgattcggctgctgcagaatagagttctgcatctgcctgctgctcacaatccttggctacgtccccggaatcatctacgcgatctatgtccttgttgctctcgactctgaccagcacgagagggaatactacacccttgcttagagcatctggttgtgccaggcgggcctgcacagttgagtcgaaatcagtattttttttctcatgtggattgtctgacatggcataagcggcaatgggtaaccaagtgttgtggtctatatctctgttacccaacttgtgagctctctttattgtgctccagttattcaatctgtaattgtgatactacaagagaataagatgcgcatgtatctctgagagcaactgtgatttatgattggtgctaccttgggctcaaaaacatgtgaacagtcgttctatgac

SEQ ID NO: 261572 - DNA, 798 bp, Zea mays
gtgcgcccctattctcttcaccggcttcctcctcctcctcctctcccctcccgattccttctctctcccgctagatggatgggcacgctactgcgccggatttctccccagccggttccttcggccacgcgaccgcgcgctcggaaaactccacggacagcgaaggaggtgaaccaaggacgacgtatctgtcgccggagaaggtaagcatcgatccgccgtgtcctacgattcgtttgtcttgctccaggcggcgagcagcagtgggggtcgtcctcgcggatccgccttcaagcttcgcggatcccacccaaaattaaaatcctctcggaaatcagagacgcgaatccctcgccccaggccccgaaacctccgagttctctcgccaattcgatccgcctcaccgccgccgcccgtccgccggtcggccttgactgctccgtcgcacgtggcggttcgcagcgcggaatctaccttgtgttgagagatccggggaaacccttgttcccggtcgttccggctcgaatcttctgcggactggcaatgtaagcgttctccatcggagggcgacgatctacggggcggttgttggcggggtcgcgggaatggagcacgtgttcggagggaagtttaagcttgggaagaagatcgggagcggatctttcggcgagctctatctcggcgtcaacatacagagcggcgaggaggtggctatcaagttggaatcttgtaaaatcaaggcatcctcagcttcattatgagtcgaaactatacatgcttctccaagggggaactgga

SEQ ID NO: 261573 - DNA, 504 bp, Zea mays
tgccagtctgctccgcagctatgaggtacagcctcatccaagtttgtctaaagaaatggacacaacagttgatagcagccaccttcatcttccaaaccctaagatcatcctcaccagaagaaggatctgaagggagagtttggcaaacgaaaatctggcacgtttgctttcactgtattgtttttcactggtgttacaccagtatatgatctttagtttcctaccgtcgtttggaccatgctgaagtttggaaaggcgaccttgacgatgcggaagtgccttttttcctccggatttttgacagaccctgtgtgcttcgttggatctaagtttttgtcaggtttttggagcacagggctgttagatcacaggagacgtatgctgatgtgtataaacagactcgtttttttcagttggggttttctcctatctgtggagaatgtaattaatgtccaacgcatgatgtcgctcgccacataatattttattgtatcttacttgcat

SEQ ID NO: 261574 - DNA, 718 bp, Zea mays
cgcgcggccggcggggcgcagatcggctcctgcacgtgcagcgcagccgcacgatagtgaagcagggaggctgcgataggaggcgcagggagggtgcgacggaggcaaagagcaagcacctggggacttcaggtaagtagaaaaccaacactgaatttgtcggttctctattttgtgattgaccgattggtttgttgatctcagaaaccaaaaattgtttcaccgtcaagcaccaatttttgggtaggtaagtgttttgggatgattctcctatgcatcaatagcaaccttgtgcttggcaaagttatttgccctgataatgttgtaggtttagtgaaaagaaatatactgacatatccaccgatccatcgatgcccaatggagattgacctctatcaagatttagttatgtgtctcagtagggcaatatttctgtgagttgtatactgtggattcctcatctgcatcatgaattgatcgcactatttatgccctatttttcaaaccatggtttctgtaattctttgcaccatggtatttttctcaaatgattttatctttcacaacccggactgaactcactgaagcagaaagaaagagtacaagtctactactgcagaaagcaaggagaatgccaatagaagcagatttcatgtatggatcggataaaatcttgagcaaaatgggagaagggttgggttctctgcaatctgtcgtc

SEQ ID NO: 261575 - DNA, 581 bp, Zea mays
acccaggtccgggaccgtggtccggcgccgagaagctcattgaacggatgctgcaaacaggcacagttccagacgatgaatcctacaatttggttgtaggcctgcttatcagacagaacctcgttgattcatctctgaagtatttggatctgatgcttaaatcgggctacatgttatcactaactgttttcacagattatatccgagcatgtgtgagatctgggaggttggacacgttgacatcaattatacagaaatgcaagacagctgataagatcaaagttttgtgtccgcaatgggcctggtgcattgacatatcagatgctgcatttgaagctaacaacagcaaattagctctttttgctctggaatttcttgcaagatggattgttcgtggtgagaatgttaaacctcctgttcagctgtcagttaatgaaggtcttgtaatatcagctctgagtgctgctggcagaacttttagtactgacctcttgaatgctgcttggtcgctactacggaagtccctgcgccagaaaagggcacccaccccagagacatatcttgccaagatctatgctcat

SEQ ID NO: 261576 - DNA, 588 bp, Zea mays
  unsure (1)..(588): unsure at all n locations
caacccgccaaaccctacttgccaccgccaaacttccgccttcgtccgcgccggcgccgctctatcgctctaaaataacctttccagttccaccgggactagctgaaaggagagggaacggagggggatggcgtcgccggacgacgagataagccggctcttccgcatccgccgcacggtgtatgagatgctgcgcgaccgcggatacggtgtccgcgacgaacaaatcaagctcgaaaggcacaagttcatcgaacgctacggcaaccccgtccgccgtgacgagctcaccttcaacgccacaaagttgaacggcccatcggaccagatctacgtgttctttcctaatgaggcaaagcccggggtgaagacaatcaggaactacgtcgagaagatgaagaacgagaacgtcttcgccggcatactcgtcgtgcagcaggcgctcagcgccttcgcacgcatctccttncatgaggtcttccagaagtaccacctttaggtcttccaggnagctgagcttcttgtcaacattaatgaccatgtcctagtgccagatcatgtgctcctgacacctgaagacaagaatac

SEQ ID NO: 261577 - DNA, 2050 bp, Zea mays
aagttactcataagtatcagaagaaaaggacccgagcctagggctcagggtgcctcccacagccgccgctacgctttggctgcatcactcgctcctcttcggagcccctctttcgccggcgtcgtaagaagagatggcagagcgtttgacccgtatcgccatagttagcgaggacaagtgcaagcccaagaagtgccgccaggagtgcaagaagagctgccccgtcgtcaagactgggaagctttgcattgaagtaacttcggcatcaaaactcgctttcatttctgaggagctgtgcatcggttgtggtatctgtgtaaagaaatgtccatttgatgccattgaaatcatcaaccttccaaaagacttggaaaaggataccactcaccgatatgggcctaataccttcaagttgcacaggttgcctgtcccaaggcctggtcaggttttgggccttgttggaacaaacgggattggaaagtcgacagctcttaaagtgttggctggcaagctgaaacctaacttggggcgcttcaaaaacccacctgattggcaggaaattcttacatactttcgtgggtctgaacttcagaactacttcacacgcatattggaagataacctgaaggcaatcatcaaacctcagtatgttgaccacattccaaaggctgttcaagggaatgtaggacaagtgcttgaacagaaggacgagagggatatgaaagctgaactgtgtgttgatcttgaattaaaccaagttattgaccgaaatgtaggagatctttctggcggtgagctccagagatttgcaatagcagttgttgcagtgcaaaatgcggaaatctacatgttcgatgagccatcaagttaccttgatgtgaagcagaggctgaaagctgcacaagtcatcaggtccttgcttaggcccaacagctatgtcatcgttgtggaacatgacttgagtgtcttggattacttgtccgacttcatttgttgtttatatggcaagccaggtgcttatggtgtggttaccttgccattctcggtccgagagggtatcaatattttcttggctggatttgttccaacagaaaatcttcggttccgagacgaatctcttacatttaagattgcagagactcaagaaagtgctgaggagattgagacatatcagcggtataagtaccctactatgagcaaaacacaggggaatttcaagcttactgttgttgagggtgaatttaccgattctcagattgttgttatgcttggtgaaaacgggacagggaaaactaccttcattagaatgctggctgggttgttgaagccagacacagtggaaggaactgatattgaaattcctgaattcaatgtgtcctacaagccccaaaagattagcccgaaattcaagaataccgtgaggcatttgctacaccagaaaattcgggattcctatatgcaccctcagtttgtgtctgatgtaatgaagccactgcaaattgaacaactcatggaccaggaggttgttaatttatctggtggagagctccaaagagttgctatatgcctctgccttggaaagcctgcagatatctatctgattgatgaaccaagtgcttatcttgattcggagcagcgtattgtggcctcaaaggttatcaagagattcattcttcacgcgaagaaaactgcatttattgttgagcatgatttcatcatggcaacatacttggctgacaaggtcattgtttatgaggggcgaccttctattgactgttctgccaatgcaccacagtctttagtatccgggatgaataaattcttatcgcatcttgacattacttttagaagagacccgaccaactataggccacgtataaacaagttggactctacaaaggacagggaacagaagtcggccgggtcctactactacctcgatgactaatgaggaagcacagattcttcttggagagccatatggcgcatagtctttcgaggtctctttgagtgttttaatccttatgttatctttagcttccttacttca

SEQ ID NO: 261578 - DNA, 545 bp, Zea mays
  unsure (1)..(545): unsure at all n locations
cccacgcgtccgcccacgcgtccgggaaaggcaaggggaagggcgggggcgcgtcgcctgagaagggcagctctggggcgccctccggtgaggacgactccaggagcagtgacagcggcagcgatgagtcgtcagagacgagagatgatgacactgaccataagggttcatctgcgcccaagaaaaggaaatctggtaacacgtcggctgaaggtgaaccgtctcaagctgctgttgtgcgctatgctacggttgagtcgccatatcccgcaaagggaaggtctgcctcaaagcttccagtgtctgcacctggcagggcagcgcttcctagtgccaccccgaatctgaacattgggatggacatttggaatacttctcctgccttggctgttcctgcagtgcagggggaagcgaatcctgngttggcgcttgcccgacgtgatagcgttactcaactggatgaacgtgaattgaagagggagaggcggaaacaatctaacagggagtctgcaaggagatctaggttacgcaagcagcaagagtgt

SEQ ID NO: 261579 - DNA, 424 bp, Zea mays
gtcggacataaaaaccagaaaagggggcgtcgaacctagggtttcgtctgtctcccgacgccgccgctaggctttgcgcctttgcctgcatcactcgctcattcggagcccctctcttcgccggcgtcgtaagaagagatggcagagcgtttgacccgtatcgccatagttagcgaggacaagtgcaagcccaagaagtgccgccaggagtgcaagaagagctgccccgtcgtcaagactgggaagctttgcattgaagtgacttcggcgtcgaaactcgctttcatttctgaggaactgtgcatcggttgtggtatctgtgtaaagaaatgcccccccatttgatgccattgaaatcatcaaccttccaaaagacttggaaaaggataccactcaccggtatgggcctaataccttcaagctg

SEQ ID NO: 261580 - DNA, 595 bp, Zea mays
  unsure (1)..(595): unsure at all n locations
gcacgtaccggtccggaattcccgggctgtactgccaacgcaccacagtctttagtatctgggatgaataaattcttatcgcatctcgacatcacttttagaagagacccaaccaactataggccacgtataaacaagttggaatcgacaaaggacagggaacagaagtcagccgggtcctactactacctcgatgactaatgaggaagtgcagattcttcttggagagccatatgtcgcataatctttccagagcgtggaaaggagaagctactttgaagctaccactgcatcatggcatgtgacttgttgaataattggttgcaggagtagagtgcgccggttataacttataaagcagagcatgccgtgttgatactgagttttttgttggcttgacctatatgaagagaaggatcggtgttaaaatgagatttgcgagggggaactaatttctgtttttaagcaatactgtactgtcgttttgctatcaagtatatttgacccccgattatatagattacattgaagtttttgggcaacaatgtgaaatcttgtgataaaaaaaaaaaaaaaaaaaaaaanaaaanaaaaa

SEQ ID NO: 261581 - DNA, 502 bp, Zea mays
cggacgcgtgggcgaccaactataggccacgtataaacaagttggactctacaaaggacagggaacagaagtcggccgggtcctactactacctcgatgactaatgaggaagcacagattcttcttggagagccatatggcgcatagtctttggagggcgcccagggtgcggaaacgagaagctactgtgaagctaccactacatggcatgagacttggttgcaggagtagagtgcgccggttataacttataaagcagagcatgctgtgttgatactgttttttttccctttttggcttgacctatatgaagaaaaggatcggcgttaaaatggtattgtgaagggagaggtttttaagcaaaatgttgtaccgtcgttttgccatcgagtatatttgaccctcgattatatagatctcattaaatttttggagcaacaatatgaaatctcgtgacaagtcgttgtgcttttttggttatctgataaaaaagggcggccgc

SEQ ID NO: 261582 - DNA, 464 bp, Zea mays
  unsure (1)..(464): unsure at all n locations
tcgtctcgtggagaagtctacgtttagaagtctactcatctgtcatcgatggtcatggtggcgtcggcttgaataattggtgtgcgaggagtagaagtgcgtccggttataacttataaagcagagcatgccgtgttgatactgagttttttgttggcttgacctatatgaagagaaggatcggtgttaaaatgagatttgcgagggggaactaatttctgtttttaagcaatactgtactgtcgttttgctatcaagtatatttgaccctcgattatatagattacattgaagtttttgggcaacaatgtgaaatcttgtgataaatctctgtgcttattggttatctgattgtaactcgtcctttgtaaactttgtttgaatgagcaagtgaactgattgtcgataaaaaaaaaattccaccccatacttacaaaaaaaaaaaaaaaaaaaaaaaaaanaaa

SEQ ID NO: 261583 - DNA, 557 bp, Zea mays
gccactcgctgcccgcagcggaggtgagacacaataatcttagatggagaggttaagcaccaaccagctctacagttctggtgttcctgtaaccgtaccaacatctctgccttgtataccagtctctctggatgagagcttcccgaggcttcccgatgcacagagtgttttgatggagagagaattgaggagcactccactaccacctcaccagacaactgttgctcctatccgtggtctgtttcactccaatactggatctgttggtcctttgtgctcacctccgtctgtaaggttctcttcgcattcaaatcctgagcaataccccaaccacaattcatacaattctcaagtaccaagcactgcaagttcctcaacgctgaattatgggtcacaatatggaggctttgaaccatccattaaccgatttcccaagagacattgaaccaacttggtgccccgatccagttgagagcattcttggatactctggtgatgtccctgctgggaataatttgactgggaccacttctattggagcttcagatgatcttact

SEQ ID NO: 261584 - DNA, 428 bp, Zea mays
ctcttctcaccgcatcacctctccctccggcgcgcgcgtccgggtacagcgctagagtcactggccaccatgcatgcggcggcggcggcgaatggcgcgggcgacgtgcagaagcctcagcagcagccgctggtggcgggggcgccgcccccaccgccggcggcggccgtggtgccgccccattgggtcgccatgccgttcgcgccgcctcccggggccacggccatggtgatgcagccgcaccatatggcgcctccgccgccgcagttcgcgccgactcacttcgtgccgttccacgccgtcgcgccggcaccgtcggtgccagcagcggtcgcactgggttccccagcgccgcatcagccccggcaggaggagaacaagagcgtgtgggtcggcgaccttcattactggatggacgagaactatct

SEQ ID NO: 261585 - DNA, 810 bp, Zea mays
ccacccagcgtccatacacacagcagcctttttgttctccccgcgagcgctctctttctctatcgactggcgacgactccgccaccgccgccgctctacgcgagacgcccaggtcttcgccaacgacgagcatccgggttagagaggaagaaattgcaaccgaaacaatggcggcagattccggcgctcgcagacaaccaagcttcaccaaggtcgaccagctgcgccctggaacccacggccacaacctcatcctcaaggttgttgactccaagatggtcgtccagagaggccgcgagggagggccccagggaagacagatgaggattgcggagtgcttggttggtgatgaaaccggcatcattgtcttcactgcaagaaacgatcaagtggatgtaattaggcctggaacaactgttgaactgaggaacgcaaagatcgacatgttcaagggttcgatgcggcttgcagtggacaagtggggaattgtgaaagctgctgaaagctcagctgagtggacagtcaaggaggacaacaacctgtccttaattgagtttgagctggtgaccgtgacggagtgaaaaccgccattgcttaggagtattgttggtttgctgtgttgttgaacctaatcatcatcgccaatcaataaggactcgtggttgatgttctcggcatcggagttgcgtattgctgtaccgttgcttgcttcctgtgcgttgtggctacttttgactgctatccaataataataaattggtgtcatgaagtggaaaatgccaaaaaaaaaaaaaaaaaaaagggcggccg

SEQ ID NO: 261586 - DNA, 906 bp, Zea mays
tttgggggtaaccaaagaaaaccacttcaaagaggcaaggcagcaatcgaaaaaataaaagtaaggagggaaatgacaatagccaaggtactggtctggattctgaaggtcaatcaggaaaagcagatgtacaggctgagattgttgcttctaagatgtccgcatatgatgcttccatgtcagcctctacttctaatgttaaatttaaccattcatctgctttcggaaacttggcaaacgccaagccactacctcctgtgcagtttcatgctctagacagtgaccaccaggttcttgatgtatggaagccatctgtcattattgtttatcatccagatattaccttcgtaagagaaattgaagtatacaaggcagaaaactcatcaaggaagttaaaagtttacttccttttttatgaagattccactgaggtgcaaaaatatgagtccagcattcgacgggaaaatgaagcatttgaatctttgatcagacagaagtccctgatgatgatacctgttgatcaggatggccgttgcattggaccaactgttgcaaatgaaccagagcctcctttatgtcagaactcaattacaagaaaggcaggtggtaaaaaggcgcccgagaaggagatgcaggttattgtagacatgagagagttcatgagcagccttccgaatgtattacatcaaaaaggtatccgaatcgtaccggtcacccttgaagttggtgactatgtgctctctcctttgatctgtgttgaacggaaaagtatcgcggacttgttccaaagctttgcttctggtccgctgtacaatcaggttgagacaatggcacgttactacaagatcccggttctcctcatcgagttctcacaagataagagcttttcctttcagtctgcaaatg

SEQ ID NO: 261587 - DNA, 468 bp, Zea mays
acgcgttgtctgatacaaccccctagactgagtcggtcggactcgatcagcaattaagcgaacctcgccgcgatcgtatcagccatggcgaccgccgcgcacgagggcgtgacccagcgcgtcgctgccagtggcagcagggacgacggcgccagcggcggcatcgcggcggtctcgggtcccaacaagaagccgggcggcggcaggaggcggcgcggcctccgttcggtcgccgccgcggtgtccatccccgcggcgctcgtggctctgtccttcttcgccgcgggccactccacgccgccgccgagttccgccacggtggcggtggtgcgggccgggtcggtggcgtcggaggcggtgctggcgctggcggcgtggatggcgtgggcagagggcgggctgcacgcgcgtccggccgacacgctgttgccctacgccgcgcgggttcgcgccgggctcgcgtgggcg

SEQ ID NO: 261588 - DNA, 1545 bp, Zea mays
cgagatctttcaccccacgacccgaacgttcgggagaaggcaaattccagacaccacacaggacacagcgcattcggctaatttcctcgtctctccccaatccgaccacccccatccattcaccaacccgaaatagaaggccgtccccagccaccagcctccggagttcctccggcgatccccgtccccttgtgtgcgcgctccaggagggccttctgcctccagcttgcagagcccacctaattgctgcgagatggatagagggcagaacgggagggatgacgtcttcggacgcagggatccattttctgggtttggcttcggcccccacaggagcttgttttctggtctccttggggggagggatccatttgacgatccgttctttacccatccgttcgggggtcggatgatgggtgaccatgacatgtttgtacctagtccttttgggccgatgggagggccttttggggacatgaggaacggtgggtttatcgagcaagctcctcctaggggtaacagaagaaggcctgtgatcacagaggtcgaggaggatggtggagagaacgcagagcatggtaaccagcagcctaaccaagatccttatgttcaggagccagacgatgggattgatgagacagaaggtggccaagtcgagctgcacagggatctcagtagggctaatagtggagggcagccgcaggctcgtactttcacatatcagagctcttccgtgacgtttggtggtattaatggagcttactacaccacttcaaagtctcggcggactggtagtgacgggatcactgtggaagaaagcaaggaagctgatacaacaactaaagaggctactcatagaatctcccgtggaatccatgacaagggacattccctgacaaggaaactgaattcggatgggaaggttgacaccacacagacactgcacaacctgaatgaagatgaactagctggattggagcaatcatggaaggggaatgctggacattacttgcctgactggaaccacaatgctggtgcacctaatagcgataattctggtgaccgtagctccaatggacgtgaccggcgatcggcctcaggctgggcgcttcctgggaccgagcaaggccgtgatccgaggcgcaacgggaagccaaaatcacgggtcatccctatctcctgaagagcatggacggagtagatatatagagtagataaataaacagctggtttgtactactatgcaaggtttaggttcaagatcgtttcaaggaaacgacctgaggtccaggtaaccggagtccgcccagcacctcgcgtgctattgtctgattctgtagctgtacagtgctctgctaccttattatccgtgatgtgaaacaatttgtgtcgtccagtcttgctgtaaaatcatcatcgcgtatattgtaaacctgagtcggtatgtctgagttggctttgctgtgttgttgctagatgtttgggtcgctgaaggatctgcttctgtgtttgcgtaaaaaaaaaaaaaaaaaaaccacgcgtccg

SEQ ID NO: 261589 - DNA, 771 bp, Zea mays
gaggggagggaaggggaggtgaaccgagggagcggaggaagatctcgggctctcagagctgcatcctgaacccatcgcgtaggaaggggcaaaggagtcggagctgatccggcagtcgctctctctcggattgagtacgatttgacgcatttgcggccgagctttcttgcacccaagatgagtgggcatggtgacactgcgacctcagctaagatggcgaaactgaaggagttgttgcaaaagagtgaaaaccacatttgtgctgactgtggtgcatctgatcccaaatgggcatcagctaatattggggtattcatttgcgtaaaatgttctggcgtccatagaagtctcggtacacatatttcaaaggttctgtcagtgacactggacaagtggtctgacagtgaagttgactccatgatagaagttggtgggaattctcaggcaaacgcaatatatgaggcttttataccagagggctgccagaagccacattcagattctacccaggaagagcgagaaaaattcatcaggtctaaatatgagctgcaggaatttctgaagccaagcttgcgcattgtttctcatcagcctagtgactctggaaaacatgccggaaatgcttctcattctgatggttccaagagtcaagtcggcatgatcgagttcattggaatattgaatgtcaaggtgattggaggcaccaacctagccatcagggatatgtcaagcagtgacccttatggcgtcctgacacttgggcaacagaaa

SEQ ID NO: 261590 - DNA, 494 bp, Zea mays
ggagcaatcagcatataatcaagctatgcaacaaaatatttgtgatgggaaaattcaccctcttacagtccattcactgtacgtctacatacaactcctcgctatgcaaactaatggagtattgtttgagtccagctgttattacgcttcaggaccgcctgaaggaaaatgaacttcggctatctatgttaaaagaggagtgtaagcaactggaggctgatacccaaggcatgagaaatggttctcctcgtcgcctcatgaatcacggagctggtggcagcggttcacctatggctcagagcaggcatcctttctccagccaagggagccctagaagcccgagcggcggcagccggaggagggcttgatgatgatcttgctccgcctgatgcgttgatgaactgtccgttgtggcttaaccagatgcttcctgaaaacccagatatttgacggacgaagtgcccagacaacagacactgtacctgtacataccc

SEQ ID NO: 261591 - DNA, 709 bp, Zea mays
gccacgtgactgatcaggcgtccgctctaattcctttcctcggtccctccaccccccttcgccctttccgacgcgccgcccgaaaccctagccccactgattctctccagcccagcccagccaaggggaggggatgtcggcggcgccagcggcgggagggcagggtggcgggggcattgacgccgcgctcctcgacgacatcatccgccgcctgctcgaggtgcggaccgcgcgcccagggaagcaggtgcagctctctgagtcggagatccgccagctgtgcaccgtctcccgcgccatcttcctcagccagcccaacctcctcgagctcgaggcgcccatcaagatctgcggtgacatccatggtcaatacagtgatcttctaaggctttttgaatatggaggttttcctcctgaagccaattatctattcttaggtgattatgttgatcgaggcaaacaaagtttggagactatatgccttcttcttgcttacaaaatcaagtaccctgagaacttttttcttctgaggggcaatcatgaatgtgcctcaataaacagaatatatggattttatgatgaatgcaagcgtcgatttaatgtgcggctatggaaggtcttcacagaatgttttaacactctacctgtggctgctcttatcgtaataaattttttttccccgttgctttcttcccttcccccctttatt

SEQ ID NO: 261592 - DNA, 1515 bp, Zea mays
gagtttatctagctgtctggttccctttgcccaatctctctcctccgtccctccgccggtgcgcccggttcgcccttcgggacgcgccgcccgaaaccctagctccaccgatctatctctctccagcccaggcagggggaggagatggcggcggcgccagcggcgggagggcagggaggcgggggtatggacgccgcgctcctcgacgacatcatacgccgtctgctcgaggtgcggaccgcgcgccccgggaagcatgtgcagctctccgagtcggagatccgccagctctgcaccgtctcccgcgagatcttcctcaaccaacccaaccttctcgagctcgaggcgcccatcaagatctgcggtgacatccatggtcaatacagtgatcttctaaggctttttgaatatggaggctttcctcctgaagccaattatccattcttaggtgattatgttgatcgaggcaaacaaagtttggagactatatgccttcttcttgcttacaaaatcaagtaccctgagaacttttttcttctgaggggcaatcatgaatgcgcctcaataaacagaatatatggattctatgatgaatgcaagcgtcgatttaatgtgcggctatggaaggtcttcacagaatgttttaacactctacctgtggctgctcttatcgatgataaaatattatgtatgcacggtggactctctcctgatctagcacacttggatgagataaagaacttgcagcgtccaactgatgtaccagatcaaggtctactgtgtgacttgctttggtcagatccaggaaaagatgctcaagggtggggcatgaatgatagaggggtctcatatacctttggtgctgacaaggtttcagaattcttgcaaaagcatgatcttgatcttatctgtcgtgctcaccaggttgtcgaggatgggtatgaattttttgctgacagacagcttgtcaccatattctcggcccccaattattgtggtgaatttgataatgctggtgcaatgatgagtgtcgatgaaactttgatgtgctcattccaaattctgaaacctgctgagagaaaaaacaaatttatggggtccaacaaaatgtgatagtgaaagccattttgcttccagcagctctagcctcttaaggttctcctgtggatgcatcgagacaacagcatgctggcgccaagtttgagggcagcattgggctactatcagagaaaccaaataatcccatacctaactgttcatctggaagttactcatcatgacaagtgcctgaaatttttcctctttcctgttaccttgtgtcagaacattatgtagctgtagatatattgattatggaaggatgaagttgccaaattgacctgaggagattcctttctccagccaggaaaaattctgaacatcaaggagtttctgtttgcaagtttcactatttaaaagcaggtatgttgcttgtaaagagtcaaaaaaaaaaaaaaaaaaaaaaaaaaataataa

SEQ ID NO: 261593 - DNA, 809 bp, Zea mays
ctcccaattattgtggtgaatttgataatgctggcgcaatgatgagcgttgacgaaactttgatgtgttccttccaaattctgaaacctgctgagagaaaacaaatttatggggccaaacaaaatgtgagatagtgaacccattttgcttccagcagctctgaggctctcctgtggatgcatcaagacaacagcatgatggcgccaaacttgaggtcagcattgggcaagggcaactaccagagcagagaaaccaaataatataccatacctaactgttcgcctggaagttactcttcatggcaagtgtttgaattttctcttgttactgcgtgtcgaacaatcatgtagctgtagatatagtgattgtggaaggatgaagttgccaaattgacccgtggcgatttccttctccagacaggaaaaattctgaacatcaaggagtttctgtttgcaagtttcactatttaaaagcaggtcgtgtcacttgtgcggagttaaggactggaccgaggcagtattatcagtttctggatatggattgttgtgctagtttcgatgcaggtgtcaaacagcaattaggctgaagaggtgagcaacatttaaggaggtgctgatgcttgctgataacctatgaaaaggcgttgctgtagctgactacttggtttgtggtcagataattctggacgtgaattttgatatgttggccagattagctgccaaataggtatttcgtatctcttgatttatgggattcacattaactggttcttaaaaaaaaaaggggcggcgctctagaggatccaagct

SEQ ID NO: 261594 - DNA, 822 bp, Zea mays
gttcgacatcaagtccggcacgtccatggccgcgccgcacctgagcgggatcgccgcgctgatcaagcacgcgcacccgacctggtcgcccgcggtcatcaaatcggccctgatgacgacggcggagcctaacgacaacctccggaagccgatccaggacgtcaacggcaggccggcgaacttggtcgccattggcgccggccacgtgaacccgaagaaggccatggaccctggcctcgtgtacaacatgacggccatgggctacgtgccgtacctgtgcgggctcaactacacggacgacaaggtgagcacgatcatctacccggagccgccggtgtcgtgcgccaagctgtcaaggctcgaacaggacgacctcaactacccgtccatcaccgtcatcctcaaccagccgcccttcaccgcgacggccaaccgctccgtcacgaacgtcggcgcggccagctcgacgtacaccgtggaggtgaacgtgccggcgtcggtgacagtggaggtgaacccgccgaagctgactttcaaggcgctggaagaggtcctgaactactctgtcacaatcaagtcggccaacggccaggcgcttaccggccctgtcgagggggagctcaagtggttgtccggcaagtacgtcgtgcgcagcccgatcctcgtcactaacgaatccgggccctcgccggcggagacacgtaaaccgtaaccctcgatagcagctggcaaatgcctacttattacgtacatggtaacgattagtttgccatatgagccagcgcttgaaatcgatgggattgtgagcttcattcacttttg

SEQ ID NO: 261595 - DNA, 1765 bp, Zea mays
cccactcgtccgcccacgcgtccgcctttactcgccggaggcaaccagaactcgtgccacctcctcctgttccttgccatctccgaattcccatctgagattccaagggccgcgccgtgcaatcgaggctctccccgctcaccatatatcggaggctccgcccccgcgcctcgaatccttcgcgagaggtgctgttgtttgccgtgatttgagccgggtggaggtgtctcgcttcttgatcttgagaggtgttcctagttgattgttgggagcgaagaaggcatgataccttctgtgaggatctctcctggctctgcagccttctctggctccagcctacgcttaaaattacattcaattccatccatctctagtctcaaaccctccaaatatgtggtctcctcgctgaaaccactctacctagcaccgctagatggtccgcgcactgccgagcttaagtctcggagacagccacttgagttccgttgttctgcttctgctgctgatgacaaggagtcaaagactcaggtggtgccagttcagtcggaaggcgcacagaggttgaagatctccatctatttcgccacctggtgggcgcttaatgtgatatttaacatttacaacaagaaggttctcaatgcattcccttacccctggctcacctccacactctccctcgcctgcggctctgctatgatgcttttctcgtgggccacccgtcttgttgaggcccctaagaccgacctggacttctggaaagttcttttcccggttgctgtggcgcatacaattggccatgttgctgctacagtgagcatgtctaaggtggcagtgtcattcacacacataattaaaagcgcagaacctgcattcagtgttttggtgtcaaggttcttccttggggagacgtttccaattccagtatatctttctcttcttccaatcattggtggttgtgctctagctgctgtcacagagctgaactttaatatggttggatttatgggtgccatgatatccaaccttgcatttgttttccgcaacatcttctcgaagaggggcatgaaggggaagtccgtcagtggcatgaattactacgcttgcctgtcaattatgtccctggtcatactgactccatttgctatagctatggaaggccctcaaatgtgggctgctggttggcaaaaggctcttgcagaagttggacccaatgttgtctggtggattgctgcacagagcgtgttctaccacttatataaccaggtgtcctacatgtctctcgatcagatttctccattgacattcagcattggcaatacaatgaagcgtatatcagtgattgtttcatcaatcattatcttccacactcctgtccgcgctgtcaatgcactgggagctgccattgccatccttggcacattcctgtactctcaggcaaaggcgtgaggcgggccatgatgacgaacgtctgcagaatcagtagcaagcactaaatccaattttgcttgttccagtggcatgtagatatcgggttagttttccgtatgagagtttgtaataatggatgaatggctctgctgtttcgttcttgtttgttggccagactcaaatccataggccatgaactgcggtcgagtgtacctgaataatactgtaacggagaattcgccgatgctgtttctttatgggtatatatatagtccaagccggaatcccgtttttaaaaaaaaaaaaaaaaaagggcggctgctgcgcaccacctctc

SEQ ID NO: 261596 - DNA, 527 bp, Zea mays
ctcagatgtgggctgctggttggcaaaaggctattgcagaagttggacccaatgttggctggtggatcgctgcgcagagcgtgttctatcacttatataaccaggtgtcctacatgtctctcgatcagatctctccattgacgtttagcattggcaatacaatgaaacgtatatcagtgattgtttcatctataattatcttccacacgcctgtccgccctgtcaatgcactgggagctgccattgccatccttggcacattcctgtactctcaggcaaaggcgtgaggctaaagctttggcctaaggatcggagccagtagcaggcactggatccagttttgcttgttggagtggcatgtagatataaggttcggttttcgtgagagagagggtaataatggatcagtggctctgctgttccgttcttgtttgttgacctgattgaaatgcacaggccgtgacatgaaccgtcgtcaagtgtacctgaataacaccgtaacgaaattcaccgatgctgtttctttt

SEQ ID NO: 261597 - DNA, 481 bp, Zea mays
cggacgctcgtcgccagtactcgtgccacgactgccacccctcctcttccttgtgatctccgaatacccatctcagattccaagggccgcgccgtgtaatccccggctctccccacccaccatatatctagtatccgcgcctcaaatccctcgcgaaacgccccgccgtaagcagttgttgtctgccgtgatttgagccgggcggacggattgatcccgggacgaggtgtctcagctcttgatcttgatcctgatcctgggaggcgttcctggtttattggtgggagcgaagaagccatgataccttccgtgaggctctctcctggtcctgcagccttctcaggctccagcctacgctcaaaattaccgtcaattccatccatctccagtctcaaaccctccaaatatgtggtctcctcgctgaaaccactctacctagcaccgctagatggtccgcgcactggcgagcttaagtctcgga

SEQ ID NO: 261598 - DNA, 2276 bp, Zea mays
tcgttgacgcgtgggcggacgcgtgggcggacgcctggggcagtaatgggcttcctgcttgctgccagcggtcttttggttctttacattgctatcaatttgtttggaatttattacggtgatgactgggaaggtctttttgaagctattactggttatggccttggtggttcttctatggctcttttcggccgcgttggtggtggtatttataccaaggctgctgatgttggtgctgaccttgtggggaaggtagaaagaaacattcctgaggacgatccaagaaacccagctgttattgctgacaatgttggtgataatgttggagatattgctggaatgggatcagatctctttggctcatatgctgaatcatcatgtgctgctcttgttgtggcctctatctcgtcttttggaatcaaccatgaatttactccgatggtgtaccctcttctcgtcagttctgttggtattatagcatgtctcataacaacgctgtttgcaactgatttcttcgagataaaggctgtggatgaaatagagcctgctctcaagaaacagctcataatttccacaattgtgatgaccattggcattgcactaatcagttggcttggtcttccatacactttcactattttcaactttggagtccagaagacagtgcaaagctggcaattgttcttgtgtgtggcggttggtctctgggctggcctagtcattggttttgttactgagtactacacaagcaatgcctacagccctgtataagatgttgctgattcctgcagaactggagctgctactaatgtcatttttgggcttgctttgggttacaaatcagtcattatcccaatttttgctattgcgtttagtatcttcctcagcttcagccttgctgccatgtatggtgttgctgtggctgctcttggaatgctgagcaccattgccacaggtcttgctattgatgcatatggccctatcagtgataatgctggaggaatagctgaaatggctgggatgagccataggattcgtgagagaactgatgctctagatgctgcaggaaataccacggctgcaattgggaagggttttgccattggctctgcagccttggtttcccttgcactatttggtgcgtttgtaagccgggctgctatctccactgttgatgttctgactcctaaagtattcatcgggcttattgtcggtgctatgctcccgtactggttctcggcaatgaccatgaagagtgtgggcagtgctgcgctcaagatggtggaggaagttcgtcggcagttcaacaacatccctgggctcatggaaggcaccacaaagcctgactacgcaacttgtgtcaagatctcaacggatgcatccatcaaggagatgatccccccaggtgctcttgttatgctcacaccactgatcgttgggattctatttggggttgagaccctctctggagtccttgctggtgcccttgtctctggtgttcagattgccatttctgcatccaacactggtggtgcctgggacaacgccaagaagtacattgaggctggagtttcagagcatgccaggacccttggcccaaaaggttctgaccctcacaaggcggctgtcattggtgacaccattggagatcctctcaaggacacgtctggcccttccctcaacatcctcatcaagcttatggcggttgaatcccttgtcttcgcccccttcttcgccgcccatggtggcattctcttcaaatggctctaagccagcgagagacgcaggataaaggccgtagttttgcaaggcgagtagagcagtatgtcagtaatacagcatctatggcatgtgcttttgctcgtccagttcatgagccccgttgtgtatttggtttccgttttcttggttggagtttttagttccaaggtccgatcatgttttgatcccataaattctcttccagccttcgagcaactgagtccatcttcctaagtcatcagccccagcgagacattgaagcatggggaaacttaaacagtatggtgatgattaatctcagcattttttttcttgcagcaatcaatatggactttgcttaaaaaaaaaaaaaaggggcggcccccgattagtaaccccgtcgccccgggatttaatcccggcccggaccctgaaggggtaccagtttcccctaaagggggccgtattagaccttggcgaaaccagggccaaagctgttcccgggggaaaattgttacccgcccaaatttccacac

SEQ ID NO: 261599 - DNA, 2977 bp, Zea mays
cccacgcgtcggcgcgtcgcctcctcccttcccccaccccgccgccgccctcgcgtccgtccgtccgtccgtcgttattagggttcggtcgccgccatggcgatcctctcggcgctcgccaccgaggtgctcatccccgtcgccgccgtcatcggcatcgccttcgccgtcgtgcagtgggtggtcgtgtcgcgcgtgaagctctccccggccgcgtccggcggcggcggcggcaaggccggctacgccgactccctcatcgaggaggaggaggggctcaacgaccacaacgtcgtcgtcaagtgcgccgagatccagaacgccatctccgaaggagcaacatcgtttcttttcaccgagtaccaatatgttggtatcttcatggctatcttcgctgttgtgatcttcctcttccttggttcggttgagggattcagcacgaagagccagccctgcacatatagcaaggacaagtactgcaagcctgcgctgttcactgcactctttagcactgtgtccttcttgcttggagccatcacctctctggtctctggtttccttggcatgaagattgccacatatgcgaatgccagaactaccctggaagctaggaagggtgttggcaaggcttttatcactgctttccgctctggcgctgttatgggtttcctgcttgcatcaagtgggcttgtggttctgtacatcacaattaatgtatttaagttgtattacggtgatgactgggagggtctttttgagtccatcactggctatggtcttggtgggtcgtccatggctctcttcggaagagttggtggaggtatctacacaaaggctgctgatgttggtgccgatcttgttggaaaggtcgagaggaacattcctgaggatgatcctaggaacccagctgtgattgctgataatgtcggtgacaatgttggtgacattgctggaatgggatctgatctctttgggtcatacgcagagtcttcttgtgctgcccttgttgttgcgtctatttcatctttcggaatcgaccatgatttcactgggatgtgctacccactccttgttagctctgttggtatcattgtctgcttgatcaccaccctttttgctactgatttctttgaagtcaaggctgtgaaagaaattgagcctgcacttaagaagcagctcatcatctccaccgtcctgatgacttttggtattgctctaatcagctggttggcccttccagctaagttcaccatctacaacttcggtactcagaaggaggtttccaactggggtttgttcttctgtgtttcaattggtctgtgggctggtttgattattggttttgtcacagaatactacactagcaatgcatacagtcccgtgcaagatgttgcggattcgtgcagaactggtgctgccactaatgtcatttttggtcttgctcttggatacaagtcggttatcatcccgattttcgctattgctgttagcatctatgtcagtttctccattgctgcgatgtacggcattgcagttgccgctcttggtatgctgagcacaatcgcaactggtcttgctattgatgcttatggtcccatcagtgacaatgctggtggtattgctgagatggctggaatgagccacagaatccgtgagagaactgatgctcttgatgctgctggcaacacaactgctgctattggaaaggggtttgccattggttcagctgctcttgtgtccctggcgctttttggtgcctttgtcagcagagctggagtgaaggtcgtcgacgtcctctcccccaaggttttcattggtttgattgttggagccatgcttccgtactggttctctgccatgaccatgaagagtgttggaagcgctgccctgaagatggtggaggaggtccgcaggcagttcaacaccattcctgggttgatggagggaacagccaagcccgactacgcaacctgtgtgaagatctccactgatgcttccatcaaggagatgattcctccgggcgctctggtcatgctgactcccctcatcgttggaaccctctttggcgtcgagactctctccggcgttcttgctggtgccctggtttctggagtgcagatcgccatctctgcttccaacaccggcggtgcatgggacaatgccaagaagtacatcgaggctggtgccagcgagcacgcgaggaccctcggtcccaagggatccgactgccacaaggccgctgtgatcggtgacaccattggtgaccccctgaaggacacctccggcccgtccctcaacatcctcatcaagctcatggccgtggagtccctcgtgtttgcccccttctttgccacccagggtggcctgctcttcaagtacctgtaaaagggacaacaccaagcacacagcagaagtatacgatctcccgaccgaccgtggacaatatcgaataactcctgccaaatcgccagttccttttgtgtactgtgcgctagccgccgcctagctgcactgctgtatttttgtttcaggattgctgctgctgttcgcattcaatctttgggcctcccggagccgccggaggcgcgttttactgttagccttactactcttactccctgtagctccacgtagaagaaaccgatgtcctgcgtctggcaatttttcttagtcccttgatgatggcgatgatgctgaaacctttttttgaacaatgatacatgatgattgttgcgttgtactggtggtacaaaaaaaaaaaaaaaaaaaaaaaaaaaaaaaaaaaaaaaaaaaaaaaaaaaaaaaaaaaaaagaaaaaaaaaaaaaaaaaaaaaaaaaaaaaaaaaaaaaaaatggggggggccgttttaaaggaaccaagtttatatcccctttcttgcaacgtattatttttttttttgggacaccaaaatcaatttcactgcccgacttttaaaaacttggggattggaaaaac

SEQ ID NO: 261600 - DNA, 2792 bp, Zea mays
cccacgcgtccgcggacgcgtggcgcgtctcccacacggccgccgccctcgccttcgtgcgttccccgcgtagagtttagggttttgtcgccgccatggcgatcctctcggcgctcgccaccgaggtgttcatccccgtcgccgccgtcatcggcatcgccttcgccgtcgtgcagtgggtgctcgtgtcgcgggtgaagctctccccggctgcagccgcgtccggcggcagcaagaacggctacggcgactacctcatcgaggaggaggaggggctcaacgaccacaacgtcgtcgtcaagtgcgccgagatccagaccgctatctccgaaggagcaacatcgtttcttttcactgagtaccaatatgttggtatcttcatgtccatctttgctgttgtgatcttcctcttccttggttcggttgagggattcagcacgaagagccagccctgcacctatagcaaggacaagtactgcaagcctgcactgttcactgcactctttagcactgtgtccttcttgcttggagccatcacctctctggtctccggtttccttggcatgaagattgccacatatgcgaatgccagaactaccctggaagctatgaagggtgttggcaaggcttttatcaccgcttttcgctctggtgctgttatgggcttcctgcttgcatcaagtgggcttgtggttctgtacatcaccattaatgtatttaagttgtattacggtgatgactgggagggtctttttgagtctatcactggctatggccttggtgggtcgtccatggctctctttggaagagttggtggaggcatctacacaaaggctgctgacgttggtgctgatcttgttggaaaggtcgagaggaacattcctgaggatgatcctaggaacccagctgtgattgctgataatgtcggtgacaatgttggtgacattgctggaatgggatctgatctctttgggtcatatgcagagtcttcctgtgctgcccttgttgttgcgtctatttcatctttcggaatcaaccatgatttcactgggatgtgctacccactccttgttagctctgttggtatcattgtctgcttgatcaccaccctttttgctactgatttctttgaagtcaaggctgtgaaagaaattgagcctgcacttaagaagcagctcatcatctccaccgccctgctgactgttggtattgctgtaatcagctggttggcccttccagctaagttcaccatcttcaactttggtactcagaaggatgtctccaactggggcttgttcttctgtgttgcaattggtctgtgggctggtctgattattggttttgtcacagaatactacactagcaatgcatacagtcctgtgcaagacgttgcagattcttgcagaactggtgctgccactaatgtcatttttggtcttgctcttggatacaagtcagttatcatcccgattttcgctatcgctgttagcatctatgtcagtttctccattgctgcaatgtacggcatcgcagttgccgctcttggtatgctgagcacaatcgcaactggtcttgctattgatgcttatggtcccatcagtgacaatgctggtggtattgctgagatggctggaatgagtcacagaatccgtgagagaactgatgctcttgatgctgctggcaacaccactgccgctattggaaagggatttgccattggttcagctgctcttgtgtctctggcgctttttggtgccttcgtcagcagagctggagtgaaggttgtcgatgtcctctcccccaaggttttcattggtttgattgttggagccatgcttccctattggttctctgccatgaccatgaagagtgttggaagtgccgccctaaagatggtggaggaggtccgcagacagttcaacaccattcctgggttgatggagggaactgccaagcctgactatgcaacctgtgtgaagatctccactgatgcttccatcaaggagatgattcctcctggtgctctggtcatgctcactcccctcattgttggaaccctcttcggtgttgagactctctctggtgttcttgctggtgccctggtttctggagtgcagattgccatctctgcttccaacaccggtggtgcatgggacaatgctaagaagtacattgaggctggtgccagcgagcatgccaggaccctcggccccaagggatctgactgccacaaggctgctgtgataggtgacaccattggtgaccccctgaaggacacctcgggcccgtccctcaacatcctgatcaagctcatggcggtggagtcccttgtgtttgcccccttcttcgccacccacggtggcctgctgttcaagtacctgtaagggccacaccaatcatcacagcagaaatatacgaccgaccgaccgtggacatctcgaataactcctgccaaatcgccagttcatgtgtattgtgcgctagccgcctagctgcactgctgtttttttggtctcattgttcgtattttctccttggcccctccccctagaggcgttactgttagccttactcttactccctgtagctgcacgtagaagagaactgttgtcctgcaggtctggcaaattttcccagtctcttgatgatggcgatgatgttgaaatctttgaacaatgatacatgattgttgcattttaaaaaaaaaaaaaaaaaaaaaaaaaaaaaaaaaaaaaaaaaaaaaaaaaaaaaaaaaaaaaaaaaaaaaaaaaaagaaaaaaaaaaaaaagaaa

SEQ ID NO: 261601 - DNA, 657 bp, Zea mays
ccccccaggtgctcttgttatgctgacaccactgatcgttgggattttgtttggggttgagaccctcgctggggtccttgctggtgcccttgtctctggtgttcagattgccatttctgcatccaacactggtggtgcctggacaacgccaagaagtacattgaggtggagcttcagagcatgccaggacccttggcccaaaacgttctgaccctcacaaggcggctgtcattggtgacaccattggagatcctctcaaggacacgtctggcccctccctcaacattctcatcaagcttatggcggttgaatcccttgtcttcgcccccttcttcgccgcccatggtggcattatcttcaaatggctctaaagatagcgacaacgttagttagtcgcaagagaaaggccgcagttctgcggctgcgaggggaatagagcagtatgtcagctatacaacatctatggcatgtgctttgctcctccacttgattatagcccccgttgtgtgtttcggtttctgttttcctggagtttttggttccaggcttccgaccatgttttgatcccataaattcttcttcagccttcgagcaactgaatccatcttcgtaagtcatcaaccctagccagacattgaaacatcgggaaactttaag

SEQ ID NO: 261602 - DNA, 465 bp, Zea mays
agtgcaaagctggcaattgttcttgtgtgtgacggttggtctctgggctggcttagtcattggttttattactgagtactacacaagcaatgcctacagccctgtataagatgttgctgattcctgcagaactggagctgccactaatgtcatttttgggcttgctctgggttacaaatcagtcattatcccaatttttgctattgcgtttagtatcttccttagcttcagccttgctgccatgtatggtgttgttgtggctgctcttggaatgctgagtaccattgccccaggccttgctattgatgcctatggccctatcagtgataatgctggaagcttaagtctgtatgggtgcatcttatcatttatatgtatatctgaaagcttaagtatttttttaaatacaaagatgtctggaaactttacgcaaaaaaaaaaaaaaaaaaaaaaaaaaatataaaa

SEQ ID NO: 261603 - DNA, 560 bp, Zea mays
caaatttccaatgacttgccatatcattagcatcagaggctccataaagcagctctgctagaattaactgattcactgtcaaggtcaaacatcactatgatattgctgagatggtccaatcagtgacaatgctggtggtattgttgagatggcaggcatgagccacaaaatctgagagaacttatgctcttggtgctgctgacaacacaactgttgctattagatagggatttgccattggttcaggtgctcttgtgtccctggtgctgtttggtgccttcgttagcagagctggagtgaaggttgtcgatgttctctcctgaaggttttcattggtttgattgttggagacatgtttttgtactggttctctgtcatgaccatgaagagtgttggaagtgtcgccctaaagatggtggaggaggttcgcaggcagttcaacaccattcttgggttgatggagtgaacaagcaagcctgactatgcaacctatgtgaagatttgcactgatgcttcttccatcaaggagatgattccttggggtgctcttgtcatgctga

SEQ ID NO: 261604 - DNA, 951 bp, Zea mays
ttctcgcgtccgcccacccgtcttctctccggttcgtgggagggccaaagcttcgagttaggaaaaccctaccgctgtgggagtagcctccggcgatggctgcggcggcgatcctgccggagctggcgacgcaggtgctcatcccggtcgcggcggccgtgggcatcgcgttcgcggtggtgcagtgggtgctggtctccaaggtgcgggtcacccccgagcgccgcgcggacggcggggccgtgaagagcgggcccagcgactacctcatcgaggaggaggagggactcaacgaccacaacgtcgtcgtcaagtgcgccgagatccagaccgccatctctgaaggagctacatctttccttttcactgagtacaagtatgttggattattcatgggcatctttgcaatccttatattcctcttccttgggtctgtcgagggattcagcacgaagagtcaaccttgccactatagcaaggacaagacttgcaagcctgcccttgctaatgccatcttcagtactatagcttttgtgcttggtgcggtcacctcactggtttctggttttcttggaatgaagatagcaacttatgctaatgcccggacaactttagaggccagaaagggcgtcgggaaggcatttattactgccttccgatctggtgcagttatgggcttcctgcttgctgccagcggtcttttggttctttatattgctattaatttgtttggaatttattatggtgatgactgggaaggtctttttgaggctattactggttatggccttggtggttcttctatggctctttttggccgtgttggtggtggtatttataccaaggctgctgatgttggtgccgaccttgtggggaaggtagaaagaaacattcctgaggacgatccaagaaatccagctgtcattgctgacaatgttggtgataatgttg

SEQ ID NO: 261605 - DNA, 526 bp, Zea mays
cggacgcgtggttcggccgccacctcggcctcttaccacgccccacggcaccaccccaacgtgatggcggtgagcaacaacatcacggcatgcgtgacgctgctggcgctgatctgcgcggtgcccgtgatcgcgtcgggggtgtggttcgcgtcggcgcagggcgaggagtgcgcgcgcctggcgcggtggcccgtggccatcctgggcgggctgctcctgctggccgcgctggcgggcttcgtgggcgcgtactggaaccggcgcggcctgctggccttctacctcttcgccatggcgtcgctcgtggtgctcctcatcgcgctcctcgccttcgccttcgccgtcacccgcgggtccggcgcctaccccgtgctcggccgcgcctacgacgactaccgcctcgacggcttctccatgtggctccgcgggtacgtctccgacgaccccgggcgctgggacaaggtcagggcctgcctcgccgtctccgacacctgcaagaagctcgcgcgccaggccgccttca

SEQ ID NO: 261606 - DNA, 991 bp, Zea mays
  unsure (1)..(991): unsure at all n locations
cccacgcgttcgcccacgcgttcgcggacgcgtgggtgattattggttttgtcacataatacgacactagcaatgcatacagtcttgtgcaagacgttgcagattcctgcagaactggtgctgccactaatgtcattttgggtcttgctcttggatacagtgacaatgctggtggtattgctgagaactgatgctgttgatgctgctggcaacaccactgccgctattggaaagggatttgccattggttcagctgctcttgtgtctctggcgcttttttggtgcctttgtcagcagagctggagtcaaggttgtcgatgtcctctcccccaaggttttcattggtttgattgttggagccatgcttccctattggttctctgccatgaccgtgaagagtgttggaagtgccgccctaaagatggtggaggaggtccgcagacagttcaacaccattcctgggttgatggagggaactgccaagcctgactatgcaacctattggaagatctccactgatgcttccatcaaggagatgattcctcctggtgctctggtcatgctcactcccctcattgttggaaccctcttcggtgttgagactctctatggtgttcttgctggtgccctggtttctggagtgcaaccgtcgttttctcttaacagaaaagaactataaaaacgtcgccgctgtcaaaacccagaaattacgaggcgcgaaatggaaagcttccagcagattaacgatcggctagatttgattcattccgcccgcccactacctctcacggtcacggccaatccggccaacccagagatcacgtgtcagtgctattttgtgtacaagtactacttaatatatgtttgaaaacttttttaagtgatttccaaacttgaacgggaatcattcttaattcttttaaatgtctgatagtagttattgtttgtgccaccttgttctaaaaagtctcaaaaacaaacnccattctnc

SEQ ID NO: 261607 - DNA, 445 bp, Zea mays
agtcattatcccaatttttgctattgcgtttagtatcttccttagcttcagccttgctgccatgtatggtgttgttgtggctgctcttggaatgctgagtaccattgccacaggccttgctattgatgcctatggccctatcagtgataatgctggaagcttaagtctgtatgggtgcatcttatcatatatatgtatatctgaaagcttaagtattttttaaatagaacatgtctggaaactttagtaacgacatgagtttcaggctttcagctatagcagtcttattcgcttttaagacagagaagatttttttttagagtttacaaagagtaggtgctatgggtgcatgttatcatttatgtgggggacatctctggtggcaattaatcagtaacccccccagttaagcccgggttttggaaaaaaaataaaaaaaaaagaa

SEQ ID NO: 261608 - DNA, 750 bp, Zea mays
gtaccgtatcagtctcccggattctctccggttcgtgggagggccaaagcttcgagttaggaaaaccgtaccgctgtgggagtagcctccggcgatggctgcggcggcgatcctgccggagctggcgacgcaggtgctcatcccggtcgcggcggccgtgggcatcgcgttcgcggtggtgcagtgggtgctggtctccaaggtgcccgtgatcgcgtcgggggtgtggttcgcgtcggcgcagggcgaggagtgcgcgcgcctggcgcggtggcccgtggccatcctgggcgggctgctcctgctggccgcgctggcgggcttcgtgggcgcgtactggaaccggcgcggcctgctggccttctacctcgacggcttcgccatgtgcgctcgcgcgtggtgcgtctccgacgaccccgggcgctgggacaaggtcagggcctgcctcgccgtctccgacacctgcaagaagctcgcgcgccaggccgccttcaccagcgcagaccagttctatcagtcgcacctctccccgctccagtccgggtgctgcaagccgcccgtcggtgtgcgggttcagctacgtgagcccgacggtgtggtccgccccggcggcgcggccggcggcggacgcggactgcgggctgtggagcaacgacccggggcagctgtgctacgggtgcgagtcctgcaaggcgggcctcctggaggcgctccgggaccagtggcacaaggccaacgtcgccctcgtcg

SEQ ID NO: 261609 - DNA, 614 bp, Zea mays
cccacgcgtccgcccacgcgtccagaatcgtgggctgtgacctgtcgtcttcgtctccggcagagcaaagcggcggcgaggcgggagatatagaggagagacgagagcgggatggggtacctgtggagggtgcggctgtcttcatttgctgccggcgcggcgacggcttcggcggcggggttcttcctcctctacaaggaccacctgctcgcccgcgctgccatcatcagccaggtggaggacatcaaggaaacttctgaaaagcattatgcagccctaaataagaggatatcagcactggaaagcagaagagaaccaggaactatcaaagaggcatcagattaattctgagttgggcttatgtcatggttacatctgcccatgtgtttttgattgctgcaggcggtataaactgcagcattttaagctgtactattgtgttgttgaaattctatgatctctgaatttgaattgtgttacacttcttgtctatgtcgtctttatgagatggacaagatcaaatactatacattttttcttgatagagtaagaaatatagaaggagcaatatgggtcgttggcgcagtatggggtgccaccactgagggtccttc

SEQ ID NO: 261610 - DNA, 733 bp, Zea mays
acccacgcgtccggcatgatgccttcttccctccctcattctcgctcgcccccattccaccttcgacgacccctttctccttctccctcctcaatcacctgcagcgaaaaggaaaagggtgtcagaccgtaactaagagctatttagcaataatacatacatagctataccctctttaggtcaagagggtggagttctccttattcggaggaagagctccatcctcattctacaagaccaaaccaataaatggcctctagcccacagtcctcgccatcatcctccaagaagtcgccgccaccacaagaagcatcagctttggcgccaaaatcatcttcaaagtcaccctcgccaccaaagggtgaatcaaattcatctcccagtcccccatcgaaatcgtccctgtcaccaccgccaccaccaaagaaaagtggtagtacgtctagctctaaagatgggaagacgaagaagtcgtcttcatcgtcttcatcgtcagataatacagccgctgtgatcaccggcgtggtgcttggggtggtgggcttcgctctgctcttgtccatcgtggcgtgcgtgtgctgcgccaagaagaagaagaaacgtccgcccccaatgaacatgcccttctacaccgacgagaaaggcaatgtgtattaccccaacgctggtctgccgcctatgtggcagcaatatggcagcaacggcagcatccctccgccgggatggcaccatc

SEQ ID NO: 261611 - DNA, 718 bp, Zea mays
cccacgcgtttctttcccggcggctgccgaacctctgctccggcgactaggttcccgcctccccgactctgccccaagcgagcgcggcacgcgtgtcgccttggcttcctctcttctgcttcagtctcgcgccgccggtttctatcctgccgtcgcccggagctcatcgtgctgacctccagtgacgcgctgaagggatctgggaacttcgaggatgctttgctgtgctggccaccaggcgtcccttctcctcttcgctctgctctctgtctcctcccttctgctcgtcgacggatcccatcaggaccaggaattcggtgaagctgttggatccagaattcttctaaacaaatccagacgcacatgaggtgcattgctcaagggaaaggagccgtgcagcttgggaagctattgatgagtatttgatgcccttcgtggaaaaagaaaaatatgaactcccaagcaaatgtagacttcgtcctgataatgacatgtttcgggagcaagagcaacataagattcattttgatattaatgagtggcactgtggcttttgcaagaaagctttccgagcagagaagttcattgatcagcattttgaaaatcgccacaagaatcttgtggataatagtgaaggaagatgcatggcagatctatgcggcgcactacattgtgatctgatgatgcagttcatataaccaaaatgtaaatgcaatgc

SEQ ID NO: 261612 - DNA, 1129 bp, Zea mays
caggcacaaaactcatctgggggtagtcgactcgtcgtcttcgctcgcccgtgctcaccactgacctacccgcttcaaaacagccaaactggaaaaaaagattctccgtccacgcctcgtcccaaccctagccccgtcgatctcgcatggccaccggcccgcgatctctccacgccctcctcggcggcggcgcagtcgccgacttgctgctgtgtaggcggaggaacgcctcggcggcggccgtggtgggcgccaccgcggtctggttcgtcttcgagcgcgcgggctacagcttcccctccgtcctgtccaacgccctgctcctcctcgtcgccatcctcttcttctgggccaagtccgctttgctgcttaacaggcctcttccacctcttcctaaccttgaggtttcagatgcagttgttgaaaaggctgcagatcatgctcttgtatggatcaataggctgctggctgtcggtcatgacatcgccatcaagagaaataggaaagtttttataaaggtgatattgattttgtggctggtttcatttgttggaatgctcttcaactttcttacactcatttacattggtgtaatgctttctctgttggttccaccactctatgagaagtatcaggatcaggttgatgagaaggttggtgtagcgtacagtgtactatcaaggcacatagataccatcattaccagggctgggcaatcagccaagcagaagaagactgagtaaaagaaacgttttgctgtattgtggaacatccctggttgtccaatgaagttgacagtgggcctttcatctttgaccctctattccactaaaatgaaccctcgatatgctgatatgaggttttgatgtgcattacgggaaatgaggtggcttgtgtatttcctttttggacatggggtttactatgggtgcatatcgcactcggaatgatatcgagaaattgcgactcgtacatgcaattatgcaggctgcttgctctgttagtcatatgatctttccgtcagtgattttaagttttaggctgctccgaggaactttgcaggctgctccgagcaattatgcacgctgcttgctcattcgatgcccatctactggtacctcgttttccg

SEQ ID NO: 261613 - DNA, 429 bp, Zea mays
gctgtcggtcatgacatcgccatcaagagaaataggaaagtttttataaaggtgatattgattttgtggctggtttcatttgttggaatgctcttcaactttcttacactcatttacattggtgtaatgctttctctgttggttccaccactctatgagaagtatcaggatcaggttgatgaaaaggttggcgtagcgcacagtataatatcgaggcacataaataccattgttaccagggctgggcaatcagccaaggagaagaagactgaataaaagaattgttttgatgtattgtggaacatctctggttgtcaagtggagttgtgatagtgggcttttcatctttggactctccatatggccctccacttacattagttctcgatatgctgatctgaggttttgatgtgcgctgttgatttcagg

SEQ ID NO: 261614 - DNA, 459 bp, Zea mays
atcaacaaattgtacattgttgatcacagaatatgacacaagatcacaaaaatctaataccaattagggacattgaaaaagctgtatattatgctcttgtatggatcaataggctgttggctgtcggtcatgacatcgccatcaagacagataggaaagttatattttttcctaactatatatgctcttacctattcctgttctccatagtacaaaagatgatattgattttgtggctggtttcatttgttggaatgctcttcaactttcttacgctcatttacattggtgagttctctgtccatgctaattttaagtgagtatgtaactatatgctctcatacgctttagggatccgctacgagcagcctacacatttatcatctgttcccatgcttatttttccttttttttattagtgatgggaatcgtatatccataaatagatctggagactgg

SEQ ID NO: 261615 - DNA, 413 bp, Zea mays
cacgcgtacgctgcggaagcaccgaggcccgcgggattgttaaaaagattcctcgcccaaccctaccccatgcgatctcgcatcgcatggccaccggaccgcggtctctccacgccctcctcggcggcggtgcagttgccgacttgctgctgtggcgaccgaggaatgcctcggcggcagccgtggtgggcgccaccacggtctggttcgtcttccagcgcgcggggtacagctgcccctccgtcctctccaacgccctgctcctcctcgtcgccatcctcttcttctgggccaagtctgcgttgctgctcaacaggcctcttccacctcttcctaatcttgaggtctcagatgcgattgctgaaaaagctgcaaatcatgctcttgtatggatcaataggctgctggctgtt

SEQ ID NO: 261616 - DNA, 541 bp, Zea mays
ttctgtgatcaacaatgtacaatttgttgaataggctgttgttgaaaaagctgtatattatgctcttgtatggatcaataggctgttggctgtcggtcatgacatcgccatcaagacagataggaaagttatattttttcctaactatatatgctcttacctattcctgttctccatagtacaaaagatgatattgattttgtggctggtttcattcattggaatgctcttcaacttccttgcgctcatgtacattggtgagtttgttagctatgtcttcatggatgtttggatatactgtttttaaaaaggtatataatgttcttttatgataactcgatgtgcatagggcatacgacatactaaacttgtcaatttttctaggtgtaatgctctctctgttggttccaccactctatgagaagtaccaggatgagattgatgagaaagttggtgtagcttacagtgtactatcgaggcacatagataccatcattaccaggactcgacaatcagccaagtagaagaagactgagtaaaa

SEQ ID NO: 261617 - DNA, 610 bp, Zea mays
  unsure (1)..(610): unsure at all n locations
cggacgcgctcgctgacgcgtgggcggacgcgtgggcggacgcgtggggtgagtcccaagctcttcctctcatcaacttcttcccgttccacgcagaccaaccagacattaagaattgagatcctgcaaccgcaacaatggcggccatggcgaacacctctcgtctccccaccccctgcagcctcccaaccatcagcatcggcgctaagagcaggaggctagctgtggcggccgtcagatgcggtcccggcggcagcaggagccaccggaggagccttggggtcttgctgtgtcgatcctcgtccacggccggagcccaagggagcacgaggatggaggactataacaccgccatgaagcggatgatgcgtaacccctacgagtaccatcacgatctcggcatgaactatgctgtcataagtgagagcttgattgttggctcacagcctcagaagcctgaagatatcgatcgcttgaaaaatgaagagcgagtagcatattatttttgcttacagcangacaaggacattgaatattgggggcattgacttccaatccattgtcaatagggggcaagaacttggcattcagcacatcaggagaccggccg

SEQ ID NO: 261618 - DNA, 1732 bp, Zea mays
cccacgcgtccggcaataaccggggtggcagaaaagaggccgcaactgcaaggcaccgcaggagagaagaagatcaccagcaacaccaagcaactactcgtacgcggaaagagaaacccagaagccggtcttgttggattattccgttcgtcagttccgtccggagcggcggaggctctgttggtggtgcaaaaatgagtgacaacctgatggacaaggttagcgcctttggtgagcgcttgaagatcaccgggacagaagtcagcaaaaagatgactgccggaatgagctccatgagtttcaagatgaaggagttgttccaggggcagactccagctgacaagattgttgagggtgccacctcagaggatctggacgggcctgactggaactcaaacttggagatttgcgacttgatcaacacagagaaggttgacagtgtggaactcatccgtgggatcaagaagaggatcatgctgaaggatgcgagggtccagtacctctcattggtcctgcttgagactattgttaagaactgtgagaaggccttctcagaagttgcggccgaacgggttcttgatgagatggtcaggttgattgatgatcctcagaccgtggtgaataacaggaacaaggcccttatgctgattgaagcatggggggagtctggtgatgaactccgttatctgccagtctatgaggaaacatacaagagcttgaaatcaagaggagtgcggtttcctggacgtgacaatgagagcttggctcctatatttactcccgcgcgatcagttgctgaagctgatgttgatgcaagcttgccccagcaggtgttcgaggacgtccatgttcatacatatactgctgaagaaacaaaagaagcatttgatgtagctcgtaacagcgtagaacttctttcaactgttctttcctcttctcctgagcaggatgctttgcaggatgacttgacaaccactcttgtgcaacaatgctaccaatctcagcacactatccagatgattattgagaccgttggagacaatgaagctgtgctctttgaggccttgagcgtgaacgatgagatccagaaagtattatcgaagtacgaggagatgaagcagcccagggcctccgagcatgcagaacatgtaccagttgtcataccgattgctgcggagcatgaagatttgaatgctgttggcactgaagacgcccttgtcagaaaaccagctgccgcgagagcaacgtcaggtggagatgatgacatccttgatgatctcgacgagatgatatttggcatgaaggttggtttgttttttctgtatgtttcttattagtttttttctttgatttttttttttttattattttttaaatatttcttataattattatttattataatttttatttcttttctttttttttttctttatatataatttattttttttcttatttatttttttttcttttattatattatttttttgttttttatataaactcttctttttctatttatctatttttatttatttcttttatctttattttcttttactttattatatcttatttcgtttttattatatttctttctttctttttctttctcttttttatctaaatcagttatctttttacttctttctttttatcaattttttgtctatttatattttatttttttattaaattttacaattctcttattattttttattttaat

SEQ ID NO: 261619 - DNA, 775 bp, Zea mays
aaaaaaagaagcatttgatgtagctcgtaacagcgtagaacttctttcaactgttctttcctcttctcctgagcaggatgctttgcaggatgacttgacaaccactcttgtgcaacaatgctaccaatctcagcacactatccagatgattattgagaccgttggagacaatgaagctgtgctctttgaggccttgagcgtgaacgatgagatccagaaagtattatcgaagtacgaggagatgaagcagcccagggcctccgagcatgcagaacatgtagcagttgtcataccgattgctgcggagcatgaagatttgaatgctgttggcaatgaagacgcccttgtcagaaaaccagctgccgcgagagcaacgtcaggtggagatgatgacatccttgatgatctcgacgagatgatatttggcaagaagggaggtagcagctcccaggaaggtccgaaaaagccagatccgaagaaggatgacctgatcagcttttaattacctttccataatcgcagccagtacttgctattgtctggtgctgtacccactcggtagattgaagatttttattcgcatacgattcataccggtttgttcagttaagtcgctacactttgtcaatcttgtttcatggctgggtcccatgaccatgaatgtattgtattggatggtggattatgcgagacggcgggaaagtgtccaatgtgggtgaatctttattcttcgctacagtagccattttttttaaactcaaaaaaggaggaaaaa

SEQ ID NO: 261620 - DNA, 726 bp, Zea mays
cctcccttcttgccgaatatcatctcgtccagatcatcaaggatatcatcatctccacctgaccttgttctcgcggcagctggttttctgacaagggcgtcttcattgacggcagcagtcagatcttcatggtctgtggcaaccggtatgagatccagaaagtgttgtcaaagtacgaggagatgaagcagcccagggcctcggagcatgcagaacagagagcagttgtcataccggttgccacagaacatgaagatctgactgctgccgtcaatgaagacgcccttgtcagaaaaccagctgccgcgagaacaaggtcaggtggggatgatgatatccttgatgatctggacgagatgatattcggcaagaagggaggtagcagctcccaggaagggccgaagaagccagatccaaagaaggatgacctgataactttttaagcgtacccttctataattgcagcctttgcttgctattttctggtgatgtacccactcggtagattgaagattccttaggatttggatcgattgtctattcgcatacgattcgtatctgccccctttcggtttgttcagtaaagtcgctgcactttctgagtcttgtttcatggatgagtcccagtcccagtcccagtgaccatgaatgtgttggatggtggattatgcaccaacggggggaaataaaatcatgacggaaataaatggtggtccttaattgacg

SEQ ID NO: 261621 - DNA, 594 bp, Zea mays
ggattcccgggttgattattccgtcgtagttccgcgcggagctcgctaagcctacgcccatcggcccctgttttcctaagccgctgctcctgcttccggggaaatttcgtgtccagtatcttgatcttccgccgccgcgcttcacgccagggctccttccaccggcgtcctccttaccgtcgtcctctactggcgctggactgctgcgggggtggagatcggcttagatcaactcttaattttgccgggactctttagagggcgcgtgcgctggtacagcaaaaaatgagtgataacctgatggaaaaggttagcgcctttggtgagcgcctgaagatcaccgggacggaggtcagcaagaagatgacggccggaatgagctccatgagcttcaagatgaaggagttgttccaggggcagactcccgctgataagattgttgaggacgccacctcggagaatctggacgggcctgattggaactcaaacttggagatttgcgacttgatcaacacagagaaagttaacagtgtggaacttatacatgggatcaagaagaggatcatgatgaaggatgcgagagttcactacctc

SEQ ID NO: 261622 - DNA, 564 bp, Zea mays
ggtatttaccgttcgtcagttccgtccggagcggcggaggtacgtatacgcccctcaacccctgttcctaatacgcatctcctgcttcccccaaaaaatccatgtcctgatcttctctgccgctgctcccaatttccctctcatctcttgctgtctcttccgccgccgccgcacgtcttccttcccatcgctctctactggtgctggactgccgtggggtggagatcggcttggaccaactcatattttaggctctgttggtggtgcaaaaatgagtgacaacctgatggacaaggttagcgcctttggtgagcgcttgaagatcaccgggacagaagtcagcaaaaagatgactgccggaatgagctccatgagtttcaagatgaagggagctgttccaggggcagactccagctgacaagattgttgagggtgccacctcagaggatctggacgggcctgactggaactcaaacttggagatttgcgacatgatcaacacagagaaggttgacagtgtggaactcatccgtgggatcaagaagaggatcatgctgaaggatg

SEQ ID NO: 261623 - DNA, 492 bp, Zea mays
catcctgggtggcagaaaagaggccgcaactgcatggttccgtaggagagattagaagaagatcaccagcaacaccaagcaactactcgtacgcggaaagagaaacccagaagccggtcttgttggattattccgttcgtcagttccgtccggagcggcggacaaaaatgagtgacaacctgatggacaaggttagcgcctttggtgagcgcttgaagatcaccgggacagaagtcagcaaaaagatgactgccggaatgagctccatgagtttcaagatgaaggagttgttccaggggcagactccagctgacaagattgttgagggtgccacctcagaggatctggacgggcctgactggaactcaaacttggagatttgcgacatgatcaacacagagaaggttgacagtgtggaactcatccgtgggatcaagaagaggatcatgctgaaggatgcgaaggtccagtacctctccttggtcctgcttg

SEQ ID NO: 261624 - DNA, 560 bp, Zea mays
aacagattatactatggagagggaaggttcgccaagagcgttctgtttcagcagagtgcagttccagcccacaatgatgcacgcatctgccggtgattcacaggagttattattgcgctgcgatattgatgatggttcgggcggattgctgtctgtggaccgtggtgggggcgaggggcgaagccggccaccagtgattcagtgaagaagaaaacaaaccaacacatttgtgtaatcaactttgatgaaacttcaattgaggcgcggcacaaaaatggtgaatatggcacttagatgcattgtttcgatgaatccagggtttgtgaatttagaccgtttgagaaagtttttgtagaataaagctcagcctgttcatttgcttttaatctttatcggctgtttttacgttgttttgcttctatcaattgtagcagctacaataattcgaacaactgactttaatataaagcgaacaactctactgttttttaatgaatatgtatatgtggagctctaccagacaaaaaagggcaaatgaatactgtgtccatcatgggcaa

SEQ ID NO: 261625 - DNA, 2283 bp, Zea mays
ttcttgtcgcgtgggtaaaaacaaaccgaaaaacctcctctacagtcccatctaggcgcccctcctcggctccgatccagtttcgccggcggccatgtcgcagccggcggcgacggtggccgcggcggcgcagccgcagggtcgcggccccgcggggcgccagggcggcctggggcagagcatcgcaggcatcgtgcggatggcggtgttctggtactttgcgtccaagttcttcgggcccaagcgcccacccgcggaccccgggatgctcatgtccaacctcttccagaagggcgagccaatggatatgtggatgtatttgtcagagaacgagaagttcaacgattttgctaatgaggatgcacttatttggcacgaggcaaacataccatatgcagtctggggacctaccagtactagaacacggtcattaacatactatccgtcagaggctctcaagcataatggctctttgtatgctcatgtttactttgcccgctcgggttaccctgtggacccaacagatcctgaatatgagcagaaatctgcatttgggaggacgcaccctgttgtggcattcttgccaaaatcaaaagctggtaaaaagaagagcttgcttggggattcagaagagcctgaagagcaagcaccacctaaggagaataaagaatttgaggataaagatgagggtccgactgaatatttatcttattggaaaccaaatgtaacagtaaatcttgttgaagacttcacacggtatcccaacaataatgtacctgccatcgttgctccatatctgaatgtggatccagctacaggcgattattatcctacagtattcttcaacgagttttggcttttgagggataaattaatagcgctcaatgagactgtgaaggaattgcccttaaaccttgaagttggtcctattagcatgaccaagtggcagttgtttttacagattgagcagtccttccaggttcatcgtagttatggaagtatgcttgaaggcgaggctgatgaactcaagagggttttccttgaaggaaatccttatcttcttggattgactatgattgtttctctattacactctctgtttgattttctggccttcaaaaatgatatccagttctggaacaagaacaagtccatggaaggtctatcggcaaaatctgtggttctgaattttgtgtgtcaactaattgttttcctgtaccttcttgacaatgacacttcatggatgatccttgctagctctggaattggtgtgtgcattgagttttggaagatcggaaaggcgatgcatattgaagttgatagaagtggaaaaattcccatgttgaggttccgagaccgtgaatcatatgcacagaataagactaaagagtacgatgccattgcaatgaagtaccttacctatgtacttttcctccttgtggtcggtttctctatctattcacttaagtatgaaaagcacaagagctggtactcatggatactttcttctatgacaagctgtgtgtacatgtttggtttcattatgatgtgcccccaattgtttatcaactacaagctgaagtctgttgctcatatgccatggagacaaatgacctacaagttcctcaacactataatcgatgacctttttgcatttgtcatcaaaatgccaatgcttcatcgtctctcagttttcagagatgatgttatcttcttgatatacctctatcagaggtggaagtatccggtcgacaagaagcgtgtcaacgagtttggcttcgggggcgaggacgaaccggcagcccaggaggctgtggaaggaagtgattcagctgcagcaccccagctaacggaggccgggtccgagacgagtacggaggacaagaaaaccaagtgatctccagtcttcggatcatccaaatacaagcatacatctctgcaacacctgccttcccagccggcgtgaaatttcttttgctgaaactggatgctggactcttgcggtcttgtcttaccgagacgtgctgaccataagataaggcgtgtaacaagggacacgatagtcttttgtctagagcagcgggcgaacaggcacacactttcacaattacgtttccagttcgtcttttagcagccattactagttgatatgcttgtttgattggtttgtgtacaatattttgtgcatgttgtcttaaaacacacactaatttggaggttcactaggtgctagataagcaacgacactcgtgcatgtatttgatgacgcttgaactcaactgt

SEQ ID NO: 261626 - DNA, 665 bp, Zea mays
ctttttgcattcgtcattaaaatgccaatgcttcatcgtctctcggttttcagagatgatgttatcttcttgatatacgtctaccagaggtggaaatatccggtcgacaagaagcgtgtcaacgagtttggcttcggaggcgaggaggaacccgcagcccaggagactttggaaggaagtgatccagcagctgcagcagcagcagccgagccaacggaggacaagaaaaccaagtgatctccaatcgttcgatcatccaaatgtagcacgccactcagcagcacctgccctcccacagcggttgtgaaatttttcgctgaactggatgctggactcttgcggtcttgccttactgagacactgacgataagataagttgtgtgtgtaacagcctaacaggggatacaatagtgctgcctagggcagcgggcgaacaggcacactatcgctattacgtttctagcagcccttacacagccattactaggcgatatgcttgtttatattgctttttttgtacaattttgtgcatcatttttcaaaatacataacggcgattaagagaaaaaaaaaaaaaaaaaaaaaaaaaaaaaaaaaaaggggggcgccccatataatgggcctgtcccccgggggttttttttcggggggtgttctgggggggg

SEQ ID NO: 261627 - DNA, 506 bp, Zea mays
ccgggatgaccacgcgtcgggccgaagatcacaaaagggacttccgttccgtgctagcgcgcgatcgcgtcggcctccactccaccttcccgaaaaagcttaccctttgtgtttgtgtgtctgtctggcaatcgatcgatctccatgacgacgtccccgccgcgcgcacgcctgctcgccatggcgctggcgctggcattcgcctgcgtgctgctcgtcaggtccgcggacgccgccacgcccggcggctccgcgtacgggtgcaacccggccacggacaggacgtgcaggcccgagggcgtcggggtggtgctgcccgacggcggcattgacctcgacggcgacggcgacgaggacgagctgccgcagttcgacccacacttcacgatcctcggccatgcccagtgagtgtgagtgcaggtgcagctggctggttggtcatctcagtcggtgtactggacatgcgtcgtaatctctgtcgttcattcgacgcgagaggaattgag

SEQ ID NO: 261628 - DNA, 2084 bp, Zea mays
cggacgcgtgggcccctgggcaaattgcggtggccggggcccgccgccgcgacagcgccgtccgtcctcggttccgctcctccgtccgatccatacgtttccgttccctataaattctataaattcccgcaaagtcccgtaccgctcagccaacccaacacgacggcgagtcgacggcgagtgggagggaacaccgcagcagcgatgcgtcggggctcgctttcgctgctgctgcttgcggcggtggcggcggtagcggccaccgcggttcccgccgagccggcgtcgacgctgtccgggccgtcgcggccggtgacggtggcgatcggagacaggggccacgcggtggacctgccggacacggacccgcgggtgcagcgccgcgtcacgggctgggcgcccgagcagatcgccgtcgcgctctccgcctcgcccacctccgcctgggtctcctggatcacaggggactaccagatgggcggcgccgtggagccgctggaccccggcgcggtgggcagcgtcgtgcggtacggcctcgccgccgacgccctcgaccacgaggccaccggggagtcgctcgtgtacagccagctgtacccgttcgagggcctccagaactacacctccggcatcatccaccacgtccgcctccagggcctggagcctgggaccaggtacttgtaccggtgcggcgacccggccatcccggacgccatgagcgacgtgcacgcgttccgcacgatgccggccgtcgggccggggagctacccggggcggatcgccgtggtcggggacctcgggctcacctacaacaccacctcgacggtggaccacttggtgcgcaaccgccccgacctggtgctcctcctcggcgacgtctgctacgccaacctgtacctgaccaacggcaccggggcggactgctactcctgcgccttcgccaagtccacgcccatccacgagacgtaccagccgcgctgggattactggggaaggtacatggagcccgtgacgtcgagcatcccgatgatggtggtggagggcaaccatgagatcgagcagcagatccacaacaggacgttcgcggcctacagctcgcggttcgcgttcccgtcggaggagagcgggtcctcctcgccgttctactactcgttcgacgccggcggcatccacttcgtcatgcttgcgtcctacgccgactacagcagatcaggtgcgcagtacaagtggctggaggcggacctggagaaggtggacaggtcggtgacgccatggctgatcgcgggctggcacgcgccctggtacaccacctacaaggctcactacagggaagccgagtgcatgagggtggagatggaggagctcctctacgcctacggtgtcgacgtcgtcttcaccggccacgtgcacgcgtacgagcggtcgaaccgggtgttcaactacacgctggacgcgtgcggccccgtgcacatctcggtgggcgacggcggcaaccgcgagaagatggcgacggcgcacgcggacgaggccggccactgcccggacccggcgtcgacgccggaccccttcatggggggccgcctctgcgccgccaacttcacgtcgggccccgccgcgggccgcttctgctgggaccgccagccggagtacagcgcgtacagggagagcagcttcgggcacggcgtcctggaggtcaggaacgacacgcacgcgctctggcggtggcaccgcaaccaggacctccatgccgccgccgccgccaacgtcgccgccgacgaggtctacatcgtcagggagcccgacaagtgcctcgccaagacggccagattgttggcctattgattgatccatcactcctagctactcctactctggtcgctgcctattgattgatccatcaatcctgttaattttcagaagagtttcagaagagtcttaatactcctagtcttaatagtcctagctatgcaaatatgcagtgttaatttgcggcagtaccagattaagcttccatccagattggcagcggtcaattcttgtccttggcacactactcgagatgaaataagctttaccttaaaacc

SEQ ID NO: 261629 - DNA, 661 bp, Zea mays
cccacgcgtccggccgcctgggtggagtggagagctggaggcagatcgaaataaagagcaccgtccgaaccgacgtcctcgccgacgtcgtctcaaacgtgcccctcacgagaccgtcctccaaaatcctgaaacctatataattcccgctccatcaccggccggacgcctgatccgagtccctgagtcctgatagtacacgacaggcaccgcagcagaccggccggactcggcgccaagcgcgatggatttgtcatccgacgacgtgaaggcggcgaacatgcggcctgcggttgctgctgccgacggcacgtcgacgcttctgcggggttggcgggagttcatgcggagcggcgcgccggcgaggttcctctgttatgaggacggcaagtggatcggtatcaccggagaggcggtgccgcagctgcgccaggcgttccaggagaggagggcgatggccgatgcttcgtacgggggcaaggcgtacctgttcgacttcctccgcatgatcaggatcgacgaggtcaccggcgaggagaccgggctggcgtggatcgacgaccgcggggactgcttcttcccggcgcccgactgcggagggaggaagcgcaagagggacgacgagccggcggaggacgaggccgagtcatcctcgggcgtg

SEQ ID NO: 261630 - DNA, 1029 bp, Zea mays
gggttatagaaaattatattttatgtaaatctattacatagccttgtggatattggtaccaccttatttttcttgttggcctgttcaaccacatgaaacacgctttgctactttttttttactaaccagagatccatgtccatgcatgtgtaggttattggcctttatgttggggttgcgacagtgggaatcttcatcatctggtacacgcatggcagtttcctgggaattgacctggctagtgatggccatacccttgtgtcgtactcccagctctcaaactgggacaagtgctcctcatgggagggcttcaaggtgtcaccattcaccgcaggagcgaggacattcagcttcgatgcaaatccatgcgattacttccagggtggcaagattaaagcaacgaccctctccctgtcagtcttggtggccattgagatgttcaactcactgaatgccctgtcagaggacggcagccttgtgagcatgccaccatgggttaatccgtggcttcttctggccatgtcggtttctttcgggctgcatttcttgatcctctacgtgcctttcctggctcaagtgtttgggattgtgcccctcagtttgaacgaatggctcttggtgatagcagtggccttaccagtggtgctgatcgatgaggttctcaaatttgtggggcggtgcctgacagctcgtgcccgaaaacaatcagggaagaggaaggcagagtagatgctagtgatcatcggtattagaatctgtagcgccacgggaatcgatattggatgtgacaccccattgtttttgagttgctaaggtctctcgatcctttctgagtctttttagactgggaatgacagtccaggacaggcaaggatattctataggactcataatcagatcgcattgaacacactgcattcttttcgttgtaacaaatgctggtgctgtgaacatgctggagatacatcaatggctacctgacgctttttcgctataaaaaaaaaaaaaaaaaaaaaaaagggcggccgc

SEQ ID NO: 261631 - DNA, 609 bp, Zea mays
gtcgcgtccatattcttgacatcggctttgggtattccagaaggtctcatcccagtgcaactcctatgggtcaatcttgttacggatggccctccagcgactgctttggggttcaacccgcctgataaagacatcatgaagaaacctcctcggagaagtgatgactcgttgatcacgccttggatcctgtttcgctatatggttattggcctttatgttggggttgcgacagtgggaatcttcatcatctggtacacgcatggcagtttcctgggaattgacctggctagtgatggccatacccttgtgtcgtactcccagctctcaaactgggacaagtgctcctcatgggagggcttcaaggtgtcaccattcaccgcaggagcgaggacattcagcttcgaatggctctaggtggtggcagtggccttccccgttgtgctgatcgacgaggttctcgaatttgtggggcggtgcctgacagcgcgtgcccggaaacaatcagggaagaggaaggcagagtagatgctagtgatcatcggtatttagaatctgtagtgccacggggaatcgatattcaatgtgacacccccattgtttttgagctgc

SEQ ID NO: 261632 - DNA, 513 bp, Zea mays
gaatcggggctcaattaatgttattgggagactgccatccattcccttgggctttgcaactcaaggtcctctaccttggtaagtacaaagtatcacgtgaacaagaatcgtcgtgggttcctcaatattatttctaaagaaaatctgaaacaagggataccttgtaatccctcttgaagatgtgaagcaatctaaaatctatgtaagaagataaataacactcaggagtcaagactagacaactagtcaccccaaagaattagccttttttagccgtgtacacctggaatctaatccagattggcaaccacagcatcggtaacttcctgggtggtgctgctaccgcccagatcctttgttctgtacgtgccttcagcaacgacacgcttcactgccgtctcgagccggtccgcaaatgacgggaactgcaaatgcctcaacatcatagcagatgacagaagcagcgcgacagggtttgctttcttctgctccacaaggttctcattcccaaca

SEQ ID NO: 261633 - DNA, 490 bp, Zea mays
cggacgcgtggggttgagggagaagaagcaggggaggggaagcgatgagcaacatgctgcggggtcgccgccgcctggacctcctgcaggtggtgctcttcgccgccgtgctcctgggcggcggcggcggcgcggacgccggcacgacgagctcgtacaggcggaagctggaggcgacggtggagatgccgctggacgccgacgtgttccgcgtcccgccggggtacaatgcgccgcagcaggtgcacatcacgctgggcgaccaggagggcacggccatgatcgtgtcgtgggtgacggccagcgagccgggcaacagcaccgtcgcgtacggcgaggacccggcgaggatggagcgccgcgccgacggcgcccacacgcgcttcgactactgcaactacacctgcggcttcatccaccactgcaccctcagatacctcaagcacgccaccaagtactactacgccatggggtttggccacacggtcag

SEQ ID NO: 261634 - DNA, 403 bp, Zea mays
gttagttgagggagaagaagcaggggaggggaagcgatgagcaacatgctgcgggcgcgccgccgcctggacctcctgcaggtggtgctcttcgccgctgtgctcctcgtcgtcgtcgccgacgccggcgtgacgagccagtaccggcggaagctggaggcgacggtggagatgccactggacgccgacgtcttccgcgtcccgccggggtacaatgccccgcagcaggtgcacatcacgctgggtgaccaggagggcacggcgatgatcgtgtcgtgggtgacggccaatgagctgggcagcagcaccgtcatgtacagcgaggcgtcgccggacccggagaagatggagctccgggcggagggcacccacacgcgctacgactacttcaactacaccttcg

SEQ ID NO: 261635 - DNA, 301 bp, Zea mays
ccctgcgtccgagaagggggtggccaaagaaagcaggggctgaggaagcagagtagtagagcgaaggcgagcgtatcaatgatggggcctctgcctctccgccgccgcgtgggcgtcctcctgttcctggccctcgtgctcctgggcggcggcggcgcggacgccggcacgacaagctcgtacaggcggaagctggaggcgacggtggagatgccgctggacgccgacgtgttccgcgtcccgccgggctacaatgcgccgcagcaggtgcacatcacgctgggcgaccaggagggcacgg

SEQ ID NO: 261636 - DNA, 686 bp, Zea mays
ctccattgatgcactctttggttgattttcggtggagcatttcgtcgaacacaggggcggagggcccagtatggtccagaaatcaaagtaaaaaaaagccctagtgtctccgcatcgcgctcccgcacacagaccgaccagccgcagcccgtggcgcacctgcctgcgcccgccgcctccgtcatccactcaacctcgcccctcggccactgccgcccggcgcccgcccgcctgccgcaccggccgaatcatccgacggcccttaagctgaggcggtgtggcctaagttgcagcgcggcggtcgccccgtgtctcgtccacttcggccccgacaggctgtccacggtggcgcgaactgcccctcgccggttcggccccgcccgcccgtagcagctcaccagagaactagcctctcgtcggccttccccaggtctgcgcgtggcgcggcgccgcagcaaagctccaccgcgtgcgtgtccgccacccgccgtcccgcccgggccgccgtcgttgctcgtcggtgaacgacgtctcgctggcttcagggtatcagcgcgttcttcgagcggcagcaacgacaaacgggagaaggaagagaactcgtggggaaggcgaagcgggacgatgcagcccaagatcagcgcgttcttcgagcggcaggagacggacccagatccgattagtgg

SEQ ID NO: 261637 - DNA, 625 bp, Zea mays
cccacgcgtacgccgcgtgcagcgccgcctggatcgagcagccgagcgactaagcgaagactcccttttccccgagcacaagagaaccatggcggcggcggcagtttacggcggcttcaaagggaagcttggcgtcgaggatgcccccgagctgcagctcaaccgcatccgcatcacactctcatccaagaacgtcaagaacttggagaaagtttgtgcggatttggtaaagggagccaaggacaagcatttgagggttaagggacctgtcaggatccctactaaggttctccacatcaccactcgcaagtccccttgcggtgaaggaacaaacacatgggatcggtttgagttccgcattcacaagagggtgattgacctaatcagctcccctgatgtggtgaagcagatcacctccatcacaattgagcccggtgttgaggttgaggtgaccattgccgacgtgtaaggacgtgaagttcagcaatgtcatcgacaatctttttctttgtgctccctgtgtgctctgctcgcaagagagattttgagttattattagcatacaagacttcttccccccctataatctatgtagctgtttgctgatcatgcctgtcaactgaat

SEQ ID NO: 261638 - DNA, 446 bp, Zea mays
ggaacaaacacatcggaccggtttgagttccgcatccataagacggtgatcgacctgatcagctccccagacgtggtgaagcagatcacctctatcaccattgagccgggtgttgaggtcgaggtgaccattgcagacgtgtaatgacgatctatatattcgcgttgcttttggctttgtgctccccttgtgtgcctgtaagagagacatcgagttattgttagcttataatccttttgtagctgtatgtcttatctgtgggctgcgcaacttaaaattttggttcagtaatctagtttgtcagggcaactagttcgcttcagtcttctgtcaactattgtgatgaacctcgcttcgttcaattttttttatgataaaccttgtatttagcacgtgaccgaattctattagcataaagtaaactgggtgtcgaccattatgtgggt

SEQ ID NO: 261639 - DNA, 569 bp, Zea mays
actgtctaaaacatttttttctttgcttgaagcaagcaccttcccctttctctgcctccctctcccctccatatatacgccattgtgtcgctccgctagtctcgcgcgacgcccatgggggaggaggggggcctgatctaatgtaggggcaggaggaagcccttccactgttccatctctttcccggagtaggtggtgggcacgacgaaggcccctcgcccccaccagattcgtgcaactcggcgcctcatccgatcggcaccggccgcccaacgcgctacagacgcgctgccgcgtcgggactctggaggacacggcggcggcttggtggattgtgggagggagggccttctcttggatttcttgttgtcgaggacagggtcttgtattagctagctattcactggatgttggcgatggggacagaagagtgggagctctatccttgttcctacagcggctcacaggtgatagagtacaggccggtctctgaagacgaagacggcgcgacgacgaccagaacggggccgacgtggcagtgtcgctggacgccgttctcccagacgatc

SEQ ID NO: 261640 - DNA, 429 bp, Zea mays
ctggagacgcgcacggccggcttctcgttcgccgtcagctccaacatgctcttcaccttccggatcgcgcaggcgttcctgtccatgatgtgctccatgcgcgccttcatcttcttcttcttcgccgcctgcatcggggtcatggccatcttcgtcctcacgctgctgccggagaccaagggcgtgtccatcgacgagatggtggaccgggtctggcgccgccattggttctggaagacgtgcttcgccgacgactacgacgcggccagggtctacgacaactgctagtgctaggcacgcgcgccgccggggattagttcttttgtcattggaattagaaaatcggcctgatttattggattttcgttgctatgacctttacattgatgtcggggcaatcaacaggccaaactatatagcatatgagaa

SEQ ID NO: 261641 - DNA, 799 bp, Zea mays
cccacgcgtccggtgcgatggaaggcagagggtgacggccaggaggaagcggtcaataagagacaggggaaaatttgcccaaaaaaggactagaataacagctccgatccgaccatgtcgtcgtcggcgttcggcgacttcggtccgctcaccgagcgccgccgcgccgaaaaggcgcggcagcagcgcaggcgcatcatgatcgccgccgggactatctccatcatcatcatactcatcgccatgggcagcgccgcggtcatgtacagcgggaagaagtcgtccagcgacggtggccacaagtctgcttccaaaggcaagtcgagcggcgggtcagactcggactcgggagcggaagcggaagcggaatcggaagcggaatcggaatcggggtcggaatcgaagacgaatctgaaggccgtgtccaagagcatcaaggcgatgtgctcgcagacggactacacggacgcgtgcgagaagagccttggcaaggccgcgaacgccagctcgtcgtcgcccaaggacatcatccgcagcgccgtcgaggtgatcggcgacgcgatcggccaggcgttcgaccgcgccgatctgatcctgagcaacgacccgctcgtgaagggcgccgtcgccgactgcaaggaggtgttcgcggacgccaaggacgacctcaacagcacgctcatgggcgtcgacgacaaggacggcatcgccaagcagggctaccagctgcgcatctggctcagcgccgtgatcgcgaacatggagacgtgcatcgacgggttccccgatgaagagttca

SEQ ID NO: 261642 - DNA, 465 bp, Zea mays
cccacgcgtccgcggacgcgtgggcggccagcggcggcggccaaggcgcgatgggagcggctcccctggcggcgtggtgggcgcagccccggcggctgtgggtgctgccccggcgtcccatggcgcgctaccctgagccccgtccccggtggcggcgccccctagccgcggccctggcggcacgggcatggcggctccggcccagtgccggcgcatggcgcagccgctgcccttgcagcgcgggcggccaggccctccgtggcgcgcgggcagcctgggcgctgccggccctagccacggcccggcggcccggccccggtggctccccgtggagcggcggctatggccccgtccctggctcgccagcgggcggccccggcgcggtacaggcgcgcggcccggccacggctcggcgcgacacgggcgctctatggccgtgcggcctatgccaagcacgcgggcgcg

SEQ ID NO: 261643 - DNA, 563 bp, Zea mays
gaaaccctggctgctctcggaccttggacgacacgtcgacaccagtgcagcagccaccaaagatccggcccgcccgcgccgcacgagaccgccgcccgcgccgcacgagagtcatgacgacgccgcggcggcacgctgatccgtcgccctcgccctcgccctcttccccgccgcagcttctctcccgcctccgctccggggcctccagtttcctggcgcggcagtacagcacggggaagggaggcgataacaccggtccttcgaagccgaaaggtggtggctcctccgcgccaaggcacctcaggccaggattcgtggatccttcatcatggaaacattttgactcaagggctgttggcattaaaccgggtgctatacatacagatgcatgggcggttttaaaaaaagctcagacgtgaaggttttcaagcttaccttgttggtggctgtgtgagagatttgctactcaaaagggtacctaaagattttgacgtgattaccactgcaagtctcgaacagcttaagaaaaatatattcaggagatctaggattgtaggcaaacg

SEQ ID NO: 261644 - DNA, 730 bp, Zea mays
ggcagtaccagcagcgcccggccttcagcttactacaccgaagccgctgatcctccgggggtcaccagagcagatcttgaacctgctccaagagacggtggcagggaaagccaggaaaggcgccgctccttctcgtttctgtggccgtttggcccgtcgagttccagatccagttcttaccagtacgaacagaatgttgatgagcctgcagtatacgatccaaaccagatagcatattctgagtggcactatgaccactgactgaaaccctgcagcaatcgcaagctatctgcaattcgtgccttcaaccctcagctttggagaggcattcatcagctgtaatggctgcttgccgtataaaaaaaggatggttcttgcctgttatattgtgttcagtgcatagccttgctccgtatgtccgtcgtatatataatcccttgcgtgtagtaagcgatgaactgaatgcatccagaatatcatgtcatgataaacttgaatatagtttcatggttgttatttcagactgaaaataaaatcagtcttctgttccggttatactgatttctgaaagaattctagacctccgttcttgaatatttgttgtctgttttatatttgttgtccatttgttgtccgttttatatttgttgtccgttttatttctgagctaaatcatgacaaataacaaagaccagagtaaataaaaaaaaaaaaaaaaaaaaaaaaagaa

SEQ ID NO: 261645 - DNA, 747 bp, Zea mays
ttgttcacgcgtccgtatttttgctcgcatgcgcgatatgctgtcgaagactgatattcttcatcttgcatcatccttgggagttcaaatgcgaaacatacatttattacccttgccacccgtggagcatgtacctgaatctgggaacaatgatgtgaaagaagtggtaggaatatgtgatgataccacggttctacctgaatggcagcaacttgtctctactctaaataggaggaagcagaatgtaaaaaagcacctagctaactggggggactctgttccacaagttctagtagaaaaggctgaagaatatctccctccgaatatgggcttcctcatcaagtttgttaaggatgatggtgagttgctgtacccatgcccctcttggatacattcagatataatggacgataacattcttatcgaggggatcataaaactgagttcttctggtgagagggaaagagtttatgactcacatcgggacaaaataaatgcaattcacatcattgatttcagtgatctgtccattggggatcctatatgtgacataattccgctgcacttggatattttccggggtgatagtgaccttctcaaggaatttctacggagctatcaacttccccttctgaggggggaatcaaccaccgatgtctacagatcagtgcgaaactcgaagttcagcagggcatcatatcgcgcgatgtgctactgtatattacacgaggacaacggtcttggagc

SEQ ID NO: 261646 - DNA, 570 bp, Zea mays
acgctgacgcgtgtgctgactcgtgggctgacgcgtggtcggacgcgtggcttggatgggccaggaaaatgcagctcccctgcctcatgcccatcaaatcgttaaacttgttagatcggtaggcagagagaggccagactgatgggaatggcagcgaaggagcactttgtgcttgttcatggtgaagggcatggagcctggtgctggttcaagctccgctggctccttgagggtgctggctaccatgttacatgcattgacctagccggaggcggcgtcgatcctactgaccccaacacaatccggtcgttccagcagtacgacaagccactcatagacctcatttcaaccttgccggagggggagaaggtgattctaatcggacatggtgctggagggctgagtgtgattcatgcaatgcacgaatttgttgacagaatcagccaagcattttttgtggcagctacaatgctaccatttggatttcaagctgatgaagataagaaagatgggttaccaactttgcctgagaacgagattgagttgacactttgtgctggagcagatgat

SEQ ID NO: 261647 - DNA, 2018 bp, Zea mays
ccagaatcttactttgtagatttagtgtaaataatagtgatagcagctggtgacgaatctcgggtttccttagtagctgtcaccctgtgaatatgtcgtcggcaggtgtgatcgtcttggggccaattccagaagaccctgccttcctgcccatctgcttcaatggcagccggtcacagcactgctcatctgggtcacaactgcaggattccattcttattttccttgctgtgccgggtatgccacccatgcccatgagcgtgctgggatctgagtccattgcatctgtcaagctgcgcatccagcagttcaagggctttgtggcgacgaagcagaggcttgtgctggatgggcatgagctggcaagaaacaactccccagtcaaggattatgggctggccgagggaaatgttctgcatcttgttattcgactgtcagatctccgtgtgattaacattgagactgcaactggaaggaagtttcagtttcaggtggaccagagccgcaatgttaagtttctcaagaataagcttgaagcagagggtgatgaggatattggtaatcttgaggatcacaagcttgaatatgatggtgaggagcttgaggaccaccagctgatagctgatattagcaggagggatgatgctgtgattcatttattcatccgcaaaccagcaaaggtatggacacaacaagttgatggagatactttggttacagttgtcaatccacaggagaaaggcaacctgcaaaatgaacctcgctcaatgaactccacaaaatcagttgaggttaggcctgctcctgttgaaccaatagttagccaaaatgtgaagctgtcacctgaagtgatgaagatgataaattcaaccacagctggactggagaaagggcacctgcctgtgatgtcagctgaaggttcaggaggtgtatatttcatgcgagatgcaacaggtcagaagaatattgctgtgtttaagcctattgatgaggaacccatggccaaaaacaacccaaggggtcttcctttgtccactgatggcgaggggatgaagaggggaacaattgtagggggaggtgcattcagggaggttgcagcttatattctcgaccatccagttagtgatagtaaatctggtcacagttttgggttttctggtgtgcctcccaccacattggtccgaacctcgcatagggggaagaacttcaagattggttcactgcagatgttcatggagaacaatggaagcactgaagatatgggtcctcgaccttttcctgtcaaggaggttcacaaaatagcagtactagatattaggttagctaatgctgatcgtcatgctgggaatattctagtgtgcaaggagagagaaggtggcaactacaagctgattccaattgatcatggttactgcttgccagagaagtttgaagattgtacatttgagtggctctactggccccaagcccgtgagccattcaatgatgaaaccattgaatacatcaaatcactcgatgctgaagaagacatcaagcttctcaagatccatgggtgggagctgcctccacggtgtgctcgtgtcctgcgcatcagcacaatgcttttgaagaaaggtgcatctcgtggcttcacgccctatgacatagggcgcatactatgcagggaaactgtgaatagggactctgagattgaggtcatcattcaggaagcagaggatgctgttctcccagggtccagtgaaaacatgttcttagaaactttatctgaaatcatggaccgtcacctccacaaggaatgagtttagaaattcagaataacttatctagttgctccagctgtatccggtttgttgtaagtattgtagacaaggggtgtcaagggactaatgatttcatttgtttgtatcctctcaaatgatttcacttggttgtaattgctcgagtactttgcttatgcacattttgtgaataatatatttgttccgttaaaaaaagaaaaaaaaaaaaaattaattaaa

SEQ ID NO: 261648 - DNA, 314 bp, Zea mays
ggggaagaacttcaagattggttcactgcagatgttcatggacaacaatggaagcactgaagatatgggtcctcgaccttttcctgtcaaggaggttcataaaatagcagtactagatattaggttagctaatgctgatcgtcatgctgggaatattctagtgtgcaaggagagagaaggtggcaactacaagctgattccaattgatcatggttactgcttgccagagaaggtggttaatatctgttacaatacgtatttggttcatctgcttgcaccttatttgtttcatatggctgattagaaacttacgt

SEQ ID NO: 261649 - DNA, 715 bp, Zea mays
cccacgcgtccgaatggcagaattcctaaacgtgaggttggcgaaaagagaaaagaactagagcatcccgtggagagaaggcggcggcagcgcctgtgtggagatgtcaatcctgtgggagaagagcgcgggttggcgatggctggttcggcggacgcgtgactcgaagcccttctttttcacgttcgcggcgctgtgcggcgtcgtccccggcgtaatcggctacggcgtgatgcagctcaccggctcccgcaacgagcagctcgaggcccaccttcgctccacggcccgtcccgagaccacgatgatggggcaagtgaacagggagaggctggcggagtttctcggcgagctgcaacggaaagaggacacgaacgacaggtacgtggccgcgctgaggggggagaccctgaccaggaagcgctacgagcgcatccagcccgtgcctgccgccaacgcgcaagcgagccaggagactgccggagccagcgcggaggaggagaggcccaaggcaaagtgagtcatcagcgagacgtgcctcagtcaatttttacttgctggacatacgcatgcttcggcataatgtaagcagtcagcgcctgtgaaacgtcattgcgcttggggtatttgactcccttttgttttaaacgctgctgatgtaaatctttggtgcctttcgatggatgctagtagagctctggacggttctgccgaa

SEQ ID NO: 261650 - DNA, 1708 bp, Zea mays
gggccgatacacgactctagactgcctcctagaaaccctgcacggctcgccgagacttcagtttactggagcacgcaccgcagcgtctccaccttctgctcaacctccgcttccgtaggtgccggcgctaagcgaggatccctccgtccatcggtcccgacggcacctcgactcgtttcgtcggtcgctgtggcgacgggtgattgactgcgatatgaggcaatggttatgttgtaactgccactttgatgacgaggaagatggccatgacaaggaacaggccaaagctcagagcaataagatagaccccaagcagaagtcttcaaaacctcctggtagtcaacctgagccagagttctcccctcctacaattgatgttcctgaattgtcattggatgatttgaaactaaagactgatgattttggatcaagtgctctgattggtgaaggttcttatggacgagtatatcatgccgctttagatgatgggaggcaagccgcagttaaaaaacttgatgcatctgaaaatgagcctaatgatgagttcctcaaacaggtctcactggcatcaaagctaaaacatgaaaatcttgttgagatgttgggttactgtgtcgatgggaattaccgtatactcgcttatgaatttgcaaccatgggttcgcttcatgatgttttacatggaagaaaaggcgttcaaggcgcgcagcctggccctgtgcttgactggatgcagagggtcaaaattgttattgaggctgcaaaaggtatagaatatctgcatgaaaaggttcagccttcaatcatccatcgggacatcagatcaagcaatgtactgctgtttgaggatttcaaggcaaaaattgcagacttcaatcttttgaaccaagcaccagatatggcagctcgtctccattcaactcgtgtattgggaacttttggatatcatgcacctgagtatgctatgactggccagctgacacaaaaaagcgatgtctacagctttggcgtggtccttttggaacttttgactggaaggaaaccagtagatcacacaatgcctcgaggacaacaaagtttagtcacatgggctactccaaggttgagtgaagacaaggtgaagcaatgtgtagatcccaggttgaagggagaatatcctccaaagggagtcgctaagcttgctgcagtggcagcactgtgtgtgcaatacgaagcagagttcaggcccaacatgagcattgttgtgaaggcgctttcgcctctccttcaacaaagacctgcaccaggcaccgcagagccagccccgcaacctgtgagctgaatccagtcacgtgtgatgggacctcgcagcatcaggcatctccgcgatcattcaatcagcaagtcattgagagtattttgaatatttgttctgtagcattctgttcctggcttgatgttggcgctgcacaatgacaatggtatatgcagtaggtttgatttttctttttcttttaccttctctataccagtaccaagttaccaactgttcgtagattttcagaattcgctgcttgaagaatagatgcaggattgatctggaattttttttttggtctggcgtggcgttgctgccttctcttccatggttaccaaataccatgattgaaatcaagtcacttctactttgtttgaagtcaaaattcttatactttgaaaaagttagtag

SEQ ID NO: 261651 - DNA, 1425 bp, Zea mays
gcgcgcagaagctactcccgaagagtcgctctcctgcgtccacgcctcgcttgcggcgactagggcgactgccgccgccgcccttcgcccagctgcccaggtcttcgtcgggcgctttaccgctgaagagcgcccaccataccagattggccaccagaggattgctacatttgggaaggatgagcaaaggccctgttccattcgccaacattgggaagagagcaaaagatctcttgtacaaggactacaactttgatcaaaagttttctttgtcgacatgttctaactctggtttgaatctcacagccactggtgtgaagatcaatgaagacttcattggtgatatacggacacagcataaaagcagcagaaccactgttgatgtcataatcgatagtgattctaaagtgtcaaccacagtcactgttgatgaagcactaactggtttgaagacttcatttgccttcaaggttccagatcacaagtctgggaagcttgatctgcaatatgcccacaatcgtttttcattgaactcgaccattggtttgacatcaacacctttggttgagctcgctgcaactgtcggcacaagtgaacttgccattggtgctgaggttgggtttgacagtacttcagctgctgttaccaaatacaactcaggggttggatacaacaagtctgatttctctgcttccttgctactggctgataaaggggagactttgaaggcatcttacgttcatttattcaatccgaccaacggggctacagttgcagctgaggtaacacacaagctgaaaaccaaggagaactatttcacacttgggagctcccatgcccttgatccttcaacattgctaaagacgagattcagcaactcggggaaggtcggtcttctctgtcagcatgagtggaggccaaagtccctcgtgactctttcagctgagtatgatccaaaggtggtaagtgcgccttcaaggatcggcgtggccatatcgctcaagccttgagatatgggtcaagtcaccttctgtaaaacagtacaagcgttacgtactgatactcgtgtccaagaacataaacttttggagcgatgcctagaacaaccctctcccttttagccttgtttttggtaagatccttgggcaaagaagtgttgtcagggagttggacttgttttgtggaatgtttccattaagagccaaccccacaccgatgattgcaaacagaggtttgtattagtgcagaagtttcactctgcgatattttttccccatgttttcctagtcgacgcaaaatgattttggaggtgattgaacacctaacgtcttgagttgacggcagctttaacagctctgattataaaggggccacttgtacccagcctccgaagcatctgcttccaattcgtcgaattggttattc

SEQ ID NO: 261652 - DNA, 611 bp, Zea mays
tttgaagagtcgctctcctgcgtccacgcctcgcttgcggcgactagggcgactgccgccgccgcccttcgcccagctgcccaggtcttcgtcgggcgctttaccggtgaagagcgcccaccataccaggccccgcaccttttaacaagttccagtcgtggcgccgagccctactcctcctcccgccgccgccgccgccgccgcagactcttcctcgcgactcgccgctcgcccgactttcacgagctccgacaccaaggtctgagtgtctgactaccacgctgcacctacgacctcgaggcgtctccaccgcgccattggcaaactaactcactttacaggagcaccatgggagagtcgagcaaggagctcctggacctgccctccgaccccaggcctcccgcctccttcatcgagtcgcttctcgctggcagggagcagcagcagcaggataaggagggaaagcgtaagttgggggcgtccactgatcccctgcccaaaagccaagttatcgggaaagtgaaggatttcttgggggagattgcaagggccaaccagaagttgcagcttgatgcacagaacaagcctcctgtggagtacgatattgaagc

SEQ ID NO: 261653 - DNA, 313 bp, Zea mays
agctactcccgaagagtcgctctcctgcgtccacgcctcgcttgccgcgactagggcgactgccgccgccgcccttcgcccagctgcccaggtcttcgtcgggcgctttaccggtgaagagcgcccaccataccaggccccgcaccttttaacaagttccagtcgtggcgccgagccctactcctcctcccgccgccgccgccgccgccgcagactcttcctcgcgactcgccgctcgcccgactttccgagctccgacaccaaggaacaccatgggagagtcgagcaaggatctcctggatctgtcctccga

SEQ ID NO: 261654 - DNA, 545 bp, Zea mays
tcgttcacgcgtccgcccccgttcacctcgcgtgcgccacctagggtgaccgccgccgcccttcgcccagccgcccggggggcgctttgccggcgacgagcgcccaccgcacccccaccatattggtcactggaggattgctgccgttggtaaggatgagcaaaggcccagttccgtttgccaacatcgggaagagagcaaaagatctcctgtacaaggactacaactttgaccaaaagttttctttgtcgacgtctagcggctctggtttgaatctcacagccactggtgtaaagatcaacgaagacttcattggtgatatacggacacagcataaaaagcagtagaactactattgatgtcaccgttgatagtgattctaaagtggcaaccacagtcactgttgatgaagcactaactggtttgaagacttcattcgccttcaagggtcccgaccacaagtctgggaaggcagcttgatctgcaatatgcccacaatcggttttcattgaactcgaccattggtttgacatcagcacctttgg

SEQ ID NO: 261655 - DNA, 527 bp, Zea mays
aaagatgagattcagcaactccgggaaggtcggtcttctctgtcagcatgagtggaggccgaaatctcttgttactctttcagctgagtatgatcggaaggtggtaagtgcgccttcaagaatcggcatggccatatccctcaagccttgagctgggttaagtcaccttctataaaacagtacaagcataccgtctcccaagaacacaagcctttggagcgatacctagaacaaccctccattttaagccttttttaattttgtaaagagtccttttgcaaaggagtattgtcactttggcaggggagtttagactttgttttgtgggaacagtttccattagaagcccaacttccaacacgaaggaattgaaaatacagaggtttgcattagaacagaagctccactgcgatattttcccatgttttgctagtcgacgcaaaaaatgattttttggaggtgatttgaacacctaacatcttgagtcgatggtggttttaacagctctggaaatcaacaagggccat

SEQ ID NO: 261656 - DNA, 628 bp, Zea mays
gtgttctattacacaaaagaggcaaaaaacaaaagccggtaacggaaaccctaatcccggcaaatcccgaatccctctcgaatttctatttaatgttcctgttcttcccctccgatccgatgtccccaactgcgctcccgtcggcgatcaaacaccggatcgcggcactcgccgccgttgaggaggaggtttccggcgctgcttccagcgccttgccgtcagcaccatgaggaagaagctggacacgcgtttccccgctcctcggattaaaaagatcatgcaaacagatgaagacgtcggcaagattgctcaagctgtacctgttctagtgtccaaagcattggagctatttctgcaagatttatgtgataggacatatgatattacaattcggaagggggtcaagactgtgggttcttcccatttgaaacaatgcatacaaacgtacaacgtctatgacttcttgagggaagtagtcagcaaagttccagacattggtccttctgatgttattgctgatgataagcttggcaaaaggaggaaagccgaagaaatgggagtgaggaagaattgaagaggacaagaaatgagacagaaagctatacaagcaatggcagaagccgtggga

SEQ ID NO: 261657 - DNA, 1951 bp, Zea mays
cttatatttgccgttccgtcacggctttgctcgccaaactgactgatggtctgattgtgattgcggcagcaccgccgaccacgagcccgccgaaaggctcctccgcctgccgttccagggtgcactgccgccattgctcatctccccgtggtgcggaggtccacccgggcgccaattggtctcctctttcgttggcagactgagtggcatccaatcctgaatcaatgaggggctggggtttgctcgtgttatcgctacatgttctttcatgcctggttagtggcgttgcttctggtcgaacaagctcttatgtgcgcacagagtttccatctacagatatacctctagaaagtgaatggtttgctattccaaagggatacaatgctccacagcaggttcatatcactcaaggtgattatgatggaaaggcagttatagtatcttgggttactccagaagaacctgggccaagtgaagtattttatggcaaggagaagctatatgaccagaaagcagaaggaacaacaacaaactatacgttttacgattacaaatctggatacatacaccattgccttgtcgatggccttgagtataacactaaatattattacaagattggaagcggaaattcagctcgagaattctggtttcaaacgcctccagcaattgatccagatgcatcatacacatttggcatcataggtgatctggggcaaacatttaattctctctcaactcttcaacattatgagaaaactggaggtcaaactgttctatttgttggggatttgtcgtatgctgatagatatgaacataatgatggcattcgttgggattcctggggtcgattcgttgagcacagtactgcataccagccatggatttggaatactggaaaccatgaaatagagtacaggcctgatctgggagaaacttctgtattcaagccatatttgcataggtacatgactccatatttagcatcaaagagcagttctcctatgtggtatgctgtcaggcgtgcatctgctcacatcatcgtgttgtctagctactctccatttgtaaaatacactcctcaatggctgtggctgaagaacgaattcaagcgcgtggacagggaaaagacaccctggcttatcgttctcatgcattctcccatgtacaacagcaacgaggcacattacatggagggtgagagtatgagggctgctttcgagaaatggtttgtgaagtacaaggtcgacttggtgtttgcagggcacgttcatgcttatgagagatcataccgcatttctaatgtcaactacaacataacgtcgggaaatcggtatccagtgccggacaaatctgctcccgtttacataacggtcggtgatggaggcaaccaggaaggacttgcttcaaggttttataacccccagccggattactcagcgttcagggaggccagctatggtcactcagttttacagctgaaaaacaggacccatgctatctaccagtggaatagaaacgatgatgggaatcctgttccagcagacaccgtaatgttccataaccaatattggacgagcagcacgcgccgcaggaggctgaagaagaaccatctccatctcgaggaccttgaggatttgatctccctattatagaaaaccgggttcgcaggacgcatgaactgtgtgtgggggaataatcgcaggttagcactgttgctagtgtgcccgcctctcttggaatggaagcagcagagccagctatcagactggcagtgaccaccacctcctcagctacctggttgcatgccacagatctgaaattctgaaatgctgtgactgtgactgtgaggtatgaaaaaacagtgtaaataacgcggttgcctccgtacatgtgtgacattttatacacgtgcaagaaagcatcggtgtccaccgttgtccgtgaaccc

SEQ ID NO: 261658 - DNA, 812 bp, Zea mays
gccacgcgtccgcccacgcgtccggaacaatacacacttgtcttcacgcgttggacgctttaatctggactggactgatccagaccagtcacttgagaaggagaatgcggcatttgaacaggcaatggtactagctggaagtgaatttatggagagcgttcgcttccatgttaaatcatggttaccggcaaggtctattgtcctggagtgtttgttatcaaaaggaaacattgatccaagtggagaaatcatggttttggatagattctgcccgtggaaacttcatttatttgagcttgaagaggagctgaagactgatcctctgaccaagtatgtgctgtatcaggatgagaggagcaagagttggcgagtccaagcagtcgcagttgctcctgacaggttcgagagccgaaaggctctgccagagaagtggaggggcatgagagacgacgaactttcagcagaaaccggcatccctggctgtgtgtttgtccacatgagtggcttcattgggggcaacaagacctacgagggagcattggaaatggcgagagctgctctgaaattctgattcaaccaaagcatatttattacccatgttaccattatatcagtaaacacatcaggaacacaagatgcagttgcgctttctccaatgttatcgtggactccagccgtggttaactgggactgattcttgcactgatcttctgttatcctcatcttacagaagaggtcgattgaccctttttttcgtgggatctggtattgcttagaatgttgacggttatctgaaaaaatgatggaacctt

SEQ ID NO: 261659 - DNA, 647 bp, Zea mays
cgcgtccgcccactcttcctcccactcgtccgctgtcttctttttcgggacaccttcacacctatcaacctgttcgggtacgggatcgcgtttttaggggtgggctactacaatcatgtcaagctgcaggcgctcaaggctaaggaggcacagaagaaagccacacaggctgatgaggaggccgggtcgctcttgcaggagcgcgatggacacagtgatcgcaagagcgacaatcaggcctagagggccagatctgatcctggcctccccatattgggcatctgatgcaaggtgcaaagactggtgtttggtctgcggttgctttcaaggaggtgtgtgccggttgcttgcacatctttaactctgggtctgaagagcaaatcagaagtatttatggtttaggaaatatgcacctgctttgctggagaactttgtcctgctatttatttatagacacttctgatctacaggaaggcggccattcctcactacctctctttgcccattgtctacatttatttgttctactagtagattagggactacagatgtactcctgcagatggttaatttggtggctattttcgatatataatgagcttaccgtaaaaaaaaaaaaaaaaaaagggcggccgcccgggaatccg

SEQ ID NO: 261660 - DNA, 1897 bp, Zea mays
tttcacgcgtccgcggacgcgtgggccctgctgcgctcaagacccaagtctgctagaacccgggcgcgctccaaattccccggtcacctacctcctctgccctctcactctcagatccgcgtcctcggctcctcctcctcccttccttcgttccttccagatctccctcccagtcgagagtcgagatccaccgcctccgcgccccctcaccggtgcagcgcgaggaagcggggggccagaggccagccatgggcaaggaaggggccagcgacggcggcatgtcggagtcggtgatccgcaaggtcctggtctcgtacatgtacgtggcggtgtggatcttcctctccttctccgtgatcgtctacaacaagtacatcctcgaccccaagatgtacaactggcccttccccatctccctcaccatggtgcacatggccttctgctcctccctcgccgtggcgctcgtccgcgtcctccgcgtcgtcgacctccccacttcgccatccatgacgccgcagttctacacctcctccgtcgtccccatcggcgcgctctacgcgatgtcgctctggttctccaactcagcctacatctacctgtccgtgtcattcatccagatgctcaaggcgctgatgcccgtcgccgtctactccatcggcgtcctcttcaagaaggagaccttcaggtcctcctccatgctcaacatgctctccatctcattcggtgtggccatcgccgcctacggcgaggcgcgcttcgacgtgcgcggcgtcgcgctgcagctcgccgccgtcgccttcgaggccacgcggctcgtgctcatccagatcctgctcacgtccaagggcatctcgctcaaccctatcacctcgctctactatgtcgcgccgtgctgcttctgcttcctcctcgtgccctgggccttcgtcgagctgcccaggctgcgcgccgtcggtaccttccaaccggattttttcgtctttgggacgaactcactctgcgcctttgcgctcaaccttgccgtcttcctgctggtcggcaagacctcggcgctgaccatgaacgtcgcgggagtagtcaaggactggctgttgattgccttctcgtggtctgtgatccgtgacaccgtcacaccgatcaacctgttcgggtacgggatcgcgtttttaggggtgggctactacaatcatgtcaagctgcaggcgctcaaggctaaggaggcacagaagaaagccacacaggctgatgaggaggccgggtcgctcttgcaggagcgcgatggacacagtgatcgcaagagcgacaatcaagcctagagggccagatctgatcctggcgcccccatattggttggttctcgatacattcatgatattgctaccattgtcacttacatgtgagagaagtgttttttgttagcttgcattgtgatataagagttcatcttgagaaagacgttatgtttacatctagcgttctttttgttgcaatcgaaaatcaatattgcattgtggaccatgggctactgaagacatatgttttgtttacacaaatgaaatagaaatctgaaaaaaaaatgttctgtgaacaggttaccattagcctggaactgcgacaaaataagaataatcgaaaccaataaagcctagcgttttgttgttctactcggtcattttcgtgtcctaaacttgtaattttgctggaatattgtacagggcatctgatgcaaggtgcaaagactggtgtttggtctgcggttgctttcaaggagttgtgtgccggttgcttgcacatctttaactctgggtcttgaagagcaaatcagaagtatttatggtttaggaaatatgcacctgctttgctggagaactttgtcctgctatttatttatagacac

SEQ ID NO: 261661 - DNA, 475 bp, Zea mays
tgccccctcctccacccttgcgccacgctttcacagctctcccgcctccggatccagatccgccgccaccaacgcctgctcctccccctccggctgcaccaccaccatcaagaggtccagcagggcggcggcggcggcggcggcgacatggggcgtgacggcggtggcggtgtcgccggcggcatgtctgactcggtgctccggaaggtgctcctctcctacttctacgtggcggtgtggatcttcctctccttctccgtcatcgtctacaacaagtacatcctcgacccgaagatgtacaactggcccttccccatctccctcaccatggtgcacatgggtttctgctcatccctcgcccgcgcgctcgtccgcgttcctccgcgtcgttgaactccccacatcgccctccatgacgccgcagttctacacctcctccgtcgtccccatctgcgcgctctacgcgatgtcgctc

SEQ ID NO: 261662 - DNA, 369 bp, Zea mays
ccagcggtccagcccgacctctttccaaaccggcaaatcctcagatccgccccctcctccgcctccgcctccgcctcctgtaccctcacgccgtgcttccacagccctcccacctccgaatccagatccgccgccaccaactcctgcttctcacctcctaggctgcttcgcgcgacaacctccgcgaggagcagcaggagcggcggcggcggcatggggcgggacggcggtggcggtgtcgccggcggaatgtctgaatcggtgctgcggaacgtgctcctctcctacttgtacatcgtctacaacaagtacatcctcgaccccaagatgtacaactggcccttccccatctcgctcaccatggtgcac

SEQ ID NO: 261663 - DNA, 1287 bp, Zea mays
tgtttgtacaacctggagggatatgtgtaaggatattgttagaagtccagaacattgtgcggagctcacatttccagtatctcttaagcagcctggaccccgagacggggtaatccaatgtttcataaaaagggacaaatcaaagctaacgtaccggctctacttgtcccttagctctggtgtgcttgatgagaacgggaagttcctgctagcagcgaaaaggagccgcaggatggcgcacacggagtatgcaatttttatggactcgaggaatttctcccgatcgagcactggctacattgggaagctaaggtcaaatttccttggaactaaatttatcatctacgacacacaggctccgtacaatggcgggagagtttgcacacaggaacgtgcccccagccgtcggttgtcttccaggaaagtttcaccaagagttccaagcggcagctaccccgtcgctcaggtgaactacgagctgaatgtgctgggaacccgagggcccaggcggatgcagtgcgctatgcattccatccccgcatcagcggtggagcccggcggcgtggtgcctgggcaaccgaaagagctcctcccgaggctgttcgacgagtccttccgcagcaccgcaacttcctctttctccaagtactccgtcgcggacagctccatggacctgggcagctgcccgttctccgaggtcgaggtgggcgggggaagtctgcgagaaggtgacgagtcggagaaggagaggccactggttctgcgcaacaaggcgccgaggtggcacgagcagctgcagtgctggtgcctcaactttcgcgggcgcgtcaccgtggcctcggtcaagaacttccagctgatagctcctgcaaagacgcagccgcagccgcaggcctccggccccccgccgccgccgccgccgtcgtcgtcgtcgtaccatgacccggtgatcctgcagttcggcaaggtcgggagggacatgttcaccatggactaccggtacccgctgtcggccttccaggccttcgccatatgtctgacgagcttcgacaccaagctggcctgtgaatgaatgaatgaatgaatgaatgaacgaacgaacggtgagagagtcgttcgttttatgtgttccaaagtgataagcattctgagccttggcatgtaaataatttaagaagtaggtgtttgattcaagtattgtattgtttcgtgagacaagacaatgttgcttctgaaacctaaaagtgtttcttggtcagtgaagcaaatctactaaactagctgctg

SEQ ID NO: 261664 - DNA, 779 bp, Zea mays
agcaggtccagccggacgctctctcctgatcttcctccgccgtctcctcctgtcacccgctcgctgcgaatccctttcttctgctccgccatcgcgacgcgccgacatgactgggtcttctaagaagcatgacctcaaatctaagcaaaaattggaacagaagattagtttttacacaaaagtaaaagatgcagttacttccttaaatgctaagaagactgtcagtaagaaaaataaacagagtccgcgccagaagaagcttaaagcatacgatctgtcggcactttctgagttcctcccagaaccagctgcaccagagcagaagactgaagcaaagctgaactgcaagtcaagacagacattagtggtgcaggagtctgctcatcttaaggctgtactggacaacccgcagttccagcttgacccattcgctgcgatccatcagcacctgctggcaacgcagccgcctgcagctgcaaagaaggacgacgcagcggggaagcaggggaaggtttccaaggacaagaaaagccaggaggaagaagggcacatcgtcaatctctcaggcaatggatatctgattgtgttccttcagtactagtaacttggtccgatgtcgactgcccgtgttccactagagggagctcatcgaagttcgatatcgatggttggcatagtttgagtaccagtagaggtagtactgtaccagccctcgcttttggcagcctgttgattgatgtttgcagaatcggtgccatcaacatttggtgctactttgg

SEQ ID NO: 261665 - DNA, 495 bp, Zea mays
ctatttttgatcacgttattgaagccctaaattatgtcctaaaaggggaccgaagctgggtgggagattaccctattggttgtccaaggcctctgcattgctatgcccttctccaaagaaatctgcggtcaaatggattattcactaccccgtctcgtcgttctggtggagctctagggaagatagcacaaacattgaggtctccttcaaagtttataggccgcagtgatactctaccacatgttgatgcacggtatccagccatactattcaaacagcagcttactgcatgtgtcgaaaagatatttgggcagctcagagataatctaaaaaaggaaatatcacctcttcttaatgtttgcattcaggctccaaagtcaacacgtgggcaatctggaaaagcatccaagtcatctggagttggtgcccacccagcatcgaactccaactgggacaatatcgtcaatttccttgacttacttatggatacattgc

SEQ ID NO: 261666 - DNA, 998 bp, Zea mays
  unsure (1)..(998): unsure at all n locations
ctgggaggagcccaggtgctgagtttggaggatctcagcgtgcccaccaccccttgccatggattcgaacccctcctaacgccgcnctcgcccaagaaccggagcatctcgccggaccggaaggtgaacgaggagattcttcggcagctgggggagctcgcagagtctgatggcggtatgcaggcatcagcaggtcgtgaggaggcagagcaagctggtggagaccagttcccttcctgggcgtcaccacagtatgccactggacatggcaattttggaacagaggacaaccatgagaatggcagatggaacaacagtgaatatcatgatctaaatgatgcatgtaagctcgaggtcacatatgatcaggctccagtcaactcggctgaaccgtgcttgtcttcatttgctccactgtcggaaatctgccccagcatgagcaatggtagcagtaaggaagataaccaccaggctaatcctggcattggcatgccaatgcaaggtctacccacaaggagtggatttgatgttgtcccatgccctgaccgtgactcggtcatttcgcgctataaagcgaagaggaagacaagaagatttgacaggcaggtccggtatgagtcgcgcaaagttcgtgctgatggcaggctcaggatcaaggggcgttttgcaaaggcaaaccagacatgaacctaaatctgcagttctgcactatcctaagcatctttcctcaagaaatatgctaagtatcttccaacacgaagaagaaaactggtcaggggcgatgataatgcaaaaatgtgccagaattttgtttgccttcagttcaatagctgataaccatagctccatatacagttgaattgaatgacgtgtgtatatattgctgtcatgtgactagtagctacattgctttgagagatcaaaacctgtatatgcacctacacatgtgattttgccatgacggacataataatagaaccactgcgtttgattgatgt

SEQ ID NO: 261667 - DNA, 728 bp, Zea mays
ggagcagatccaacaaaggttcaaatttgtggcatggattatggcttctatgagaagaaaattgaaatccgtcattcaatagagagtgaaggcattcctcatacttacatatgctgcaacttctttatgcgctatttgcttccttcactggtgcaacctgggctagatgctcctcctagagatgaaatcaaaatatttggtgaaggaaatactaaaggtgtttttgttaaagagaatgatgttgctaaatttacaatatgcaccatagaggatcccagaacattgaacaagacgttgtatctgagacctccaggagaatgtcttctcaatgaatgaattggctgacctctgggagtcaaaactcaagaaatccctgaaaaggttatatgtaacagaagagcaacttcttaaagaaatccatgatgctccatttcccttgaagatggatttaatctttatatattcagcgtttgttaagggtgaccacacgtattttgaaattgacttgtcaatggaaggaactcaactgtatccccatgtaaattatacaacagtgaacgagtacttggatactctagtttaggatatttgttcggtttatatcttcccttgtaataagtcagaaataatgccttttttgtttctgatattttgatgaatgaattgtactgctatttggacgaatgaattctcatgtaatttcagccaacctcataaccaggcccaat

SEQ ID NO: 261668 - DNA, 474 bp, Zea mays
gttcttccctggttttggaagaaatctggagagttagttaccagtgttgggctgagtgctgagaatgagataatacacacccttgctttcttagctggttccatggtttggtcgcagattacagacttgccgttctctctctattcaacttttgttatagaggctcgacatggttttaacaagcaaactatatggctcttcattagggatatgatcaaaggaattttactatccatgatattggggccaccaatcgtggctgctatcatctacatagtacagattggaggaccttacctggctatatatctctggggttttatgtttgtattagctctactgatgatgacaatataccccattgtgatagctcctctgttcaacaagttcactcctcttcctgaaagaagtcctcacggaaaaaatagagaagctggcagcttccctcaagtttcctttgaaaaagcttttcgt

SEQ ID NO: 261669 - DNA, 800 bp, Zea mays
  unsure (1)..(800): unsure at all n locations
aaaatattctgcataaaaacattttaatgttaatagatgatgcctccttccaacgtggtacgcacttctaagtatccaggagtgttgctgcaacacagcacatattccacatgcgcttcatgaccttatgttttatacgtgtacctgagagaatataatcattttattgtttagtccttgattagcactttggaaattaataactactgtataaatctactttctttgaaggaactttgcttgctcttgtagttcttgcagttccctcaacggagactacaattcaaatttgacattactattaaaaacaatagttggcttgtcagattggcatcatcatgtttggtgtattcttatacctgcttctaacatctcatttcattccaggtattttctctgaccttgtctgaagctcacaggtggcaatagatatacatgtgggtttttcacaggcttgtaacaaatcggagtttgcattggctgtggagtgtaactgacaagatgcagagctcttcaaatatcttgttacttttttcagcanatagaaatttaacctttgtgttttatctgtttctgtttgcttacagagttcactgatgttgattaacattgctagcatgccttaagttttgaaattggttggttggtgtagtcttggtattagttggtggtagtaggttttgatacattttatttctttccactctttagagaaagttttgcatttgcaaaatcttctcattcagtggaagctccaagcaatatacatatacanattacacaaggtccttncatatgaa

SEQ ID NO: 261670 - DNA, 614 bp, Zea mays
aagaaactataaatccaatttctataaactgaaatataagccggtatatttggaaccacactaacgtttataaaccagtttcttaaaaaccagatgcttcaggcccttagaatgcctagaacgaggtaaaagaaaagaaaaacacttggtcatcagaagaccaatttgcgacatcagaggatattctcaataccaattgtcatccacaactataacagaatgggggaaatatctttacatgagaggtcttccgtagtccatacagtacccgtgtatatggactggcatgcattacatggtacaagcaatacacacaagtgttctgtcacgatgccgttggcctaggcaacctctttgcaatttcctcaaacagttggtttatattatcagctgtcttggccgacgtctcaatgaaaaacatattgttcttctctgcgtagtcctgcgcatcctgcgaggatacacttcgattatcatgtagatcagccttattaccaaccaaaaccattacaataccaggactaccatgcttctgaagttcctgtggaatggaaaagaaaaacaggagtgctttgctaaatgattccggacttgttatatcatagacaacaatt

SEQ ID NO: 261671 - DNA, 1046 bp, Zea mays
ccgtactcggtccggaattcccggggcgacgccacccctccgcctacggctcgagtctgctctagggtttttgccaagccgccgtcgccgtcgctctgccctcgtatcccctcccacgacaccgagacaccaagatgacggcgcagaccgcggaggagctcgccacccagatcgagcagcagaagctcgaggagcagaagaccgaggcagaggaagttgtggtggaggatgaggaggaggaagatgaggacgatgacgatgatgacaaggatgatgatgaactcgatggggatgccagtggcaagtcaaagcaaagcaggagtgagaagaagagccgcaaggccatgctgaagcttggcatgaagcccatcactggtgtcagccgcgtcactgtaaagaaaagcaagaatatactctttgtcatctccaaaccagatgtgttcaagagcccgaactccgacacctatgtcatattcggcgaggcgaagatcgaggacctcagctcccagctgcagacccaggcagcagagcagttcaaggctcctgacttgagccagatgatctcgaatccagagacgtctggcccgggacaggaggacaatgatgaggaggtcgacgaaactggtgttgaggccaaggacattgagctggtgatgacccaggcatctgtttcgaggcccaaggctgtcaaggccctcaaggcttctaatggggacattgtcactgccatcatggatctgacaacttagggtgatatttctgtccgtgccacttttgttttggagtgctattgcaacttgagtgttatatgtggacctatgcttcgatgatgttaccatgattgcttcttgggtcaaggtcattccaacaaggtttcatctttgctggcttgaaacctggcagtagtttatatagcccagaatgtttgtctgtggttctggtgtttcagtaatgtcacagttatcgatggctcttaagtttctgcaatatcacatttttctttaaaaaaaaaaaaaaaaaagggcggccgcccgggaatccggacc

SEQ ID NO: 261672 - DNA, 929 bp, Zea mays
aggacgcgtgggcggacgcgtgggcggacgcgtgggcggacgcgtgggttcgtgcttgtttgctctagggtttttgccacgccgccgccgctctgccccttccaccccaccgatataccaagatgacggcgcaggctgcggaggagctcgccgcccagatcgagcagcagaagctcgaggagcagaagaccgaggcagaagaggttgtggtggaggaggatgacgaggatgatgaggatgacgatgatgatgacaaggatgatgatgaactggatggacaagaaggggatgggagtggcaagtcgaagcaaagcaggagtgagaagaagagccgcaaggccatgctgaagcttggcatgaagcccatcactggtgtcagccgggtcactgtgaagaaaagcaagaatatgctttttgtcatctcgaagccagatgtgttcaagagcccaaactcggacacctatgtcatattcggcgaggccaagatcgaggacctcaactcccagctgcagacccaagctgcagagcagttcaaggctcctgacctgagccaaatgatcccgaagcctgagacatctggcctgggcctggaggacaacgaggaggaggaggttgacgaaactggtgtcgaggccaaggatgtcgagctggtgatgactcaggcatctgtttcgaggcccagggcggtcaaggccctcaaagcttctaatggagacatcgtcaccgccattatggagctgactacttagtgttatttttgtcaaccacccctttcttttaagcatgtatcgtatgccatgcagcttgagcggatatctgtggacaacatgcttgcttagataattttatcatgcttgctttttctgtcaaaaaaaaaaaaaaatcgtttcgtttttgctggcttgctgcatagcaacagtttatgtcct

SEQ ID NO: 261673 - DNA, 409 bp, Zea mays
cccccccgtcgctctgcccgcattcccttccacaacaccgagacgccaggatgacggcgcagactgcggaggagctcgccacccagatcgagcagcagaagctcgaggagcagaagaccgaggcagaggaggttgtggtggaggatgaggaggacgacgacgatgaggacgatgaggatgatgatgaacttgacggacaagaaggggatgccagcggcaagtcaaagcaaagcaggagtgagaagaagagccgcaaagccatgctgaagcttggcatgaagcccatcactggtgtcagccgtgtcactgtgaagaaaagcaagaatatactgtttgtcatctcgaagccagatgtgttcaagagcccgaactcagacacatacgtcatattcggcgaggccaagatcga

SEQ ID NO: 261674 - DNA, 682 bp, Zea mays
catttgtgataatagatgagtgggttgtgactaacatatgtcggtgattcacattgcatacgagaatctacttaggatcaaaggtactttttatcagctgatcatcgctttgactccaactcaaataacgcgtgacgccatgtgggagcaaagttgggaaaatggatattggtggtggtccataggtactgaagcaattgaaggacatagctctaatgagagcggggctgactgatgaaacattgcaagagcagattgtgcagagatacggtgcaaggaagaataaacagtttgagatatctgatggaatcaggaaaaaccttgctaccaagggcatctccctgatggttgaaccttctggttcagtttgtttaccatttgattttttttgtttctttttcctttttcttctttttttttttaaaattaattctatttttttatgtctatttcatttttttttttattcatttttctttatctttttttttttttagttttctcttataattcttttttttttttttatttttttttttttttatttttttcattttttttttattttttattcttttttattttatttttcttttttcttttactcttttttcttttctgtattatttctttttatttatatcttatcttttttattttattttttatttttattttttta

SEQ ID NO: 261675 - DNA, 2003 bp, Zea mays
ggcctaggaggcgcaggctccactttccggcaccatggcgattgtgggccagtcgccgccgttcgcaaccatagcggaggctgacggggcccccgcagctcgtatgatgaactcctttacaaagagggaggagccatgtcacccccgaggagaggggaaggtagggatgtacgtctgtggcgtgactccctacgactctagccacatggggcacgcgcgtgcctacgtagccttcgacgtgctgtacaggtaccttatattcttggtgtatgaagtgaaatctggccgtcatttcacggatgttgctgacaagattattaaacctgccaatgaacgcggtgaaacagtgacacgcttgcgtagccagtttatcaatgaatttcttcttgacatgactgagctccagtgcttgcctcctacctgcgagccacgggtgacagaacacattgagcatattataaagttgataacacagataatggacaatggcaaagcctatgctattgaaggagatgtttacttttcagttgaaagttttcctgaatatctcagtttatctggaagaaaatttgatcaaaatcaggcaggggcacgggttgcttttgatacacgaaagcgtaatcctgcagacttcgcactctggaaggctgcaaaggagggcgaacctttttgggatagcccttggggccgtggaagaccaggctggcatattgaatgcagcgcaatgagtgctcactatttaggacatgtattcgatattcatggtggggggaaagatttgatttttcctcatcatgagaatgagcttgcacaaagccgcgcagcttatcctgagagcgaggtcaagtgctggatgcacaatggctttgttaacaaggatgataaaaaaatggcaaaatcagataataactttttcacgattagagatatcactgctctttaccatccaatggctttaagatttttcttgatgcgcacacattatagatcagatgttaaccattctgatcaagcgcttgagattgcatctgatcgtgtctactacatttatcagactctatatgactgtgaggaagtgttagctacatatcgtgaagagggtacctctctcccagtgccgtctgaggagcaaaatctgattggtaagcaccattcagaattcttgaaacatatgtcgaatgatcttaaaaccacagatgttctggaccgttgcttcatggagctgctaaaggccataaacagcagtctgaatgatttgaagaaactgcagcaaaaaatagaacagcaaaagaagaaacagcaacagcagaagaagcagcaacagcagaagcagcagcaacagaagcaacagcaattgcaaaaacagccagaagattatattcaagctctgattgcactggaaacagaacttaaaaacaaattgtctatacttggtctgatgccatcttcatctttggcagaggtactgaagcaattgaaggacaaatcattaaagcgagcagggctgactgaagaacaattgcaagagcagattgagcagagaaatgtcgcaaggaagaataagcagtttgagatatctgatggaatcaggaaaaaccttgctaccaaaggcatcgccctgatggacgaaccttctggtacagtatggagaccatgcgaaccagagcggtctgaagagtcatgattagctcactgactcaacaagtgatggtggtgtaaaatgagatttttgcctgagggcagttatcgcattttgaagactaacaaaaatcgccatctctggatgtggtattctacagggtaggggttccaggttgactcaccagttaaaacatgcatttctggttgtataacaagcaatgaaccccgtatatatacttgacagtttgactcctttggaggtttgatttttagttttggataagacattgaaactctttgcttgtgttggtggttaaggctctgtttggttcctttagttactgaagtttagtcgcttaggc

SEQ ID NO: 261676 - DNA, 551 bp, Zea mays
  unsure (1)..(551): unsure at all n locations
cagaccgtctcggagcaagttatggtactccagaacattggaacatcagttctcgtctccccgaaccagcttccagatctccaccaactgctggttgaggctgcgaactcttgaacaccgaagctcctgacttgtacataaggcagaatcctgttccaaatgcctacaccttagcaatcaacggcaaaaaaccattcattgtcgttcacacaagccttgtggagctgcttactccaagggaattgcaggctgttttggctcatgagctgggtcacctcaagtgcgatcatggtgtttggctcacttttgccaatatactcacaatgggagcatacactgtccctggttttggcatggttgctggcttcctggaagagcagctatacagatggctacgagctgcagagctgacttgtgacagggcagctcttcttgtggtgcaagatccgaaggtagtcatctctgttctgatgaaattggccggaggatgcncatctcttgccgacaagctaaatgtggatgccttcctggagcaagctcgttcgtacgac

SEQ ID NO: 261677 - DNA, 580 bp, Zea mays
tgactgaagaaaaattgcaagagcagattgagcagagaaacgttgcatggaagaataaacagtttgagatatctgatggaattaggaaaaaccttgctaccaagggcatcgccctgatggatgaaccttctggtacagtgtggagaccatgcgaaccagagggatctgatgagtcatgattatacgccgcacccacgcaacagatgatgtattcttcactcaggggcaggggggtctgaagctgacccttttcaactgcatctactgcatggattatacatgggcgtcgtcgcagcgagcagcccgtcccgccgctcttgaacaccgaagcttctgacttggacataaggcagaatcctggtccaaatgcctacaccttagcaatcaacgacaaaaaaccattcattgtcgttcacacaagccttgtggagctgcttactccaagggaattgcaggctgttttggctcatgagctgggtcacctcaagtgcgatcatggtgtttggctcacttttgccaatatactcacaatgggagcatacactgtccctggcttcggcatggttgctggctttctgga

SEQ ID NO: 261678 - DNA, 706 bp, Zea mays
tgaaggcataaacagcagtttgaatgatttgaagaaactgcaacagaaaatagaacagcaaaagaagaaacagcaacagcagaagaagcagcaacagaagcaacagcaattgcaaaaacagccagaacattatattcaagctctgattgcactggaaatagaacttaaaaataaactgtctatacttggtctgaatgcatcttcatctttggcagaggtactgaagcaattgaaggacaaagcactaaagagagcggggctgactgaagaaaaattgcaagagcagattgagcagagaaacgttgcaaggaagaataaacagtttgagatatctgatggaatcaggaaaaaccttgctaccaagggcatcgccctgatggatgaaccttctggtacagtgtggagaccatgcgaaccagaggggccgcacccaactcaacaaatgatggtaaaatgagatttttgcctgagggcagctacacattttgaactaacaaaatcaccatctctggatgcagtattcttcactcaggggtagggggtccaggttgactcgccagtcgccagttgaaacttgcatttctggttgtgtaagaagcaatggaccccatatatatactttactccgtgcgaggtttgagttttggttttggatataagacttggcaattccatttcaatgaaacggcatgaaattttgcttggt

SEQ ID NO: 261679 - DNA, 1065 bp, Zea mays
catgaccatctccaaggaccgcgtcaagccgtcgcccacccccgactcgtggaagctcaacgagatcttcgccaccggcatcgtgctcggcacctacatggccatcatcaccgccgtcttcttctacctcgcccacgacaccgacttcttcacggacgtgttcggcgtgaattcgatcaaggagaacgacagggagctgatggcggcgctgtacctccaagtaagcatcatcagccaggcgctcatcttcgtgacgcggtcccggagctggtcgttcgtggagcggccgggcttcctcctgctcttcgccttcttcgccgcccagctggtggcgacgtgcatcgcggtgtacgccgactgggacttctgccgcatccaggggatcggctgggcgtggggcggcgccatctggatgttcagcatcgtcacctacatcccgctcgacgtgctcaagttcatgatccgcgccgcgctcagagacaaggccacgggcaacaacgtccacaacaagtgatacgtttctctgggtgcttgtcgcggacggcgtttaggaacaaggactgcggcaagggccggcgatcgcgaggcacagtgggcggtagagcagagacactccacgggcctcaaccagctcgccaccacctcctcctccgaccttctaggcagcaaggactagcatgcagtccgagctcaccgagcaggcccgcaaaggtcgcaagatatacgtagctacagtcttctccggcgactagcccaccatctctagcgccgctgatgcggctgatctcgctggtctccagagaccgacggcgtccagcggtggccggaggagtcctgtgttcttcgtttccttaggtgtacttatgtgggttttggggtggcaagagagttttttttttgtgaactctggtgtatcggatcaagtgaatatgtacctacatgttgtgttcttaattctgcattgtacagctatacactatacaagggtacgggaatgctgaggtgtaacttccatgcaatatacttagttctattcatctaatcatcaaactatcagcaactttt

SEQ ID NO: 261680 - DNA, 794 bp, Zea mays
gaagcattcagctgatgctcgggcattttcgttcatcaagattcttaacctcatgcaagacatgagctatcctccacaaatgttatttgtggaaaacgtattggatttgaggtgtctgatacacatgaccagttgctggaggtcctttcaagtctcaattttagcgcgcatgtatattcatcctaagccccttacagtttggtgtcccatattctagacctcgctacttctgtttggcgaaacgtgaacctgtgcggtttcgacatgcattcgtcaacaataagttgctccagacacctatgtgcctgagcctgacactgagcagtacatcacagggtagcgaccaccagactgaagaagagctagagccagtttgtaagccaataaaagatttccttgtcaaggaggctgatggaggcactccagatgagacagttttgcaggattatatggtcccagtaaacttgattgagcggtggggcaatgctatggatattgtataccctgaatttaagcggtgctgctgtttcactaaaagctactatcgttatgtgaaggggacaggctctttgttggctacatctaaaaacctcaatgttcctgaagagaagctccaaatttcttccctgaaggagttgggcctacgatttttcacccctcgtgaggttgccaatttccattccttcccttcaaatttctgcttcccggatcacataagccttaggcaacagtatgctatgctgggtaacagtctgagtatagcagttgtgggtcctttgctgcattatctcttt

SEQ ID NO: 261681 - DNA, 1349 bp, Zea mays
  unsure (1)..(1349): unsure at all n locations
ccgcaagggggtgctgcaccggggccgctttacaatagcagccccgttctttcccacgatgcctgaggaggtctgcaggaccaacatcaagaacgacttgaccatcccttccacgtcggccttggccaccacaatgccctcctccgagcgaaagcagatggaggccaggtttatcgcctatatgcaagaaactgctgaggagaggatgactgggtttgctgttcgtggtgaaaaatacagaaagcatggtgaacgtccgccacaaccaccattggagatagttaaatacccagctcttttggaaagagcttggggatgggattcgatactgccgtactgtcctgtgaattcttggcccctatacaagacttacctccaagaatattatgagcgcaattctcgtgaagtattggctcatcaagtggaagctaatgctgcctctggtcccaatctcaacggggctgatgagaatgatctggcaactctgttcaacttgtgtatcagtagggaggttcaacttttgaatctgctgaagcgccgtgatcaaaaacacaatgttgatgagatcagcctgaatgaaaagctcaccaactgtgcccgtcagataacttttgtggaatatgctggttttcctttccccagtgttgccttaaagtgcatcatggcggagtctgatctgttgtgcatgttgctgatgtgtgggactggaatgatatcccaagtcaacatttgctccaggattcgaaaggtggccttcagatttatgacctacaaaggacctggatgttttgctgctgctgccaccatgatggccaccacaaaggaggccaagttgatgagtggactgctgaggaacagatgtagggaaaataatggtccattctctaggagtgtctttatcaggaaatggacctttgcagctatgttcagaatatgtgaggaatgttctcctgtggaagagtctacagggggctacactgctactaaattgatacttgatggatctgatgacaataatccttgtgataaggacctgctgcagaggaacaagataaatcaaaaataccaaggactgttcaaaggaaaaacaactaaatgccgacaccctgtacaaaagcaagaaaccaggagatggagggctctttgaaggagaatgtagtagaacaagtcaacacgaagttaatggatcataagaagcgtagaaccaaggtaacattccgaagggaagtgtaatgcttgctcaaatttgttaactctnttttatgttcttctcatggaactcctcaccgacgccggttntatgctagctngaacactattcctccttagggttngatgaaacaacattg

SEQ ID NO: 261682 - DNA, 623 bp, Zea mays
  unsure (1)..(623): unsure at all n locations
ctgcacagccaattccccatcgcgataggcccgttcgcacgaatcactgctctgctttcaccccccgcatcgaacctcacccccgatctgatcgaatcgaaggctgcggcggcgatgggcggtgaccatggcggtgggcacgccggcggcgacttccgccagaaggtatggagcatgacgggcggcccctactgccgccccgtccactggcgccgtaacaccgccatcgccatgttcggcgtcttcctcatctgcatccccatcgctatgaagtccgcagagctcgagcaacgcccgcatcacccagtccggccaatcccatctcaactgtggtgcaaaaactttggtaagaaggaatactgaaggaccctccaactagcatgaagtgtgggcaccttgcttttgccttctttttgtggaaacctgtgcctagccataatgctgggttaagtgttaggagcatctctggaatgcttcgcgtagtatcttttgattcttctttccttttgtcgtctcaatcgtgttacatgagaaatgcctgatggactcaaataatgaaccggtgattcaaaagcctgtnnaaaaaaaaaaaaaaaaaaaaattccananataaaaaatataa

SEQ ID NO: 261683 - DNA, 499 bp, Zea mays
tgatacttgatggatctgatgacaagaatccttgtgataaggaactagttaataaggacaacctgctgcagaggaacaagataaatcaaaaataccaaggactgttcaaaggaaaaacaactaaatgccgacaccctgtacaaaagcaagaaccaggagatggagcaacgcccgcatcacccagtccggccaatcccatctcaactgtggtgcaaaaactttggtaagaaggaatactgaaggaccttccaaactagcatgaagtgcgggcaccttgcttttcttttgccttctttttgtgaaaacgtgtgcttagcgacaatgctggctaagtgttagaagcatctctggaatgcttcgtgtagtatcttttgactctcttttcttttgtcgtctcaatcatgttacatgagaaatgcctgatggactcaaataatgaaccggtgattcaaaaaccaaaagcctctgatgaatctatttgagggtttggatcttgatc

SEQ ID NO: 261684 - DNA, 513 bp, Zea mays
ctgcacagccaattccccatcgcgataggcccgttcgcacgaatcactgctctgctttcaccccccgcatcgaacctcacccccgatctgatcgaatcgaaggctgcggcggcgatgggcggtgaccatggcggtgggcacgccggcggcgacttccgccagaaggtatggagcatgacgggcggcccgtactgccgccccgtccactggcgccgtaacaccgccatcgccatgttcggcgtcttcctcatctgcatccccatcgctatgaagtccgcagagctcgaggtatgcatgtgtatccccatcacccagactctgaccctgcgacttctcgttggcgtacatggttttgaggatttgagctgatgcttgctctaccctagatattagatctgcggcgaacgtctcaatatttatggagttcttggtagtgagacttcttgtctttggaactaggaataacctatccattctgtataacacatagttcgaacgcggatgtgaaggaca

SEQ ID NO: 261685 - DNA, 838 bp, Zea mays
ttcacgcttccggtgaaaagcgccaccttcggagtcctatgtttgaaattaactcgctgctggggtcgccgcctgaaccatttggattccctcccctggaattcgaaaaacggcgactacccccctagagcagatccatctagactctagagtacatccgagggggaagcgagcagatcgatggcgatggctgagaaggtgaaggagaagatgctgatgctccgcagcagcgacaaccaggagttcgaggtgaaggagtcggtggcgatgcaatcgatgaccctcaagaaaatggtcgaggacggctgcgccgacaaaggcatcccgctccccaacgtcacctcccacatcctcgacaaggtcatcgagtattgcaacaagcacgccgagccgaccgggccgggcgacgcggccggcaccaccaacaggtccgccgaggatgagctcaacatcttcgacgcagacttcgtcaatgtagagcactccaccctcttggacctcatcctggctgcaaactacctggacatcaaggggctcctgaacctggcccgccaaaccattacagacttgatcaatgggaagatgcctgaggaggtctgcaagaccaacatcaagaacgacttgaccatcccttccacgtcggccttggccaccacaatgccctcctccgagcgaaagcagatggaggccaggtttatcgcctatatgcaagaaactgctgaggagaggatgactgggtttgctgttcgtggtgaaaaatacagaaagcatggtgaacgtccgccacaaccaccattggagatagttaaatacccagctcctttggaaagagcctggg

SEQ ID NO: 261686 - DNA, 337 bp, Zea mays
tgaagacagcatctatggtattgcatggagctcccatgatccatcattattcgcttctttgtcatatgatggaaggggggtcttggaatcagtcaagccctacttgcagagaaaatgaaccttgtctggttttctaaattgtaagctgagtagctttgccttgccattctgtagcctcttaacaagcatctatgtgatgattcggtttactgttgtagcaatggcagaaaaatggataacaagattgttacagaaatcaatttttaggatgttgtatatttgaagtgtccatgaaaaggtcttgctgtatatgatgaggtggggttgaactcaattt

SEQ ID NO: 261687 - DNA, 447 bp, Zea mays
cccacgcgtccgcggaagttcagttgtagccgttgagacttgggaggcaggcgacatgggtggcgggaaggacgacggccacgatccctcgaaggcggacaagggattccacggaggagggtacccggccgccgccggtggatactacggcggccagtaccccggcggcggctaccctgctccaccgggcggcggtgcgtaccctcccggccctgggtacccggtaccacctggtgggtacccgcctccgggtggctaccctcagcctggcggatacccgccgtcgcacggggcgtacccggcgccgggtgcaggcgcgtatcctcccagcgggtacccccatcaaccggtctacccacagcctggctatccatcgatgcccggtcatggtggcatgtacggaggaggccacggtgcaaggggctctgcaagccacggggcgatgct

SEQ ID NO: 261688 - DNA, 578 bp, Zea mays
ccctctcttccgtcagaacagttttagaaacaaagcactgggaacctcaagctcaagcagccccccgccccaaagcatgacacagcacacagactgcaccctcataacacggaacaaagataatgaactgcagaatcgcatgccatcatttcgctttcaaagacacttgctttgctgtttggaacaattctcgaagatgattcagtttcattctttcctgagtcccacattacatagattgccaggccgttgaaatattttggcataaaagatataagcgtatgccagtatcacacggtccattgcgcataatgcaattatcttggtgtggccagccccttaaatccaagttgtctgctgcagaattttgtcttgtataagtgtccaagcaaaccatttaaatgtgcctttgaactgcacccggtacttatgcattgttaaatttgtagtttggtgacactctacttgttttgcttctgtagttggtggagcgggcacagttctgggtgaatgaattggagcttatgaacgtctattttatggttggcaatgccacgatgtcttttgagaaaatcata

SEQ ID NO: 261689 - DNA, 641 bp, Zea mays
cccacgcgtccgcccacgcgtccgacgcgctcgtctctccaagcctcgaaccgcatctccggcggcctagtggaacgcgaagatggcgacggcgctcggcctcggtgcgcgctccggcctccgactcctctccgcaggcgccgtggccgcctcagcaacggcttctcgtgcattccattctactggcgcaaggaggatgggggcgcacgctcatgatgagccatactacgtccacgccaagcacatgtacaacctgcacaggatgaagcaccagcagcttaaggtgtgcctcgccgtgctggctgcggtgggcactggcattggagtccctgtgtatgctgttgttttccagcagaagaagactgcatctgcataatctgaaacgccgaggtggctcgacatgaaaacatgcctgcccgtgaaatttcttttcccatttcccacaacattttgagaggttcaggctggagcttcagttttgcagttttgcttggccatttctctctctatatatttttttctctcttgctgcaggtttactctgctcattggattttgacataggaatacccatgtctgttaataatacgatgtcttgaactgacagaacgcatatgctgttatcctttctaattttgatt

SEQ ID NO: 261690 - DNA, 643 bp, Zea mays
ctactgtctaagactatacttcaggctcttctatatcaagttttttaacagtggttctaccctatgcataccatatctgatgtatctttttattgaccttcactgtttatacagaaggtttaatagcatctgaatattctcaccgctgtgatatctctgatgcctgataacatctacatctttttattgctcgtgaatgacagctcaacacggtgctttatcatcctgcaggtttgagtatcatgcagctgctgaagttattaaggtggttgaatttgaggaagtcgatggaggcacgaaaaccaggatcacgaacagggagaaatcatgattcagatctcatggatgggtggtttcctgtaaactgtatagctctttcgttttacatggatgggtggttttttatcttcacatgtcacgtgtagtgtgtaccgcaacctcaatgtcagttctttttgttttgctctgtattattttactagaaaactgcatggcgctggcgtcccccattcgcatcgagcccatgactttgtcgatgccctgtaactggacaggatcaggcaactgtttgccctgctgaacccctggaacattgttaagcttgacattcgatatagttccaacaaggctagtctgtttggtg

SEQ ID NO: 261691 - DNA, 827 bp, Zea mays
gaagaccagaaccaagcaacccagcaagtttggagggactccatttttcttcttacgttcaccccgagtgggcgaccgccgccgccgccccacgcaaggtgcacagatcttcgtcgggcccctggccggcgacgaacgcccagcagattatcgggtatacatgcgcacaaccatgtcctttaccgggtccgcccctgccaatgatccctgcctcgccaagatcctgtccaagcaaggggacaacaaagttctctttgcggacaaggtattaaagttcacccaatctggaaagatgaaaagacgcatcctagtgatcacagactttgctctataccttgttgaccccgaggccaacatattgaagaggaggatagcacttgcagctgtggataagctatgcattagcaacctcagtgataacttctttgcgatcattgtgccgactgagtacgattgtttaatggccagcactagaaagaaggaaattgttgatgtcattgttaaggctatcaagagcacatctgagtatgaacctgaggtggcttcctctaacaggtttgagtatcatgcagctgctgaagttattaaggtggttgaatttgaggaagtcgatggaggcacgaaaaccaggatcacgaacagggagaaatcatgattcagatctcatggatggttggtttcctgtaaactgtatagctctttcgtttttcatggatgggtggctttttatcttcacatgtcacgtgtagtgtgtaccgcaacctcaatgtcagttccttttgttttgctctgcattattttactagaaaactgcatggcgctggcgt

SEQ ID NO: 261692 - DNA, 759 bp, Zea mays
agcgattgcaattggaagaacatttgctgccctcaaggattaccagatagatgggaacaaagaaatggtggctctagggaccatgaacattgttggttcactgacttcttgctacgtagccacaggttctttctcgcggtcagcggttaattacatggctggctgcaaaacagcggtgtcaaacgttgtcatgtccactgtcgtgatgcttactttactgctgatcaccccactgttcaagtacactccaaatgccatcctctcctcaatcataatatcagcagtgcttggtttgattgactatgagtcagcttaccttatctggaaagtcgacaaactggacttcctagcatgcatgggagcattttttggagtcatattttcatcggtggagtatggcttgctcattgcggttgcaatatctcttgctaaaattcttctccaagtaacacggccaagaacagttttacttggaaaccttccacgaacaactatatacaggaatgtagaacagtatcctgatgctaccaaggttccaggggtgctgattgttagagtgggctcagctatatacttcgcaagctctaactatgttaaagagagaatcctgaggtggctaagagatgaggaggagcaacaacaggaccagaagttaacaaaaactgagtttctaatcggtgacctgtctcctgtaattgatatcgacacaagtggaatccatgctttggacgagttggcgaaagctctcgaaagcgcaat

SEQ ID NO: 261693 - DNA, 1264 bp, Zea mays
tcgacctacgcgtcctgctaaatagggcaaaggaaattgttgcagaactggtggagaggttcaaggtaaagcctgggattccacgcaaggatgatggttcaatagcttttgaaaatgacttcttcaaacgtcaagcttttttgacagtgtctggacagcttcaggttgagacatatgcatgtgctcttagtagcgtttatacctttggaccaacattccgggcagagaactcacatacgtcacgacatttggcagagttttggatggttgaaccggaaatcgcatttgcaaacttgcaggatgacatgaactgtgcagaaaaatatgtacagtacctttgcaagtggctgcttgaccattgccaggaagatatggagtttatggtgaaaaattatgataagagtgcaattgaacgcctggagcttgtttcgtcaactccttttgtgcggatttcatacacaaaggctgtggagctcttgaaaaatgttaccgacaagaagtttgacaacaaagttgaatggggaattgatttagcctctgagcatgaaaggtatttaacagaggatatatttaagaagccagttattgtctataactatccgaaaggaataaaggcattttatatgagactcaatgatgatgacaagacggtggctgcaatggatgttcttgtgcctaaggttggtgaattgattggtggaagccaaagggaggaacggttagatgttctgaaacagaggatacttgatgctggccggcctttggaaccctatgaatggtacttggacctccgtcgctttggatctgtaaagcacagtggttttgggttgggttttgaaaggatgattctatttgcaaccggaatggagaacatcagagatgttatacccttcccaaggtacccaggaagggctgatctgtgatctttggagacattggttaaacagatgcgagttgaattcaacacgcgactagtgattttgatatgttttcaccgttaagtttctacttcctaatttgcacattttaattataaattgtggaactggtacggttgtcaaaaatcatgtaattttctggttgtattttattatatttgtatctctgatcaaacttctgtctttgctagttgtgctcaacaggcaatgtttttttctaaatgaaaaaaacaggtcaaaactgaattgtttaattaattgacatttcagtgtaagggatgcgagttctcgctatttaggataaagttaatattttttactgcctc

SEQ ID NO: 261694 - DNA, 748 bp, Zea mays
cccacgcgtccgcccacgcgtccgcccacgcgtccgcccacgcgtccgttgactgcgaggatggaaaaattagttagcctgaatgcccaagaagtaggagggcagccaacaacttgtggcgttgcaggaccgagtattcataatgacaaagacaatggtccaggtttaggcaaacgctcacagccttatggagcgaaacgcaacagcacgaacctctcagtgggaggagtcacatggtcttgatggttcggaaccaccatcaccaccgagaccgcgcttgcctagcccaaggagactaccaccttctcctttgccaccgcctggaaacaaaaacactaagcggagaaagacaaggaggtggagcttgttcgaagaagaaaccttaagaaagggtgttgaagagtatggggttggcaattggagggatattctagataacaatgctgaggctttgaccggcaggacaccggtggacttgaaggacaagtggaggaacatgctttttcgttgatgtaacggggaaacatgtagctggacatgctttactagggtaaagtacatagcatgtagtcgtcgtacatcacagcactcttggtcaagacttttttggcagctgctgcaacatgattttgtgtcccggtgttgtagcaaccccagcccaaacggttggcttttctggcagttgcacagcagcagactcttggtcaagcttttttggcagctgcaacatgattttgtgttttggtgt

SEQ ID NO: 261695 - DNA, 288 bp, Zea mays
gagaaagacaaggaggtggagcttgttcgaagaagaaaccttaagaaagggtgttgaagagtatgttaccttgtcttgatgttcagttgttatcgtttgacatgtcagttattattattattgctgttgctgtatgttcctgttctgtttgtttcacgtgtaggtatggtgttggcaattggagggatattctagataacaatgctgaggctttggccggcaggacaccggtggacttgaacgacaagttgaggaacatgcttttcctttgaggtaacctgtgaaaca

SEQ ID NO: 261696 - DNA, 1115 bp, Zea mays
gctggaacttattcagagatacttcagtggaacatcatagttacacagtggctcatgattcatttcttgcacaacttggatctatgttatggggctctatgaggcatgtaattgctccttctgcctctcatagagggtaccattactatgagaagttatcgtttcagttgtattttgtgacacgagagaaagtcaggagtataaagcagttacctgttaatgtaaaatccatcagggagagcctgaattctgtgctattacatcatcaaaactccatgtttagccaaaacatgctgtcattgtcagaggatccatcattgatgatggcattttcaatggcacgtcgtgcagctgcggtgccgcttctattagtcaatggcacctataagtcaactgttagcacataccttgattctgctattctgcaacatcagctacagaagctaaatgagcacaattcactgaaaggaaggcattcaaatcacaggtcaacattagaggtcccaatattctggttcatacataatgaacccatattattggacaaacattatcaagccaaggctctctcaaatatggtcgtagtacttcagtcagatgatgattcctgggaaagccatttgcagtgcaatggaagacccatcttatgggatttgaggaaaccggttaaagctgctattgctgcaactgctgagtatgtatctggtctacttcctccacatctggtttatagccatgctcatgaaactgcaattgaggactggacctggtctgtgggttgtaatccctcagctgtgacttctgaaggttcacaactttcagagttccagcaagatgtgattgctcgtaactatattattacttcagtggaggaatccattcaagtaatcaattcagcaattcagcaattggtaatagagcggactactgaaaaaggcttcaaaattttcaaggctcacgaaagtaagatggttgagaagtacaatgccgttgttagcttgtggagaagagtatcggctatgtccaaggcatggcgatatggtgatgcagcaaaacttatgtcaatgcttgaggatgcttcaaatgggttttctagtgctgtgaacttcaccatt

SEQ ID NO: 261697 - DNA, 432 bp, Zea mays
cttgtgggaaaataacatatattcactgcatttctggaaggggccggagtacaacaatcgtcttgtgctatctggtcaaatacaagaatatgacacctgcagcagctttcgagcatgtacggtctaaaagggctcgagtgctgttgacacattcgcaatggaaggctgttcaagaattcagcaagaagaacacggaccgtcctgctctcacgagcggtcccgcaacagcatctccagcacgggacgcggcaccggtaacagtagcggatctgaacggcaataatgctccagagtttcttgcggaggatgccagcttgtctagacgcaacaccacaccgtcgaggccaacgattaagatgctgtcatgcttgtttccttctcgcgtctgatgaatggtcgctggacgtcgggtgtccgaggcgcatgcgtggt

SEQ ID NO: 261698 - DNA, 668 bp, Zea mays
cccacgcgtccgattacatgtggggcaactcctgcaatggaaatactgagttggtgtggggctgatccaggaaatgcatttcttgtgccatcaccttactacccgggttgggatagggacataaaatggcgaactggtgttgagttgatacctgttccttgtcgtagtactgataactttaatgtcagtgtcactgctcttgaaatagcttacaaacaggcaaaaaagcgaggaataagagttcgtggggttctcatatctaacccttccaacccaacgggaggcattgtgccaaaagaaatactgcatgaccttctacagtttgctgcagagaagaacatacacttaatttctgatgaaatatttgctggttcaacatatggaagtgacaagtttgttagcgtggcagatgttgtggatgaactagaggactttgataaaggcagagttcatatcatatatgggctctcaaaagacctatctcttgccgggtttcgagttggagtgatatattcctacaatgaacacattgtatcggctgctgctaaaattgctcgattttcatctgtctcaagtccaacacaacgtttgcttgtttccatgctttcagatcaaaagtttatttcagaatacataaaggttaacagagagaggctccagaaaatgta

SEQ ID NO: 261699 - DNA, 1800 bp, Zea mays
cggacgcgtgttcggacgcgtgggcggacgcgtgggcgcagctggtggagctatttgatgacagcaaggatatagatgaggttttgagcttgtcaccagaaaagatgctacttcggtggatgaaccatcatctgaaaaaagctggctacaagaaaactgttaacaatttctcttcagatgtcaaggatggtgaagcctatgcttaccttttgaaagctcttgctccagagcattcccctgaaactacattggacaccaaggatccgaacgaaagggcaaaactagtacttgaacaagcagagaagttggactgtaagagatacttgaccccaaaggatatcactgagggatctgccaatctaaatcttgcatttgttgcacaaatattccagcacaggaatggtctgaccagtgacaccaaacaagttaccctcacacagacagcaacacatgatgatgttctattatctagagaagaaagagcctttcgaatgtggatcaacagccttggggttgaatcatatgtgaacaatgtcttcgaagatgttcgcaacggatgggtacttcttgaagtgcttgacaaggtgtctcatggatctgtcaattggaagctggcatcaaaacctccaattaaattgccatttagaaaactggagaattgcaatcaagttgtaaaaattgggaagcagttaaagttttctttagtaaatctagctggaaacgatattgttcagggaaacaagaaattgattgttgcacttctgtggcaattgatgagattcaatatcctccagctgttaaacaaactgagattccactcccaagggtccgaaggaaaagaaatttctgatgccgatattctaaactgggccaactgcaaagtgaaggcatccggaagaacatctcgtatggaaagtttcaaggacaagagcttatcgaatggaatgttcttccttgatcttcttagcacagtacagccaagggttgtgaactggaaagttgttactaaaggggaaactgatgaggacaagaagctgaatgctacctacatcattagtgttgcaaggaagattggatgctctgtgtttctgttgccagaggacatcattgaggtgaatcagaagatgatcctaacacttactgctagcattatgtattggagcctacagaaacagccccagtcacagtctgaattgacagaacaatcagaaccatctagcatgacttctgacgcagcctctgaagttgcctcggaggatggtgcttcaacgacagcaccgtccgagtcagaagaggtgaactcgctgtctgatagcatatcgaatttgacaacggatgatgctacttcaaacgccccatctgctgaaaacggaaatggtgtggcagggtcctgatggttatgattatgcagaccctgttctttttttccccatacagtgctgttacaggaaatagtgctttcatgatgcccaaagttgtcgctaccagaagcgatatttttaatacttctgcttcctgagcatggtagcttgatagatacaacagtcacagatagatatagatgccttttgttcattggatccgcttatactatagtgggggaagataatagtatgtgtcgctggctgggtattttctgtatttctggcatacacccatgcaaaatttactacctcctctgtatcttatcggtcaattcgttcatatgtttattggactagtcaaagcttgtaatgctgttgctgctctgaaccgtgcctgtacataacatatgcttaaaaaggttttgcattgtccttt

SEQ ID NO: 261700 - DNA, 439 bp, Zea mays
aaatggtgtgccagggtcctgatggttatagtgatacagaaccagttctttttcccacacacagtgctgtattttttaatcagggagcagtgcttttcatggtgctcaaagtcgtcgctaccaaaagtggtttgtttaaaacatctgcttcatgagtatggtagcttgatagatacagcaagttccgatagctatatatgccctttgttcatggaatctgcttagactatagggggcggggcgggaaagatagtatatgtcgctggccgggtagtttctgtatttgtggcacacgcacccatgcaaggttttacctctttatgtatcttgtcggtcaattcgttcatatgtttattggactggtcatcgcttgtaatgctggtgctgctctgaaccgtgcctgtacataacatacactcaaaagtgtttttgccttgtc

SEQ ID NO: 261701 - DNA, 1333 bp, Zea mays
tttgcgtctgtggtgccgtggggcggccggaggagcaagcagcctaaaaaaaccgtatcgtctcgcctgttcagtttccttctcctcttcccgcagcccggtttgccgaccaggttccaccgttccagagtagccaagcgaatcccgtgtctggttcgcgcgatggcggaggagcagtccaacccccagcaccagcaagcggaggagagggaggttatggtggagcagcagcagccgaggagggccccgaagctgaggtacctggacttcgtccaggtggcggctgcccaggccgcggtgtgcctcgctgggctctacggcctcgccaaggaccacgccggcccgctccgccccagcgttgacgccgtcgagtctgccgtcaagggcgtcgttagccccgtctacgaccgcttcggcggcctgccgctcgacgtcctcgccttcgtcgaccgcaaggtggacgacacggtgcacgaggtggacaagcacctcccgggcgcgctgaaggcggcgtcggcgcatgtctacgcggtggttcggggcgtgccggaggtggcgcgcgagctggcggccgaggcgcagcggtcgggcgtgaggggcgcagcccgtgcggcgctcgcgatgacggagccggtggcgcgggacgtgtacggccgcgtggagcccgtggccaaggacctctacgtgcggtacgagcccgcggcggagcacctggccgtctccgcctggcgctcgctgaacggcctgccggtgttcccgcacgtcgcggagatcgtcgtgcccaccgccgcgcactgggccgacaagtacaacagggcggtcgcagccgccgcggagcacggctacgcgggggccaagtacctccccgccatccccaccgaacgcatcgccaaggtgttttcgtcggcgccagaggccgagccgctggcagagggccagtagtgtgtgtgtgtgtgcgcgcgcgcgcgagctcgtctttgccggtggtgactctggatttggatcaccttccgaactgaactgaaaataaggaagcgtgaatccgggggccagttaaagatggtggtatggtatggtagcggcgttgtactagatgcgtgatgggacgatggttacggaccatgatgatgacgctgtgttccatttagctctctgctgcgtgcttttgtataaaagaagtggttcgatgtcgcaaacccttagtttatctgacgatgcggtttttggctgttttagtttttgtttggtcaggttcaggttagggcgaaaacgataaccttgcgtcattgggcagcttttagagtcttttttttgtttcctggtagaaatctgt

SEQ ID NO: 261702 - DNA, 533 bp, Zea mays
ctcacgcgtccgcccacgcgtccgctcacgcgtccgcggacgcgtgggaaatccgtatcgtctcgcctgttcagtttccttctcttcccgcagcccggtttgccgaccaggttccaccgttccagagtagccaagcgaatcccgtgtcgggttcgcgcgatggcggaggaccagtccaacccccagcaccagcaaccggaggagagggaggttatggtggagcagcagcagccgaggagggccccgaagctgaggtacctggacttcgtccaggtggcggctgcccaggccgcggtgtgcctcgctgggctctacggcctcgccaagggccacgccggcccgctccgccccagcgttgacgccgtcgagtctgccgtcaagggcgtcgttagccccgtctacgaccgcttctgcggcctgccgctcgacgtcctcgccttcgtcgaccgcaaggtgagttgcgtcacgcgccctatggaccgatctcccccttctcctgctctttggtggccgggtagcgtctcgtggtaaca

SEQ ID NO: 261703 - DNA, 1415 bp, Zea mays
gcagatacaagtgtgaatcgaaaaaggtgcacctgaaacaggttgatattattggactgggttctggtgcggaggtggatcagaaacttaagtatgctaatgatctttcgtcgggtgtgatattcggaagagagcttgtgaactctcctgcaaatgtccttacccctgctgtgcttgcggaggaggcgtcaaagatcgcttctacttacagtgatgtgttcactgccacagtactagatgtagagaaatgcaaagaactaaagatgggttcctacttgggagttgctgcagcttctgctaaccctcctcacttcatccatttgtgctacaaacccactgatgggaacgtcaagagaaagctggctattgttgggaagggtttaacttttgacagtggtggctacaacattaagaccgggccaggctgcagcatcgagctgatgaaatttgacatgggaggctctgcagctgtatttggtgcagctaaagctttgggacaaatcaagcctcctggagtagaggttcactttatagtcgctgcctgtgaaaatatgatcagtggcacaggcatgaggcctggtgacattgtaactgcttccaatgggaagacaattgaggtaaataacactgacgcagaaggaaggctaacacttgctgatgctttggtctatgcttgcaaccaaggtgttgaaaagattattgatttggcaacgctgaccggcgcttgcgttgtcgcactcgggcctagcattgccgggattttcacgccgagcgacgagcttgccaaggaggttgccgctgcttccgaggtatccggcgagaagttctggagactcccgctggaagagagctactgggagtctatgaagtctggcgtggctgatatggtcaacactggcggcaggcagggaggttctattaccgccgcgctgttcctgaaacagttcgtcgacgacaaggtccagtggatgcacatcgacatggccgggccagtgtggagcgacaagaagcgggccgccaccgggttcggcgtttccaccctggtggagtgggttctcaacaactcgtcctcgtcgtgaacaaaacccataccccccctcgtatcacaatgcctttccatgcgtttttttttcctcctcttttgtgctaccattccatagttgcaaactgcagagcgcctcttggcatgccaagtgtgcgtgtggtaccgttgcgatagaataatcagcatgggtagtggtgtcgggtccctgaaagaaagcagcggcgtgctggtcgcggtcaagccatgcctgtcgccttccggctgccgctgtgggcatttgtaacgcgtctctgcccagtgaaataacgtttgtcccccgtgtttgtgcccccgcccaaaagaaagctgcatcggaactgatcttcccgtg

SEQ ID NO: 261704 - DNA, 540 bp, Zea mays
gccgctgcttccgaggtatccggcgagaagttctggagactgccgctgttcctgaaacagttcgtcgacgacaaggtccagtggatgcacatcgacatggccgggccagtgtggagcgacaagaagcgggccgccaccgggttcggcgtttccaccctggtggagtgggttctcaacaactcgtcctcgtcgtgaacaaaacccataccccccctcgtatcacaatgcctttccatgcgttttttttttcctcctcttttgtgcgaccattccatagttgcaaactgcagagcgcctcttggcatgccaagtgtgcgtgtggtaccgtttcgatagaataatcagcatgggtagtggtgtcgggtcctttccctcaaactgaaaaaaagcagcggcgtgcctgtcgccttccggctgccgctgtggtcatgttgtgtaacgcgtctctgccgagtaaaataacgtttgttccttgtgtttgtgccccgcccaagccccaaagaaaaatttacaaaaaaaaaaaaaaaaaaaaaaaaagga

SEQ ID NO: 261705 - DNA, 463 bp, Zea mays
accttcccaaatctcagttgtcgcctgtcgtcgtcttcgtctagcccggcccgttccaaaacctccgtagccgccgccgccaccccggcgaccgaagatgatctccccggacgcagcccgcaacgtagtcggcatcatcggcaatgtcatctccttcggcctcttcctgtccccagtgctgacgttctggcggatctacaaggccaaggacgtggaggagttcaagccggacccttacctggcgacgctgctcaactgcatgctctgggtgttctatggcatccccgtcgtccaccccaacagcattctcgtcgtcaccatcaacggcatcggcctcgtcatccaggccgtctacctcactatcttcttcctctattccgacagccagaagcgcaagaaggcgttcgcgatcctggccgtggagattctgttcatggtcgccgtggtgctcggtgtgatcctc

SEQ ID NO: 261706 - DNA, 686 bp, Zea mays
  unsure (1)..(686): unsure at all n locations
cggactcgtggggtcaaattgagagtaaaaaataaagagttttgtacatggtctaagatcttcatccgctagggaatttttggagatggtctaagatcttcatccgccagggaattgcccgctaattggagtctctcccgtagtcccgtgtttgagttgttctcctctcatctccatcttcgcaacgaccacgaattccacggccaaccaatctctggtctatcgctctcttctccttgtctttaaatctgagactttttttgttcgcgtcctccgccctcaaccgtagccacctcgctgcccctgccgccgacacccctgctcgccgttgctgcagccgcacaggcgatggatcatgaagaagtgaccgaattcctgggccaggtgcccctcctgcagtgcctcccgggttcctctatccgcagaatcgcggaggccgtccaggtcaagaactacgaacctggtgactatgtcgctcgcgaaggtgaacctgtcaatggcctttacatcatagtggatggccaggctgaagtttctgcacctgcgaatgcagaagaagcaaatcgcccagactatgtgttaaataagtacgactactttggttatggaactaatagttctgttcatcaagtcaatgttgttgcactatcaaagctgacctgcttcatatngcccaatcaatatgg

SEQ ID NO: 261707 - DNA, 604 bp, Zea mays
cggacgcgtgggtgttggagagattttttttacccgagaagctgcgccgcgcgccaatctgatcatctccatgcgctgaagatcgttggtgcccgccatgcttcccgatgattgctgccacatcgtcgctgaggaaatttcaagccccatagctgcacatatactcgacttctactacggcgacgacggcctgggcgatgacctctttgccgcggtgactgccacctctggcccattccctgccactgacgatgatgtttcttcgtctaccgctaccacccctcctatctgcggctacagtgaagacaccgcagctgctggtggagccacagcctacaccccgttgacatccttcgacaccactctcacagccctcctggaggaagagcagcaccatggccttgacgccgggttcctcccgcagatcgatggcctatcagaggtagcagcatactatccaactgccaccgatgaggccagcatagggcagttcgaccagatgggacttccagagaccttagacgagcaggtgcctcctccagtgcagatgagcagcagtgcatatgccttgatgccgatcgctacagactatgatgagtgcttc

SEQ ID NO: 261708 - DNA, 812 bp, Zea mays
ctcgcggatcgacgcaagcctctacagtcgcgcgggcggagacgaagagagcggaagcgaagagcagcggcgcaaaggaaagggagccatgctcgcctcgccggcgctcgccggcgcccactccttcgcggcgtccgtgtatggaaacatcctcgtcccctcgcctcccgtccccgcgccggcacgtcgcgcggcgctgtccgtcgtcgccaaggtcaaggtggccacgccccaggacgaccgcatcgcccgccacgtccgcctccgcaagaaggtaagtggcaccactgagaggccgaggttgagtgttttccgctcaaacaaacatctgtacgctcaagtcatcgacgacacaaagcaatgtactctggcttcagcttcaaccatgcacaaatctctctccaaggaatttgaatactcggctgggccaacgatcgaaatagcacaaaagatcggtgaggtgattgccaagtcttgcttggagaaagggatcaccaaggttgtcttcgaccgaggtggtttcctctaccatggccgcataaaggctctcgctgattctgccagagagcacgggcttgaattctgagtcgtccaggcgtttgttcatatctccaggatcacctgtaatcttcttctttttttgttctctccatatgccgaacagagctgttttgtagtcactcgccttgttctacagggtgcaaagccatggcccatgcccactcgttgaccatgtcacgtttttttcgtgcgctaggtgtcttgtgttctgacgcttctcgaattgatattataagctgatcgtggttgtt

SEQ ID NO: 261709 - DNA, 1388 bp, Zea mays
tggactcgtgggcccacgcgtccggcacaccccccattcgaacgccggagctcgacaaggacgaccgacgacgcacgcggagatccggcgtactgcaaattttgaaaactgaactgtaagatggcatcagcagagctttcccgtgaggaaaatgtgtacatggcgaactcgccgagcaggcggagaggtacgaggagatggttgagttcatggagaaggtagccaagactgttgactcggaggagctcactgtggaggagcgaaacctcctgtctgttgcatacaagaacgtcattggagcccgccgcgcctcatggcgcatcatctcctccatcgagcagaaggaggagggccgaggcaatgaggaccgagtaacactcatcaaggattatcgtggcaagattgagactgagctgaccaagatctgtgatggcatcctcaagctgcttgagacccatcttgtgccgtcttccactgcccccgagtccaaggtcttctatctcaagatgaagggtgattactacagataccttgctgagttcaagactggagctgagagaaaggacgctgctgagaacacgatggtggcatacaaggctgcccaggacattgctctggctgagcttgctccaactcaccctattaggcttggactggcacttaacttctcagtgttctactatgagattctgaactcacctgatcgcgcctgcagtcttgcaaagcaggcttttgacgaggccatctcggaactggacaccctgagcgaggagtcctacaaggacagcactttgatcatgcagctccttcgtgataacttgaccctatggacttctgacatctcggaggaccctgctgaagagattagggaggcgcccaagcgcgactcgagtgaggggcagtaaagccggctttatgtgcctagaaactagtagctagtgtttgctgctgtcgaatgacactatgcaatgtgatctggaacctggtttcttgggtgcgacgcttgtagccgtgttatgactgtcgtccgtaaaatttgggggctccccgtatgagatgctgcctggcaaggcctcggtgtcccacctcgtttgtggcggggggcgctggagcccggtctggttgggttgggaagccctttaaactgttgtcacttgcattttaccttttccatcgctgtttattgtgagtggtcctatatctatggctcgtctcagtggtctagtatatgttttcttggttctctcttgattcctcacagggtgagtgggaccgttcgcatttgtctgtcccatcccatctcaacggtgaatgtgttttgtttggtgtctcgttctgaggtgactttgccgcatctcgatttcatcttcaataagatagctctttat

SEQ ID NO: 261710 - DNA, 529 bp, Zea mays
cacgaggccggcgatcctagtctcgtgacgaagctgcattacagggaaggcctaagcttgtgttaactagacctaaggaacctgagttccagacttcccaaagaatccgagcagtaaaagtaaagagctctgcagagatagaggaggaaatgttggcaaagatacccaagttcagggcacggccattcaacaaaaaaattgctgaagccccttcgttccctccacttccaaggaaacccccacagatttctgaattcagtgaatttcatcttaaaacaatggagagagcaagtcgatatgcggacacctggtcggaagtatcttgtgcagatactatccggagtcgaaataagccactgaaatcgacacaacgaaagccaccgctacttcatactgcaaatagagcctggccaccaagtgtgaaaagttctcaggaacttgaactggaggagctggagaaggcccccaagttcagggccaagcctctatacaaaaagattcttgagagtaagggagatcattgagaggt

SEQ ID NO: 261711 - DNA, 463 bp, Zea mays
gaatttccgggtcgacccacgcgtgcgcccacgcgtccgcccacgcgtgcggcacgacgcacgcagagccgcagagatccgtcacactgcaagttttgaaaactgaactgtaagatggcatcagcagagctttcccgtgaggaaaatgtgtacatggcgaagctcgccgagcaggcagagaggtacgaggaaatggttgagttcatggagaaggtagcgaaaactgttgactcggaggagctcactgtggaggagcgcaacctcctgtctgttgcatacaagaacgtcattggagcccgccgtgcctcatggcgcatcatctcctccatcgagcagaaggaggagggtcgaggcaatgaggaccgtgtaacactcatcaaggactaccgtggcaagattgaaactgagctcaccaagatctgtgatggcatcctcaagcttctcgaatctcaccttgtgccgt

SEQ ID NO: 261712 - DNA, 605 bp, Zea mays
gcgctcactcgtccaatatatatcccccaaccgactataactgctctcttcatatgaactgccccgcatgcgtcaagtgcatcaccggactgatcactccaaacatcaactatacgtggacagcactttgatcatgcagctccttcgtgataacttgaccctatgcccccctcgcgtcccggaggaccctgctgaagagattagggaggcacccaagcgcgactcgagtgaggggcagtaaagccggctttatgtgcctagaaactagtagctagtgtttgctgctgtcgaatgacactatgcaatgtgatctggaacctggtttcttgggtgcgacgcttgttatgactgtcgtcagtaaaatttgggggctccccgtatgagatgctgccgggcaaggcctcggtgtcccacctcgtttgtggcggggggcgctggagcccggtctggttgggttgggaagccctttaaaaaaaaaaaaaaaaaaaaaaaaaaaaaaaaaaaaaaaaaaaaaaaaaaaaaaaaaaaaaaaaaaaaaaaaaaaaaaaaaaaaaaaaaaaaaaaaaaaaaaaaaaaaaaaaaaaaataaaaaaaaagggggggcc

SEQ ID NO: 261713 - DNA, 438 bp, Zea mays
  unsure (1)..(438): unsure at all n locations
gacatctcggaggaccctgcggaagagatcagggaggcgcccaagcacgactcgagcgaggggcagtaaagccggctttacgtgcctagaagctagtacctagtgtttgctgctgtctaatgacactatgcaatgtgatctggcccctggtttcttgggtgcgacgcttgtagcagccgtcttatgattatttgtcgggaaaatttgggggctccccatatgagatgctgccgggcaagacctcgccatcccccacctcgtttcaggcgggggacgctggagcctggtccggttgggttgggaagccccttaagctgttgccgcccgcatttttaccttttcaccgccgttcagtggtcctaaatctatggctggtctcagtggtcttttaaaaaaaaaaaccaaaaaaaaaaaaaaaaaaaaaaaaaaaaaaaanaa

SEQ ID NO: 261714 - DNA, 365 bp, Zea mays
aataccacgcgtccgcccacgcgtccgcccacgggtccgtttacgcgtccgaacgccggtgctcgacaaggacgaccgacgacgcacgcggagatccggcgtactgcaaattttgaaaactgaactgtaagatggcatcagcagagctttcccgtgaggaaaatgtgtccatgccgaacctcgctgagcaggcggagaggtacgaggagatggttgagtttatttagaatgttgccgatactgttgactggcatgtgcttactcgtgggcgatacatccttaaagcctgtgaggtatatttgcaaggtaatgttcttgggactctcactggcgacgcattgcccatcaacagaagcaccggagca

SEQ ID NO: 261715 - DNA, 666 bp, Zea mays
cccacgcgtccgcccacgcgtccgcccacgcgtccgcccacgcgtccgctcaaactaacgccgggaatacacctaagagctactctttgaatatgttcaaagatttcgttcctatgtgtgttttctccgaatctaaccaagggaaactttcatgtgaaggaaaagtcgagcataaatttgacatggaacctcacagcgataatttggcgaactatggaaagttatgccgtgaaagaacacaaaagtacatggttaaatctagacaagtgcaggtacttgacaatgaccatggaatgagcatgaggccaatgcctggcattgttggtctcatatcttctagttcaaaggaaaagaagaagcaagcaccagtgaaaccatctgatgccaaaagaactcgtagggatcgcacggagatggaaaacgttatattcaagctttttgaaaggcagcccaattgggccctaaaggcactcgtgcaagaaactgaccagccagagcaattcctgaaggagatattgaacgatctgtgtgtgtataataaacgaggtccaaaccagggaacgcatgagctcaagcctgagtacaagatatccacaggggacactgatactgcttgaagatgagagacgacgtggtatgatcgatagttctctgttggtcaactca

SEQ ID NO: 261716 - DNA, 635 bp, Zea mays
cccacgcgtccggtcagtctcccctgacctgccccctccgaaccgtcctgcactggatccctctcccttatgccggaatatttgtaattttgtaagcgaagctcctgccttagttgcctcctccgtcttcgctccctccgcagcgtcagatcggccgtcgctcgccgagccctagcgccgccgatcgtcagcccgtaccagtcttgcagatcggggtcgcgccgcggcggcaagaacgatggccgaggaggccaagtacctggagacggcgcgggccgaccgctccgtgtggctcatgaagtgccccccggtcgtctcccgcgcctggcaggccgcctccgcctccgcctcttcctccgacgccgctaacgccaaccccgttgtcgccaaggtcgtcctttccctcgacctgctccgcccagaagaacgccccgaagagcgcccggaagagcccacgctccagttcaagatggagttggcacaaactaacactgggaatacacctaagagctactctttgaatatgttcaaagatttcgtgcctatgtgtgttttctccgaatctaaccaagggaaactttcatgcgaaggaaaagtcgagcataaatttgacatggaacctcacagtgataatt

SEQ ID NO: 261717 - DNA, 586 bp, Zea mays
ctttttccccattcacattcggccattctccaccgtccaaccaaccaccggcggcggcacaagggaagcgaagaggaatcaacgcgatgtctgcgaccacggcggcggtgcccttctggcgggcggccgggatgacctacatcggctactccaacatctgcgctgcgctggtacggaactgcctcaaggagcccttcaagtccgaggccgcgtcccgcgagaaggtccatttctccatctccaagtggacggatggcaaacaggagaagcccactgtccgcacagaatccgatgaataaagctctggtgccatagtggcatagtccttgctacagatgatttgaagtgttgttgcaagtttccggaacatgctatttagctggcttgattttatagtcaatgctgaataataaatactttttacgacaattgtctttttcgttgctaattgcactcgccctacctgaatcagtcatgtgaacatcatggaatgcttcagttttgtacaaactaaatttggtgtgctgtccgacagattctatgtctgggccttaaaaataaaagaataatgaatggaatggttttg

SEQ ID NO: 261718 - DNA, 605 bp, Zea mays
ctcatgggccgacacacgcctcaataacgcggtcgcatcttccccattctccatcgacccaccggcggcggcgcaagtgaagcgaagaggaaaggaagctacgagatgtcggcgaccactgcagcggtgcccttctggcgggcggcggggatgacctacatcggctactccaacatctgcgctgcgctggtccggaactgcctcaaggagcccttcaagtctgaggccgcgtcccgcgagaaggttcatttctccatttccaagtggacggatggcaagcaggagaagccaactgtccgcacagaatcggatgactaagggctggcgccatggcgacatagtccttcctacagatgatttgaagcgtcgttgcaagtttctgggacttgttatttagttggcttgatttgtaaccaatgctgaagaataaatcctttttgcgccaatggtctttttacaatgtcgtgttgttttcgttgctaattgcccttgccctcccctaatcaagcatgtgaactaatggaatgcttcagttttgtccagtttggtatattgtgctgtgcggcagattctgcctaatcattccacccaaaggaatagagaat

SEQ ID NO: 261719 - DNA, 1416 bp, Zea mays
gccgacccacgcgtgcgcaggggatgaaaaccgacgctgctgcagtcgtcaaggtggtggctggtcactcccctccctcggctgctagccctgctcctgcgcccccagtggccaacaccaatgggacgccacagaagccgcctcctattcctgcctctgccttcgacatgcccaagccaaacctccggggccttaacaagcccaagtgcatcttgtgtggtaacatcacccgctcccggtgcccattccagtgttgcaagagctgctgctacaaggctcagaatccttgccacatccatgttctgaagcagacaaacacattgccagataagccgtcacctgcaactgctcctgcaacaacagaacatcaatctaacaatttacctgcaaccagttcagcgtcaaggctggctgccttgcaaaagcttccccagcactttctgaagtttctccaaacaaagaaatcagttaccaaaaaggacgttgcgggtataaacaagtggaggtttatgaagctagaggaacatatgcaaggagataccgacgctgaaaacgaagcgtacgagaggtatacgcagaacgtcgggttactggaggaagcattctgtcccatggaagaagatgctgatgttgatcctgaggctgaagcaacttcttcttcagaggaagaaaggatggacctgttggtttcggcggcaaaggcgaggttgaagtcggataacgaagctgccaatagcttcagggagagggttgccactatcttggaccagaagctgaaggacctgcgcgggagccaaagcgccagtgagggtgacgaaccgtctggcccaagtctggacgatcgtctaaccccgaccccgatgaagttcagcacagcgcagaagatggggagagccacggaactgaacgagctgctgggtaagctgacaggagcacggagcgaggacgatctgaagccttgccgtgatcttgccgagcagctgtttgggaaggaggacggctcctctgttggcaattcgaacagagtggatacggagactgagccgggcgatcaggagtcagctgcagcagtagcacggcgctattccgtcccaacgctgtgcagcaggatggaggtgggtgaggacttcgcctcagagatgaacgatgaattctgctctttgactcaggtggcccagctatgaaacctgaaacctggactaatcgcaatgtgacattttttaggggatttcatcacatttaagcctagtttagaaactcaaatttcatccgaaattcgagtgaactgagggaaaaataaaataatttctctcaatcccctccaactcctgagtatttaagttcctaaactaatccttagggaacttaaatccttccccggaattgaaggggattacccccaaatatagttacctc

SEQ ID NO: 261720 - DNA, 946 bp, Zea mays
  unsure (1)..(946): unsure at all n locations
tcaatactgggactcgtgggacgacgcaagcctctagactgacacaggcacgacacgagctcagccggcggcggcagagcgggaggagggagaacgcttcggtcccccccaacccaacctcctccccttcccgacaaggcgacgcgaagcgagatgccgctgtacgactgcatgctgctgctgaagacgacggtgaccagggaggtcctagcggaactggtgacgcgggtggcgcgccgcgcatgccagcgcaacggggtcgtcaccgacgtcaagtcattcggcaaggtcagcctcgcctacggcatcaggaagctcgacggccgccacttccagggccatcttatgcaaatgaccatgatggttcccccttcgttcccgcaagaactccactatctgaacaaggaggacaggctgcttcgctggctggtcgtgaagcacagagacacggtatacgggttggagttcttgaacgcggatggcgggagggacgagctgagaagtttcagccatggtcacacgaagggcgactacgatattgaaattgactccgatgacgaagactccgacgactccgacgacgaagagtacgcaatcgaggaggaagaggaagaggaggcggcgaacgatgaggagaagaagtagaactgtttggccaggtttctgcagtctcatctgtattggcagatgcgcgttttcttagaaatcaaatgttctctttgtaacatctgcgactttttataaaggctgaagggtatgggataagagtcagaaccaatcacttgtgtttctgaacttttaaaaccaggaaaacgggagctggaacttaccggttggttgtaacatgaaanccntgaatttggaaaatctctccgtgacaaagcgtgctttgatcctccaccaaaaaaaaaaaaaaaaaaaaaaaaaaaaaaaaaagggcggccgc

SEQ ID NO: 261721 - DNA, 1754 bp, Zea mays
aggtccaagctctcccgccctgacctcaagcaggtctgggctatcgcggacaccagaaggcaggggtatctgggtttctctgaattcgtcacggcgatgcagctagtctctctggcacaagcaggcaacgagattactcaagatagccttaagcgagatgatttgagcagtttgaatccacctgtgatggaaggtttggatgccctacttgcgaaatctaagcatttggtgaagcgtgttgatccagaaatggatggatatcctcaggaacaatctcctttaacaaacaaatggtttagctcaaagtcatcaaagaagatacctctgactgccgtcacttctgttatcgatggcttgaaaaaactttatatcgaaaagttgaagcctttggaagttacatacaagttcaatgattttgtttcccctttgctgacaagtagtgattttgatgcaaagccaatggttatgctcttaggtcaatattctactggtaaaacaacttttatcaagcatctgctaagaacaagttatccaggtgcccatatcggaccagagccaacaacagacagatttgtagttgtcatgtcaggatctgatgaaaggactattcctgggaatactattgctgttcaagctgacatgccttttagcggtcttacaacatttgggactgcatttttatccaagtttgagtgctctcagatgcgacatccactgctagagcatatcacatttgttgacacacctggtgttctttctggtgaaaagcaacgcacacagcgcagctatgatttcactggtgtgacatcatggtttgctgcgaagtgtgatcttatccttctcctgtttgatcctcataagctcgatatcagtgatgagttcaaacgtgtcattggatcattacgtggccatgatgacaaaatacgcgtagttttgaacaaggcagaccaagtagacactcaacagcttatgagagtttatggtgcattgatgtggtctctcgggaaagtattgaatacacctgaggtttcacgtgtttatattggatcattcaatgacaaaccagtaaatgaatcagctgttggtccacttggaaaggaactatttgagagagagcaagatgatcttctttctgatctcaaagatatccccaagaaagcctgtgaccgccggatcaatgaatttgttaaacgtgctagagctgccaagatccatgcttatataataggtcatctaaagaaggagatgcctacaatgatgggcaaagcaaaagcccaacaacgactcatagacaatctgcctgatgagtttgcaaaggtgcaacgggaataccatcttccgtcgggagattttccttatgtggagcacttcaaagaggtcttgagcggttacagctttgacaagtttgagaaggtgaagcccaagatgatacaggccgtggatgatatgcttggatatgacattcctgaacttctcaagaacttcagaaacccatacgagtgaacccatacaggcggttgaaagatgacttcgatctgcaacagaatgagggattgattgtcaggcgatgtgaatcatagtggtcaatgtctcttggggcgttcattgccatccatgcttagccattgttatataactttatgcataagaatcatagagccattgctcaagctttcaccagacatctgattatgtaaaatcgacaaaatagtgactgttagtgttaaagaatataccccgatgttgtttcttcc

SEQ ID NO: 261722 - DNA, 421 bp, Zea mays
cggacgcgtgggtttttgatggtgacttgctttggttttcgatcggcaaacaaataacagtgtaggcagactttggcctagccgagcaagcaaatttcttccacgacaacagatccatgttcaacgcaagaaggaaccaaagaatgaatgtcagcattcttatttgcattggatcgaactatactatactaacaaggtggcaatgcctattcgtggccaatcatatgctatgctaccattcaaggcacaatgccttcacatctcgaatgctctactcctcgcacagggctccttcccccttctcttctagaggcaagaggatgctccattggagatggcagtgctccattgtttctgggcggcgtgttggctgcttgaacctctgctactgcaggaacagggcacttatgtctccacgaac

SEQ ID NO: 261723 - DNA, 582 bp, Zea mays
gtctaacccgaaaccgtttccaaaatgcaaaactcgactccacgcgtcgcccttcttctccggagagatcgttttaatagccccgtaccaaatccaattcgtctctcctcaccggagaacagaaacgatacggttaatagatagcgaagaagggcagcaccaccagtagcagcagccatgcccgctcgcgctcgatggcgactcctcgcgctgccgctcgcgctcttactcgttgccgggtcggcgcatggcctcgtgaagccggaggcagccgcggcgcccaagccccccgtccccaaggccatatcggacctgagggacgcgatcgtgaaggggctgggattccaggccgaggggctcaaggtgtccgggttcgacgtgcgagacgcgctcgtggggcacgcggtggcgtacgagttcgacatcgaggtcggcaggaaggtcctaccggtgcgcctgctggaggacgtcagccggtgggacttcgtcgacctccccatcttccgttcccaggccgacgctgacgatacggcgctcgccgagatccggcgggccgggagggggagcatcgttgagcctacc

SEQ ID NO: 261724 - DNA, 1550 bp, Zea mays
  unsure (1)..(1550): unsure at all n locations
tctgacgcgtgggtgaagctgttgcttcttctcttgaacagacaacggaaactcctgaactagtatggacacccgcaatggcagcttctctttctgcacagttagcaacaatggcatcagacctctaccaagagcagatgaaaggacgtgttgttgattgggatgtacctgaacaagcatctgggcaacatgtaatgaaggatgaaccacaggttggtggaatttatgttagactttttcttaaggaccccaaatttccactgagaaaccctaaaagattccttgaagggctcctagatcaatatgtctcctctgttgctgctacgcattatgaagcaattgctacagacccagagcttcctttactactgtctgcggcattggtttccttactacgagttcatccagcacttgctgaccatgttggctacctcggttatgttccaaagcttgttgcggctatggcttatgagggaagaagggagactatggcatctgggcaggctaccagtgcatcgaaggcagaacctagcgaacatgacaactcagctcactccgaggccactgtacagactccacaagaacgtgttcgccttagttgtttgcgtgttctgcatcagcttgcgtctagtacaacttgtgcagaagctatggcagcaacaagtgcaggaactcctcaggttgtaccactgcttatgaaagcaattggatggcaaggtggaagtatactggcattggagacattaaagcgtgtagttggtgctggtaatcgggctcgtgatgctcttgttgcacaggggcttaaggttggtcttgttgaagtactccttggtattcttgattggcgtgttggtggaagacaggggctctgtaatcaaatgaagtggaatgaatcagaggcttcaattggacgtgttttggctgtggaggtgcttcatgcttttgcaaccgaaggtgcacattgtgctagagttcgtgaagtcctgaattcctctgatgtatggagtgcttacaaagaccagaagcacgaccttttccttccatccaatgcacaatcttctgctgctggaattgctgggctcattgagagctcatcatcaagactcacttacgccctcaccgcaccgccaccacaaccttcattggtccgtctgccatcttcttctccctctccaccatcagctcctgcaaaccctagtggacggcattcttatcagcgtttgtagtgcaaaacggaacatgttaatctcaacccggagtgtgaaccatgaaggcaccatggtaacggtttctagagtgaggccaccttgagtgggcttgttactgccaccaaatacagattgtgcggttgtgcctccattccccaccaatgagcagctgtcagtggctgcatttcagtacatagcattgtacagttttccattacaacggggtcagggtcggggtcggttttgcgtttgttcatgtaaagcatatgatcttttttgtaacataatagatgtcaatagaataatggagctggaaatngtagtatcgattcattgctgggt

SEQ ID NO: 261725 - DNA, 608 bp, Zea mays
aaaaaacaatggtcttgacgagttggagtgtggaaggggaggattgggatgacgaccatgaggagatggtggatgcggaggttgacatggaagatattgctgggaaagcaccggcgaggaggaagaacgggaatttggagggtgttctagctaatggagtgcataacggtgtaaaggacatggtcacaccaatcattaggacgagtttggagaagcaaggttacaaaattattggttctcatagcggagtgaagatttgcagatggactaagtcgcagctgcgaggtcgtggagggtgttataagcactcattttacggcatagaaagtcacagatgcatggaagcaactccaagtttggcttgtgcaaataaatgtgtattttgttggagacatcacacaaatcctgttggaaagagctggaaatggaagatggatgaccctcttgacattgtgaatgctgcaattgaccagcatactaagatggttaagcaaatgaagggcgtaccaggagtaaagccagaaaaacttgacgaaggtctgtcacctagacattgtgcgttatctctggttggtgaaccaattatgtaccctgagataaatgctctt

SEQ ID NO: 261726 - DNA, 518 bp, Zea mays
ggcgacttgatcgagtctcagaccgacatttcggaaactacccgcagcgcctctgtcgtgtatgggaaaagcgttgaggctgaggaggcgtacaggaacggttgccagtaccttcttggtcagtttgggcctccgttcgccacgctaaggcttgatttctccccaaccgtgcctttgccgtctcctgcttcgaaacctccgctccgagatattaggaagaacctcgaggacatgatttcgtcccgccgctcggctttgaacaaggcgacctcgtcggcagacgcccagctggaccctgttccagataagcttctgggggagatgcaggggctgttggcaaaagtcgacaggatgcttaccaggcctcatgctaatgctccttagccccgccaatctggagggttgtggctgtaacctattcggtagttaggcaactttggtgtctgctctgttagctgtgaatggcggggcttgttttgtggctgcttcgtgtactatatatatgccaataaggtcgc

SEQ ID NO: 261727 - DNA, 695 bp, Zea mays
  unsure (1)..(695): unsure at all n locations
cgcttcatctcatgcattttttttaccttttcctttcatcatttctacatatcagatcccataagatacagaacctagctagctactttaatttatacaaggaattacagttttcagttcaagcattccacctcaaaattggcttgacaaagttgacaacccgaggggagggcgaaaaaatagccccacagcttgtcgaaaagccaacatcatgggcaatgatgcaaccaaagaaaaaaaaagagtattccccatgccctccacacaaatcgatcagcccatatccatctttagtcgaggattgtacaaacaatatctcgggaagagtcagatatcctagcagcctcagcgatcctgagagccatgatggatttgtatgctgcgagctctgcgtttgtcatgagagactgggctctgttgcgcagtcgaatagctctttctacagcctgttttgccgcacgttcagcttgggcaactctgtgcaaagctgcgtcctcttcagcattgtattgcaataaagcttcaggctttccacgaccagcttggctttnntgtctcttgaaagatctctttcgcttcatggcagacttntgtgataaatgccctcgccttatgggtgcaccctgaaataccctcagcactggtgcagctctcttggacctcttacttgtccaatatttatacccagcacgcac

SEQ ID NO: 261728 - DNA, 555 bp, Zea mays
  unsure (1)..(555): unsure at all n locations
gcccctnttttttttttntttttttttgatcaaagaacccatnaattggtgtattacgtgtggttatccaatgagatcgcgacatcttattacaagatcacagttgaaatgcggaaagctgaggcaacaactaagtcgatgggggatcctcagtcctgaccatgtgtactgacaacatgttgcaaaaaaatacaggtcactgacaaacaaatctgaacagctattcatcatcatcaatgtagcgttgctcgttggctagcctggcgcgctcaagcatcttgtcgaggtcctccttgagcttctcgtcaaattttaccagctggttcacaaatactgcaccgagacccatccccaacacatgctcccaaggatggcgcatgtagggaagcttgcggagggcgttggagtacatctgagtgcccagtcccaggagggcgccgatgatcgtcggcgtcgccggcatcctgctgttctcctgtctcctcggggcgaggctgcggcggtggggtggacgactggacggcaaggtcggggagagtgctgcggacgcgtggg

SEQ ID NO: 261729 - DNA, 551 bp, Zea mays
atcagagaaagtaagcgatcatattcaaagcccataatttgtagcttacaattgtgatccatcagatccattgggcaacgacattttattacaaggccacagttgaaatgtggaagctgaggcaacaactaagtcatgggggatccacagtcctgaccatgtgtactgacaacatgttgcaaaaaaatacaggtcactgacaaacaaatctgaacagctattcatcatcatcaatgtagcgttgctcgttggctagcctggcgcgctcaagcatcttgtcgaggtcctccttgagcttctcatcaaactttaccagctggttcacaaacactgcaccgagacccatccccaacaaatgctcccatggatggcgcatgtaggggagcttgcggagagcgtttgagtacatctgggtgcccagccccaggagggcaccgatgatcgtcggcgtcgccggcatcctggtgctctactatccctcctgtcccggcgaacggcgcggctgcggcgggggagtggacggcaaagtcggggagagttctgtggaggct

SEQ ID NO: 261730 - DNA, 897 bp, Zea mays
  unsure (1)..(897): unsure at all n locations
cccacgcgtccgcccacgcgtccggaaacatttagcctcaaagacagttgcacccaatgtgaacaagcttgttgctcttgttcaccgccctaatgaatcctttttccttgctccccaggcagataaagttactattgtgtatccaatgagattccaggactccattgatattgttttagcaacttccttcctgcaggaatttgtggaggcaagacgaacagctgcacttaataatgttccttcttgtatgtggtctccggtaccacctcttgagttaaaaggagtatctgctgatgcacttaatgcaaatgctggctttgttactttcgttgtttaccctcggcatgttgagggtaaaaagctagatagaacagtttggaatttgttgacatttcatgcttatgtaagctatcatgtaaagtgttctgaaggattcatgcataccaggatgaggcgcagggttgagtcgctgatccaggcgttggaccgggcgaagtctgatgctgagaagttgaagaagttggtacacggtggatctttcaaaagactgagcctgaagaacgagggggactcgcgtttctgaagggaattggcaaatgttgttgttttccatttggctaatgacttctgttgtgggaagcttacttccgttcagttttgggagcgaaggctcggaaccggttaaatccatgccattgaattttaatgtaaattcgcgttgcttttacatatttactagcctgaaatctctcggcgtatcagttccatgacacatcgcctttgcaaccggagagcctgctgcctgcatcttggtgcaagtagtttgtttttgccatgagatgtctgagtctgatcttttttggccttaataaatgtgttgttcttggatcaanttat

SEQ ID NO: 261731 - DNA, 1839 bp, Zea mays
ctcagctacttcaatctccttgtcccaaatgatcttctctaggatgttaaggggggctcacagctcctcctctatctccttcaagaaggcagtggggcggcagtgtctgcggatgcgaatcccctgcctagcccgctatgtcattgaatgacaagccattctcccattggaccagctcctttgcgttcagcatatcgtcctgtgccagcacctcaaggattgagtccgtgtggccagcacggagcgcgcgggagcgggcgccggcgcaggcgctggcgagggtggcgacgcgcgagggcctgggggaagcggcgcccctgatgctggcgacggcggagaaggaagacctaatggatcgcgaggcgagcagagactccatcaaacgtcgcgggcgagatggatggagacccaccgtcggctcgcccgtgtcccgattcccactcacgacatcaacctgtccccatccatctcgcccgcgacgtttgatggagtctctcctcgcctcgcgatccattaggtcttccttctccgccgtcgccagcaccaggggcgccgcttcccccaggccctcgcgcgtcgccaccctcgccagcgccggcgccggcgcccgctcccgcgcgctccgtgctggccacacggacgatatgctgaacgcaaaggagctggtccaatgggagaatggcttgtcattcaatgacatagcggctaggcaggggattcgcatccgcagacactgccgccccactgcctccttgaaggagatagaggaggagctgggagccccccttaacatcctagagaagatcatttgggacaaggagattgaagtagctgaggggcatgctaagaagcctcttgaggaggtgattcaggctgcaacgaaagcccctccttcaagagacttctatggcgctttagaagctgcctacaagcgtaatggggtgcctgcattgattgctgaggtcaagaaagcatccccgagtaggggtgtgctcagggagaactttaatcctgttgaaattgctcaagcttatgaaaagaatggagctgcatgtttgagcattttgacagatgagaagtactttcagggaagctttgataatcttgaaaaggtgcgcagctcaggagtgaagtgccctcttctctgcaaggagtttgtcattgacaagtggcaaatctataatgctcgctctaagggtgctgatgcaattctactaattgctgctgtgctaccagatcttgacataaggaaatttcttcagatttgcgaagagttgggaatgacagctcttattgaggttcatgatgaaagagagatggaacgtgtgctgaagataaatggagttaagcttattggtatcaataaccgaagccttgagacatttgttgttgatacttcgaacaccaagatgttgctcgagaaacatggggatatcatcagggagaagggaattttggttgttggtgaatcaggtctgtttactccggatgatgttgcttatgttcagaatgctggcgtttctgctgttttggttggggaatccctggtgaagcaagagtgccctggacgagccattgttgggttatttggcaaagaactgctgcactgaatgagaggacaaagattgtagtagtacatggtttggtggtgaggtgttagtgctaggctgctagctgttagccatagcatcatttgcagtaatagcattggttttattaataataccaccgaatgtgacatgcagaataaaaataatgttcaataagttccattcagtgattttctttagttcagtgacaaacgaatgcgatctgttcatgacagaggatctcccaagc

SEQ ID NO: 261732 - DNA, 451 bp, Zea mays
ggagacccaccgtcggctcgcccgtgtcccgattcccactcacgacatcaacctgtccccatccatctcgcccgcgacgtttgatggagtctctcctcgcctcgcgatccattaggtcttccttctccgccgtcgccagcaccaggggcgccgcttcccccaggccctcgcgcgtcgccaccctcgccagcgccggcgccggcgcccgctcccgcgcgctccgtgctggccacacggactcaatccttgaggtgctggcacaggacgatatgctgaacgcaaaggagctggtccaatgggagaatggcttgtcattcaatgacatagcggctaggcaggggattcgcatccgcagacactgccgccccactgcctccttgaaggagatagaggaggagctgggagccccccttaacatcctagagaagatcatttgggacaaggagattga

SEQ ID NO: 261733 - DNA, 429 bp, Zea mays
ttgctgatatatctcttttttcctttgtacttgtctggttgttggtgaatcaggtctgtttaccccggatgatgttgcttatgttcagaatgctggcgtttctgctgttttggttggggaatccctggtgaagcaagagtgccctggacgagccattgttgggttatttggcaaagaactgctgcactgaatgagaggacaaagattgtagtagtacatggtttggtggtgaggtgttagtgctaggctgctagctgttagccatagcatcatttgcagtaatagcattggttttattaataatacccccgaatgtgacatgcagaatcaaaataatgttcaataagttccattccaaaaaaaaaaaaaaaaaaaaaaaaaaaaaaaaaaaaaaaaaaaagggcggccgcccgggaatccggacggtac

SEQ ID NO: 261734 - DNA, 508 bp, Zea mays
cccagcagcaatcaggccccaatgccccagcaaagcagaatgtgtctcagcctggagcaggcaaccgctctcagccacgttataatcatgggagactgaaccccttggaggctgaagcagttcaggagacccccgacatgatagtagagaacgatccggtcggagagcccaaagaactcgcaggagaagcccctgagcaccagtcggttggtggtaagcaagaagtttgcagatgaagatatgatgctgaactccatggatgctagtctagtgatacccccggtcatcttcctgtggatggatgtccatgtttcgctgtactttgatgaataaaggttaagacattatgtctgttcgaagtgtaatatgttaatataatcgttatttacgcttttatgcattgttcttttgatatattacacttgtgacgtcaacatatgtgtggaaatagatcctggcacacatatgctatgcacccggctctgcgccttggaaacgggtgtgacac

SEQ ID NO: 261735 - DNA, 526 bp, Zea mays
gcttcgccaagtccttgtgttgcgatgcgtcgaagcgccagccctgctgctatgctgcttcgtcgtcatcgctccactcctcgctaagtaccttcgcctgaggccgctgatgactgcgtcgacgactttgctcatcgaagcttgatgtgctgatcccctgcaccgaagattttcctgttgttgccgtgtcgtctgcactgtccgatgtggttgatttaatagttgagaatcaagtgctattccgtggaagaacctcaagttttcagtaagcaagaagcttgcagatgaagatatgatgctgagctccatggatgctagtctagtgatacccccggtcatcttccggtggatggatgtccttgtttcgctgtactttgatgaataaaggttaagacattatgtctgttcgaagtgtaatatgttaatataatcgttatttactcttttatgcattgttcttttgatatgttacacttgtgacgtcgacatatgtgtggaaatagatcctggcacacatatgtgatgc

SEQ ID NO: 261736 - DNA, 385 bp, Zea mays
cgaagcccgtcgcggcggcagctgtgaagtcagagaggagcggcagcgaggacgacgccgagtcagaggcaatggcggaggtggctgccgcactccgggctgtcggggaggggttcctgcgtatggaggagcgcaggctggagctatcgctgcagatggagaaggaacggatggaatcggagatgaaacgcacccagacgatgctggacgcccagcagctcttcctcgaggccttcctcggtaagcaactgcagcacaagaaggcccatgtctccccttcctctgccgcaatggaagaggactgatcgatcgatgtatcccggctgctctctgtcaaacttgtgttcatatgcttgcttgatctttgttaactgttgttcatgct

SEQ ID NO: 261737 - DNA, 554 bp, Zea mays
ggcccttgagcaggataaattagccatttctcctggtcagaaagatggtaagaagacccttgatcaagagaagtcagttagatctcccattcagaaaggtgctaagaagaccaaaccccttaaccaggatgggttagtcatttctcccggccaggaagatgacaagaagccccttgtgcaggatgagccaatagtagtgtctcccatccagaagaataacaataagtatgttgatcaggagaagtcccttcagcaggagaagcaaatcatctctcccggacagaaagatgataagaagagcagcaaggtgggacctgactcagcatgtaatcatgtgcaacagaagaaagtgaaggctactgtatctaccggccgtgctgctaatactcatgtttctagttccaggcctcgctctgtttttatcccccaagcacattggcccagccagccaattgttgatcggtttgcgcatatacctgagcacctgatcagcccttctgcttttagttatgggttgccacaaccacttatgcatcagcctatctcaacctcat

SEQ ID NO: 261738 - DNA, 409 bp, Zea mays
gaggcccaccaaatatatacgacataagtggaagcgcacattttataaacaaatgtgataatggaattgtcatccacagaaacagggacccaaatgctggcccccttgataccgtgcaggtgggtgtgaggaaggtgcggaataaagtggttgggcaaataggagatgctttcctgacatatgaccgggttactggtgaattcaaggatgctggtaaggccactacagcacccagtgcaaaagcggcaaaacagtcacgcaaagaggcatataagataccatttcaacatgctgctcaagacggtgagaatagttttggtctctgactgcataagaaagacatgttcctgctgatttgatgtacctgtatcaatcaacgcaagtgagatttcacgattgtttctgggga

SEQ ID NO: 261739 - DNA, 1746 bp, Zea mays
cccacgcgtccggtctagacgacgcgcttgtgtgcgtggccggacctgaaaagccggttcctcccccgaccccggcgccccaccgcagccgccggctcccaccgcccggcgcaccccgtcacctctccaccaaccggatacccggacggatccgctcccacctggatcctgatccggggaagtcaaaggggagatcgaagcttgagcagagggagccaaaatggtgaaggacacgcggtactacgacgtgctgggcgtggacccgtccgccaccgagtccgagatcaagaaggcgtactacgtcaaggcgaggctggtccaccccgataagaacccgaatgatccgcaggccgcggagaagttccaggaactaggagaagcataccaagttctcagtgaccctacacagcgccaagcttatgactcacatgggaaagacggcatctcaacggaggggattattgatcctgcaacaatttttgcaattctgtttggtagtgagctttttgaggaatatattggtcaactggcaatggcatcaatggcttcacttgataattttggtgaagatgagcagattgatgcaagaaagctgcaagagagaatgcaggctgttcaaaaggatcgggaagaaaaacttgcagagacactgaaaaaccggctacacatctatgtgcaaggaaataaggcagaattcatccagcatgctgaagcagaggtgtccaaacttagaaatgcagcatatggagttgttatgttgaacactattggctatgtatattcaaggcaagctgcaaaagaacttggaaagaaagtgatgtttttgggtgttccatttattgccgaatggtttagggacaaaggacattttatcaaatcccaagtaacagctgccacaggtgcaatagctcttatgcagttgcaagataacttgacgaagtatatgagtgctgagggccagtacacagaggaggaacttgaaatgtacatggaaaaccataagaaagtcatggttgattctctgtggaagcttaacgttgctgacatagaagccacattatcccatgtctgtcaaatggtacttcaagacagtagtgccagaaaggaggaattgcgcctccgtgctaaaggcttaaaaactttaggaagaattttccagggggctaaggtcaaccctagcgagggggaaacatcacaaacgaagaatatagacaacatggatggcaatgacggcagctcccctgactcgtccccaaatagagaggcacagttcactcctaatcagcctcctgtcccgagcccgtatgtggaggcgccttatgttaacggagtctattgtccgttcccgatgccagcagctccgcctggcgcaaggagggatcgaatcccttgagtccagataaaacctgcttgtaaaatgggctctgtttaacattgcctataatactagatcatttgcatgatgaacctggagcagaggggaacacaggagtctgtcaggtgttctctgcacctccctgttattttggtcgcgtatgcttggtagcagccgtgtcttgtgtacaggtgtgttttgctattgttgatcgatgaagctgtaggtgtacatgttatgatgcccattatattattctgttgtcggcctgctgtattttagcataaacagtggatacatttgcatccatgggaaatgaaatgttctagtcattgtttcccatcattcaggagtttggtgttaatggggct

SEQ ID NO: 261740 - DNA, 601 bp, Zea mays
ggaactctgccactttcgaaaatggtggtgtaaataattattcagagagaggtgaccgactgattgatcttgatgctttccgtgaaaaacttctccagatttcacaagcattgaactcacaattaaccgagcctgagaaagctggactaaaagaatcagttcatcatttgctcaaatgggcgtggcgatataacaaaaatcttgaagagcaggctgcccaacttcacatgttgactggctggtcacagattgttgaggttgctgtatcaagaaggatgtcattattcgaggactgttctcagctattgtttgaactgcttgatgcttcgttgaatgccacaacatctccagattgttcagtgaaaatggcatatgttttaactaatgtatcgttgacctgtatggcgaaactgcgggatgaaagattcatatgcccagctggtacagattctgatgcggttacttgccttgacattatttcgtcaaagcagctaccaaatgcagcttgtaactcattgttattcaagcttgtgatggccacattaagaaatgaatcatttgaaatcttgagaagacggcaatatgcattattactgagtta

SEQ ID NO: 261741 - DNA, 517 bp, Zea mays
caaaaaacttgaagagcaggctgcccaacttcacatgttgactggctggtcacagattgttgaagttgctgtatcaagaaggatgtcattattcgaggactgttatcagctattgtttgagagaagcataccaagttctcagtgaccctacacagcgccaagcttatgactcgcatgggaaagacgacatctcaacgtacgttcagttacaaataaattacttgccgccgctggtcagtggaaccagggcttgttggaacatgggaaagtttcttatttctatgtgaatcaaactgtttcaaaccagtccagtgccttttttttggcactgctgctgctttcagaggaaaataaaacttgaagtgctaccaagtggcatgattctgctgcatcttattagtaggaaacagaggctgtaccaaaagggagggtgttaagctcagagagtcaggattcatgattaaccatcatgtatattgtatttggaactttagagaaaattatatcccctgctgaa

SEQ ID NO: 261742 - DNA, 795 bp, Zea mays
gtttccagtgtcttgccagtttgccaagagcaatgctgaaggtctgaacttctttgtggggaggatctagtaatggcagagaggctactcatgaaacacctcgatgcaccaggcacgtggctggcggagaagcatcggaggacgttgatgaacaagtattgtggacggtacctgcgggacaagcacctgcagcactacattatctacggggagacagtgcaagacagattcgaacacaatcgacgtctaaggaatccttcaacgacctctgtccagcaagcgctacatgggcttgcatactgtgtgtatggcaaacctgacgtgcggcgtttgatgttcgaggtgtttgacttcgaacaggtccagcctaaagcagtctgaggatcttctccattggtaccgatgctagagttgctgaatgctgaccaacaagaccccaatggcagtggtacaaatgctgtagattcttgaagtcgtccattcgacaggagatctttcgattctgaagcctgaagccctgaaccctgagctgggacagctgattagccactgggtcctgtctctcctgaaaccgtcactgttccaaccttcttgtccgtcggaaatggtagactagtgatgctgtggatcggaggctgctgttgtttgaacttacaattttgataattcgttgtaaattcctgtttgggcagaaacgcaaatagcagcagcatggcagattcatttcctatcagaattgtagtccgtaatcgagaagcagtaagatgaataatataaagatattcattcgtccgc

SEQ ID NO: 261743 - DNA, 932 bp, Zea mays
ccacgtggcacggactcggagctcttcctatattgctactgctattgctattgctatacggcaagggccgcagcggcaggccacgcatctctctcccttccttctccccgttctccgtgcaatctcggccgtttccgctcccgccatcgccatggaggaggccaaggttgtggagtccaaggacgggacgatctcagttgcttcagcatttgctggtcatcaggaagctgtgcaagacagggaccacaaatttttatcaaaggcagtggaggaagcataccgaggagttgactgcggcgatggaggaccatttggtgcagttgttgtccataatgatgaagtaatagttagctgccataacatggttttgaagaacactgatccaactgcgcatgctgaagtaactgcgataagagaggcttgcaaaaagcttgggaaaattgagctgtcggattgtgaaatttatgcatcctgtgagccatgcccaatgtgttttggtgctgttcatctatcccggattaagaggctggtgtatggagccaaggcagaagactgcaattgccattggatttgatgatttcattgctgatgctctcagaggaactgggtactatcagaaggccaacatggagataaagcaggcagatggaaatggagccatgattgctgaacaagtatttgagaagactaaagagaagttccaaatgtattgaaccgtggaatatacttggtgggatgatttaacattgtgatagccctctgattctcaaaaaaagaataacacaacctctggtattatgtaatttatgatgggccacaaattgccattgtgcttccatttctgaaaacaagattgatgtcactccttgatcttcaatgagcagttgattcttaacttaaataattaaattttttttatttgttttattttt

SEQ ID NO: 261744 - DNA, 1642 bp, Zea mays
  unsure (1)..(1642): unsure at all n locations
actttgggcttccatcactctttcatgggtggtgaccgctgagctccctgacccgcaaattttatccggagcaaaggcttccataaatatgctagattgcaaatcttttttttgtgacaggaagtagagaagtactcgcgtcgtggaggttcccctcgcactggggatctccccgccaggcgtcgacgagctggatgactccgacgcggcggcgaagtgcgacggacgagggctctgtagcggcgggggtcctacgccgcttgtgaccggttccggaggccttgacggcgcgagggggcggcgggggtgtatgcagttggaacttgggacatactgcagccttaagatcatagatttacttgtttcagttgcatacagcatcagagtctaggaaaacggactaagggtcccaattcaagcatcgacgaagtaccaatgtaccaacaacagcctaagggctcaacatcgacaaatttattacgagaaagacaatacgacaatctgcttgttcacattgactccagatgcaaaagaccacatgattccatcccacgcgtccgcccacgcgtccgcccacgcgtccgcggacgcgtggggccgtggaggtcaccggtgggcctgagattcccttccaccccggtagggaggacaagcctcagcccccacctgagggccgccttcctgatgccactaagggttctgaccacctgaggcaagtttttggcaagcagatgggcttgagcgatcaggacattgttgccctctctggtggccacaccttgggaaggtgccacaaagagcggtctggtttcgagggggcctggactacaaaccctttggtctttgacaactcttacttcaaggaacttctgagtggtgataaggagggccttcttcagctcccaagtgacaaagccctgctgagtgaccctgtcttccgccctcttgtcgagaaatatgctgcggatgagaaggctttctttgatgactacaaagaggcccacctcaagctctccgaactggggtttgctgatgcttaaatagaccctatcctggagtgatacattctgctgcatgtggtcttttgcatctggagtcaatgtgaacaagcagattgtcgtattgtctttctcgtaataaatttgtcaatgttgagcccttaggcttgaattgtgggaccctttgttcgttttcctagactctgatgctgtatgcaactgaaacgagtaaatctatgatcttaaggctggcctaaccttttccattcatctctttccttcttaatctatttcctcctccttttctaccgggtcgccccctaaagataccagtttactcccctcctccataatatactctccttgggtatttaattaatgtatggggtggngtaaagggngaagggaaaannggggaaaaaaaaaccccccgcccccccccccccccctttcccccttttttttaccatcttttattaatttacatcccttccccccctctttttttccccctctccccccccttcctttttttttccccccttccgcttcccccctctccattcttctttttttttttttttttttctccatcccccccccttttcctcacttcccctatcctctatccttatttttatatt

SEQ ID NO: 261745 - DNA, 1405 bp, Zea mays
gcgggaggggagaggggcaagtgcgagtggtggtggtcgctgcgtcgtcggcggcgcaggcgcccagacccagcagctattgtggtcgtccctcagccgcgtcgcaccgcatcgcattctacgattcgaagctctctctgctcgcagccatggcgaagaattacccaaccgtgagcgccgagtacagcgaggccgtcgagaaggccaggcgcaagctccgcgccctcatcgccgagaagagctgcgcgcccctcatgctccgcctcgcgtggcactccgcggggacgttcgacgtgtcgtcgaggaccggcggtcccttcggtactatgaagtgcccggcggaactggctcacggcgccaacgcggggctggacatcgcggtgcggctgctcgagcccatcaaggaggagttccccaccctctcctatgccgatttctaccagcttgccggagttgtggccgtcgaggtcaccggtgggcctgagatccccttccaccccggcagggaggacaagcctcagccgccacctgagggccgtcttcctgatgccaccaagggttctgaccacctgaggcaagtctttggcaagcagatgggtttgagtgatcaggacattgttgccctctctggtggccacaccttgggaaggtgccacaaagagcggtctggttttgagggggcctggactacgaaccctttggtctttgacaactcttacttcaaggaacttctgagtggcgacaaggagggccttcttcagctcccaagtgacaaagccctgctgagcgaccctgtcttccgccctcttgtggagaaatatgctgcagatgagaaggcattctttgatgactacaaagaggcccacctcaagctctccgaactggggtatgctgatgcttaaatggtccatatcctggagcgggacacaaactgctgcctgtatggactcgtgcgattcagggtgaaccatcagattgtctagtgtcttctttgtaataaatttatctgttcttggtactttgtctatggttgaatcggaacccattttccgtttgcctagattcttaatttctggtgctgtatccagctgaaactagtagatctatgatcttgtggctgcagcatgttcttgtcacttttatctggtctccgttggttcggttcacaggttgtgtgctttaaaaggctgtgcttaagtcctgcaattcgagtccaccaaactgtagggtgcaagtcgagattttattagtgatgcaagttgctggtattggtgcattatcgggctaatacgcttgcgttgccttctgattttataagtgatgtaaattgctggttttaacgtgcattacctggtgggctggttctataactggggctttggcaccgactcttctatcagtacat

SEQ ID NO: 261746 - DNA, 1171 bp, Zea mays
cgcgggatcgacgcacgcgtccgcacacgcgtccgcccacgcgtgagcttgtgaccctccctcagccgcgtcgcgtcgcatcctacgatccaaagctctctctgctcgcagccatggcgaagaactacccgaccgtgagcgccgagtacagcgaggctgtggagaaggccaggcgcaagctccgagccctcatcgccgagaagagctgcgccccgctcatgctccgcctcgcgtggcactccgcggggacgttcgacgtgtcgtcgaggaccggcggtccattcggcacgatgaagcatcagtcggaattggctcacggcgctaacgcggggctggacatcgcggtgcggctgctcgagcccatcaaggaggagttcccaatcctctcttacgccgatttctaccagctcgcgggagttgtggccgtggaggtcaccggtgggcctgagattcccttccaccccggtagggaggacaagcctcaacccccacctgagggccgccttcctgacgccactaagggttctgaccacctgaggcaagtttttggcaagcagatgggcttgagcgatcaggacattgttgccctctctggtggccacaccttgggaaggtgccacaaagagcggtctggtttcgagggggcctggactacaaaccctttggtctttgacaactcttacttcaaggaacttctgagtggtgataaggagggccttcttcagctcccaagtgacaaagccctgctgagcgaccctgttttccgccctcttgtcgagaaatatgctgcggatgagaaggctttctttgatgactacaaagaggcccacctcaagctctccgaactggggtttgctgatgcttaaatagaccctatcttggagtgatacattctgctgcctgtatggaatcatgtggtcttttgcatctggagtcaatgtgaacaagcagattgtcgtattgtctttctcgtaataaatttgtcgatgttgagcccttaggctgttgttggtacattggtacttcgtcgatgcttgaattgggaccctttgtccgttttcctagactctgatgctgtatgcaactgaaacaagtaaatctatgatcttaaggctgcagtatgttcgctcaagctaagaacgggggaccgctagaacgtccttgtgatact

SEQ ID NO: 261747 - DNA, 639 bp, Zea mays
cacaaaaacaaacacaaaaaaatttattcataaaaaaacaaaaaaaatgacaacaaggggggtcttatacagctgccaagtgacaaagccctgctgagcgaccctgtcttccgccctcttgtggagaaatatgctgcagatgagaaggcattctttgatgactacaaagaggcccacctcaagctctccgaactggggtatgctgatgcttaaatgtccatatcctagagcgggacacaaactgctgcctgtatggactcgtgcgattcacggtgggccatcagatggtctagtgggggctctgtaataaatttatctgatcttggtactttgtctatggttgaatcggaacccattttccgtttgcctagattcttaatttctggtgctgtatccagctgaaactagtagatctatgatcttgtggctgcagcatgttcttgtcacttaccttttatgtggtcttcgttggttcggttcacaggttgtgtgctttaaaaggctgtgcttaagtcctgcaattcgagtacaccaaactgtagggtgcaagtcgagattctattagtgatgcaagttgctggtattggtgcaaaccaaaaaaaaagacactgtgaggaccactcttcttcaaaggtgtta

SEQ ID NO: 261748 - DNA, 592 bp, Zea mays
  unsure (1)..(592): unsure at all n locations
tccacgcgtccgcccacgcgtccgcccacgcgtccgcccacgcgtccgaggcaagtctttggcaagcagatgggtttgagtgatcaggacattgttgccctctctggtggccacaccttgggaaggtgccacaaagagcggtctggttttgagggggcctggactacgaaccctttggtctttgacaactcttacttcaaggaacttctgagtggcgacaaggagggtcttcttcagctcccaagtgacaaagccctgctgagcgaccctgtcttccgccctcttgtggagaaatatgctgcagatgagaaggcattctttgatgactacaaagaggcccacctcaagctctccgaactggggtatgctgatgcttaaatggtccatatcctggagcgggacacaaactgctgcctgtatggactcgtgcgattcagggtgaaccatcagattgtctagtgtcttctttgtaataaatttatctgttcttggtactttgtctatggttgaatcggaacccattttccgttaaaaaaaaaaaaaaaaaaaaaaataggancgaccgcctgggtcggcccgcccttccatcccg

SEQ ID NO: 261749 - DNA, 1143 bp, Zea mays
  unsure (1)..(1143): unsure at all n locations
tctctcctcgtaccagcggcgcatggccacgctctctnctgtccgatcgggcctcccgccctctcctctcccaaaaaacctcatcttccccgctcgtctgcattctcggccatcggcggcgctccagagttccaggccaggagaagctagagttacaaatcgtagtccgtgagaaccagttgaatttcatcaatcttatcaggtcatctcaagttcagtgactctcaaccagcctacaacgacggaaaggaagttggcaccttcaagggtcctcaaacattgctgcaccggacgttgtgtcgtgtatcattgaatgaagcacacctaggttagcaaaggcatgccagattctacatgttccaagaatgacaacatttagtccatcctggtgtacttcaagctcagtcatagattgaaaggggaaatggagtcttcggcgaagacaaggcttccactccactccatcgaattattcatccttcgccgtcgctccgcaccgctctccaactttgagaccttccttcctgatataggaaggcagggttcatgagcggcggcacgcctgcagcaagcagtagcctgcgggcagcactctcatactgcgtgaggcaagtccgcgcctatgactaccaccactacctctgccttctccacctggccccggccgtgcgcaaggccgcgttcaccttccgcgccttcaacatccagacagcaagggccatggatgtggtgtccgacccccggaccggcctcatgcgcctcctctggtggaaggaggcggtcgacaaggtctttggcaacaagctggtcgagcacctagttgcccacgcgctctcttcggtcatcggagaccataaggttagcaagcactggctgaagcggtccctggaggcgaggatcaacgacgccaaccgtgaggaaggcaccattcctgggacgagcgcggacttggagaggtatgcggaggacacccagtccaccatcctttacatgaccctgcaggctggcggaatacagtccaccgtggctgaccacgccgcctctcacatcggcaaggccagcgggcttctgttactgctcacggcgctgccgcaccatgtaaataatcaagggacggtacattatatcccagctagtgtggcc

SEQ ID NO: 261750 - DNA, 722 bp, Zea mays
ggcgagcggacccaccccgcccaactgtcgttatccggattcaggtccctcccaagtccgagctgttcacctcccgccgccccctcgcgccgtcaaggcctccggaaccggtcgcaagcggcgtaggacccccgccgctacagagccctcgtccgtcgcacttcgccgccgcgtcggagtcatccagctcgtcgacgcctggcggggagatccccagtgcgaggggaacctccacgtcgggaccttccttcctgatacaggaaggcagggggcgtgagccgcggcacgcctgcagcaagcagtagcctgcgggcagcactctcatactgcgtgaggcaactccgcgcctatgactaccaccactacctctgccttctccacctggccccggccgtgcgcaaggcagcgttcaccttccgcgccttcaacatcgagacagcaagggccatggatgtggtgtccgacccccggaccggcctcatgcgcctcctctggtggaaggaggcggtcgacaaggtctttggcaacaagctggtcgagcacccagttgcccaggcgctctcttcggtcatcgcagaccacaaggttagcaagcgctggctgaagcggtccgtggaggcgaggatcaacgacgccaaccgtgaggaaggcaccattcctgggacgagcgcggagttagagaggtatgcggaggacacccagtccaccatcctttacatgac

SEQ ID NO: 261751 - DNA, 744 bp, Zea mays
cccacgcgtccgcccacgcgtccgcccactcgtccgcccacgcgtccgcggacgcgtgggcttccaccccggcagggaggacaagcctcagccgccacctgagggccgtcttcctgatgccaccaagggttctgaccacctgaggcaagtctttggcaagcagatgggtttgagtgatcaggacattgttgccctctctggtggccacaccttgggaaggtgccacaaagagcggtctggttttgagggggcctggactacgaaccctttggtctttgacaactcttacttcaaggaacttctgagtggcgacaaggagggtcttcttcagctcccaagtgacaaagccctgctgagcgaccctgtcttccgccctcttgtggagaaatatgctgcagatgagaaagcattctttgatgactacaaagaggcccccctcaagctctccgaactggggtatgctgatgcttaaatggtccatatcctggagcgggacacaagtggccccccgtatggactcgtccgattcagggtgacccaccagattgtggagtgtcctccttgtaataaatttatctgttcttggcactttgtctatggttgaatcggaacccattttccgtttgcctagattcttaatttctggcgctgtatccatttgaaactagtagatctatgatcttgtggctgcagcatgttcttgtcccaaaaaaaaaaaaaaaaaaaaaaaaaaaaaaaaaggaa

SEQ ID NO: 261752 - DNA, 287 bp, Zea mays
ctgcagatgagaaggcattctttgatgactacaaagaggcccacctcacgctactccgaactggggtatgctgatgcttaaatggcccatatcctggagcgggatacaaactgctgcctgtatggactcgtgcgatcttttgcatttggattcagggtgtaccaccagattgtctagtgtcttctctgtaataagtttatctgttcttggtactttgtctatggttgaatcggaacccattttccgtttgcctagattcctaatttctggtgctgtatccaactgaa

SEQ ID NO: 261753 - DNA, 695 bp, Zea mays
cagacctggcggacggtgggcgtcttgctccagccgccgtcggatcggatccgatccaaagcaagcagcagcagccggctcctcctccgcctcccgcagcagccacaccccgtccgtcaccagaggaagaggaggaggatgtcggggtcgaaggtgtacacccttgaggaggtggccaagcacaacaccaaggatgactgctggctcgtcatcggcggcaaggtgtacaatgtgaccaagtttctggaggaccaccctggaggtgatgatgtcctgctgtcttccactgccaaggatgctaccgatgatttcgaagatgtggggcacagcaccaccgcccgtgcaatgatggacgagtacctcgtcggtgagattgatgcggccacgatacccagtaaggtgaagtacacgccccccaagcagccgcactacaaccaggataagaccccggagttcgtcatcaagatcctccagtttttggtccccctcgcaatactgggtctggccgtcgctgtaaggatgtacaccaagtcggaatctgcctagtctcttgtcatcaacgcttcaaacatcattcacaaactgaataagttagtgttgaaatgctgcaaagatcattaattctgaaacttgagtctttgctgtcgtgtgagacgtacgcctattagtataaaatcccttctatttttccttcc

SEQ ID NO: 261754 - DNA, 859 bp, Zea mays
ctccattttccccacctactacttcctctgctcgcggctcgccttcgtcggatcgggtccacagcaagcagcaacagcctgcagccggcagtcctcgcctccgcctcctccaccctgaccgtcaacagaggaagacgaggatgtcgggatccaaggtgtacaccctcgaggaggtggctaagcacaacaccaaggacgactgctggctcgtcatcggcggcaaggtgtacaatgtgaccaagtttctggaggatcaccctggaggcgatgatgttctgctgtcttccactgccaaggatgctaccgatgatttcgaagatgtggggcacagcagcactgcccgtgcaatgatggacgagtacttagtgggtgagattgatgcagccacgatacccaccaaggtgaagtacacgccccccaagcagccgcactacaaccaggataagaccccggagttcgtcatcaagatcctccagtttttggtccccctggcaatactgggcctggctgttgctgtaaggatctacaccaagtcggaatctgcctagtcatctgaaccaagttagcgagggttgcatcttgtttaccagagtcgcatgtcagaaacttggagtctttgctgtcatacggttatatttatatgagacttctatcggtaaaatgaaatggatgtcagaaacttcattgttgttcgctgtggttttgttctgttgtcccctgttctaaccgggatatgtttggaaaatatactttctggaagtgctctcattagtttaacagaactacaaaagggtgttcactataaagttttaagtttgcatgcgttcggaactttatattactcctctgtttttttttt

SEQ ID NO: 261755 - DNA, 764 bp, Zea mays
agcgatacagcttaccaaactcaaggataatgatccatcaacctcttggaggggcccaaggacaggagactgatcttgagattcaggccaatgagatgctgcaccacaaggcgaacttaaatggataccttgcataccacactgggcagcccctggataagatcaacgtagatactgaccgtgactacttcatgagcgcgaaagaagcaaaggagtatggccttattgatggagtaatcatgaatcccctcaaggcccttcaaccacttccagcttccagttagtcatgaagtgtgctagaactccgtcaaacatttttgttgtatcaatgtgtatgttggaagccctggctacgtaatattctacgtccaaatgcatcaaagattgtacaaaccaagatatgcggttaggatatccatccttggtgatggatattggaactaaattaacagtattagggttagtttgggaactccattttcccttgggattcctattttcccaagggaaaatgaactaattttccttgggaaaatgaaattcccttgggaaaaatgtggtttccaaactaacctaacccttaaagttaatttgtcaactctatttttctaaggaaattcctctcataaggcttggtttcctcgtctatgtactctatatggatgcctttttttataggaccgatgtctttctattttaggtcaacaggtgacggtaataactgtgtcttcattagggcatgtgcccccaacccctaagggttt

SEQ ID NO: 261756 - DNA, 704 bp, Zea mays
atcttgagattcaggtaaactcgcaatgtggggctatggaaagtatcatgctttctagaccagtacagtatcttaaccaaagatattctcagttctcgtttcttctcaacaaagatccttattttctgattttcatactcagctgagcttacggttgttatattttgcatattatttttttatctctacatattgcgtattgttacaagccaatgagcccctcttttggcaaccgagtaagaattacagttgtttacaccagcagttgctgatcctcaaggtctgatcttgtgattcaggccaatgagatgctgcaccacagggcgaacttaaatggataccttgcataccacactgggcagcccctggataagatcaacgtagatactgaccgtgactacttcatgagcgcgaaagaagcaaaggagtatggccttattgatggagtaatcatgaatcccctcaaggcccttcaaccacttccagcttccagttagtcatgaagtgtgctagaactccgtcaaacatttttgttgtatcaatgtgtatgttggaagccctggctacgtaatattctacgtccaaatgcatcaaagattgtacaaaacaagatatgcggttaggatatccatccttggtgatggatattggaactaaactaacctaacccttagagttaaattgtcaactctatttttctaagg

SEQ ID NO: 261757 - DNA, 471 bp, Zea mays
acttcacactactctccgcggcgcggccgtccgttctcctctcgccgccgccggccgcgcctccaccctcgcggcactcgcatggcggcgccggctctccgtatcactgcgcggctgggacttgcacttgacggtgccaccgccgcgagacggcgcgaggcctcggcgcctgtggcggtgccggccgcgccgtggctgaagaaggcggcggtccggtgtcagcgagccgtcggtgccgctgttgccgagaagaaggatgcgccggtatcggttgcgcaggatagaagcggcgacgggggcgcggcgccggagctcaccgtcgtgatgaagttcggcgggtcgtcagtggcctcggccgagcggatgcgggaggtggcagacctcatcctcagcttccccgaggagcaccccgtcgtcgtgctctcagcgatgggaaagaccaccaacaaactcctcatggctggggaaaag

SEQ ID NO: 261758 - DNA, 1418 bp, Zea mays
ccggtccggaattcccgggttcacccccgcggccgcggtgaagagaggtgactggtataggaccaaggatttggtgattaagggggcagactggatagttaatgaaatgaagaaatcaggtcttcggggtcgtggaggtgcaggttttccttctggtctcaaatggtcctttatgcccaaggtttcagatggacgcccttcttatcttgtcgttaatgctgatgagagtgagcctggaacttgcaaagatagagaaatcatgcgccatgacccccacaagcttctggaaggatgccttattgctggagttggaatgagggcatcagctgcttacatctacattagaggtgaatacgtgaatgagcgtctcaaccttgagaaagctcggcaggaagcgtatgcagctggacttctgggtaagaatgcttgtggctctggttatgattttgatgtgcatattcattttggtgctggtgcgtacatctgtggtgaagagaccgccctactagagagccttgaagggaagcagggcaaacctaggctgaagccacctttcccagccaatgctgggctctacggctgccccacaactgtgactaatgtagaaactgtggctgtatccccaacaattcttaggcgcggtccagaatggtttgcaagctttgggcgcaagaacaactctggaaccaagctctattgcatctcagggcatgtgaacaaaccttgcaccgtggaagaggaaatgagcatacctctgaaggagttgctcgagaggcactgtggaggtgtgagaggggatgggacaacctgcttgcggtaattcctggcggttcatctgttccccttttgccaaagcacatatgtgatgatgtgttgatggactatgatgcactgaaggctgtgcaatctggattgggtaccgcagctgttatcgtgatggacaaatctacggatgtcgttgacgcgattgctaggctgtcctacttctacaagcatgagagttgtgggcagtgcacgccttgccgagagggcacaccctggctctggatgatcatggagaggctcaaggttggtgacgcgaagctggaggaaattgacatgcttcatgaggtcacgaagcaaatcgaagggcatactatctgtgcgcttggggatgctgcggcatggcctgtgcaggggcttatcaggcacttcaggccagagttggagcggaggatccgcgagcgagctgaaagggagctgttggcggcttctgcataatgtgccagccatgttgcccctgtactagtttcctgatttcttcctaccgaaataatacaaactgatggagctcctttctgtgtaaggaaatgaaaaaaaaaaaaaaaaaaaaaaaaaaaaaaaagggcggccgcccgggaatacggacggtacgtgca

SEQ ID NO: 261759 - DNA, 499 bp, Zea mays
tcgaccatcatggagaggctcaaggttggtgacgcgaagctggaggaaattgacatgcttcaggaggtcacgaagcaaatcgaagggcatactatctgtgcgcttggggatgctgcggcatggcctgtgcaggggcttatcaggcacttcaggccagagttggagcggaggatccgcgagcgagctgaaagggagctgttggcggcttctgcataatgtgccagccatgttgcccctgtactagtttcctgatttcttcctaccgaaataatacaaactgatggagctcctttctgtgtaaggaaatgtagccttcctggtttctttaaaccatcatttatttgatgcactcaagcagctggtgaattttgatggactagataaactttccaaagtagaaacaaactcgagggttgtaccgtgtatgctacataatattattgtggatgtgtatgtctacctgcatgtgtcttcaatgctgagctatgtatggtttggg

SEQ ID NO: 261760 - DNA, 2108 bp, Zea mays
ctccatttcccgcagcagggcccattggaaggttggaattggaaacccaaaaagcataggcggggggtggcaggggaagcacggagcaagagattcgtttgctgccattattaaccgagccgagccgagagaggtcaggcagcggacccccattcgcatccgcctccttttccttggagccgaagaagagggaaaggaagggaggacagccgccgccgccgccatcaccaccgtcaggatgcattccacgaacctcctgctcgaggagcccatccggatggcctccatcctcgagccctccaagcccagctacttcccggcgatgaccaagatcgtcggcactctcggccccaagtcgcgctccgtcgacacgatctccgcctgcctcaaggccggcatgtccgtcgcccggttcgatttctcgtggggggacgccgcgtaccaccaggagacgctggagaacctcaagctctccatcaagtccaccaagaagctctgcgctgtcatgctcgacaccgttggcccggagctgcaggtggtgaacaagagcgagaccccgatctccctcgaggagaatggcacggtcgttctcacccctcaccggggccaagacgcctcctccagcttgctgcccatcaacttctctggactcgccaaggcggtgacaccaggggcaacaatattcgtgggacaatacttgttcactggcagtgagaccacctcagtttggttggaggtttctgaagtgaaaggagatgatgtggtgtgtataatcaagaacacagccaccttggctgggtcactgttcacgctgcattgctcccagattcacattgacttgcccaccctgtctgatgaggataaggatgtcattagaaaatggggtactcccaataagattgacttcctttctctgtcctacacaagacatgcagaggatgtgcgccaggcacgggaattcctgtcaaaattgggcgatctaagccaaactcagatctttgccaaaattgagaatgttgagggcttgaaccattttgatgaaatactggcagaggcagatggtatcattctgtcaagaggaaaccttggaattgaccttccacctgagaaggtctttttgtttcaaaagtctgcgcttcacaagtgcaacatggctggaaagcctgctgttgttactcgtgtcgtggacagcatgactgacaacctcagacctactcgcgcagaggcaactgatgtggcaaatgcagttcttgatgggagtgacgccattctccttggtgctgagactctccgtggtttatatccggtggagactatttcaacagtgggcagaatttgtgctgaggctgagaaggtattcaaccaagatttatactacaagcggactgtgaagtatgtgggagaacctatgacccacttggagtctattgcttcttcagcagtgcgagctgcaatcaaagttaaggcatcagtcatcatttgcttcacctcttctggacgagctgcaaggctcattgctaagtacaggcccagcatgcctgttctatctgttgtcattcctcgtctaaagacaaaccaactgaagtggagtttcacaggtgcttttgaggcaagacaatcactcatagttagaggcctcttccctatgcttgctgatccacgacacccagctgaatctaccagtgctacaaatgagtctgtgttgaaggttgctcttgaccatggcaaagcctcgggcgtgatcaagtcccacgaccgcgtcgtcgtttgccagaaagtgggtgattcctctgtggtgaagatcattgagctggatgattagacaatcaggctatgctgttgtctactagggcacgtttttgccaatttttttgcctaggccgaaacttattggctatgtataatcctatagcgcttgaaaactgagcagtttttcctatggtgccatcataggatttgcttttacagttccaattatggtgtagttcgaaatttgctcgactaaactgcggtgtaacagttaaatgggcagatggaataatgtaatcatactgttccctcgttaggttgtcacttgaattgatgatctggcctttttttttttggct

SEQ ID NO: 261761 - DNA, 1659 bp, Zea mays
cctcacgcgtccggagagagagctcacctgagcctttcccaagttgtttctcttctcttgctccgcaaaccagcgcaagcccttccctgacagcggcggcgacatggtgctcgaggcgacgatgatctgcatagacaactcggagtggatgcggaacggcgactacgccccgtcgcggttccaggcgcaggccgatgccgtcaacctcatatgcggtgccaagacccagtcgaacccggagaacacagtaggcgtgatgacgatggccgggaagggcgtccgcgtgcttgtcactcccaccagcgacctcgggaagattctcgcctgtatgcacgggttggaagttggtgctgaggcaaacttggctgcggcaatccaggttgctcagcttgcgctaaagcatcgccagaacaagaggcagcagcagaggattatagctttcattggaagtcctgtgaagtacgacaagaaagttttggagaccattgggaagaagctgaaaaagaacaatgttgctcttgacattgttgactttggtgaatccgatgatgaaaaacctgagaaactggaagcattgattgctgctgttaacagcagtgatagcagtcacattgttcatgtccctcctggtgaaaatgccctctctgatgtcctcctaagcactcctatatttactggtgaagaaggtggaagcggttttgctgcttccgcagcagctgccgtagctactggagcatctggatttgaatttggtgtggacccaaatgtagatccagagttggcactcgccctgcggttgtctatggaagaagaacgagcaaggcaagaggctattgcaaaaaaggctgcagaagatacatctaataccgaaaatatcaatgcctcaagctcaaacagcgattctgttatggctgaagcagaacttgcctcaaatgctgctgctggtgacaagcaagaacagccaaaggatgatgacgatctactacagcaggcacttgcaatgtcaatggagggtggtgcttcaggatctgcagctgtgactgactccgctatggcagaagctggtgcagttgaccctgacttagcgttggctcttcaaatgtctgtccaggatgcaaacatgtccagtgacactgatatgagtaaggtgtttgaagacagaacgtttgtgtcatctatccttaattcgcttcctggtgttgatcccaatgatccatctgttaaagatttgctggcatcattgcacagccagggagagcaagagaagaaggaagacaagtcagacaaaacagaagacgagaagaactgatgtagccatgttcatgcttccatgctcacaaagaaattgaacattggtctgcattggctgcgcttactctcttggctatgaaatttgcttatcctcatgtaacagtgctttgtttataacttaatgccgagggaatttgtattgtgactgcaacaatcttctcgtcataaatgttcaagtgatttcgtgtttcaagctctccggaaaaaaaaaaaaaaaaaaaaaaaaaaaaaaaaaaaaaaaaaaaaaaaaaaaaaaaaaaaaaaaaaaaaaaaaaaaaaaaaaaaaaaaaaaaaaaaaaaaaaaaaaaaaaaaaaaaaaagggggccccccactagtgaaccccatcc

SEQ ID NO: 261762 - DNA, 659 bp, Zea mays
tatgttccctaatcaaaatgcgatcagtatattgctgatgcttacatgatgtcagttgcatggccatacaagaaagtaatagtctatatcttatcttgtttatgtttagatttatatgagccatcaacttaatgatgattaaccttgattgcaccagctgaagttggtgcataaggctgcaacaccgtctagtggagggtgttctggacaaagaaagcttgtaccttaaaacaggaggatacaagaagctggagtggttgtctgaaggcttttgaactgcttgaagcattagtgtagctttggtgcttttgtgactgatcagctctggagcagctagagtgatgtagttgtgggcttttgaacaatagctggagtaatatgaaacattagtgatgtagttgtgggcttttgaactgcttcaagctggagtgatgtcgctgtggtgcttttgtgactgatcatctctggagcttttgtgaatgatctagctagctatctgtaaatgatctagttgtgaatgatattataattgtgatgcttttgtgaatatataattgtggtgcttttgtgtttatgtgatggatctatgcctgtggtaaactgattaattgtgtatgtctttatgattcgtgtataaaaatctgtgatttgtggtgctt

SEQ ID NO: 261763 - DNA, 476 bp, Zea mays
cgctgatagttagaggcctctttccgatgcttgcagatcctcggcatccagccgaatcaaccagtaatacaaatgagtcagttctgaaggttgctctagaccatggcaaggcatgtggtgtgatcaagtcccatgaccgtgttgtcgtttgccagaaggtgggagattcatcggttgtgaagatcattgagctggacgactagggcatactttgccgattttttttttgacgaggccggaatttgttggctatatgtataatcctatagctttctttacaaatgagcagtttttccctatggtgccatcataggacttgcttagcgatttaaaactcgattatgtgccacctaaaatgggcagatggaacaatgaaatcatactgtgccctttatccgttgctatggttaacctgagcccgtttgtgttaaaaaaaaaacaaaaaaaaaaaaaaaaaaaaaaaaaaaatataaaaa

SEQ ID NO: 261764 - DNA, 641 bp, Zea mays
acgccgcgtttcttgggcggacgcgtgggcggaagcctcggctggcgaggagctcccccacgcagccgctgctctctccacgtcctctgttccttcccctccccgatctcccccaatccgaccaaaccggcagagccggggggcggcgatggcgctgcgacgggcgctcctcagatcggcagagatctctttcgaacgcaaggctgcaattgagtacattcattctttatcaagggcacagcctgctcgttctctcaatggtgctggcctttgtcctgctagtagatcacttagcacccaggccgccactacgtcaagcacaccacaacctccgcctcccccaccccctccagagaagactcactttggtggcctcaaagacgaggatcgcattttcaccaacctctatggtctgcatgacccttttctgaaaggcgcgatgaagagaggtgactggtataggaccaaggatttggtgatcaagggggcagactggatagttaatgaaatgaagaaatcaggtcttcggggtcgtggaggtgcaggttttccttctggtctcaaatggtcctttatgcccaaggtttctgatggacgcccttcttatcttgtgtgtaatgctgatgagagtgagcctggaa

SEQ ID NO: 261765 - DNA, 1161 bp, Zea mays
ttccgcctcctgcttcctctccctcagccgccacccactctctcctcttccctctctctgcaccgacttctgcggcggcggcggcgccatgggcccggcgggctcggccgccgtcctgtcctacggggacaccgtgacgcagctccacatcgtgggcgccgcgggcgcgggcgcgccgcctctgcccaggaacttctccatcggggtcgtggtcacgacgctgtccaggctccccgacctcaaggtgctcacgctgtccgggctcgggctctggggcccgctgccgggcaagctcggccgcctcgcgtcgctggagatcgtcaacatgagcggcaactatctcttcggcgaggtcccgcggggcgtgtcgcgcctcgccggtctccagacactggtcctcgacgacaacatgctgggcggtgaggtgccgacctggatcggcgcccagccgtcgctggccgtcctgagcctgcggaacaacacgttccagggcgtcgtgccggagtccctgggaagcgccccctcgctgcggtcgctcgttctcgcgtccaacaacctgtccgggaacctgccggacatgagccagcaggccaacctccaggtgctcgacgtcggcggcaactcgctcgagccggcgttccccaagctcgggaggaaggtggtcaccgtggtcctggctaggaaccggttcgtcgccttcctccagaacccgcagctcgtgcaggagttcaggcccgacaaacagtacaacatccacatgctccaggagcgatatcagatcggtcctgaccagattgaagctctgtatcagtgtgccaaatttcagtttgagtgtggtaactactcaggagcagctagagtgatgtagttgtgggcttttgaacaatagctggagtgattatgaaacattagtgatgtagttgtgggcttttgaactgcttcaagctggagtgatgtcgttgtggtgcttttgtgactgatctagtcgtgaatgatattataattgtgaaaaaaaaaaatgaaatgaactaaaacatacacctgtataatacattaaaaatgaacactattaatttaaaggactaagaaattgaaactaagaattaggtactgtgaaactaagagtttggtaccgaaaaaaaaagggggtgactttttaag

SEQ ID NO: 261766 - DNA, 959 bp, Zea mays
atgtagtaattcatgaagttattgttccttatgttcatggagtttgttctgctaggtttttatgcttttaatttctatttccttaacgaaacctcaggcaccttaaagacagcttggatgattggtttcatgaacagctagagaacttggatgatgattatcttgtgtttgattgccctaatatattctcaaatcatcttttcatgctttagttgtttcttaatagttgcacagtttcatctcactcatattcttgccacttacatgtatgtgacaaaacagacaatccgtcttttttattgcttatggcgttgtgcattatacatgtccaccaattatatacaaataccatttgtgggttacctctggtgtgtttacgtgctcctcagattcctgacattttttctgtctttaaatgtcatatcactattaaaaaattgatttttgttgtctaaaataccacaactacttttctaggtgcgagctgcaatcaaagttaaggctagttagtcatcacctcgcctcgcgcgcttctggccaggctgctaagggtgttctggacaaagaaagcttgtaccttaaaacatgaggatacaagaagctggagtggttgtctgaaggcttttgaactgcttgaagcattagtgtagctttggtgcttttgtgactgatcagctctggagcagctagagtgatgtagttgtgggcttttgaacaatagctggagtgatatgaaacattaatgatgtagttgtgggcttttgaactgcttcaagctggagtgatgtcgatgtggtgcttttgtgactgttcatctctggagcttttgtgaatgatctagctagctatctgtaaatggtctaattgtgaatgatattataattgtgatgcttttgtgaatatataattgtggtgcttttgtgtttaaaaaaaaacccacgcgtccgcggacgagtgag

SEQ ID NO: 261767 - DNA, 1083 bp, Zea mays
cgggccgacggacgcgtgcgccagaccctcgaacccgagaggaaccctaatcctagccgcacgcgggaggcagctaagagagcttgaagcaccagccatggcggagcacgacctcacggcgctgatggcggcgcactggaccggcacctggtcttcccgctgctggagttcctccaggagcggcagctctactcggagccggagatcctggaggccaagatccgcctcctcagcggcaccaacatggtcgactacgccatggacatccacaagtccctctacggcaccgacgacgtgcccgaggacatggtgaagcgccgcgccgaggtcgtctccaggctcaggtcgctcgaggaggccgcagccccgctcgtcgccttcctccagaacccgcagctcgtgcaggagttcaggcccgacaaacagtacaacatccacatgctccaggagcgataccagattggtcctgaccagattgaagctctgtatcagtatgccaaatttcagtttgagtgtggtaactactcctgggctgctgagtacctgtaccagtatcgtgctttgtgcacagatactgagcgaagtgtgagtgccctctggggaaagctggcagcagaaatcctaatgcagaactgggacgtagctttggaggaactcaaccgcttgaaggaaataattgattcaaagaacttctcatcacctctgaatcagctccagaacaggatatggctgatgcattgggctctgttcatcttctttaaccatgaaaatggtagaaatgggatcattgatctgttcttccaggacaggtacttgaatgctatacagacaaatgcacaccatcttattaggtatctagctactgcagttgttgtcaacaaaaggagaaggaatatgcttaaagagttgattaaggtcattcaacaggagcaccatagctacaaggatcccgtaactgaatttctggaatgcttatatgttaactatgattttgatggtgctcaacagaaactcatagagtgtgagcaggtaactttgaggttgtttttcctgcaattttcaaggcctcaattttgttattca

SEQ ID NO: 261768 - DNA, 422 bp, Zea mays
agctcgggaggaaggtggtcaccgtggtcctggctaggaaccggttcgtcgccttcctccagaacccgcagctcgtgcaggagttcaggcccgacaaacagtacaacatccacatgctccaggagcgatatcagatcggtcctgaccagattgaagctctgtatcagtgtgccaaatttcagtttgagtgtggtaactactcaggagcagctagagtgatgtagttgtgggcttttgaacaatagctggagtaatatgaaacattagtgatgtagttgtgggcttttgaactgcttcaagctggagtgatgtcgttgtggtgcttttgtgactgatcatctctggagcttttgtgaatgatctagctagctatctataaatgatctagttgtgaatgatattataattgtgatgcttttgtg

SEQ ID NO: 261769 - DNA, 1860 bp, Zea mays
gtgttcttgtgaggagaaatcccatgatttgggggaagacgaagtccaagcacatcccccgccaatcgctcgatgaaaaatctaaaccaaaaccctcagcgttttcaagggttccggagggattttatgttggtaagttacatttgcattacgctttgatgattgctgtacaaggatgatatggcctcccgcccaaagctgtctggtattcagaagcaggttttggcgctgtataggggattccttcggacagcacgccttaaggcccctggagaacgccgcaggatcgagtctggtatcttggcagagttccgtgacaacgcaaggagtgttgaccttaggaactttgtacacatagagtacttgttgaggagagggaagaagcatcttgagcagctcaagaatcctgatattactggactcgctacccttggtagtaaagaaatgaggggttgtgacttgtatattgtcaaggatcacttggatgtggtaaatgctatactggacactgatgatagctgcataaggattgtgcggaaaaacgggaagacatccctacatactgctgcaaggattggataccatcgtattgtcaaggcactcatagagagggatcctccaggatttgttcccatcaaggataggaagggacaaactgcacttcacatggctgtgaaaggcaagaacacagatgtagtggaagaggtactgatggctgatgtttccattctcaatgtgcgggacaagaagggaaatactgctttgcacatagctacacggaaatggaggccccagatggtacaacttcttcttagctacgaatcacttgaaattaatgctatcaatattcaaaatgaaacagctatggatttggctgacaaagttccttatggtgagtctaaaacggaaataatagagtggttgacagaggctggtgcaaagaatgccagaaatgtggggaaaattgatgaggcatcagaactgaggagaactgtgagtgatatcaagcacaatgttcaggcacagcttagcgagaatgctaagaccaataaacgagtgactgggattcgcaaagaattgcagaaactgcatagagaagctattcagaacaccatcaattcagtcaccatggtagcaaccctgattgcctccattgccttcgttgccatattcaatttgccaggtcaatacttccaagatgtgaatagcgggggagacattggtgaggctcaaatagccaagcttactggttttcgtgtcttctgccttctgaatgcaactgctctcttcatttccctcgcggtggtcgtcgtgcagatcaccttggttgcctgggaaactggtgcccagaagcaagttatcaagatcgtgaataagctcatgtggaccgcatgccttagcacaggtgcggcttttatctcactggcatatgttgtagttggcccgcagcatgcctggatggccttcacagtatcagccatcggaggtccgatcatgattggaaccctcctgttcctagcctatctgctgttgcgcccacggttcaagttcggcgaagacagacagcgccgcatcaagagggcaagcggcagcaaatccttctcctggtcaatccatgatgggttttcagatctggaagccttctctgatcatgagaagaggatctatgccctgtagcagggtgtaacagtaattactcctccctgacaagaggcaactgggagagtgcaaatggttcatgtatatatttggtttagccgttttagcctagccgctgttagacctttctccccatgtacaatatctaataatgaagagctgcagctattgtaaagtgcaagtaaaaaaaaaaaaaagaaa

SEQ ID NO: 261770 - DNA, 599 bp, Zea mays
cggacgcgtgggtgtgaatccttccccaaagtttgcttggccattgactccatccgcctggttggtaaaggaagccctgccaaagaaccgctggtgatggcatggctgggatctgtcttcacaatgctggtggctctgatactcccatgcgcgtgctacctctccatcaagaagggtgcagtgccattgtgggagatcatcctgtgcatagtcatcataatgatcggcgccgtatgtgcatgcgtgggatcatacacctcagtcagccagatgattagcagcaccaaatagcgcacgctagctgatatttatctagtgtctacggatccttccaaatgctttgacagagttggaactggcagcttttcgtagctaagtttatttgttccttctttatggcagaaatttggtaagagagagtttagttgtgggaggacaggcggcgaaggagtaatctgagtttagtgtggtgcttttgtgactgatcatctctggagcttttgtgaatgatctagctagctatctgtaaatgatctagttgtgaatgatattataattgtcatgcttttgtgaatatataattgtggtgcttatgtatt

SEQ ID NO: 261771 - DNA, 681 bp, Zea mays
cccacgcgtccgcgcggcgtggtatcgctttcgcgtctgcgtgcgtgcgtgtgctggcaggcaggcggctggcctccgtccgcgcatcctcttctggcgaggagctcccccacgcagccgctgctctctccacgtcctctgttccttcccctccccgatctcccccaatccgaccaaaccggcagagccggggggcggcgatggcgctgcgacgggcgctcctcagatcggcagagatctctttcgaacgcaaggctgcaattgagtacattcattctttatcaagggcacagcctgctcgttctctcaatggtgctggcctttgtcctgctagtagatcacttagcacccaggccgccactacgtcaagcacaccacagcctccgccttccccaccccctccagagaagactcactttggtggcctcaaagacgaggatcgcattttcaccaacctctatggtctgcatgaccctttcctgaaaggcgcgatgaagagaggtgactggtataggaccaaggatttggtgatccaggggtcagcactggaaagctcccgctatggagactacggtcttagggcactggaggtgcaggttttccttctggtctcaaatggtcctttatgcccaaggtttcagatggacgcccttcttatcttgtcgttaatgctgatgagag

SEQ ID NO: 261772 - DNA, 848 bp, Zea mays
ccgacgcgtccgcagacaaatgcacactatcttattaggtatctagctactgcagttggtgtcaacaaaaggagaaggaatatgcttaaagagttgattaaggtcattcaacaggagcaccatagctacaaggatcccgtaactgaatttctggaatgcttatatgttaactatgattttgatggtgctcaacagaaactcatagagtgtgagcaggttatactgaatgatccattcctgggaaagcgcattgaagagggaaattttgtcagtgttcctttgagagatgagttccttgaaaatgctaggctttttattttcgagacatactgccgtatccatcggtgcatcgatatcagcatgcttgctcagaagttgaacatgagctacgatgaggccgagttgtggatcatgaacttggttaggagctcaaaactggatgcaaggatcgattcagtgtcaggaactcttatcatgacaaccaatcacatcaatgtgcatgagcagattatcgagagcatgaagggccttaacatgcggacctacatgctcgcaaagaacatcgtggagccagctcagcaggcagctcggtgaggttagcggagtacagttttgaggcgccaagaactagtttagaggtagaggtctattgtgtggcagtgaattcgtcaccgggattgaacacatgggactgggaggtggcttgccgtttggtacagcttagtatgctgacattttcaatattttgtactcggaatttcgtaacagtttatccttctcaatgtatattactattgatgcctgtttggatcacattaattgaaacaaatatctagaaattgtttctc

SEQ ID NO: 261773 - DNA, 786 bp, Zea mays
gggaagacgaagtccaagcacaacccccgccaatcgctcgatgaaaaatctaaaccaaaaccctcagcgttttcaagggttccggagggattttatgttggtaagctttgatgctaagttccaatgtccaaggatggtatggcctcctacagccgcggaagcgttttgttgttacctgtcactgcttcagccgttgactgcctattgctttcgttattagtgaggctttcgcaggaagtgcaggcagccggccgtcgacaccaagcaagccttgcgcttatggcagccgtggtgctcggtcttatcaccagtggtgtcgttagatgccaaatgcagggtgctcggcacggggattttgctttctggtgtctgtcccgttggaaccggggagttcctgagtgacgaacagacttcccatggcagctattctgttgaggatgtgcgaaaggtgcactgcagagtctgagaagtgagagaaataaatgacaagtgctgtttaccgctcacccaattttaaccaatgccacggtgatacgattatctctgctaaagggataattgtttcaactaaaccaagcaccacagttggaggtcaaatccttggaaggcaatattgtgaagttattgtaacttgtgtgctaaaacgagattcagttttgcctcgccctggagtgatgtcgctgtggtgcttttgtgactgatcatctctggaagcttttgtgaatgatctagctagatatctgtaaatgatctagttgtgaatgatattataattgtgatgctttt

SEQ ID NO: 261774 - DNA, 649 bp, Zea mays
gttgtacccgttcaatggcgagctggtggcagcgatgtaggagatgatccatgccgaggtgcacaagtacatgttagtggacggcacctgccaaagatacaccgtttctactggtgcgagctgcaatcaaagttaaggcattagtcatcatttgcttcacctcttctggacaggctgcaagggtgttctggacaaagaaagcttgtaccttaaaacaagataaaagctagaccctgtggacgagtgagacttgttcgacatgccccgtgcctactatcactctcgatttgaagaagagtctcaagattctgcaggtgttgtgttactcctaattcagttaccttactggcaataggatgccattgcaacatctgaaagtgcaaccatctgattgaagcggatttaattatacaagatagatctagaattgctttacttgagattcaagcaatgttggatgcttttgtgactgatcatctctggagcttttgtgaatgatctagctagctatctgtaaatgatcttgttgtgaatgatattataattgtgatgttttttgtgaatatataattgtggtgcttttgtgtttatgtgatggatctatgactgtggtatactgattaattgtgtatgtctttatgatttgtgt

SEQ ID NO: 261775 - DNA, 503 bp, Zea mays
cccacgcgtccgcaattttgttatccacgtgtgtgcttcttgaattatggaaaagcctgaaagacaacacatccttttttgtgtgtgcaaaacatccttctgtgaaatgatcctcaaccatcaattcttttaaatgttccctagtaaaatgatttattcttgatggttcaaaagtttccctattccttggatgtatcatatgcatcggggatgtcatattgaagaatcagtataataatatggactatttggaggggtctttaaatgagcttggaagttggtgcataaggctgcaacaccgtctagtggagggtgttttggaccaaagaaagcttgtaccttaaaacaggaggatacaagaagctggagtggttgtctgaaggcttttgaactgcttgaagcattagtgtagctttcgtgcttttgtgactgatcaactctggagcagctagagtgatgtagttgtgggcttttgaacaatagctggagtgatatggaatatt

SEQ ID NO: 261776 - DNA, 879 bp, Zea mays
tctacgcgtccgcccacgcgtccgcccacgcgtgcggccgccactccttctccctccccctttctctctcttctctctctaccgccccaggccccccgatctcctcctcccactccgatcgcccgaccgatcgccgagcttccctgttccctccccgcccccgcgacgccatggagccgccgcacgccgagcaggccgtcgccgtcgcacgctgagcaggccgtcgccgctgtagcagcaggaggagagggtggcactgcaagcccgggcaccggcctcgaaggtgctgtctgcttaacgttttttgtttcgttcagatctatggccggacgaggcggactgtggctactacctccgcacgacgctgcgacgggcgctcctcagatcggcagagacctctttcgaacgcaagccgggagattcggaatcccgcgcgcgagttgggcctggccagcagataatcgaattgctttgccgtggaaacaggagaaggctgcaattgagtatattcattctttatcaagggcacagcctgctcgttctctcaatggtgctggcctttgtcctgctagtagatcacttagcacccaggccgccactacgtcaagcacaccacagttgaaagcaccccccacgtcaagcagccaggcccccactacgttaagcaaaacagaagccgagaagaactgatgtagccatgttcatgcttcccctgttgaaatgcatattcagcatagcttacttagttcctatctgctgtttcaacgttgatttaaaaaaagagctggtagttgtgagccatctgtaaatgatctagttgtgaatgatattataattgtgatgcttttgtgaataaataattgtggtgcttttgtgttt

SEQ ID NO: 261777 - DNA, 933 bp, Zea mays
aattcccggtcgagcacgcgttcgcggacgcgtgggcaaaaagtcctagtttactatttttggatacattgttgataaaccctcggtgtaaacacatagttgggcgctcgctgttctgctgtccaaacacatgtctactggctgaaaatagctcattttggaggtacatttgcatcaagctttgatgattgctggacaaggatgatatgggcctcccgcccaaagctgtctgggattcagaagcaggttttggcgctgtacaggggattccttcggacagcacgccttaaggcccctgaagaacgccgcaggatcgagtctgttatcttggcagagttccgtgacaacgcaaggagtgttgaccgtaggaactttgtacacatagagtacttgttgaggagagggaagaagcatcttgagcagctcaagaatcctgatattactggactcgctacccttgtagtaaagaaatgagcaagagaagaaggaagactagtcagacaaaatagaagacgagaagaactgatgtagccatgttcatgcttccatgtaatagttcattattccatacatatttctgtctatccagaatctactattgaaatacatatctagcatagcttgctcagctcctatatgttgtttcaacgttgatttaaaagaagagctggtagttgtgggcttttgaacaatagctggagtgatatgaaatattagtgatgtagttgtgggcttttaaactgcttcaagctggagtgatgtcgctgtggtgcttttgtgactgatcatctctagagcttttgtgaatgatctagctagctatctgtaaatgatctagttgtgaatgatattataattgtgatgcttttgtgaataaataattgtggtgcttttgtgtttatgtgatggatctatgactgtggccccctgttt

SEQ ID NO: 261778 - DNA, 689 bp, Zea mays
  unsure (1)..(689): unsure at all n locations
atttttatttttcaatatcaatttagggaccatcttggaatatcaattttataaaattttataaatcaatatcagctcggtggccccagggtgagccttgctcttcagatgcaaattttctcgccggttttgggccaccagcatgttcttacctagtttcttgccatatcagttgccacgccaaagcaaatcagggagctgatgaaggtgaacggcctgacaaacgacgaagtgaaaagccatcttcaggtgagctatgtaattgacccaaaaggcacttcaagcgggcaggaaagtctaaggcccttacttagtacttccaaatttatatgagccatcaacttaatgatgattaaccttgattgcaccagctgaagttggtgcataaggctgcaacaccgtctagtggagggtgttctggacaaagaaagctngtaccttaaaataggaagactgtgaccacatgctggagtgacgattgtactacagcaggcacttgcaatgtcaatggagggtggtgcttcaggatctgcagctgtgactgactctgctatggcagaagctagtgcagttgaccctgacttagcgttggcaagagaagaaggaagacaagtaagacaaaacagaagacgagaagaactgcttcaagctggagtgatgtcgctgtggtgcttttgtgactgatcatc

SEQ ID NO: 261779 - DNA, 430 bp, Zea mays
  unsure (1)..(430): unsure at all n locations
cccacgcgtccgcccacgcgtccgcggacgcgtggtccgttccttcccctccccgatctccccaatccgaccagaccggcaggcaccttcgactcgagcggagcaggcgaggcagagatggcgctgcgacgggcgctcctcagatcggtcaacttctcccccgacagcaaggctgcaattgagtacttttattctttctcaagggcacagtctgcttgttctctcaatggtgctggtctttgtcctgctagtagatcatttagcacccaggctgccactacgtcaagcacaccacagcctccacctccaccaccccctccagagaagactcactntggtggtctcaaagatgaggatcgcattttcaccaacctctatggtctgcatgacccttttctgaaaggcgcggtgaagagaggtgactggtata

SEQ ID NO: 261780 - DNA, 479 bp, Zea mays
atcggtgcatcgatatcagcatgcttgctcagaagttgaacataagctacgatgaggccgagttgtggatcatgaatttggttagaagctcaaaactggatgccaggatcgattcagtatcaggaactctcatcatgacaaccaatcacgtcaatgtccatgagcagattgttgagagcttgaagggccttaatatgaggacctacatgctcgcaaagaacatcgttgagccagctcagcaggcaactcggtgaggatagcagacttcacagttttgagacgccaaggactagtttagagacaactgtaaacttttcgagctctattgtgtggcattggatttcaacacctggaaggtggcttgccgtttgatacagcttggagtattatgctgacattttcaatattttgtaatcggaacttcgtaacagtggatccttctcaatgtattgctattattttatgctgacattttcaac

SEQ ID NO: 261781 - DNA, 754 bp, Zea mays
caaagtgtgtgcttatggttcctgagtcagatgatcttttcttcagcttttagaacacacctctccatctttcggtgctaggtggatcaccgtctaaacaatccaccaccagaaccgccctaccccaagatagctccatctcagtcgttgtacccattcaatggcgagctggtggcagcgatgtaggagatgatccatgacgaggtgcacaagtacatgttagtggacgacacctgccaaagatacacaatttctactggtacacattttattttttcatgtttttcagttggagaaaacatttaagacaatattttctcgtttgttctccatatggggcttgttccacgccacttgaaggaagaagggaatggtggtgttaagttcggacaatacatctacacatcttggagcatcggcatcaatgttttcaatcttctcaaatttcaaattattctggtctcttcgtgcaaccataaaagtttattaagtcacttatctgagtggtctaaaagtctagcatatttttgttcctctgcctgtcgagacggatcaactgacatgaataatatccagtgaatactgcaagagctattcatgatctgccgtgaactagctagtatgatataactcagtttgtggagtgctaatgcacaaacaggaaataggatgatacttcatgtatatttttttatttcatgaaaatgaactataggatactgttcacaatccataccaagcttctgcagttatc

SEQ ID NO: 261782 - DNA, 769 bp, Zea mays
cccacgcgtccgcccacgcgtccgcccacgcgtccggttcgagcggtcgagcctggtgacctgatccctgtgctggtcaaccgagtccgaaccgcgtcggtcggaccgtctcacgacgacgaaggttcgcgaatcccctccttccttcggcctcgccttcttattttgtccgccggacaagccagtagtggctacatcgcgaagggcggcaaggcagatctagggcgatcatggcttacgtcgagagaggtgttgtgaaagacaaacggactatatggcgactgagcataatctcagacttcttctgggccattgtgagctttatcagaatcttctttgacacactgttctcattggacaaaactgacaacttcaagaaagggtatggtgctggtaagaagtgggatggtggacctggtggtggtgggcggggcccatatggcggtggaggaggtggaggattcggcggcggaggtggaggtggttcacggggtcctcgcactctatctgacatccaatccaatgaccacagttctctccctgcttgtggatcctgctgtggctaataagcgtgcaaccgttccgcctgatgactacgtataacagatgaatacacatgcttctgtatgttctgaagaacatcgtagctattgatatgtattttactgtcagacgattgtatcataatcgatatgtcgtttattaacagcctatttacctgtagcttgactctggcatgattcgcatggtacattcatggttcatcttt

SEQ ID NO: 261783 - DNA, 486 bp, Zea mays
tcgcgcgcatcgcatccaccgccgagctttctttctttctttcttttttctgggagaagaggaagaagaggggaggcgcgacaaaaagggcgccgcgcccccgcatcgcccccgacgccggcatctctccctcgctctccttctcccgatctgatccgaagcgcggcgtcgacgacgacgacctaagggcacgatgcattcgaccaacctgctgctggaggagcccatccggatggcctccatcctggagccatccaagaccagcttcttcccggcgatgaccaagatcgtcggcacgctcggccccaagtcgcgctccgtcgacaccatctcctcctgcctcaaggccggcatgtccgtcgcgcggttcgatttctcgtggggagacgccgcctaccaccaggagacgctcgagaacctcaagctcgccatcaagtccaccaaggagctgtgcgctgttatgcttgacacggttggaccggagct

SEQ ID NO: 261784 - DNA, 609 bp, Zea mays
gggcgaacgcgccaccgccttacgccagccgccaggcgctctccgctcaggttttcatcttcgggtgcccttcaccggcgaccagcacccaacaggctttgatgattgctgtacaagcgacgatatggcctcccgcccaaagctgtctggtattcagaagcaggttttggcgctgtacaggggattccttcggacagcacgccttaaggcccctgaagagcgccgcaggatcgagtctgttgtcttggcagagttccgtgacaaggcaaggagggttgaccgtagtaactttatacatatcgagtacttgttgaggagtgggaagaagcagcttgagcagctcaagaatcctggtattactggacttgctacccttgtagtaaagaaatgaggtacatagttttcaaaaacacttacacatttgacttcacatggtcttcgatgcatatctttgacaactagtttgttctagcatacatttattaaaaacttctcatttttttaataatttcatagctgccaaacaaggcttatttatttatttctgattaagactagaccatgcgtttgtaacagccatgtctagtgcttttctctgggggatggtaa

SEQ ID NO: 261785 - DNA, 446 bp, Zea mays
tgatgcattgggctctgttcatcttctttaaccatatcaggtacttgaatgctatacagacaaatgcacaccatcttattaggtatctagctactgcagttgttgtcaacaaaaggagaaggaatatgcttaaagagttgattaaggtcattcaacaggagcaccatagctacaaggatcccgtaactgaatttttggaatgcttatatgttaactatgtagttgtgggcttttgaacaatagctggagtgatatgaaacattagtgatgtagttgtgggcttttgaactgcttcaagcaggagtgatgccgttgtggtgcttttgtgactgatcatctctggagcttttgtgaatgatctagctagctatctataaatgatctagttgtgaatgatattataattgtgatgcttttgtgaatatataattgtggtgcttttgtgt

SEQ ID NO: 261786 - DNA, 689 bp, Zea mays
  unsure (1)..(689): unsure at all n locations
cccacncntccggaccttttgaaaaatcttaatcataaaaatattgtcaagtatttgggatcattgaagacaaagagccacctccatattattttggagtatgtggagaatggctcacttgctaatattatcaagccaaacaaattcggaccttttcctgaatctttggtggctgtatacattgctcaggtgttggaaggtcttgtttatctgcatgaacaaggtgtcattcatagagatatcaagggcgcaaatatactgactaccaaagtgggccttgtcaaacttgctgactttgggagttgccactaaattgactgaagctgacatcaacactcattctgtggtcggcactccatactggatggcgcctgaggtcatcgaaatgtccggcgtttgcgctgcttctgatatctggagtgtgggttgcactgtaattgagttgctgacatgtgccccgccatattatgatctccaacctatgcctgcactgttccgtattgttcaggatgtgcatccaccaataccagaaggactgtcacctgaggatactgattttctccaacagtgtttccaaaaggatgcgatgcaaaggcctgatgcaaaagcattattgatgcatacatggttgcaaaacttatgacgagctttgcctggttctcttcgaaacctactccattgaggaacat

SEQ ID NO: 261787 - DNA, 1038 bp, Zea mays
tccacgcgtccgcccacgcgtccgcccacgcgtccgcttctccattgtttctctagactttgaggtatttgccatcgtgttattcatcatgtaagcttaaaatatgacacaaagaaactcctaatattatgttttatttttagactacgcagacaaatagggtagctatgctagatgagatcctggattatgtgaagtttctaaggctttagcctttaggtcaaggttcagctcattgtgctgacatatttgggttattaaccaccaattgggttacttgtttgatcactgatgggtccctgattttgaaaatgttaggttctaagcatgagcaagctgggttatgatggtgttgtggcactgctggttgctgatatatcactttcaatcggtcttgaccagattgaagctctgtatcagtatgcccaatttcagtttgagtgtggtaactactcaggggctgctgattacctttaccagtatggtgctttgtgcacaaacagtgagcgaaatgtgagtgccctctggggaaagctagcagcagaaatcctaatgcagaactgggacctagctttggaggaactcaaccgcttgaaggaaataattgattcaaagaacttctcatcacctctgaatcagctccagaataggatatggctgatgcattgggctctgttcatcttctttaaccatatcaggtacttgaatgctatacagacaaatgcacaccatcttattaggtatctagctactgcagttgttgtcaacaaaaggagaaggaatatgcttaaagagttgattaaggtcattcaacaggagcaccatagctacaaggatcccgtaactgaatttttggaatgcttatatgttaactatgtagttgtgggcttttgaacaatagctggagtgatatgaaaccattagtgatgtagttgtgggcttttgaactgcttcaagcaggagtgatgccgttgtggtgcttttgtgaaaaaaaaaaaatttttaatttataaattaaattttattttaaaaaaaaat

SEQ ID NO: 261788 - DNA, 392 bp, Zea mays
  unsure (1)..(392): unsure at all n locations
aaattggtggagcatttggtggagaaaaaacacctggtggtggacgaaaaccagggagtgattcctggaaccagtacatgaggagggcgacttggagggaggtcctagaggtagtaagtcacttgtttactccatgatgacaatagcaagcagatcgcggtggtgcctatggatgctacaacaagaaagatcaaaagttcttttggatggatgcagctagatattttgttttgtattttctccaaaagagaaatttgcaacgttgtgagtgatattataattgtgatgcttttgtgaatatataattgtggtgcttttgtgtttatgtgatggatctatgacataaaaaaaatatataaattntattttaattttattaaataataaaaatt

SEQ ID NO: 261789 - DNA, 619 bp, Zea mays
agtaaagaaatgaggggttgtgacttgtatattgtcaaggatcacttggatgtggtgaatgctatactggacactgatgatagctgcataaggattgtgcgaaaaaacgggaagacatccctacatactgctgcaaggattggataccatcgtattgtcaaggcactcatagagagggatccaggaattgttccgatcaaggataggaagggacaaactgcacttcacatggctgtgaaaggcaagaacacagatgtagtggaagagttactgatggctgatgtttccattctcaatgtgcgggacaagaagggaaatactgctttgcacatagctacatggaaatgggagaattttgggattatgaaacaccgcagacgtggcttcgacgaaacggaggcgtaggcgagggattcgacattatgaaaaaccagagaagatactacactctaaaatggacatgaatcctctattaccagggaaggatgatgtttattacactgaaacagacgctgtctcacatccgttacccgcactagacgcacccagtctttctacagagagaatcgcgccgttcttgaatctgccattcgctgaatctgccattcgctgctgttgt

SEQ ID NO: 261790 - DNA, 439 bp, Zea mays
gctatggagctggtagattctggagttggcagtaaggcagtgatccacacttgggctttgaagccatggtgctttctctagacggctatcatgtctgtagtgttgttagaataatcctggttctgtgttttcataacttcatcatgctagtgttctgctgtagcggaacacagaatggaacggaacgatattcttgttttactggttgagcactacacgacgattgtttttctagggtgttctggacaaagaaagcttgtaccttaaaacaggaggatacaagaagctggagtggttgtctgaaggcttttgaactgcttgaagcattaggttagctctggagattttgtgaatgatctagctagctatctgtaaatgatctagttgtgaatgatattataattctgatgcttttgtgaatatataattgtgtttgtgt

SEQ ID NO: 261791 - DNA, 618 bp, Zea mays
tcatttagatattggtacagcctgtaatcgactttggtacaataggatttggttttgctgttcacttagtttttagttccaaacaaccatcaaattgcatgtcctttaggaaaaatatcacatgaatatcagtaatataacactgataataaaaaatgcttcgattctatatatttttcatgttataaggttgaaaacattctgtctcacggatcagaatgtgtacaaggcgacatactgtgtttacaaatatatttaaccataataaaaacatctttggaaactgaatatcatttaagtccaaaaatgtttttgctgactgttcattaagctagagtgaagagtaaacttagcatttcttttctatatctctccctcgggctcatgccgccgcagtctcctccatcccacctttcctacgcaggcagctccatctcagtcgttgtacccattcaacggcgagctggtggcagcgatgtaggagatgatccatgacgaggtgcacaagtacatgtttggacgacacctgccaagatacacaatttctactggtacacattttattttttcatggtgagaattaaattcttagcttgcgcaaaaccaaaagtttagtga

SEQ ID NO: 261792 - DNA, 468 bp, Zea mays
gggacgcgtgggatcctggacagaacgtttgtgtcatctatccttaattcgcttcctggtgttgatcccaatgatccatctgttaaagatttgctggcatcgttgcacagccagggagagcaagagaagaaggaagacacgtcagacaaaacagaagacgagaagaactgatgtagccatgttcacgcctccatgcgcacaaagaaattgaagaccggtctgcgtttactctcttggtcgtggagtttgtttatcctcatataaccgtgctttgattataacttaccgccgagggaatttgtattatgacgctgcaacaatcttctctccatatatgttcaagggattttcgtgtttcaatgctctccatatatgatcaacatccctaaagatatctaagcttacatacctcaatttacaacaaaaaaaaggggcgccgctcgcgatctctaagtctagatcgcgagc

SEQ ID NO: 261793 - DNA, 513 bp, Zea mays
agacaagcctggacgcctagtggaggagaaatcccatgatttgggggaagacgaagtccaagcacaacccccgccaatcgctcgatgaaaaatctaaaccaaaaccctcagcgttttcaagggttccggagggattttatgttggtaaggtgttgtgcggtgtgatctccaattccctattgctgttgtcttactccatcatgaccttagggaaggatgttttcctctaaattactcgtaataattatgcttggtgtatgtgttgttttagctacttgatgaaatgttttagttgtgtgcgataatatggttgccgttcgagtggaaagtagatgtgttgtatgacctgagttggagttgaagcaagtatgtgtgtctcgtattacgaaactaattagagatatgcatgatgtttgtagatggattatgtgtagagtgttttagtacaagtatttttttaggtataggtgaaccaattattgtatatgaattgtgcgatattcaggttgttct

SEQ ID NO: 261794 - DNA, 451 bp, Zea mays
  unsure (1)..(451): unsure at all n locations
cggacgcgtggggtctcctaataactagtttctatcttgctccccaaaccagcgcaaaccctgccctgacaccggcagcgacacgtccaccggcggcgccatggtgctcgaggcaacgatgatctgcatagacaattcggaatggatgcggaacggcgactacgctccgtcgcggttccaggcgcaggccgatgccgtcaacctcatctgcggcgccaagacccagtcgaacccggagaacacggtaggcgtgatgacaatggccgggaagggtgttcgcgtgcttgtcactcccaccagcgacctcgggaagattctcgcctgtatgcacgaagttggcgctgaggcaaacttggctgcggcaatccaggttgcccagcttgctctaaagcatcgccagaacaagaggcagcagcagaggattatagctntcattggaagtcctgtgaag

SEQ ID NO: 261795 - DNA, 760 bp, Zea mays
gcgtccggggcagcctagttggacaggttttacaaacctctgcatctccatactaattaaatttgtaccgcaggttagctagatctctacgtcagtgcttgatttgatttgtttaacttcccatggtaaaagttgctcagatcccatgtagttcagctttgttttcttatagatcagttggatgtacttgcttttttgtataaaggattgacggagaggaagcaaaaaatgactgtatgggagaatatgcagaaagctgaagcagaagcagccatacaaaaccttgtgataaaacttgaaaagaaaaggccatactcgctagagaggattttcaacacccttaggtctggctctcggaagaccacaggtggtacgcagtacatcaaccgcaaatcagaatcagcatatttccagaactatcaaaacggcgccaaacctcagcaagaacggtcaaatgagttcattgagtggatgcttcagacaggatctatagcatggatcataatctggattgtccttaagtttttattgtgctaggggaacataagaaagtatgtagagcaaaatgagaggagctgttgttaccctcaattctttgtgattattgtgctagagtgatgtagttgttggcttttgaacaatagctagagtgatatgaaacattagtgatctagttgtgaatgatattataattgtgatgcttttgtgaatatataattatggtgcttttgtgtttatgtgatggatctatccctgtggt

SEQ ID NO: 261796 - DNA, 485 bp, Zea mays
ggccacccggccatgcccaggctcccacccgccaggccgccacccaccccactcggccactcccccaggcggcgaggcgtggcgcccatgccccaacccctgttcgcaggtcgcagcagccgccagcacccagatcccagagtcccagaccatgccgccactgcgccttcttattttgtccgccgaacaagccagtagtggctacatcgcgaagggcggcaaggcagatctagggcgatcatggcttacgtcgagagaggtgttggaaggtctcgtttatctgcatgaacaaggtgtcattcatagagatatcaagggcgcaaatatactgagtaccaaagagggagaatgtaccatgaatcacatgaatttggtggtcatatgttcaacaccctcctagagggtgttctcgacaaagaaagcttgtaccttaaaacaggaggatacaagaagctgaagtggttgtctgaaggcttttgaactgc

SEQ ID NO: 261797 - DNA, 811 bp, Zea mays
cccacgcgtccgccgtgtcctctctctctagtgtcgacgagtgggcgaacgccgccaccgccttacgccagtcgccaggcgctcaggttttcatcttcgggccctttaccgggcgaccagcacccaacaggctttgatgattgctgtacaaggatgatatggcctcccgcccaaagctgtctggtattcagaagcaggttttggcgctgtacaggggattccttcggacagcacgccttaaggcccctgaagaacgccgcaggatcgagtctgttgtctttgcagagttccgtgacaacgcaaggagtgttgaccgtaggaactttgtacacatagagtacttgttgaggagagggaagaagcagcttgagcagctcaagaatcctgatattactggactcgctacccttgtactaaagaaatgaggtccattcattgccagaacaaagtatcatcatgataccggtgtttctaatgtgaagatttggaacctgccactgatggtgtccaaataaaataaatatgaccacagattacagatttgatatccagggactttctaatcagcctattagaatctgaagataaatcttgtagcacctgtccggtgacccatagtaatattattttactcttgctgtaagcagaggttaacactaaaaaaagtattgtgattggtctgaactttttgtgcggtataaagcatgtgattcagctcaacttgacttttccaactttaccgagcatatacaattgtgattaatatagaggctcttaaggtgtttaaataaccaatccaagcatgacaagc

SEQ ID NO: 261798 - DNA, 493 bp, Zea mays
gaattcccgggtcgacccactcgtccgcggactcgtgggatcatgataggtgtgcttgagcttttgatagctagtttattggaactgttatctttttatgatcatggtatattgagacagaaatattttacatgtacctttgcagtttttcagttggagaaaatatttaagacaacattttcatcgtttgttctccatatggggcttgtttcacgccacttgaaggaaggagggaatgatggtgttaagttcggacaatacatctacacatctatgaaatgtacaaccacgatgtagagcatagagtttctaaagttgggtaagctgtttggctgttttatagaaatttgtatcaacatcaacatagatttttagtcccaaacaaattggggtaggctagatttgaaacccaacaagaagtcaccaaaaagagaaagagagataaaggggaggggaaaagcttttgagagaactaaaagagaaaatgcctaat

SEQ ID NO: 261799 - DNA, 719 bp, Zea mays
gctagatagcatccaagacaaatagcgctgttggcgatctgaggcaactggtaagcagtctgggcttgggcgcacgccaggcataaagggaaggctctgaacacgttatattcaaaaggcaagacaacatcttctaaaagcctggtgcgacaagcccacggtagttgccaattgcgtacatgcatttgaacagatctgggctctaaaaactgctaacttggtagcagaaagattgatgcattgcatatcataccactggatcaaagagtttagtgaatggccacaatgcatgttcttgagttggcatcaaagttccttccatataataataacaaaatatttgacataatgaatctgttggaggatagacttcaacatgcaaatggagtcgttgttttggcaacaattaaagtttttctccattcccatgactgttgttcatcaacagcaagagaagaaggaagacaagtcagacaaaacagaagacgagaagaactgatgtagccatgttcatgcttccactgttgaaatgcatattcaacatagcttgctcagctcctatctgttgtttcaacgttgatttaaaagaagagctggtagttgtgggctttcgaacaatagctggaatgatctagctagctatatgtaaatgatctagttgtgaatgatattataactgtgatgcttttgtgaatatataattgtggtgcttttgtgtt

SEQ ID NO: 261800 - DNA, 466 bp, Zea mays
ctcatggcgtcaggctggttgcttcctcaaagcgagcggcgcatcaactatttatctacgtcctggataatcgaattgctttgccgtggaagcaggagaaggaagaatgcaaaacacgtagtgagttcagttgtgacacaagcaccaaactttgatgggtatcagtggagaaagtacgggcagaagtggatctccaaaacaaagcattctaggctgcaattgagtacattcattctttatcaagggcatagcctgctcgttctctcaatggtgctagcctttgtcctgctagtagatcacttagcacccaggccgccactacgtcaagcacaccacagttgaaagcacaccccacgtcaagcagccaggccgccactacgttaagcaaaacagaagacgagaagaactgatgtagccatgttcatgcttccactgttgaaatgcatattcagcatagcttactcag

SEQ ID NO: 261801 - DNA, 351 bp, Zea mays
ccgccgggcagcctccactccttctccctcttctctctcttctctcctccccttgctcttctctggccgccgccacttgcccggacttcctgcagccgagcgcccctgcagctccctgcaccttcatcctgcccgctccagtcgaccgcgcactgggaccagcgcagtgcccagccgagcagcgcgacgcccggtggcgttcatgtgcttctcggactttggccgctggatggtgtactctgcgggatccgcaacctcctactgagctcccgcacagaggggcaggcatgtgaggctttcgcaggaagtgcaggcagccggccgtcgacaccaagcaagccttgcgcttat

SEQ ID NO: 261802 - DNA, 501 bp, Zea mays
ttcggtgctaggtggatcaccgtctaaacaatccaccaccagaaccgccctaccccaagatagctccatctcagtcgttgtacccattcaatggcgagctggtggcagcgatgtaggagatgatccatgacgaggtgcacaagtacatgttagtggacgacacctgccaaagatacacaatttctactgtttttcagttggagaaaacatttaagacaatattttctcgtttgttctccatatggggcttgttccacgccacttgaaggaagaagggaatggtggtgttaagttcggacaatacatctacacatcttggagcatcggcatcaatgttttcaatcttctcaaatttcaaattattctggtctcttcgtgcaaccataaaagtttattaagtcacttatctgagtggtctaaaagtctagcatatttttgttcctctgcctgtcgagacggatcaactgacatgaataatatccagtgaatactgcaagagct

SEQ ID NO: 261803 - DNA, 265 bp, Zea mays
gttggcagtgaggcagtgatccaacttgggctttgaagccatggtgctttctctaggacggctattattcccacagtgttgttagaataatcctggttctgtgttttcataacttcatcatgctagggttctgttgtagcgtaacgcagaatggaacggaacaatattcttgttttactggttgagaaacctgttagttttggactgcagggaaatcttttacttgtatcagacgctgcaagcatggactttttttgtctggaag

SEQ ID NO: 261804 - DNA, 389 bp, Zea mays
atgcggtggtcgtcaaccgagtcccgactgcattgatctgaccgcctttctacgcgcaacgacggagcttctcgaataccctccttccttcggccgcaccttcttattctcccccgaacaagtcttagacgcctaatccgtagtttacatcccgaagggcggcaagggtgatccaggccgaccatggcttacgtcgagagaggatgttgtgatagacaagcggactatatggcgactgggcataatctcagacttctttcgggctattgtcaacttcatcagaatcttctttgacacactgttctcagtggacaaaactgacagctacaacaaaaggtatggggctggtgagaagtgggatggtggacctcgtggtggtggtgggcggg

SEQ ID NO: 261805 - DNA, 257 bp, Zea mays
ggacaagcctggacgcctagtggaggaggagatcccatgatttgggggaagacgaatccaagcacaacccccgccaatcgctcgatgaaaaatctaaaccaaaaccctcagcgttttcaagggttccggagggattttatgttgcaagagaagaaggaagactagtcagacaaaatagaagacgagaagaactgatgtagccatgttcatgcttccatgtaatagttcattattccatacatatttctgtctatcca

SEQ ID NO: 261806 - DNA, 716 bp, Zea mays
gcccgtataagagccccttcctcactccggaaccccattccccgccgcctcgcgcccccgctcgcttcacttctctaggtgcgcaccgatcagaagagatggcggtgccgctgctgacgaagaagatcgtgaagaagcgggtcaagcagttcaagaggccccacctcgaccgctacaagtgccttaagccaagctggcgcaggccaaagggtattgactcccgtgtcaggaggaagttcaagggatgcaccttgatgcccaacattggttatggttctgacaagtcgaccaggcactacctccccaacaagttcaagaagtttgtggtccacaacgtttctgagctggagttgctcatgatgcacaacaggacctactgcgctgaaattgctcacaacgtgtccaccaagaagcgcaaggagatcgtggagcgtgctgcgcagctcgacattgtggtcaccaacaagcttgctaggctccgcagccaggaggacgagtagtctggtttcttgtcttaacgacgaactggatgttgccattcctttctgtaggaaactactttgcttgtgtcttgttagtactgaaaaccagagtcactcctacctttttgcaatcagtagctactaaaatgtggcagattccactatttgccttgcatctatctaaattatatgcgttaaaaaaaaaaaaaaaaaaaaaaaaaaaagggcggccgc

SEQ ID NO: 261807 - DNA, 636 bp, Zea mays
ccctagggttctcacggcgccataagagcctctcctctctccccggccgccgcccgccgcccgctgccgctgcttgcgcctctctcgcccgcatcgccgcagggttcgcaaagatggcagtgccgctgctgacgcagaagatcgtgaagaagcgggtcaagcagttcaagaggccacacctcgaccgctacaagtgcctcaagccaagctggcgtaggcccaagggtatcgactcccgcgtcaggcggaagttcaagggatgcaccttgatgcccaacattggatacggctctgacaagaagaccaggcactaccttcccaacaagttcaagaagtttgtcgttcacaacgtctctgagctggagctgctgttgatgcacaacaggacatactgtgccgagattgcccacaacgtgtccacccggaagcgcaaggagatcgtcgaacgtgctgcgcaactggacatcgtggtcaccaacaagcttgccaggctccgcagccaggaggacgagtgaaatggccaatatttttctctaccattttttatgcttatgttagacttttccaacggacataattctgttataagcggaagaatgatggtgagggccatctagtttttgactggacatcatg

SEQ ID NO: 261808 - DNA, 570 bp, Zea mays
ggataaaagacccgctcctgtcccgcaggcggccgggcgccggcccgcccgcccgcccaccagccgccgccgcaccgccaccgcgcgacctcccttcttcgccgcaaaccgctctgggcgcttgaagatggcggtgccgctgttgactcagaagatcgtgaagaagcgggtcaagcagttcaagaggccccacctcgaccgctacaagtgcctcaagccaagctggcgcaggcccaagggtatcgactcccgtgtcaggcggaagttcaagggatgcaccttgatgcctaacattggatatggctctgacaagaagaccaggcactaccttcccaacaagtttaagaagtttgtcgtgcacaatgtttctgagctggagttgcttatgatgcacaacaggacttactgcgctgagatcgcccacaacgtgtccacccgcaagcgcaaggagattgtggagcgtgctgcgcaactggacatcgtggtcaccaacaagctcgccaggctccgcagccaagaggacgagtgaaatgttgggtagttttgattgtgctctgctggtgttgaaga

SEQ ID NO: 261809 - DNA, 752 bp, Zea mays
agaactatcaactgaccacgcacgcagcgcgtacgcatgcatgcattctatacagatccacccactcgtccgccagcagatcgtccgctagggttggagcccggtaccccgaatcccgctcctccgccgcctcgcgtccacccttcctcttggcgcgctccgatccaagagatggcggtgccgctgctgacaaagaagatcgtgaagaagcgggtcaagcagttcaagaggccccatctcgaccgctataagtgccttaagccaagctggcgcaggccaaagggtattgactcccgtgtcaggaggaagttcaagggatgcaccttgatgcccaacattggttacggctctgacaaatcaaccaggcactacctccccaacaagttcaagaagtttgtggtgcacaatgtctctgagctggagctgctcctgatgcacaacaggacctactgcgctgagattgcccacaacgtgtccacccgcaagcgcaaggagattgtcgagcgtgctgcgcaaatggacatcgtggtcaccaacaagcttgccaggctccgcagccaagaggacgagtgaaatgttgggtagttttgactgtgctctgctcgtgttgaagatgttactgagattgatgttcttctgtaccatttctatgcttatgatagactcttcatatggacaaaattatgctatgagtgaaaagagttatggggagtgccatctagttttgaccggactccatgcagtgtggagcc

SEQ ID NO: 261810 - DNA, 565 bp, Zea mays
ctcgtgggacgacgcaagactctaaactgagtcgtaatacccttcctcagtccggaaccccattccccgccgcctcgcgcccccgctcgcttcacttctctagagatggcggtgccgctgctgacgaagaagatcgtgaagaagcgggtcaagcagttcaagaggccccacctcgaccgctacaagtgccttaagccaagctggcgcaggccaaagggtattgactcccgtgtcaggaggaagttcaagggatgcaccttgatgcccaacattggttatggttctgacaagtcgaccaggcactacctccccaacaagttcaagaagtttgtcgtccacaacgtttctgagctggagttgctcatgatgcacaacaggacctactgcgctgaaatcgctcacaacgtgtccactaagaagcgcaaggaaatcgtggagcgagctgctcagcttgacattgtggtcaccaataagcttgcccgtctccgcagccaggaagatgagtaaactgtttctagcagtagttttggaatggtgcggctttagaggacttgctgtgtatgat

SEQ ID NO: 261811 - DNA, 674 bp, Zea mays
cgcgcccccgctcgcttcacttctctaggtgcgcaccgatcagaaggtgcctgcctcctcctcgtcggcgaaaagatggcggtgccgctgctgacgaagaagatcgtgaagaagcgggtcaagcagttcaagaggccccacctcgaccgctacaagtgccttaagccaagctggcgcaggccaaagggtattgattcccgtgtcaggaggaagttcaagggatgcaccttgatgcccaacattggttatggttctgacaagtcgaccaggcactacctccccaacaagttcaagaagctcgctggccacaacccttctgagctggagttgctcatgatgcacaacaggacctactgcgccgagatcgcccacaacgtttcaaccaagaagcgcaaggagattgttgaacgtgccgcgcagctcgacattgtggtcaccaacaagctcgccaggctccgcagccaggaggatgagtagtctggtttcttgtcataacggccaactagatcctgccattcccggctgtaggaaactactctgctttgtgccttgttggtacttagaataccagtcattttctacatttttggtaccagtagcgacttctatgtggcatattctactgttatcttgcgtcttaattaactgcaactcaagggttcaatggtggtcct

SEQ ID NO: 261812 - DNA, 377 bp, Zea mays
cccacgcgtccgcactaccttcccaacatgttcaagaagtttgtcgttcacaacgtctctgagctggagctgctgttgatgcacaacaggacatactgtgccgagattgcccacaacgtgtccacccggaagcgcaaggagatcgtcgaacgtgctgcgcaactggacatcgtggtcaccaacaagcttgccaggctccgcagccaggaggacgagtgaaatggccattatttccggttgtgatccgctggtgtgcaagatgttgctgagatccgagattcattctctgccattttttttcgcttatgttagacttttccaatggacaaaattctgttataagcggaagagtgatggcgaggaccatctagtttttg

SEQ ID NO: 261813 - DNA, 473 bp, Zea mays
ggttacaataatttttcacatagctgatggaacttctgtttgtgtgaagccaacagatgggccctcctgctaattagaaaccaatttttttagactttttcagcctcctctactgctcatgttgctggcttgtaataggtgggctaggggttatctagagatgacaaggccctcaagttggctttccagcactggatcgaagcgatgagtacaaacgggcagtggggattggtgggttttactgcccattcttgctcttttcatggtacaattatcctgtttttttcctacagtgatgttttattttgtggcaccatctttcgaccataaacaaatacactcactttgatgaatgttgatatactttcagcattcaattgtagatagaattcttgctttcgtgtagatctaggtcatcgtgtcgccgtctatgtttggctggttgtagagcccccgctctaggtttgtttagc

SEQ ID NO: 261814 - DNA, 1308 bp, Zea mays
cggacgcgggggaaggcctgaaaagcaaaaccgtagaagatcactacttcactagctagggttttcctccgtgacgaatggtctatataaaaggtcagaaccgaaaccttaaccttattcggcgactatggcggcggcaccggcaggcggcggccctcgggcattgtcccagcgggagcaggacatccagatgatgctcgccgccgatgtccacctcggcaccaagaactgcgacttccaggtggagcgctacgtgtacaagcgccgcactgatggtatctacattattaaccttggaaagacctgggacaagcttcagttggccgccagggtcatcgttgccattgagaatccgcaggacattatcgtgcagtctgctaggccctatggccagagggctgtcctcaagtttgcgcagtacactggtgcccatgccattgctggcaggcacactcctggtacattcaccaaccagttgcaaacctccttcagtgagccacgccttcttatcctgactgacccgaggactgatcatcagcccattaaggagtctgcgcttggaaacattcccaccatcgccttctgtgatactgattcccctatgcgctatgttgatatcggcattcccgccaataacaaggggaaacagagcattggttgtctgttctggctgctcgcccgaatggtcctccagatgcgcggtacaattcttccaggacacaagtgggacatcatggtagatcttttcttctacagagacccagaggaagcgaagcagctggaggaagaagaggctctggttgcacctgactatggcgcggttgcagaatacactgcaccaggcgctgacaactggggcggtgaatggggtgctggcgaagctgcagctccagctgctagcattccagctgctggcgcagactgggctgctgctccagctcctcctgctgacggtgtctgggacgcagctgtggctccacctccagcagcagcccccggatgggaacaaggcgcggcccccgttgcggcgtcgacccctacctgggagtaattaataaagagtaaatgagcatggtggatggtttatactagtcatcagcggagcttgttggtaggcacttgctggagtagttgcttcgaacttctttttttcgtgttagatgaggtaaaaaaacaattttgtgttattgactctgctgtgagcgagtgaaccttgcacattttcgttatctcaaatggatagatctgttctaaaaaaaaaaaaaaaaaaaaaaaaaaaaaaaaaaaaaaaaaaaaaaagggcggccg

SEQ ID NO: 261815 - DNA, 457 bp, Zea mays
  unsure (1)..(457): unsure at all n locations
ccggnccggaaaaaccggaccgagctagaggacaccaagcttacttacacctgcatgcgaccttctgtgtggcggcggcgacccctacctgggagttgttaataaagagtaaatgagcgtggtggatggcttttactagtcatcagcggagcttgttggtaggcacttgctggagtagttgcttcgaacttctttttacgtgttagatgaggtaaaaaaacaattttgtgttattgactctgctgtgagcgagtgaaccttgcgcattttcgttatctcaaatggatagatctgttttacgcttgttttgtgaactgtaaaaattgttcttattttttatttttttatttttacatctatccctattttttttnttttatatttgtttttcaaattaattaatatcaaaactaaaccaaagtgtgttttttaaaaaaaaaaaaaagggggggctttt

SEQ ID NO: 261816 - DNA, 397 bp, Zea mays
acggtcgccgaagctcgccgagctagccattgccgcctcccggctcgcgactcgcgagtcacaggcgcagcgatgcgttccttggggacgaggctacatcgcgatgtggtggagggcggtgaggcgccggtgggtcgcgacggcgcggcccgcgtcctccgcggcggcgggggcggagaagagctgccgcgccgtggtggtgccgcgtttcggtgggccggaggtgctcgaggtcaggcagggcatgcctgtgcccgatctgaagccgcaggaggtgctcgtgcgcgcacggcctgtctctatcaaccccctggacctccgaatgcgatgtggctatgggcgctccatattcgaaccactcctacctctgatcattggtcgggacattagcggtgaa

SEQ ID NO: 261817 - DNA, 1116 bp, Zea mays
cggctcgagtgtcacactactcagccagcccgctctatctctttcctctatccaagccagaaaggtagaaaccccccggaaacaactcccggccatggcgaccgcagaccgggtcgccgccaccttcctctcctctttccccactcaccatccccgccccttttcctccgtttccctcgtgacaaaccctgtcctacccgtctcccttcgggccgctgtcacaggtggcccacggctcgcctcccgtctccgggtccaccgcgtcggcgccgccgtcgcccagcttcccaccacgaatccggaggtagcttctggggagaagaagatcagatggtcatcaagggctgtgcggtcttttgcgatggcagagctggaggcccggaagatgaggtaccctaccacaggcaccgaggggctcctcatgggcattcttgttgaaggaactagtggcgcagcaaaacttttgcgtgctaatggaaccacacttctcaaagtgcgtgaggaggcagcgaatgttcttgggaaatcagaaatgttttactttagtcccatgcatccaccattgacagaagctgcacaacgagcccttgattgggctgtcaatgaaaaattgaaatcaggtgaggatggagaagtaaccgccaatcatttgctactggggatatggtcagataaagagtcggctggtcataaaatcctgtattcgcttggatttgacgatgagaaagccagtttactggccaaaacggctggtgaagaggctgcaatgagtcttagagagcaaggagagcacctaatttattcgtcaacttaagttggtattgtgcactagcttttatgcacttcttggtgcctcgagacgttgacctggagaggctgcctctacaaactttagaacttattatggagatatgttaggtcagatacgatatttgtactctcacgattgccgatgcctgtgaaaacgttgcgctttgtttgtcacggtgaatgcttgtgttcctttatcagctggatttgggaactgctcgtagaaaacaagtcaacaccaccaaaacttgtagggtccagtgggcctgacgagtccttaaaaaaatttgttcccccccagccttt

SEQ ID NO: 261818 - DNA, 544 bp, Zea mays
cggacgcgtggggcgcgccatcactccactcgatcgaccgcctccgtgtccgtgccctacagctggtcatgagcgcccgcccaaccatggcggcggcggcgcccgtgcgcgcctgggtggtggcgctggcgctggtgctggcgtgcgcgctgctccagccgcggccgtccgacgccgcggcgcagcccgccccgcagtcgccggcgacggcggtgtcgtcgggcgccgccaagcccaagtgcgtggccggcgccaggaacgaccacgcgtgccgcgtcggcgccgtgcacgacccggacagccaggaggaggagggctccagcgtcaccatcgacgcgcccgccgccgcgcccgacgacgtcggccacgacgacggcagcgactacaacgaccccgacgtgcccaacaacgaccagctcgtcgtcgtcggccactgaaagctgccgcgcgcgcgcgcgcgccgacccgtggaccatgcgtgcatgaagaagaatgcagggggtgggcctgggcctgtaacctgttaatggatcggattctcggt

SEQ ID NO: 261819 - DNA, 930 bp, Zea mays
cccacgcgtccggccaaaccgtcctcctctccgccgcccgccgcccgccgcagcagcacccaccgggcaagatgaagacgatcctggcgtcggagacgatggacatcccggagggcgtcacggtcacggtggccgccaagctggtcacggtggagggcccccgcggcaagctcacccgcaacttcaagcacctcaacctcgacttccagctgcaggaggccggccgcaagctcaaggtggacgcctggttcggcacccgccgcaccatggccgccatccgcaccgccatctcccacgtccagaacctcatcaagggggtcaccaagggctaccgctacaagatgaggttcgtctacgcccacttccccatcaacgcctccatcaccaactccaacaccgccatcgagatcaggaacttcctcggcgagaagaaggtcaggaaggtggacatgcttgatggcgtgaccatcctccggtccgagaaggtcaaggatgagctcatccttgacggaaacgacgtcgagctcgtatctcgctccgccgccctcatcaaccagaaatgccatgtgaagaagaaggatatccgaaagtttttggacggtatctatgtgagcgacaagggcgtcatcgaagaggagcagtgagcgacagagtagccgaaatgccaggagatgaatatgaatgtcgtttgagttgcaattttgtgagactgaatgtgaacctttttctcattccttaaatagttgactgccagtgttcgtggtttcaaacgaaatttagtcttattaactgaatttgcgtattcaaatggattgcgtggctgcctggttatgttttgaattttgcgtcgcggtccaataattcgatggactggacccaaggaaatttgaatccgaatggactgaaaaaaaaaaaaaaagggcggccgct

SEQ ID NO: 261820 - DNA, 872 bp, Zea mays
aaaagcgggccgcctgccggtaccgggcctcatttacagcgtcgccccccgccttccctttctccccctccgccgcttcgtcgccgcagtacccaccgggcagggtgaggacgatcctggcgtccgagacgatggacatcccggagggcgtcacggtcacggtggccgccaagctggtcacggtggaggggccccgccgcaagctcacccgcaacttcaagcacctgaacctcgacttccagctgcaggaggccggccgcaagctcaaggtggacgcctggttcggcacccggcgcaccatggctcgccatccgcaccgccctctgccacgtgccagaacctcatcaagggggtcaccaagggctaccgctacaagatgaggtttgtctacgcccatttccccatcaacgcgtccatcaccaactccaacaccgccatcgagataaggaacttcctcggcgagaagaaggtcagaaaggtggacatgcttgacggcgtgaccatcctccgctccgagaaggtcaaggacgagcttattctcgatggcaacgacgtcgagttagtctctcgctccgccgccctcatcaaccagaaatgccatgtcaagaagaaggatatcaggaagtttttggatggtatctatgtgagcgacaagggtgtgatcgaagaggagcagtgagggacaattagttgttatcgtttgagttggaattattgtttggtttgcaattttctcaaggtgaactttgtaatcggttaggatgtgttgtggaccattatcttatcctacaatattatcgtatctgtttaagaaaaaaaaaaatattttattattattatatataaatttatttatttagtgtaataaaaat

SEQ ID NO: 261821 - DNA, 1032 bp, Zea mays
ggtccacgacgcgtccgaccacgagtccgcccacgcgttcaaatcgtctctctcccgtcctcccctccaccgccgcagccgccgccgtacctcctcctcccgcgcagcagccaccgccaccgccggaaatgaagaccatcctggccacggagacgatggacatccccgagggggtcacggtcacggtggcggccaagctggtgacggtggaggggccgcgcggtaagctcacccgcaacttcaagcacctcaacctcgacttccagctgcaggacggcggtcgcaagctcaaggtcgacgcctggtttggcacccgccgaaccatggccgccatccgcaccgccatctcccacgtccagaacctcatcgcaggcgtcaccaagggtttccgctacaagatgcggttcgtctacgctcactttcccatcaacgcctccatcaccaacgccaactccgccattgagatcagaaacttcctcggggagaagaaggtcaggaaggttgatatgcttgaaggtgtgaccatcttgcgttcagagaaggtcaaggatgagcttgttcttgaaggcaatgatgttgagcttgtctctcgctccgctgctctcataaaccagaaatgccatgtcaagaagaaggatatccggaagttcttggacggtatctatgtgagtgacaagggccccatctttgatgagcaatgagctgccctttgttcctggctagcaaaagccgtgttaggctgtggccagtagactgtttgcggagtggatgtagttggaaataggagatgggatgagtaaggttgctggagataagacctttagcaagagtttatgagatggccctttattttgggttgtgtttttttttgtttgagttcagttaactacatctttgcaagttggttggatctgaagttctgtactgtcttaggatgttattatgtaaccccaggtggacattgtttgtgatcatattcttcaccaaaaaaccaaaaaaaccaaacaaaaaaaaaaaaaaaaaaacagggag

SEQ ID NO: 261822 - DNA, 281 bp, Zea mays
gaagtttttggatggtatctatgtgagcgacaagggtgtgatcgaagaggagcagtgagggacaattagttgttatcgtttgagttggaattattgtttggtttgcaattttctcaaggtgaactttgtaatcggttaggatgtgttgtgccccattatcttctcccacaatattatcgtatctgtttaagaatatgaagcttgtttatcatttcccacgcgtccgcgtaaaaaaaaaaagaaaaaaaaaaaaaaaaaaaaaaagagaaatatagacatag

SEQ ID NO: 261823 - DNA, 808 bp, Zea mays
cgcccgccgctcttctgctgcagcgccgcctctcgtcctcccggcgtcatcgtcgccgccctgatctccgcaggccggcgtgtggcggagatccatccgtgcttgaactgactccttccttagctacaagtacctattatcaaccatgtttggacgcatgccaaggaagagtagtaacaataccaagtattacgaggttcttggtgtgtctaagaccgcaagtcaggatgagcttaagaaagcatacagaaaagctgccataaaaaaccatcctgataagggtggagaccctgagaagtttaaagagctgtctcaagcttatgatgttcttagtgacccggagaagagggagatctatgaccagtatggagaagatgcccttaaggaaggaatgggaggaggcagcagcagtgatttccatagcccttttgacatttttgagcaactttttccgggttctagcaccttgggggtggtagctcaagaggacgcagacaaaagcgtggtgaagatgtggtgcatactatgaaggtttccttagacgatctgtacaatgggacaaccaagaaactatctttatcgcggagtgctttgtgctccaagtgcaaggggaaaggatccaagagtggggcatcaggaacatgccatggttgtcgtggtgctggaatgagaacaatcacaagacagataggccttggcatgatccaacagatgaacactgtttgccctgaatgcaaaggatcaggtgagatcataagtgacaaggacaaatgcccaagctgtaaaggaaacaaggtagtccaggaga

SEQ ID NO: 261824 - DNA, 1275 bp, Zea mays
atccaaaccgccgcggccacggcccagccttccatagttctgtcagaaattccccttctcatccctgatccctccaactcccaccccaatacatcctgccgacgccatcagccggcgggacgcacacacgaggtcgaccttcgaaccctagtccttggccgagccgccttgcgggatcgtccccgccgcgcggcagctctgcctcgacccttttagtctccctccgttcgacaccgcttggatccgagatggaatcaccgcccctcacagctgaagcaattgcttttaccgagaaaaagatggacatggctttggaggatataattaaaatgtcaaagaaaaagaatcctggaggcaagaaacccccgaggcagccgataaaaaagcatccattccagaatggcaactctaataaagggaatggcaaggttcaaagttttatggagtctagatcaaccattagacaaggtgttcttgcacagagaaggtcaaatcttggtggaaatcagttccctgctacaaagcaggctgcgaagaaggctgctgttatgccaatgcacaagggggctatccgttggaacaagccaagtgcaagtaccttagtgcagaggaggcctgtaggtggtgcttttcagaatgccaaggtcaaggagtccaaccaggcagcaccaaggacgatggatgcactctttgcacagatgaaggcgcaacgcttgaggacggtacctcaacagcaggcaaattcttccccctggagtcatttcaaccagcatcgacgtgttcagcagcagcagaggcgaggcagagggtatggtggccgtaatgttggcaaccaatgaatccaactagacatatctactgcatcggagccctttctcttcactggtcttttggaccttggaagaaaggacgccccttggaaaatcaaacttggctttgtttattggaggggtgacaatgggctctaacttggctttgtttattggaggggtgacatcgggctctaaattttacactaagatttaaggatctgattaagatcaggccctatttctattcatttttaaactaaaatttatttaatgacctactattttgtgaagcgtttggatcgtgatccattaccacctcacctttggacgtggacaggatatgaagcgaagtttgtttgagttttctagttgtgtgcagtctgcttccgtttcagcatgtataatgacatggaaattatttggtcagagattatgatgtcttgtttcttggcggacgcgtggg

SEQ ID NO: 261825 - DNA, 1720 bp, Zea mays
aacctggaatctctaaaattcaaccaacccttccggcagaaaacccccaagccacccaataaaagggggtcctttccaaagggggaactttaataaagggaatggcaaggttcaaagtttattggagtctaaatcaaccattaaacaaggtgttcttgcacaaaaaaggtcaaatcttggtggaaatcagttccctgctacaaagcaggctgcgaagaaggctgctgttatgccaatgcacaagggggctatccgttggaacaagccaaggtaaacaatgatgttcttttattgcttatgagaaagtttactgcattcaaggggttgttcaatttattgagtcatgcaccttggattatattggctgagaatgattgtgatgctggtgtttacatggaactgccttaacttctctggttatacacacacaagcttataaagaacaatcgatttcatattcttgtggcacaaggcctgttttcttggttgaactgctacaaatatatggtgaatatagcatatgagccttgaagcttcattgaaagttatggccttctcctttatctgctgttgcctgacatttttctatgcagtttcatggtgtaatttatagctgctggatgagtgttattttggacaccagcattaactgtctgtgagggtttcattagtgttatttgtcaactattgttggaaggactgaaggagatgtgataatggctagcgtctcatgccactggtgacggatcatccatatacagggacgttacatgcctgagtttgaattggttttgactactggctccttggcagtgttcagtgtttatttgttgaatgatgaatgcagtgtaaatctagggtagtgctgctaattggacaattgttgtatgcctccaagggagtatattttgctactgcctcatattcaagttggctgtatccgtaacatcatgccagttttgagcatcctatcataatctgctatatgctccccttgttcactgcgtcccacagagataatgcttgcctgcatttctactggataagagtaaatcgtgggatcccacgatttatctcagtatgctgggctgtatggatgctatcttttcaaggtcaactgttgggatttattttcatgattccttatgtgaccttgtttgttctggatcagtggtcactatttacatggcttgagttttatcagtttaatcaatcaataagttgtgtcaacttgggacattgttgaaccatgtgcattgaaatttgggtggaactaaacagtctagactccaaaatgtgagggccttggaaaccaagaggatgcactagatattttcaatgaacactttattgtttctgtttcattttatttcaaaacatggtatgtactccctgacttcacttgagaagcgagaattgtatccttgttttgatgggggtatggtgagtttgctcagaaaacaatatggctcttggttctccgttgcttatgattcttggtactcgagcactcctgctcatgtgagatactaatgttttgattttgatacagtgcaagtaccttagtgcagaggaggcctgtaggtggtgcttttcagaatgccaaggtatggagtatggactttgtcaaatcttgaccttaatgctgagtaaataggacaaactggccgacaaggtcaaggagtgcaaccaggcagcaccaatgacgatggatgcactc

SEQ ID NO: 261826 - DNA, 1362 bp, Zea mays
gcgcttccttccttgcttcccctgccctcttctttttattccccgtctcctttgttcgcttgcgggctgcggcaagggggagggagaggacgtgacgaggggaggggaggggaggagggagggcaggcgggccgacgaatgcacagtcccggagaatattggtgaagcaataacttgatattgggttctagaccaaagaagcaatggaaaaggaatcatctgccacatacgagccaaaaaggaacagtgaaataagggtttttgagagttcagatgagatttcaacggatcttgctgagtatatctcacaagtttcagaaatttctgtcaaagaaaggggatactttgccatcgccttatctggaggtcccctagtcagttttttggggaaactttgtgaagctccatacaacaagacactggattggtccaaatggtacatcttctggtctgatgaacgtgctgtggcaaaaaaccatgcagagagtaactataggttaacaaaagaaggattcctcgccaaggtaccgattctgaatggccatgtctactccataaatgacaatgccacagtggaggatgcagcaacagactatgaattcatgatcaggcagctggttaaggtccgcacaataggagtctcagagagaaacgactgtcccaagttcgatctcatccttctcaccatgggctccgatgggcatgtggcctcgcttttcccgaaccaccctgccatggagctgaaagacgactgggtcacctacatcaccgactctccgcagcctcctcctgagaggatcaccttcactctcccagtgatcaactcagcatccaacatagcaatagtgtccaccggtgatgacaaagcaaaggctgttcacatagcagtttctgacatggccgaaggtcttgatgctcctacatcactgcctgctagaatggtccagccaacggacgggaagctggtatggtttctggacaaggcggcggcatcattccttgactccaagaacgacgacgacgacgcttgctacgatcgtcacgagtgactaactctgaggatcgttggtcgttttgaagcgaatgaacggaggtgtgtgtaagtaggtggtggcgtatgatggaagacgcgctgttccccttttagctcgatgcatgggttaattttgttctgagggtttttagctccggaaatctgaaattgcccttggtccttttgcagtgaggtgatttaaaagcgatgaaatgtgtatgcgatgttgagtcgtcaaagaacaccggaatttaactgtggtcgtataatattatgtgctacattctatgctatggcagttagattttataatttataaaaaaaggcca

SEQ ID NO: 261827 - DNA, 453 bp, Zea mays
cggacgcgtggggaaaaggcagagaaggtttttgaggatatgtttgtgaaatggaaaaacctgtcttccaaatactacaccgctttgctaaaggtgtatgctaatcagaacctcttagacaagggtgaggaactagcaaagcggatggatgaggagggtgccaagtttgggaccccaactttgaatgcacttgtgaagctatatgctgacgctggagaggtggagaaagctgagtccctattgcacaagctatctctgaagaacaacgtcaagcccagttacagctcatacatgacactgcttgatagctactcgaagaaaggagacgtccacaactcggagaaagtgttcaacaagttgagacagataggctacactgggaggatcaggatgtaccagtttctgctccattcttatctacatgctaaagcccctgcgtatggattcaaagag

SEQ ID NO: 261828 - DNA, 1735 bp, Zea mays
gaacacgcgtccgcgacgtgggtaagtcataagagagagtgatacactgttctttgtttttgagtacatggaatgcagtctttatcagctgatgaagagcagagggaagcccttttcagagactgaaatccgaaactggtgctttcaaatatttcaagctctgagtcacatgcaccagcgtggatattttcaccgtgaccttaagcctgaaaatttgcttgttacaaaggaactcatcaagatagcagattttggatttgctcgtgaaatttcttctgagccaccttatacggaatatgtgtccactcgttggtatcgtgcccctgaagttcttcttcaagctactgtttataatgctgcagttgacatgtgggcaatgggtgccattatcgcggagctattttcactgcgacctctttttcctggatcaagtgagccagatgaactttacaaaatctgtagcattattggcactccaaatcagcgtacttggcctgaaggactgcagctagcagcatctatgggttttcagttccctcagtgtgaaagtgtacatctttcggaagtggttcctttagcaagcaaagatgcaatcaatcttatctcgtggctttgctcatgggacccacgaagaaggccaacagcagtggaggttttgcagcatcccttctttcagccatgcttctatgtcccaccttcacttcgcttcaaatctactggatatgcatcaacgccaccatcagctggggctaaaggagctgttgatcagaagaacattaggagatactacatgggtactgtacccaatgcgaggccaacagttaattactcgtacttgagaaacaatgctcctgcaagagcagttggtgcacaaaggaaattggagttggattatcagctcccagagactaataaccataataaggtgacaaaggcagaagcgatgaaccagtcttggtccagaccagcagcagtaaggagcaatgcaggaaatcatcttgccaacgacctgaacccccgtgtacctgaccttgccgagaagctgtctcagttgtcaatgggccccaacagggtgtcgggtttgggttccgagaggtttgttagaacccatgagaacgctgccaagcgccccttgcccgtgggatccagggcgtggcatggtccagctgaccccttccggcgcccatacgagatgccaggtgatagaactctccttccaaggaatctcgttcgctgaggctgtgaagctcttcgcaagaaacatgtccaacgctcgctgtcttcggagctagtcttccccggctatttacctcgcaacaataaataaacaaccaaacttcgtttccagcagtgggtgttgctcagcattgtttgttaccgtgcttgtgcgtgacgaggataagaggcgtccgggtttgtgcaccccccccccccccccgggggtcctcgagggctccagggctggttggttgcagcatggcccgatgtgtctccatgtgagatcgtttttttaattatgctgtgcgatgtgtgattggtaacactgcttcagttgttaccgctgcttgttcagtgggtttgtatgaactgtgacatgctccgctaaacgttattctaaatactggtatgcaaacatgtcgaaggtgaacaatcaatggtgcatgtagagtagacgtaactggtaactgccttgtttcattctttacaagcctactctagtcccaattcgcatggt

SEQ ID NO: 261829 - DNA, 1975 bp, Zea mays
cgctattctaaatccccaaacggaagcatcgccactcttcctaacctgaacaatcaccaccgttattaagaagatgatgcgctgcgctgcaacgggcggcgggtgcgtcgcttcgtggagcggcgatcggagattgccggcggtcaacccctgcagcgtgcggatgccgacgggcaacgatgggtggtgcgccggcctgaggtcgcgggcggcggatctcgccggcctcgagatggccaacctgcgcggcggcgtcggggggctcttccgcgcgagcccgcgctacgggcgcttgcaagccacggcggcagttgaccctgaagatattccattggagaaggttcaagttaaatcctcaggacatgttctgccatatgttggcgttgcttgtttgggggctattctgtttggttaccatcttggtgtggtcaatggcgcacttgaatatctcgcgaaggatcttgggattgctgaaaatgctgtcttgcaggggtgggtggttagcacatccttggctggtgcaacactaggttcttttactgggggttctttggcagataaatttgggcggacaagaacattcatcctggatgcagtcccacttgctctaggtgcattcttgagtgcaacagctcaagatatccgcacaatgattattggccgattgcttgctggaattggtatcggggtctcatctgctcttgtacccctttacatatctgagatctcaccaactgaaattcgtggaacacttggtaccgttaatcaactttttatttgcattggaattcttgcagctttgttagctggattgcctctggcaggaaatcctgcctggtggaggacaatgtttggaattgctgtagttccatccattctgctggctgtaggaatggccttttcgcctgaaagccctcgttggctattccagcaaggaaaggttactcaagcagaattagctgtaaaaagactgtatggaaaagaaatggttaccgaaattatgtttgatctgagagctagtggccaaagttcttcggagtccgaagccggctggtttgatcttttcagcaagcgttactggaaagttgtgagtgtgggggcagcactgtttttgttccagcagcttgctggtataaacgctgttgtatattactctacatcggtgttccgtagtgcaggcattgcatctgatgttgctgctagtgctcttgttggagcagccaatgtttttggtactatggttgcatcttctctaatggacaaacaaggaaggaaaagccttctgataacaagcttttctggaatgggtgcttcaatgctactcctagcattgtccttcacctggaaagctctggcaccttattctggtactcttgctgttgttggcactgttctgtacgtgctgtcatttgctctaggagcgggccctgttccagcgctacttcttcctgaaatatttgcctcgagaataagggccaaggctgtcgcattatctctaggcatgcactgggtatctaactttttcattggcctgtacttcctgagtgtcgtgagcaagtttgggatcagcaacgtgtatctgggatttgcatcagtatgtgcccttgcagttctgtacatagctgggaatgtggtcgagaccaaggggagatcacttgaagagattgaaagggagctaagtgtagcagaatgatgtacttttgctagtcatgctgtggcgccgttttggttatcgagaatgcaaccaagcgctcaaccgagcatccttggacctggagactctttctagtttcatgtagttttagaaataagcgaacggcaagagtaccaatcttaggtgacttggtgtgggttgtgtctgaaataagtgaattggattgtagaatttcagaaataagtgaattggattgtagaatttcaaaaaaaaaaaaaaaaaagggcggccgcccgggaattcggacggtacgtgcggcga

SEQ ID NO: 261830 - DNA, 606 bp, Zea mays
ggattcggcaagttccggcctcatccgctgctttcctcgcaactatcggatcttgcgaggcatcgtcctcctatcctataatcgcatttcgaatcgcaaacggagacttcgcccctcttcacagattctaatcgaatttgccaatctgcaagctaacgtagtgattttctgtggtggtggtgatgtgcgatccctggaacaatcaccaatcaccatccttaagaagatgatgcgatgcactgtaacgggcggcgggtgcgttgcttcgtggattggtgatcggaggtcgccggcggtcaaccccttcagcgtgcggatgtcgacgggcaacggtgggtggtgcggcggcctgaggtcgcgggcggcggaactctccggcctcgagatggcccatctacgtggcggcatcggggggctcttccgcgcgagcccgcgctatgggcgcttgcaagccacggccgcagttgaccctgaagatattccactggagaaggttcaagttaaattcctcaggacatgttatgccttatgttggtgttgcttgtttgggggctattctgtttggttaatatcttggtgtggccaatggcgcgcttgaatatcttg

SEQ ID NO: 261831 - DNA, 830 bp, Zea mays
  unsure (1)..(830): unsure at all n locations
atgatgttcagtctctgcattctctcaactcatttgactatcctttgacagttgaccctgaagatattccattggagaaggttcaagttaaatcctcaggacatgttctgccatatgttggcgttgcttgtttgggggctattctgtttggttaccatcttggtgtggtcaatggcgcacttgaatatctcgcgaaggatcttgggattgctgaaaatgctgtcttgcaggggtgggtggttagcacatccttggctggtgcaacactaggttcttttactgggggttctttggcagataaatttgggcggacaagaacattcatcctggatgcagtcccacttgctctaggtgcattcttgagtgcaacagctcaagatatccgcacaatgattattggtcgattgcttgctggaatcggtatcggggtctcatctgctcttgtacccctttacatatctgaggttgcgatacgttgaaatgacagttgctttgttcaaaacctaatgctgttgtgatatgtacttctgcctgtgttgatgaacatccccaacaaatgaatttcctgtactctgcagatctcaccaactgaaattcgtggaacacttggtaccgttaatcaactttttatctgcattggaattcttgcagctttgttagctggattgcctctggcaggaaatcctgcctggtaagttttccatttgcttgttcatttgttntcccgcttcattttaccttttgattaatggaagcaatatttggattttgacagtggaagaactacacatttttnntattcaacctttctaacctattaaatagattta

SEQ ID NO: 261832 - DNA, 555 bp, Zea mays
tttgcatcagtatgtgcccttgcagttctgtacatagctgggaatgtggtcgagaccaaggggagatcacttgaagagattgaaagggagttaagtgtagcagaatgatgtacttttgctagtcatgctgtggccgcgttttggttatcgagaatgcaaccaaacgctcaaccgagcatccttggacctggagactctttctagtttcatgtagttttaggaataagcgaacagcaagagtaccaatcttaggtgacttggtgtgtgcaatgagggtctgtgtcagaaataagtgaggcttgttcggttatttccaatccgtattgtttggttatttccaatccgtatggatcgaagtggattgagcgggattgatatgtattttgacttgttatggatttaaaccgactcaatctcatccaatgtacatggattaacatcaaaccgaataagccctgagttggactgtgaatttcagaaataagtgaattgagaaataagtgaattggattgtagaatttcaaaaaaaaaaacaaagggcggccgccgtactcg

SEQ ID NO: 261833 - DNA, 590 bp, Zea mays
gtgtcgtgagcaagtttgggatcagcaacgtgtatctgggatttgcatcagtatgtgcccttgcagttctgtacatagctgggaatgtggtcgagaccaaggggagatcacttgaagagattgaaagggagctaagtgtagcagaatgatgtacttttgctagtcatgctgtggcgccgttttggttatcgagaatgcaaccaagcgctcaaccgagcatccttggacctggagactctttctagtttcatgtagttttagaaataagcgaacggcaagagtaccaatcttaggtgacttggtgtgcttggtgtgggttgtgtctgaaataagtgaattggattgtagaatttcagaaataagtgaattggattgtagaatttcagaaagtgtgttccccttattttttcgctgcagttccttccatgctagccctttattactgccagttttcttcatgcgcccttatttccttttggcctcaagatttgcccgcagctttatcagggaaggtttagtgcgtcgttatttctgtatatcccagcccagtagaagtaacagaaaccaatacaaaagtaaacccccccttc

SEQ ID NO: 261834 - DNA, 908 bp, Zea mays
  unsure (1)..(908): unsure at all n locations
cccacgcgtccgcgcgagaacgatcagccagttcccagccgcccacccaccaagagccacagcccagaggccacgccgtcctcttcaccccagggttgccgacgcggcgactccgttcacccaccaccgctgccctctctcctccctgctgccgcctgtgccggggctagcccgccgcggagccatgtcgcggtccttgagcatgagagggagcatgaggtcgcgccgcgacctgcctcctcctgagaagacaattgaaaggcttgagagtatggtggatggaggaaatttctatgaagctcaacaaatgtacaagtcaaccagcgcaaggtatattgctgttcagaagtattcagaagccttggacatccttcaatcaggcgctttggtacaattgaagcatggacaggttacctgtggtggtgaacttgctgtcctctttgttgacatcctcatcacaggagagtttccatatagtgaacaattttttgatcgtatcagaaagatatatgaggcattcccaaggataactgttccacatttccttggagaggactatgatgatgagggacataaattgtctgaagctatttctgctgccaaagtgcgcgcagagagttgttcatcattcctgaaagctgccatcaggtggtctgctgagtttggaacatcaagaaatggttctcctgaactgcacgttatgttagcagaatacatatattcagaatctccagagacggacatgactaaagtctcaagtcattttgttcgtggaaatgatccataaaagttcgcttctatgctggtgaaccttatgggcaagtgttaccctggtgaagatgatactggtgacggngctatgaccattaggactggagtcaatactatgtggtgacacactaattgta

SEQ ID NO: 261835 - DNA, 837 bp, Zea mays
agcagaatacatatattcagaatctccagagacggacatgactaaagtttcaagtcattttggtcgtggaaatgatccaaaaaagtttgcttctatgctggtgagctttatgagcaagtgttaccctggtgaagatggtactgcaattgcacgtggggtcctaatgtatctatctcaagggaacctgagagatgcaaatttacttatggatgagatgaaggaacaactaaaatctgttaactcggattttccgaaaacagatttgattcagttcatcatgtatcttttaccaacgcttgagagagatgcttatcctctttttaggacacttcgacagaagtataagacaagcacagatcgtgacgctgtgtttcaggagttactggacgaaatagctgcaaaattttacaatatacaacgccagaaccctttagaaggacttttcagcgaaatgttcaagatataatgcacgagaaaagaattttatgtcgatgctttcatctaaaccattggctggaataatacaattggtcaacaaaggtgtttgctcaactatgaatctccaaggccatacatttagcatcatgctgcatgaagatatatacttagctctgcagcaaaatcgtcgattagtgtcagattgttactgagcatgtgtaactgaattttgttttctattacttgtttctctttgttgacttgcccttgattgttattgaccatgcataactgaattttgttttcttttacttgtttctccttgtcctgttcacttttggaaatgtattttgtgtacccacaccccaaaactataaaatatttccattcattgatttt

SEQ ID NO: 261836 - DNA, 896 bp, Zea mays
tgggagtctactgctgaaggagcctctagagaaacattagaagaagcatgtgcagatgtagagatagtctcgccttttgctcagttggatattccactgattggccaatagagttacattattttccgagcaagattgaagacccccaacttttcacctgggccagagtcgctggaatgtgcactttttgctctggatgatataccattcgattctctagcattttcttcaatcattgtcaccttaaggatgtatactgaagatgtgaggtctggaagcatcaaatttcactattgcacgataaacaaaaggttaggagccagcccttcagatcttcggagtttcgatattgataaccatatagccgtgtgaggttgaaaggttctaaaccttttgcgattgaggagaatggttttggcatacaacaggcgcgcgcgcacacaccattggaacagatttaaagtaggtgctggaactgtaaatgattcggtatcaaaaaggctggtttagccattttaggagattatgcgtttcgatttcatgggagttgggaggacagaattgtatcatagtgcagtaactcttggttgtaggattgagttatcctgcatgccatggttgtggcgcttcgtcagcgaccgaatgctgtaatgtggttacgattctctgagctccttttcaaccattaattccagttgtaaaaaaaaaaaaaagataaaaaaaaaaaaaaaataataataataatataataaaatttataaataattaattaaaaataaaaataagggggtgtggggggggggaataaaaaaggggcggccgttttaaaggatccaagtttacttccgcgtgcttgcgacgttaaagctttttttttgggccccctaaattcaatt

SEQ ID NO: 261837 - DNA, 776 bp, Zea mays
  unsure (1)..(776): unsure at all n locations
caatgattgaagaaaatgctagagaatcgaatggtatatcctcaaggtgacaatgattgtaaccttcagtatacatcctcaaggtgacaatgattgaagatgtatactgaagatgtgaggtctggaagcatcaaatttcactattgcacgataaacaaaaggttagcagccagcccgtcagaccttcggagtttcgatattgataaccatatagccgtgtgaggttgtaaaggttctaaaaccctttgcgattgaggagaatggttttggcatacaacaggcgcgcgcacacacaccattggagccttgtttggcgcctccctgcacattggaacagatttaaagtaggtgctggaacatattgatagccattttaggagattatgcgtttcgatttcatgggagttgggaggacagaattgtatcatagtgcagtaacccctggttgtaggattgagttatcctgcatgccatggttgtggcgcttcgtcagcgaccgaatgctgtaatgtggttacgattctctgagctccttttcaaccattnaaaaaaaaaaaaaaaaaaaaaaaaaaaaaaaaaaaaaaaaaaaaaaaaaaaaaaaaaataaaaaaaaaaaaaaaaaaaaaaaaaaaaatacaaaaatataaaaaaaatttaaaattaaaatataaaaaaaaataaattttttttttttaaaggggggtctctttttaaaatgcataatatatcccctccttctttcaaaaatttatttttttttaattgcctttataaaa

SEQ ID NO: 261838 - DNA, 255 bp, Zea mays
gtagagatagtctcgccttttgctcagttggatattccactgattggccaagtgagtgaaaaattggcatagtcacaaagttgtaggttatttcgtccgctactaagttgattatctttgtattacaatgagatgcagtagagttacattattttccgagcaagactgaagacccccaacttttcacctgggccagagtcgctggaatgtgcactttttgctctcgatgatataccattcgattctctagcattt

SEQ ID NO: 261839 - DNA, 812 bp, Zea mays
cgcctggtctgtggcctctgcgctcaccttcctccgcggccctcgcctcgccagaacagcgggagatctcgggatcgggcggccctcctccggcgtccggatcgagaggattggacccgaatccgatcgcctagcagggggcgcggcgcgcgcgcgatggcgccggcggtggtgtcggcgctggccaagtacaaactggtgttcctcggcgaccagtccgtgggcaagaccagcatcatcaccagattcatgtacgacaagttcgacaccacctaccaggcaacgattggcattgactttctgtcaaaaacaatgtatctagaagaccgaactgtacgtttacaactctgggatactgcaggacaggagaggtttaggagtcttattccaagctacatcagggactcttctgttgcggtggttgtttatgatgtatccaatagacagtccttcctgaacacctcaaagtggatcgatgaagtgcgcaccgagagaggtggcgatgtgataatcgtgctcgttggcaacaaaactgatcttgtcgacaaaagacaagtgtccacagaagaaggagagagcaaggcaaaagaattgaatgtcatgttcatcgagaccagcgcgaaagccggcttcaacatcaagcccgtgttccgcaagatcgcttgcaaccctgccaggaatggagacattgtcagcaaagcaggagggcatggtggatgtcaacctgaagtcgaactctaggccgtcccaatcggaacaaccagagggacataggatgcgctgctagaagtgtattagcttcaggcatactt

SEQ ID NO: 261840 - DNA, 822 bp, Zea mays
gaagaggaacagcgatccagcgttcactggggaggttgtcgagctcgatttcgacgagctggatatggagaccctctgggagctcgatcggttcgtggtcaattggaggaaggctctgaagaagagccagcggaactctatagtgaatggcgatgctgccgcggcggtgattggagacgccatcgatgtgacagttgtcccggacgacgacgacatggtcgaggttagctgtcaatccgtccgtggcggtcgagatcggagagtcggctgacgttccagagaaagaaatggaggccgagatggtcgacgattacgtggatataggcgacgagatgccgacagtgaattaccagtcagtggagatcgagagggattccccggcggctgccagcagctcaagctgatcaggaagtggctcgtcttcatccagcgattccgactcggactccgattctgacggggacgatgccagcgccccgcactaggtgtggctgttgttgctgttttatctgactgtactgtaggattagcgatgagtaggtgactgaaaaggttccatttgatgaggcgttttgaagaacggtatagagaagcctgtagggaactcttgttcatgcaatgcaagtggttgtgttcgtctgtgtatgtgtgggcgcagcatttatgtttgctgtacttgggtgatgtgtatgtggtttatttttggtttgttgattagtttttttttacatgttttttttatttttaaacatatttttttttattatttgtattctgtctctttttacattaatttattttaataatatttattttgtttct

SEQ ID NO: 261841 - DNA, 1619 bp, Zea mays
gctcctctgaattctgatccgtgcggtgcggccgtgcgggtgtccgtctcctccattgcgaaccgcgagctcctgcgtcaaccagatcacacgaaccaaaccaccgcctcctcccccgaccggagaggagcctcaccgccggcgcccatggcgacacgctacttgatcgtgtcgctgcccgtgcagtcgcccggcgccaccgccagctccctgtggtcgcgcctccaggactccatctcccgccactccttcgacaccccgctctaccgcttcaacgtcccggatctccgcgtcggcaccctcgactcgctcctcgcgctcagtgacgacctcgtcaagtccaatgtcttcgtggagggcgtgtcacacaagatccggaggcagatcgaggacctcgagcgcgccggaggggtcgagagcgggaccctcaccgtcgatggcgttcccgtcgacacctacctcaccaggttcgtgtgggatgagggcaagtaccccacaatgtccccgctcaaggagatcgtcggcagcatccagtcacaggttgccaagatcgaggatgacatgaaggttcgagcagcggaatataataatgtaaggagccagcttagtgcaatcaacagaaagcaaagtgggagcttagcggttcgtgatctttccaatctggtaaaaccggaggatatgatcacctcggaacatcttgtgacacttcttgcaattgttcccaagtactcccaaaaagactggctgtcaagctatgagacacttgacacatttgtggtacctaggtcatctaaaaagctctatgaagacaatgaatatgctctctacactgtgacactatttgctaaggttgttgacaactttaaggtccgtgctcgcgagaagggttttcagatccgtgatttcgagtacagtcctgaagcacaggaaagccggatgcaggagatggagaagctactgcgagaccaagaagctatgaggaccactcttcttcagtggtgttatgccagctacagcgaggtattcagttcctggatgcacttttgtgctgtgcgtgtctttgtggagagcattcttagatatggtctgccgccatcattcctgtctgctgttcttgcaccatctacaaagagcgagaagaaagtaaggagcatcttagacgagctctctggcgatgcccatagcctgtattggaaatccgaagacgatgtaggcgttgctggtctgggaggcgaaaccgaggcgcacccttacgtctccttcaccataaattttgtctgagacaaagtatggttcctagaccgtctgtggcctaggcaatataatacttggaagcagctattggaacgcaagcgcggaacgagcatgtatattactctgttgatttatcggttcatgtggtcctgtagttcatatcacagagagatcagccgacggatgctgtaatttctgaggaacctatggaattcctgtagttcatgtggtcctgtaatttctgaggactacctacctatttccctgcagcactgcaccttgtaaaaagacttaacccgtgtctgtagcagctggctactggatttattacatctacaataaaagtcatttttaatggttgtttc

SEQ ID NO: 261842 - DNA, 734 bp, Zea mays
gtccttgacataattggtggaatcttcggaggcctgttcatctgtgaagggttcacaggtccgcgattttgagtacagtcctgaagcacaggaaagtcggaagcaggagatggagaagctactgcaagaccaagaagccatgaggaccactcttcttcaatggtgctatgccagctacagcgaggtattcagttcctggatgcacttctgtgctgtgcgtgtctttgtagagagcatccttagatatggtctccctccatcattcctgtctgctgttcttgcaccatctacaaagagcgagaagaaagtaaggagcatcttagaggagctctgcggcaatgcccatagtatttattggaaatccgaagacgacgtaggcgtcgccggtctgggaggtgaaacagaggcgcacccttacgtctccttcaccataaattttgtctgagaccggcatgttcctggccgtctgcggcccaggcaatatttcgagcagaactgccataaattctttgttgatttgtcggttcatgtgctcctgtaattcacatcacagagagaccagccgatcaataatgtagtttctgaggacatgtttccctgcagtattgtaccttgggagcgcattgtaaatggcctggaacagttgtctactggatttgtttatttatttacaataaaagccatgtgaaaataagtaactaaaaaaaaccaatcagaaaaaaaaggggcgcccc

SEQ ID NO: 261843 - DNA, 766 bp, Zea mays
tgcggtcgcgtgggcggacgcgtgggcggacgcgtgggtccggcccggcgtcgttcactccaacaaggcccagaccaacctcactgatcctctctccctcctcgccgagacgacgagatccatcgccatcagagaatcctagcccacccagaccaggtgccccacggcggtgccggcgatggcaacccgctactggatcgtctctctccccgtgcagtctcccggcgccaccgcgacctcgctttggtcgcgcctgcaggatggcatctcccgccactccttcgacaccccgctgtaccggttcaacgtcccggacctccgcgtcggcaccctcgactccctcctcgcgctcagcgatgacctcgtcaagtcaaacgtgttcgtcgagggcgtttcgcacaagatccggaggcagatcgaagacctcgagcgcgccggaggcgtcgacagcggggccctcaccgtcgatggcgttcccgtcgacacctacctcaccaggttcgtgtgggatgagggcaagtaccccacaatgtcgtcgctcaaggagatcgtcggcagcatacagtcacaggttgccaagatcgaggatgacatgaaggttcgagcatcggaatataataatgtaaggagccagcttagtgcgatcaacaggaagcaaagtgggaggtaaattgcgctgacatactttgtgtgttcagactctagaggaagtgcttgattccaggactttttccttgtttattgtaaaaggaacaggagagcagaa

SEQ ID NO: 261844 - DNA, 285 bp, Zea mays
cggacgcgtggcgagccgcgtgctcgcacggaccaaaccagcgcctcctcccccgagtctcaccgccagcgcccatggcgacacgctactggatcgtgtctctgcccgtgcagtcacctggcgccatcgcaagctccctgtggtctcgcctccaggactccatctcccgccactccttcgacactccgctctaccgcttcaacgtcccggatctccgcgtcggcaccctcgactcgcttctcgccctcagcgacgacctcgtcaagtccaatgttttcgtggagg

SEQ ID NO: 261845 - DNA, 476 bp, Zea mays
gtcgcgccactcctcgctcatggcgtcctccactctgccagccttccccttccgtccgtctcttcccggacttacgtccccggatcctgctaagcttaaccacgtatctgtttgaagacccgttcgccgtcttcccgttgcggcctccgcggcaccgtcgggcgccgccgccgcggcgacggagcgcaaccgcttccgggagcgctacgggctcaacccagacgacttcgaggaagatgcagaggaggatccaagggaagagagcatggacaggcggagccgcggagacagcagcagtctgggagaggggagcaaactgtggaagctgcagttactccagcgaaggtggcggagcctcgggagactcacaaatcacaatcaatacgtaatgcagttacttcaggtttggacagaaaccgttcctttgttttggtcgtgtaatgtcagagcaattatatcgatctattactcttctg

SEQ ID NO: 261846 - DNA, 1436 bp, Zea mays
  unsure (1)..(1436): unsure at all n locations
gtccgcaacccccactactacagtgcccgccgccgctgcgtccaccaccacctcctttcccaactcctccgcgtacccccgccctctccggcggcccgcgtaaccacccgcgcagatggcgacggcggccacggcgtccgcgacggcggcgacccgcttcacgctcctagcgggcgccggcctccgcagccgcatcacccgcctccccaccgccgtgcggttccagcgccagcgggggctcaccaccaccgcgctcctgaagaccgccgacctccagcccaaggagcagggcaagcccgagacgctcgactaccgcgtgttcctcgtcgacggcgggggccggaaggtgtcgccgtggcacgacgtcccgctgcgcgccggggacggggtgttccacttcgtcgtcgagatacccaaggagagcagcgccaagatggaggtcgccaccgacgaggccttcacgcccatcaagcaggacaccaagaagggcaaccttcgatactacccgtacaacattaactggaactatgggttacttcctcaaacatgggaggacccaacttctgcaaattctgaggttgaaggagcatttggggataatgatcctgttgatgttgttgagataggtgaaagacgtgccaatgtcggggatgttcttaaggttaagccattggcagctttagcaatgattgatgagggagagcttgactggaaaattgtggccatttctttggatgacccgaaagcatctcttgtgaacgacgtggatgatgttgagaagcattttccggggacactgactgccatcagagactggttcagagactacaagatacctgatggaaagcctgccaacaaatttggtctcggcaacaagcccgcaagcaaggaatacgccctgaaggtcattcaagagaccaacgaatcatgggagaaattggtaaagagaaatattcccgctggagagctctcgttggcctgattttggcccatgggaagccaccacattcttttgaactgctttcgtgagcatgtcgttttgtatgctgtgaccatgcttcttcgtttgcattccaaaccttttttacgaactgtttaacaaaaatgatcttgtcggatgaataatgattctggtgcgagtttaccagaacggcaaggagtttctcaagtaatggtcatgtctgtgcagcatatttttctatacatacaaatgtgtgatttctaaagttggaactttgaacacaccattcaactgagcaaaagcagtttgaggtcgttaagtaagtcttcccacaccgtgttttgtggtgttggattgctaggctttgtggtgttgaattgttatggtgtctttggtggatcgtgtgtaaaatagaggacgtgaaaataattatnnagtgnngtttnnnntnnnnnnnnaaanaaagggcggccgc

SEQ ID NO: 261847 - DNA, 450 bp, Zea mays
ggcgcttggggctgttcgttgtggtggtgcggtaggaagagacgatggcgcgaggtggcgcgtgggccgcggtggcggcggcggccgtgtggtggatggcggcgggggccggggcggtatggctggagattgcgccgtcagggactaagtgtgtgtcggaggagatccaatccaacgttgtcgtcatcggcgactactccgtcctctatgatcaccaccacgcccagcctaccatctccgtcaaggtcacgtccccttttggagacattgttcataagagagagaacgtttcgatggggcaatttgcatttaccacagcagatgcagggaactaccttgcctgcttctcaattgatggtgaggacagagggttagtggtgaagctagaccttgactggaaaattgggctggctagtagagactgggattctgttgccaaaaggaaaagat

SEQ ID NO: 261848 - DNA, 823 bp, Zea mays
ggtgtaccacaccgccttcaccaccgggctaagcccggtcctcaaggctcaactacactagcaatgcatttgaaagcattggtgttgatttgcttaattattatccttgcccttttattttaataggaactccagtgtagtgattggtcatgccgccccttaagtgaagggcaaatacaatatgctgcggcggatgcctactacttgctagacatatttgatttgttccaaaaaaggatcacaatggaaggtaaatgttcatctacaacagaacttacttcagacaggcattgctcatcagtggtgatagaatgctcttcttctggatatggcatttgctcgggtagttgtttgatgtccatagtaaccaagtacagtgagaagataatattgacagaatctgatgcaaaaccgcgtacctccagacgaaaagaaaaactgaagattcctgccaatgccaaacgcaaagataatgtggattgcagtagtgaatggcagggtccccctccatgggatccttccattggtggggatgggtacccaaagttcttgtgtgatgtgatgattgagggcctagctaagcacttgcgatgtgttggaatagatgctgcaattccatcttcaaagaaacctgaaccaagggatctattaaatcaaacatacaaggaaggaagaatattattaacacgggatgccaagctcttgaaatatcaatatttagctggtaaccaggtatacagagtgaaaagcctgctcaaacatgatcaactagctgaggtcattaatatcttccaattaaagatttctgaggaccaacttatgt

SEQ ID NO: 261849 - DNA, 842 bp, Zea mays
cggacgcgtgggcggacgcgtgggttcgcttcctttcccctaccgcatcgatggaccacgcgccacccccctttcgccgtgcacctcgtcaccggcggcggatcctcgtcggggatacgccctcctactgcgctccctcgccgccgcccgtgtcgtcgctcttgacgcagagtggaagccgcgccgccgcggtagccctgccgctgccgaccctgcggccctgggcgacgacacgacgccggcgtccgagacatctccagcgccgccgaagttcccgacggtgacgctgctccaggtggcctgccgcttcagcgatggtggtggaggtgagggcgagcgcagcgaggtgtttgtcgtcgatctgctttccgtgccgctcgccgacctgtgggcaccgctgcgagagctgttcgagcggcctgagacgctcaagctggggttcaggtttaagcaggacctggtgtacctctcctccaccttctccgccgccctcgggtgcgattccggattcgatagggtggagcctttcttggatgtcaccaacatttattactatctcaagggccatgataggcagaagaagcttccaaaggagaccaagagtttggcaactatttgtgaggagctgcttggtatccttttgtccaaggaactccagtgtagtgattggtcatgccgccccttaagtgaagggcaaatacaatatgctgcgtcggatgcctactacttgctagacatatttgatttgttccaaaaaaggatcacaatggaaggaaaatgttcatctacaacagaacttacttcagacagacattgctcatcagtggtgatagaatgctctt

SEQ ID NO: 261850 - DNA, 866 bp, Zea mays
acatcatggcctttctgctatttgttcttgctcaaaatatcttggaagcagagggcccatggtttgacagctttcttattaatgcgtcattggtttttttgtgtgaagtacttatcgatgctatcaaacattctttccttgcaaaatttaatgagataaagccagttgcatattcagagtttttggaagatctttgcaagcagattttgaatgacaaacctgatgaccgtcagaaggacctaacattcatcccacttgccccagcttgtgttgtaattcgtgtattgaccccagtatatgctaccctccttcctgctggcccttttatctggagaatattctggattttactttggtcagttctgacctattttatgctcgccatattcaagataatcgtgggattgatactgcgctgccttgcaaattggtatgtaaatctacggctcacaagaaaacaacacgtggattgagtacatggcaccacaattctgctgctatcgttacatctgtgagtagaaattttgctgtggtgcatgaagtgcagcaagcactgcagctgctgagagttatatgacagaagtattcatagtatagtacagcgcagatgaatattatagtctcttcttccaagggttttgtcgattcgaggaacagattagtcaaattttgtggtgtttagacttctgacctccgtttgtgcatagctcagcttcatccaaaactatctgctgtcacctaacccagatgttctggtctgtaatgtaagacatgtttatacatttttttaaaaaaagaaacgaactggagtttccaccttaaaaaaaaaaaaaacccggcccccgctcgcgatctagaactagcga

SEQ ID NO: 261851 - DNA, 489 bp, Zea mays
cggaattcccgggtcgacgcacgcgtcgtcacaaagttgtttgtgcatcgcggcggcgacaagggggcgacgaggcaggcggagcgggcggcgactacagcggcagcagatctcacggaatggcggcgaaggcaatctcgagccccgtgccggtggagtggtacccgacgctggccgtcgtcatggtatccgtaggcctcatgttcaccgcctccttcttcatttatgaagcaacttcatcccggaggagccgtagcctgtcaaaggagatcgcaacagcagttgttgcttctgttttcttgggctttgggtctctgttcgtgcttcttgcaagtggtgtttatgtctgatgactggctatgggccgtgtgtgcttgtgttctgcatcccgagttgtagacttggttatgacagatcctcaaagctgttgtcctaacgaatatagagcatttgaacttattctagaacgatgtatgggagcaaccgagt

SEQ ID NO: 261852 - DNA, 422 bp, Zea mays
gttgtagagcttaaaatcattagagctttaatgaggagagcaaagtatccccaatttgttgagaatgttttatctgtttcagttatgaagcaacttcatcccggaggagccgtagcctgtcaaaggagatcgcaacagcagttgttgcttctgttttcttgggctttgggtctcggttcgggcttcttgcaagtggtgtttatgtctgatggctggctatggcccgtgtgcgcttgtgttctgcatcccgagttgtagacttggttatgccagatcctcaaagctgttgtcctaacgaatatagagcatttgaacttattctagagcgatggatgggaacatccgagttaaagcaacgtttgcttcccggcccgcgctatgtgtctccgaaaaagaacaaaaaaaaaaaaaaaaaaaaggaa

SEQ ID NO: 261853 - DNA, 520 bp, Zea mays
gccccgtgccggtggagtggtatccgacgctggccgtcgtcatggtatccgtagcctcatgttcaccgcctccttcttcatctatgaagctacttcatccaagcggagcagtagcctggcaaaggagatcacaacagcagctgttgcttctgttttactgggctttgggtctctgttcgtgctccttgcaagtggtgtttatgtttgacgactgcgtatggggccgtgttcttggattcagcagacttagggcatgtacaagtctgagactccatttttctatgagacagctaagagactatatgacataactttaagactcagtattataaatgcggttaatagacaacatgcgtagagtcgtaaagaggcgggctcttagcgaagagcttggctcttgtattttttttcatatagtcccttagagaactctcaagagaccatatattaaatagggttgtacatgcacttagtaattgattgtaggatatgccagatcctcgaagcttgtgctgtccta

SEQ ID NO: 261854 - DNA, 1058 bp, Zea mays
cccacgcgtccgcccacgcgtccgcccacgcgtccgcggacgcgtgggtcacggcgtcggggcgcagagaatccccaagcaaacaaacagggtagagggagaggagaggagaggagaggagaggttgggtctgggacaccatggctccgatgaagctgtacggggcggtgatgtcgtggaacgtgacgaggtgcgcaacggcgctggaggaggctggctccgactacgagatcgtgcccatcaacttcgccaccgccgagcacaagagccccgagcacctcgtccgcaacccgtttggtcaggttccagctctgcaggatggtgacttgtacctcttcgaatcacgagcaatctgcaagtacgctgctcgcaaaaacaagccagagctgttgagggaaggaaacctcgaggaggcagcaatggtggatgtttggatcgaggtggaggctaaccagtacaccgctgcactgaatcccatcctcttccaggtcctcatcagtcctatgcttgggggaaccaccgaccagaaagttgtggatgagaaccttgagaagctgaagaaggtgctagaggtgtacgaggcacgcctgaccaagtgcaagtaccttgctggagacttcctcagcctcgccgacctgaaccatgtgtctgtcactctctgcctgttcgctacgccctacgcatctgtgctcgacgcctacccgcatgtgaaggcctggtggtctggtctgatggagaggccgtctgtccagaaggtcgctgccctgatgaagccatctgcttgaaacggttgccctgtcaatcggtgaatggaataagccaagtctgttctgggttgtttgcttgttcagtgatgtgtcttctatgacgaaagttgagtgcctatgtgtgagcatgcttgcttgtaacgagaccttgaattgttcggaaatgagcattcctgtgctcttcttgaaaataaactttgcgttaggttcctcccatccaaaaaaaggacaaataaacccaaagtaaacatataaaaaaaaaaaaaaaaaaaaagggcggccgcccgggaa

SEQ ID NO: 261855 - DNA, 507 bp, Zea mays
ctggtatcgcctccatcttctcactatctttatttattgtcttttcgtcccacgcgtctttgtttttctctgcctgttcgttacgccctactcatttgtgcttgacgcctacccgcatgtgaaggcctggtggtctggtctgatggagaggccgtctgtccagaaggtcgctgccctgatgaagccatctgcttgaaacggttgccctgtcaatcggtgaatggaataagccaagtctgttctgggttgtttgcttgttcagtgatgtgtcttctatgacgaaagttgagtgccttatgtgtgagcatgcttgcttgtaaccagaccttgaattgttcggaaatgagcattcctgtgctcttcttgaaaataaattacgcaaataaatattataattattttaatttattttatttattctatcatattttatatttatacttaattttttatatatataattaatctcttttaaaaaaaaggggcggcctttttaaaggttccaat

SEQ ID NO: 261856 - DNA, 477 bp, Zea mays
  unsure (1)..(477): unsure at all n locations
cggccggatccgggggaacaaggccgggacggggcggacggtggggtgctcgacgcctacccgcatgtgaaggcctggtggtctggtctgatggagaggccgtctgtacagaaggtcgcactgccctgatgaagcccgcggcttgaaacggttgccctgtcaatcggtgaatggaataagccaagtctgttctgggttgtttgcttgttcagtgatgtgtcttctatgacgaaagttgagtgcctatgtgtgagcatgcttgcttgtaacgagaccttgaattgttcggaaatgagcattcctgtgctcttctttaaaataaactttgccttaggttcctcaggaaaaaaaaaaaaaaaaaaaaaaaannnnaaaagggggcggccgttttaaaggatccaagtttacttccccttccttgcaacgtattagtttttttttagggccacctaaattcaattaactggccgccgtttt

SEQ ID NO: 261857 - DNA, 229 bp, Zea mays
gggcgccctcccagttcgtctattaaaggggaaccagtgaaccacccgatgcaacttgcgtagagagttgggcgcagagaatccccaagcaaacaaacagggtagaggtagagggagaggagaggagaggagaggagaggagaggttgggtctgggacaccatggcctccgatgaagctgtacggggcggtgatgtcgtggaacgtgacgaggtgcgcaacggcgctgg

SEQ ID NO: 261858 - DNA, 792 bp, Zea mays
catatgtactttcctccagtagcttttgattgcgatcctcaagttgagctttgatttccatgagttcagacaccttttgcttcagctcattgatttcaacggactgaagaccatagtgctaataagatgggaaagttagctgctgtttttgctgtggttcagaagagatctctcttggaacatcttgatcaacaaggtgttcaacttcacggttaactctattattctgtatcatgctatttgacaccaaatccttagcttcaagagcttgggacagctgttctttgagatgagtaacttcagcatgcaattccatgcattcagttatcttctcattcagctgatcttgtatcactctattatctgcagccttcacctcaagttctaaagatttctcattgagctgctcaagtagttcatgataagacggtgaatgctctaacgtatcgacctttccttgagttcctaatgttgcatgagctatctctctctccaaagatgctatctgttgctgcttccccttaatttcatcggtcttcttcttcatttccatctgaatcttctcgttctttgggcttcttccagcttcctctgtgaggcgcttaagagcacttgtattaaacgcaacctcccctgacaaaattttcaactgttctctcaacaaatcaacatggtccatcgtttttccactggccgaaagagtttcttcgccgtgaatactgccagaaggaaattccccatgaccaatgctaaacagatcagctgatacattctcaccagctaatgaatttg

SEQ ID NO: 261859 - DNA, 770 bp, Zea mays
aaaacatgtccagaaaaataaaccaaccaagaagagaaatttcagcatctgtgcagtttgtgaatagttgcaacttcagtgccatgtacataatagacaccaatctatagcaagatgattttcttgaattctagtagttgtgatgaaaaacagacatgtattctctcagaagcaaagataattctagtagctggtatcggctagcttgggtttcgatctgatcccatggcttctgctgccaatttcgcggcgtcatcctggcaaccggcgtccccatctccatggaccgcgccgcatgtcaccttcgtcacgccgtcctggcaaccgccgtccccatctccatgggctgcgccgcatgccaccttcgtcacgccatcctggcaaccggcgtccccatctccatgggcagcatcgcctgccaattttgtcaccacatcctggacgccggcgtgcccatccccagggacaacgccaaatttcgtcacatcatcttcgttgacggcgtctccgtccccatgggcgacgccactaggggcagccacggctcagcaatcaccagctccatcgatggggggcttgtggaccaacataagggctgatctcgcaaatatgcaagccacgctacaaaaggttaagcaagggctggtgcaaatcaagatagcagtgccacatgagcagcaccagctggcgttgtccgctcggctccagacgtcgacggctgtgggcatacaagttgctgctcgtggcttccttgcacaaacacgcgtccg

SEQ ID NO: 261860 - DNA, 762 bp, Zea mays
cccacgcgtccggtccaatgcgcggagggtgtccgccttatcttatggggtcaaaaaaaacagattcagaataataagataagccgagatgtaaaagttttgtcttctaggtttctggttttgggtcaagtagactcggtctttgagcacacgtcatgctgcagctcgaggacgagctgcttgtccaggaggggtgtagtgtcagggcctaaggaggcccacggaggggctgcgacagcagcaggcataggccctctaagggggattagataaggatagttagagataagattagaagattagttgagattatctaggagattagttgagattatctaggaaggttatcagttagtagtttgttgagagtttttaggagagttttaagcagataaggatctctagttagatagggacggctagctagcctatttatgtaatcaatggatgagaaataaaggaggcaagaattagaagggacaaaccctcctcttgctcggccgtggggccgtgggcagaggcccccggccggcgttcctgcccatcgatacccctctccaatccctcaccgatctagcgaccattacatctggtatcggctaccttgggtttcgatctgatcccatggcttctgctgccaatttcgcggcgtcatcctggcaaccggcgtccccatctccatggactgcgccacatgtcacattcgtcacgccgtcctggcaaccaacgcggaggaagtggttcgccaagggaattcgggac

SEQ ID NO: 261861 - DNA, 527 bp, Zea mays
ccttctgctatgactcctcgactttcctttggagctctgcttccttttgctccttctccataagcaatgcctctagagccttttccctttcatggcttgcattcgtgtctcgtctgctagctggttctcgcctactcatgctttccctcctagtacctcttggtccattgttgaatctgcgtggagctggagttggacttctcagcgatgacaactcggtcgcaagcttctcattttggttcatcagtttggtcacttcttctgacaatgccttcaattcgacaccagcagctgaagccaatccttttgcatatgtactttcctccagtagcttttgattgcgatcctcaagttgagctttgatttccatgagttcagacaccttttgcttcagctcattgatttcaacggactgctgtttttgctgtggttcagaagagatctctcttggaacatcttgatcaacaaggtgttcaacttcatggttaactctattattatgtatcatgctatttgacaccaaatcc

SEQ ID NO: 261862 - DNA, 2682 bp, Zea mays
atcgtggacgcgtgggttttaacgccacctcgcgacgcggcccccaacccccaccgctgcggtgctactgctaccgtgctacaccatcaggaatcggacgcgggacgctacaccaccaccacagctccccacctccaccctcgccgcgagttgctcagtcgcagactcgcagcgagcgaggcgggggcctcactcagcgcggggcgaggcgagcgtcccgggtgggcagcgtcgcggtcgcgggctcgatcgggttgggacggggaggtagggaggaggggccagggatctccactctcgtccgtgcgggagcgcgggcgtcgcatgcggcggcgcgccggggcaaatgctggtagcctcacgggcggaggagcgctcacgctgaggcggcggccggggagcgatgcaggcgccggagcagcagccgcagcagcagcagcagcggaggaagggttcgtcagagatggacttcttcagtgaatacggcgatgcgaacagatacaaaatccaagaggtcattggcaaaggaagttatggcgttgtttgctcagctgttgaccaacatactggtgacaaggtggcaatcaagaaaatacacaatatctttgagcacttatctgatgctgcccggatcctacgtgagatcaaactgcttcggctattacgccatcctgatatagttgagatcaagcatataatgctgcctccatcaaggagggacttcaaagatatctatgttgtatttgagctgatggatacagacctccaccaagtcatcaaggcaaatgatgatttaacccgagagcatcatcagttctttctctatcagatgctccgtgcactgaaatacattcataccgctaatgtttatcatcgtgatttgaagccaaagaatatattggctaatgctaactgtaaacttaaaatatgtgattttggattggcaagagtggcattcaatgacactcctacaacagtattctggacggattatgttgctacaagatggtatagggcccctgaactgtgtggatctttcttttctaagtattcaccagctattgacatatggagtatcggttgcatttttgcggaagtcttaactgggaagcctttgtttcctggaaaaaatgtggtccaccagttggatttgatgactgatctcttgggtactccatcacttgatacagtttctcgaattcggaatgagaaggcaaggaggtatttgaatagcatgaggaaaaaacagccagtatcatttcccggaaggttccctaaagcagatcctgccgcgctcaaacttttgcagaggcttttggcatttgatcccaaggataggccaactcctgaagaggcattggctgatccgtattttaaaggcctcgcaaaagtagagagagaaccatcatgccagccaataacaaaaatggagttcgagtttgagcgaagaaaggtgaccaaagaggatgtcaaggaacttatattcagggagatattagagtatcatcctcaacttctcaaggattacatgaatggaactgagaaaacaaactttatatatcctagtgctgttgacaatttccgaaggcaatttgctaacttggaggaaaatggaggaaagagtgtggcgcacaccgcttcatcagacaggaagcatgtttcgctcccaaggacaaccacagttcattctaatccaatccctccaaatggaacctcccaagttccccgaaagattcccacaggtagaccaggaagagtggttggttcagtaataccatttgagaacgcaactgctgttgatccatacagccaacgtagggtctcaaggaatccagtacttcctccaaccacgtcgaacatgtcagcctatgcctaccaccggaagtcagacaactcagacagagagctccaacaggagctggaaaaggaccgcatgcagtaccagccagcacagcggttcatggacgccaaggtagtatcacagatgtcccctgacttgaggtcttcctactacataccaaaaggtgtcccaaaggctgatcccgcagatagaaccgctctgcattctagcatgattcatgggatcgcccctttcagtggcattgcagctgttggaggtggctacaacaaggtcaatgcagttcagtatggagtttctaggatgtactagttctagttgcattggccatctccgaattcctcagctgatgagttgaagtaataacatggcgaagaccagatgtaggtaccgaagaactgccataccggctctgagccaaagatagaaaacatggaatacggatctcggatcgaggacgtgtccgtcagattgaaaacagatactgggcagcagtcatggttctgtccattggacctagcttttcgggaagcaatgccatcgccccgcggaaacggtaaaataaaaggagaaaaaaaaatgcagtactgtcagttgattgctgcttataaagaagcaaagggggcagagacgacgatttttacaggtaaaattatgtactttgcaaggagggaaacatgtgggaataagtagtgagcctacgtttagctctgtatataaagtgacttgattttatatgtactattacggctggtgaaacacgcttctttaattcaaagctatggagttttggcctaaataccataggcagctcagattgatcc

SEQ ID NO: 261863 - DNA, 397 bp, Zea mays
accacgcgtccgatggagtatcggttgcatttttgcggagatcttaactgggaagccattttttccaggaaataaaggctgcccagccttgatctcctggaaaaaatgtggtccaccagttagatttgatgactgatctcttgggtactccatcacttgatacagtttccaggattcggaatgagaaggcaaggaggtacttgagtagcatgaggaaaaaacagccagtaccatttactgaaaagtttcctaaagcagatcctgctgcactcaaacttttgcagaggcttttggcatttgatcccaaggataggccaactgctgaagaggcattggctgatccgtattttaaaggcctcgcaaaagtagagagagaaccatcatgccagccaataac

SEQ ID NO: 261864 - DNA, 751 bp, Zea mays
cggacgcgtgggcaggaattcacgtcgatcgcttgagttagtttgcagccaagatgaacgacgccgacgtcgggaagcaggtgcagcagatggtccggttcatcctgcaggaggccgacgagaaagccagcgagatcagtgttgccgccgaggaggagttcagcatcgagaagctgcagctggtggagtcggaaaaacggagggtgcggcaggagtacgagcgcaaggagaagcaggtggacgtccgcaggaagatcgagtactcgacggagctgaacgcggcgcgcatcaagctgctgcgggcgcaggacgacgtggtgaccgggatgaaggagagcgccggcgacgcgctgctccgcgtcaccaaggacgccaacgcctacaagagggtcctcaagggcctcatcgtgcagagcctgcttcgtctgagggagccggcgctggtgctgcggtgccgagaggcggaccggagcctggtggaggcggtgctggaggtggccaagaaggagtacgccgagtaggccaaggtcaacctccccaagatcatcatcgacggcatggtctacctgccgccgcagaggaccagccgcgacgcgcacgggccagcctgctccggcggcgtatgtgctcgcgtcccatgacggcaagatcgtctgcgacaacactctggactccaggctcaacgtctactgcaggcgtaagcttcatgagatcatgatgaaactctgcagctagcgagtatcgtgctaat

SEQ ID NO: 261865 - DNA, 774 bp, Zea mays
ttgtcgcgtgggcggacgcgtgggcgcgcgctccctggcttctctcccacccgctgccgcctctatctctcccttccctcttctctctccccttacctctctcctcccttccctcgcctcgctcctctccccgaccgagtagcagcggccgagccgccctcccccgacgtgcctgcaccgaccgcgcccaggtccatgctcaatctagcttcccttgccgcaatcgcaagccccggccccgcaaggcgataggaagccggtagttcagccgcggcttcggttccgccgttccggagatggggtccggcatgagcagcgcccggcggcgccgcttcggcctggaggcgtcgcgggggatgctgcccctgctggctctgcaggtgctcatcgagtacggccgcgcgggggcctcccgcccgcccgtcacggccgcgctgctcgccgccaactcactcgtctacctccgccccggcgcgctcgacggggtcctgccctcgctcgcgcgcgtctccttcaaccctcagctcatcatcgagtatggcgacttgacgcgctttttcctgtcacccttctaccacttgagtgaaagtcacctcttctacaacatgacgtcgctgctgtggaagggcattcatctcgagacatcaatgggtagtgccgagtttgcttccatggtcgcggtgctgcttggcctgtcgcagggtatcacgctgctcctgtccagaggcttactctagctcggtgacgataccatgtactatgatcagcatgccg

SEQ ID NO: 261866 - DNA, 980 bp, Zea mays
agaaggtctaaagatccttcaaaaggtgaaagcaacatatgaccttccgatagtcactgatgtgcacgaaagccaccagtgtgaagctgttggaagagttgctgacatcatacagattccagccttcctctgtcgccagactgatcttctagtggctgctgctaagactggaaaaattatcaatatcaagaaaggacaattctgtgcgccttctgttatggtgaactctacagagaaagtaaggcttgctgggaatccaaatgtgatggtctgtgagcgtggtaccatgtttggctacaatgatctatttgttgacccaaggaaccttgagtggctgagggaaagcaactgcccagttgtagctgatgtaacacatgctctacagcaaccagctggaagaaagcttgatggtggaggtgttgcaagcggtgggctacgagaactaataccgtgcattgcaaggacttctgttgctgttggtgttgatggtattttcatggaggtacatgatgaccccttgaatgcaccatgcgatggcccaactcaatggccattgcgcaatctggaagagctgttggaggaattaattgcaattgctcgagttaccaagggaaagaagccattcaagatcgacctcactccgttccaggagtgatctgctttggttgatagaaagcacaatgccaccatccatggaattccacagggtggatttcaatatgaattgagtacttgctattgttgggagcatacctgcagtggatgacttaggctatctctagcagattctttatctcattccgtattttatttcctttttcaaactccactctgcaaacagtgtcaaacagtgttgtcatctacagtttcgcattccctgttttaccctatctactcgagacagtcttatcaccgaacaaactattgtgttgaaacctgccggattggtttgtgttaaaaaaaaaaaacccacgcgtccg

SEQ ID NO: 261867 - DNA, 1435 bp, Zea mays
attcccacagggtgaaggtgtcgaccacaccggacggaagagttgtggacctcttctttatcactgatggcatggaactgctgcacagaaaggagaggcaagaggagacctgctcggcgctaactgcaaccctgggcccttccatcagctgcgaggtcgtaccagcagaagggttccagcaggggttctcttccctcccgccggagatcgccgaggaactgttcagggcggagctagctgacactgacagcgaggtgtgctcgagcccgctcagcgcggagctgaggaaggtccggacgacggccactgtcaacttcgacaactccctgagccccgcgcacacgctggttcagatcgtctgcgctgaccagaaggggctcatttacgatatcttgaggacgatgaaggactgcaacatccagatattttacggccggttcagatcagacaagaaagggtcagccagcaaaggttcatcaggttgccgtgaggtggatcttttcgtgaagcaagtagacgggaagaaggtgactgatcctgcgaaacaggacgcgctgcggtcacgcctgaggtccgagacgctccatccgctcagggtcatggtcgtcggccgtggacccgacacggagctcctcgtcgccaacccggtcgaggcctccgggaagggacggccgcgcgtgttctacgacgccactcttgctctgaaggcgcttgggatctgcatcttctctgctgagatcgggaggcaagcggcgtccgagcgccactgggaggtgtacaggttcctcctggatgacagcaaggagttccccttggcaagcagcctcgctaacaggaactgtgtcgtcgatagggcgaggaagacgctgatgggatgctacaactgagacttgggtgggtgtcgatctgtatctgtctgcaagaatccaacgaagcagtgcaagtgcaatgcaaggcttcccccatccacagatgcatttgcatgctatgctgcttcctggagttgtgcacggggatggtttgaaaccagagttgtggacagcacagactggaatgaatgaacatcttgctgccatggatccattgcctacggaagaaggagcatgcttggtgtggaggtgcgatgcaatggcggttttttgttgttgttgataatgtaagaaacatgttccagccttttgcatcatatcaaggatgcatatggcttcatagcatattcaacctgacaaaagcagcaacaagtagcaatgaagcacatggttctcatgaacacataataagaaactaagaggcctcaatcctagcattgcatcgccatccatgtattgtaaaaaatgttcattgccaccacttccaatgcgtgtcaaaaaccctttcaaaaaaaaaaaaaactaaaaaaaaaaaaaaaaaaaaaaataaaaaaagaagggagaca

SEQ ID NO: 261868 - DNA, 619 bp, Zea mays
tccacgcgtccgactagctccagttctccacatgccgcaccgccgcgtgcagcaatccagagacatgactggccacgttcgtcctttctctctccgaatgaagggagctgctgcacaagaaggagaggcaggaggagacctgctcgacgctaatcgctgccctgggcccttccataagctgcgaggttctgtcggcggaagggttccagcagggattctcctctctcgcgccgaagatcgacgaggagctgttccgggtggagctagcaggcgacggcgagatgtgctcgagctcgcttattagcgcagagctgaagaaggtccagactgccaccattaatttcgacaactccctcagccccgcgcacacgctggtccagatcatatgcgccgaccagaaggggctcatctacgacatactgaggacgatgaaggactgcaacatccagatattttacgggcggttcagatcggacaagaaagggcggccaggcagcaaaggctgccgagaggttgacctgttcgtgaaacaagtggacggcaaaaaggttacggatcctgagaagcacgacgctctgcgggcgcgcctgagattcgagatgctccacccgctcagggt

SEQ ID NO: 261869 - DNA, 500 bp, Zea mays
ggacgcggtggacctgggcttgttcccagttcattactgccttttgatgtttcggttgtacttcgtgggccatactggatacgcattatatatcgcaagaaattttctgttgacatgcgctgctttgctggggatcaggtttggctccagccagctactcctcctaaaggtggaccttcagttggtggatcgttgccatgcccacagttccggcctttcataatggaacatgttgctcagggtctaaatgctcttgaacccaacttcatgaatgctacacaggctagtggacacttaaataacaatgcaggagttccacaaactgctcctagtgcaaatcgtttaaatgctacccctggtgtttctatggtcaggccaacatctggtgttgctaaccatgtagcagccagtttgagtcgagcaggaaatgccatgttggcttcttcggctcttgcttctggtattagtggaacttctgtgcgacttactgctggagctgg

SEQ ID NO: 261870 - DNA, 1735 bp, Zea mays
aaccctcttggaggtctgataatcaggtagacaatgaggctggagagtctggtggatataggggaaggggaagaggaggaagggggcaatatggaggacgaggtaaagacaatggttggagaaatgatgatagaagcaattctgggtttggaagggaaaataacagtggcgatggaccaaaatggggtggtggaggtaattggaacgctacaaatccaccaagtagcagtgtaggcaccaagtcatatggtcaaaatcagccttcctccgggagtaatcctgaggataacaaaccatctgtaggtgaacaaggtgatccttgggcaagcaaggtgtcttctactgaaggtacaggacaacagaatgattcttggtcaagtaagatgacttctcgtggtgctgaggataccagcggtggctgggacaccaaggtgaaaggctcttcctgcaatgatgggggtgaaggactacaaaatgatccatgggcaaacaagattggttctaacgaaggtaaagaacaagaagctgatccttgggccagcaagatgtcttctactgtgtgtgctgatgacaagaaaggtagctggaacactacaacaaagggcattccatctaaggaaaaggctgatgatccatggaatagtaaggggggtaatgatgacagcaagaaaactgacacctggggtgctggctcgtcaggtggggatcaggaactttcttggagcaaacctattttctctttgggggaccaggaatctacttggaacaacccaaggttcggtgacgatgacaatgcaaataatagaggtggatttggacgtggaaatcgaggcagagggagaggaaggaattttggggatggtggtgggtcatcatggaatggaggcaatagaaacgatgaatcaggtggcggaaggtctggagagccatggaacagaagggactttgatggtggcggaggaagaggcagaggtcgttttgggcgaggtgaccgtaaccagggcaacaacttcgggtcaggagatggtggcagctggggctctggcaggggaaatggtggccgcggtggttacaggaactggaacgataacaatgagcgggccttcggtgaaggtggtggctggtcccagtcccagtcttccgatgtggaatgccaactaaggaaatggcgaaggaaatcaagctttctcgaaaagcaagcccagctgggaagcacaaaacacctctggtagagatggtcaggcaggaaagggtgatgcagacaactcctggagtaagaacagatcatctccatctagcgcttggggcgctcccagtggaggagctggcggccgaggttcttggggaaagagcaacgaggatggctggaactcagcgggaggatcagccaaagagaagcctgcatggggtggtgggtcagaagcgtctaccaagaaagaggacaaaggtggtgaggggaacgggagccaaggaggacgtggtgtcagttcctgcgataaaggggcagatgatgcatggaacggcaacacgggtagtgatattgggagtggtggatggtaagatttccgccaaaataatatgaactctgtcggtgcgtgtgtctagttcgtatccgttacttcgccatgtgtactctacactaaaaagaacatggcttgtgaccatttaaacattaccttagtggtggcagtaactaggtacctttgctcaaaaaaaacaaaaaaaaaaaactcga

SEQ ID NO: 261871 - DNA, 904 bp, Zea mays
cccacgcgtccgcagttttgtgcgctggttatggtgtggtcgttggtgagactgcaacgtcctctggcagtggcacaagcctggacgccgttgctgctgccattcaaattttggagatgggttttgtgcacataaattggaacaaagctggagcttcggaccaagctggaccgaaatcttttggtggtgatggttggaacaagggtggtgatcagaatagcagttggaacagtcctggaaattttggaggtgggcgtggctttgggcgaggacgagggagaggtaggggtcgggaatctggagatttcaatggcagaaatgatcaaggaaattgaaagaattcatggggtggtgacaatgctgaaaaatcttcttggaggtctgataatcaggtagacaatgaagctggagattctggtggatataggggacggggaagaggaggaagggggcaatatggaggacgaggaagaggcagagacaatggttggagaaatggtgatggaccaaaatgggatggtggagataattggaacgctacaaatccaccaagtaatcagccttggagtagcagtggaggcaccaagtcatatggtcaaaatcagccttccacttggaataattcagaggataacaaaccatctgtaggtgaacaaggtgatccttgggcaagcaaggtgtcttctactgaaggtaaaggacaacagaatgattcttggtcaagtaagatgacttcttgtggtgctgaggataccagaggtggctgggacagcaaggtgaaaggctcttcctgcaatgatgggggtaagtgggaaaaatgttggtagcgttgagtgttagactgtgtgtgttagtgtgtgtgggccggcaccactgttgggctgccggcccattagagttaggg

SEQ ID NO: 261872 - DNA, 1244 bp, Zea mays
gaaattttgaagttcattcatgaccctagtcgtacagagtatgacttcaatggccttccaacttcgtatctgcgtcttgctgcacatcgcctggcgcaccttacttcctgcactccattgccataccagacaacagtttgcctgatggaactggttcacgtatcatccttcgtaagacaacattcgactgccgactgcctgctgtccgccttgcagatattccagttaacctgccacaagaagacatctctgtggcgaaagtagctattaagcagagacctcaaaagaatttccatggcatgaacagctcaagtgctcactcttctagagacaacctccagaaaagcgtcgaagaaagaaaagaggaatacaacaaagcacgagcgcggatatttaacaacagcaatagcagtactgctactgatgagagatcagctgaggaagtgactttacccagtactcttcacaggtccacttccttggagttgaactcaagcaatagaataggtcaaggggccgaaattactcttgagaggagcttgactaccacttcagctagcagcaggtcaaatagaagcaagattgacaaggagcctgcagtcagtagaaacaagcagaacaatagggttgcaattttcagagatcgtgagtcagagcgcaaggatcctgattatgacagaagctatgacaggtatatgcaaagatttgatcctggatttggatttagtggcggcccatacacaattcaacccctctatacccctgctgttaactacaacactgaattcccccagcttgcgtcagcacaccgatcacctgttgctgtcgaacagcaacctcgtccaatagctcagcacatgcctgcatcatggtcggtggctcaagcatctaatgcaattggctatgggccagatggtgtcatgggaccttacagccctggtgcacctgtgagatcgtctgttttcatgcatgcttcacagcaatatgctataccttctcgccctggagtcccatttgcacatccacaggaatcgatgggaccattcgcacagactcaccaacaacaacctgatgctagtctacgctttgcccggccccggtgaggggcccgggcatgcctgcacctgccagtgtgcaacaaacacattatcctttgttactggcagatggtagcaggcataaaaaaccgagaggcgtaaggcagagtcagccatctgtttgatgttgtcagcctgtatgcactc

SEQ ID NO: 261873 - DNA, 428 bp, Zea mays
aattccgggtcgacgacgcgtccggcgctcggcctcgccttccgtttccaaccaggcacctcgccacctcctcgtgggatcgcgcgcaggagcggatcgccgccgcaggagagcgttccgagtccgaatacgtacgggatggtggaggcgccggccggtctgagcgcggcggcgcaggtgagcgcgctgccgctgcaggtggatctcctgcagctgccgccggaggtgcccgcgccaggggatcccgccctgcgcggcgtcctcgacagcctcttcgcgcattggctctcgctaccgaacaccgccgtgctgctcgccagcctcgtgcacaaggccaaggccagcgccggccgccgccgcggcggcgggggctgggatgctgccctccatgttgctgcaggggggaaccggcgtgccggctattttcc

SEQ ID NO: 261874 - DNA, 796 bp, Zea mays
gcgcccacgcgtacgcccacgcgtccgcccacgcgtccggaaaacgccaccacacgcggatcgaattaggctctccgagtctccggttccctcctctcggcggcggctcaggtccctctccatctccggcgtggcgcttggcgtctgacctcaacaagcaagaaagcaaatggcaggcggcagggttgcgcatgccaccctcaagggcccgagtgtggtgaaggagatcttcattggactgaccctgggtctgatcgcgggaggcatgtggaagatgcaccactggaacgagcagaggaagactaggtccttctatgacatgcttgacaagggccagatcagcgttgtcgtcgaggagtaaagagttcttcccagttattttcaaagaactctctcgagagcatgacaaagtgattgcttgctgtggagatttgtcctggaaataagcacaaccatttgggaacaccagattttgtcgaattttcctttccttttgatgaatatttgagcacgtccatgtcaataccaaacatctggccttttctctctctcttttttacatatgtttatgtggtcttagcaagtagttgtgctcgactttgcgttatgaggtatgccgtatgtgattggatcacggtgacctaacaggccattcccacacttgtgtttttacatgacttttgagtgggtgatgcacggataatattgacatgttgcgtgcacgctcaggtggtgctctttcacttgatggcgtcgtcggttcggtcaagataagtttttaaggttttcctgttcc

SEQ ID NO: 261875 - DNA, 536 bp, Zea mays
cccacgcgaacgaattaccctcggtgccctccctctcggcggcggcggcgcaagtccccttcatctccggcgcggcaaatggcaggcggcagggttgcacatgctaccctcaagggccccagcgtggtgaaggagatcttcattggactgaccctgggtctgatcgctggaggtatgtggaagatgcaccactggaacgagcagaggaaaactagatccttctacgacatgcttgacaagggccagatcagcgtcgtcgtcgaggagtagttcccacgtgtcacctcagaagtttttttttccagttgtttttgaaaactcactctggagagcacgacaaagtgaatgctgtggagatttggcttgaaaataagcataaccatttgagaacaccagcttctgttgaattgtcttttcttgtcatgactatttgagcatgtccgtgtcgtaaccaaacatctgatctactttacaatatgtattatgtgatctttgcgattaaaaaaaaaaaaaaaaaaaagggcggccgcacggga

SEQ ID NO: 261876 - DNA, 623 bp, Zea mays
aattcccggctcgacgcacgcgtccggctgatcccagtgctgagacagctgcagttatgctcaacagaatgtccatgaagaaggtgttcagggtcatactagatactctcaccacacgcaagcagccactctatcaactcactggctgcttgaatgagcatgccaacctcaagggccccagtgttatcaacgatatcttcattatactgaccctgggtattatcgcagcaggcatgtataatatgcaccactgtaacgagcagaggaagactaggtccttctatgacatgcttgacaagggccagatcagcgttgtcgtcgacgactaaagagttcttcccagttattttcaaagaactctctcgagagcatgacaaagtgattgcgtgctgtggagatttgtcctggaaataagcacaacgatttgggaacaccagattttgtcgaattttcctttccttttgatgaatatttgagcacgtccatgtcaataccattcttgtggatggcagcaaccgcaaagatctgtagtggagccctgagctgggctcgttgcaaaatatgccagcctctcatcttcaaacagaaggggcggcgactcagaaggatcaacacttattttc

SEQ ID NO: 261877 - DNA, 366 bp, Zea mays
gtctgatcccaggggcctcttgccattcaggagtattacatccggcacaaggacgggcgcacggtcgacaacagcgccgagaggcagaaggtctcccggtgcctcgtggccgcggtggagcggagggccactcatggcgtcagggtggaggtgcgcgccgccgaccggtcgggcttgctatcggatttcaccagggtgctgcgggagcacggcctgtcgctgctgagagttgagctcaagaggcacaaggacgaggccttcggcatattttacctcgtcacggacaccggaggcgaggtgcgcgctgagtcgttgcgcgccgtgcaggcgagggtcgccgagatggatatctcgctcgacgttgtg

SEQ ID NO: 261878 - DNA, 416 bp, Zea mays
ggagagcacttggcattagagctcaataattcggttcttttcttctgcaaggcaaaaatgatggaagatgctctttgcacttataagtgtatgagagagcaaaatatcggacccacatctcatactttttgtcatatgttgtgtggttattcttcaatggacatgcttagggagatcaccatgctgtggggagaaataaagcgcagacatgaatatggagagctagatttgaatagggacttgcttgatagcttggttttgaattttcttaaaggtggatatttttcgagggtgatggagatcattagttacatgtcaaaacataacatttactgtgacaaggggaaatacaggcgtgcctttctgaagctacacaagaacctgtataagaatttgaattcattgcatgacaaaac

SEQ ID NO: 261879 - DNA, 690 bp, Zea mays
cccacgcgtccgcggactcgtgggcggacttttgtttgaacagattatcccacaactgatgggacgggcataatagattatattgatgtcacagatttagttgatgctcatgtgaaagcactcaacaaggcagagcctagaaaagtcggcatttacaatgttggaacaggaagaggtcgctcagttaatgagtttgttgatgcctgcaagaaggcaactggggtcaacatcaaaattgagtacctcaacagaaggccaggagattatgcagaagtatacagcgacccaacaaagatcaacaaggagctcaactggacagctcaatataccgatctcaaagagagcctatcagtcgcatggaggtggcaaatgtcgcatccgcgtggctacgggccaaactaaatatagcctgctgatctataattcacttaatcgtcaatacatattagttctttagttagagatacaagatcttgctgcgatactcctcaaaatcagtccttcatatgcttctttctctcgtcctttttatttcaaaggtttgcatttttggctagcagaaacatgaatggtgatttggatgaaaaaaaggacctgtgatgacaatttcgttgtgtctgacacattgttggtaaaaaaatgtaaattgcttcagccaatgagctgcaagattgattgaattgagttaag

SEQ ID NO: 261880 - DNA, 681 bp, Zea mays
  unsure (1)..(681): unsure at all n locations
ccctggtgtccatttggttggaatccatgatgataatgatatggtatcctttgtgcgatctgcagctgatcttgtccacatcggaacagatgttgaaagggctcttgatcaggcccgtgtgttatatgacatggacagcgatgatgaagagtggatatcaagccggcggaaatccttagcaagagacaacaccgccacacttcaggtggcagaagatttgtttgagagggttatggacaaactagagaagtttgcatatagccacgactctgatggactcagcattgttcagatgaaggaactggagactgatgatgtacctctgcacactattgaagtgatacatgcatattggcaagacaagaggcagaaaaggggaatgccacttattcgacattttcagtcggctatgtggaagatctacgagcagcagctgcatgaatgggaatcaaaagtatgcagaatgcagagttcatcaaatgggtaccaagaaaagaaattgcctcccaagcctgcattgtttgccttctgtttgaggcctcgtggactccatgtaccatacaaggggccaaagcagcgttctcataagaagcttatgtccacaggctgccatagcttttcaagagagcatgatggcttttaccggcaagtatcaagcangagatacaatgaatgcactgg

SEQ ID NO: 261881 - DNA, 674 bp, Zea mays
aagttccggtccggaatacccgggtcgacccaagccttccgcaacccttccgagggattgccactttttctacatttccagttcgctatgtggaaggtcgacgagcaacagttacatgaatgggaatcgaaagtatgcagaatgcagggttcatcaaatgggtaccaaggaaaaaaaatgcctcccaagcctgcattgtttgccttctgtttgaggcctcgtggactcgatgtaccatacaagggaccaaagcagcgttctcataagaagcttatgtctacaggctgccatagcttttcaagacagcatgatggcttttaccggcaagtatcaagtaggagatacaatgaatgcactgtggatgggcggatatgcgaattatatgacattggttctctttattccctaacagggtactctcccaggttctctacaagaacaggttctcttcgggcatttgagtcctcggaaagttctacaccaagatttttcaggacaaatattgtcaaaaggagtgcaaccgttgctttctctgatgatcaccagccgtcgccttccttccgccctcagagagttaaacggagcgcatctgaccattggaacactgtcattcatgactggcagaactcaaagcatctctttccgggctcgccccctgttgatattgaggagct

SEQ ID NO: 261882 - DNA, 764 bp, Zea mays
ataagtgttgaattagctggaagttcagttcaattgccccttgtgtggaatattcaagtgagcacatggctacgatactatgtctatgagaggttaattcagaaaggaaagaaaccaggtttccttcaattgttgggtacacagacagtcagtgccatctggcatggactatatcctggatatatcatattctttgttcaatcagcattgatgataaatggttcacgagttatatacagatggcagcaagcagcgagcagttcattcctgagcggtatcctggcctttctaaattttgcttatacattgctggtgcttaactactcctgcatcgggttccaggtactgagcttcaaagaaaccttggcgtcctaccggagcgtatattatgttggcacaattgttcccattgtgtgtcttctgctgggcaatgttatcaagccagcaaggaaggcgaaggctcggaagaccgagtgaggaaatactcactcaagtgacctttacatagaagaaagatggtgaagcttcaacgaagataaggacattctagttttcaatttatttattctgtctttttgtacggtatcaaatttagcataaggataatgtggtgaccccggttctcctacctcggaactcgattgcgattgatcaatcattaaaacgtgacataaccactggattttcctttacttaatgactactcatacgtgtgtgcgaatgattttttgtcctgacgggcctttttctattgtgttcccatc

SEQ ID NO: 261883 - DNA, 1569 bp, Zea mays
gtttctttaccctaaccttttcaccgctcgagccaagggacacagccgccgccgtttcttcatctcccatcttcatagtcgcgctaggcacacaggcgtcggcggcggcgctcaggctcgggatctcagctacagcgtcagcggcttcctctcccgcctctcgccagtcgtctcgcgccctcgcttccgatcctccgcacaccggccggtgaccctgcaaatggcagggcaggcagggaccccagtaacccaccctataagtccccacgtgataagtggcgctttcgttcagcaatattaccacattttacacgaacaaccagatcaagtgcacaagttttaccaagattcaagtattcttggtcgaccagattccaatggaattatggcatatgtaaccactatgcgtgatattaatgaaaaaatcatgtctatggacttcaggaactgcttaacagagatagagactgcagatgcacaattatctcacaaggatggggtgctcattgttgttactggttccttgacttcggatgaaggcgttttccgtaggtttacccagtcattcttcctagcaccacaagaaagtggtggctattttgttctcactgatgtatttagatttatttcggaaaggaaaccagctgagataaatcaagttgctactcaagaaaatgaaatcagtcagaatgttagacctgcatctgaaacatgttcagcactaccagaacctattccagctgatgggagtgtgatctcagaccatgtgacagctgatagtaatgtcacggagaagcaaataagtgatctttctgctaatgggactgccattgaaagtaatgataatacccagccacctgtgcaagtgcccaaagaggatccaaagaaggccctacttgttgctcctccccctccaactcagatggatgttactaagaaatcttatgcatccattgtcaaggtcatgaaggagggcccaccaactccagttgtcaaaacaacatcgtcagtttccaaacagaagccagctcctaaaccagtgtccacggctgtcgaaggcctagagaaaccatctgagaaacctacccaggctattggaaccggtgatgggattgttgcccaaaacaactcgtctcgcaatgagcaaggctattcaattgtcatcaagaatttgcctttccatgccaatccggaaatggttgaggaggaatttaagaaatttggtactataaagccaggtggtgttcaagtccggcacaataaggttgatcgatttggttttggttttgttgagtacgagtcccagcagtctatgcaagcagcaattgaggcatctccgattcgtatggcggacaaagaagtcggcattgaggcgaaaagagccaattcacgaggtggccgtttccaatctggcaggggagtgtaccatggtgataactttagagggcgaggaagtggctatgtggacaacacaaactacagaagcagcggcagcttcaaccgccagaatgaaggggagatgtacaaccgcagagatgaaggggagatgtacaaccgcaggaatgaagg

SEQ ID NO: 261884 - DNA, 2370 bp, Zea mays
ctttatcgttttgaggagcttagcgacgggcttttaaaaagagaaaaagggagaaaataaaggcgagagaaaaaaaactgcggagaggtagcggtggatcgaaaccctaggcgcggtcggcggcgatggcggcggcggcagcagcggcagctgcagcgcctgagtcgtacatcgggagcttgataagcctcatgtcgaagagcgagatccggtacgagggcgtcctgtacaccatcaacaccgaggagtccagcatcgggctaaaaaacgttcgctcatttggaactgaaggtcgtaagaaggatggccaacagattcctgccagcgacaagatatatgagtacatactctttcgaggaagtgatataaaggatttgcaagtcaaatcatctccaccatctcagtcggcaactttacacaatgatcctgctattattcagtcacattatcctcatccagcttcgctttctacaagtttgccttctgctgcaagcacaataggagccaaccctacttcacagaatgctccatctttgattcagatgccaccgccatttcaagggaatttgcccccttaccagtctggcaccagcttacagtcatggaactcagcacctatgccatcatctgcaaatggcactggccttacaatgccaccaatgtactggccaggatattacacaccaccaactgggttttctcatctgcagccaccactcttccttaggccaccccacagtttggctgttccacaggtcctgcagcttcctgtacaatatcctggacttggatctttacctgctggatttccaaatatgccggagcttccttctttccttcaacctggtaacagtaatagtttaaatcaaacttcaggtgtacctacatctgtgtcaacgcctgcttcattgagtacatcacaaactgaatcatcaagaagccaactgccaaataagttttcatctgattcagcttctgtattttctgtgggttttactcctccatctgtgactccttcagtttcgacagttgaaccttccattcctgtgtcagcagtcttgccttctctggtgaacagtaagccagtagctctacctgactccaccatgccatctctctccactgccaagcctgtgattgtacctgatgcttcagtgcttacctatctatcatctcagccaccatctgctaatgatgtttctccagtcaatgctgcggagcacgttccattggtaacccctgggcaacttctgtcaactacttcctctacaattatatcatctcatgccttgcaaactgcttctgctgtggatctgtcctctaaggctgccccctctacagttccatcttctcaggctacattgtttgaaggttcaaccacacaggttgcctcctcttctattttgtcacaacaggtggcaatgacaaatgaaagtaaagtagccaagcagcgtgagtggaaggcaaaacaaactgtggttggtagacccggaaataaggagcccctattgcctgaaccaaagtcggtgtttcaaaagcctgtaggagtttcctcatatgtccggtacaacagtagaggtcgcggaagaggaagaggccgtgggcaatcgcatcccataaccaagttcacagaggactttgatttcatggcaatgaatgagaagttcaacaaagatgaagtatggggccatcttggtaaaagaatagggcagttaaatgatgaaccaaatggttacgaagatgatgttatagaagatgatgagatatctcctagaaagccagaagctaaggctgtgtatgttaaagatgacttctttgattcactctcttgcaaccaaattgacaatggagggaggaacggaagagtgaaattctctgagcagaggaaaatagacactgagacctttggtgactcagcaaggcatcgaccaatgggcatccgaggtaggggcccccgtggcggcgctcgtggtcgtggctattatggtattagaggatatggatatacgggtagggggcgtggctactcttacccaaatcaccagccgtgatacctcggtgtctggaagcacactgaatggcaatggtaaattggccaatttgcgtggtaaaactgagatttatcgcagattacagtgctgctgttgtaagtgtcttattagtttgtttactgatgtggttggtaattcaagaatcaacgtctcttttattgatggcagattggtgtagaagctttcacatctatatcttgttagtgtcgatggtcatttatttccttttggaggtagaagctgttagcagattgctagatgatgtaacacagatctgtccaagatcaacggaaaaacaagcagcagtattgataatctg

SEQ ID NO: 261885 - DNA, 557 bp, Zea mays
ggctgtgtatgttaaagatgacttctttgattcactctcttgcaaccaaattgacaatggagggaggaacggaagagtgaaattctctgagcagaggaaaatagacactgaggtattcacagataggcattgaatctttaccttcccatatcaccttagcattcagtgcatatcatgatttattttggctgtagacctttggtgactcagcaaggcatcgaccaatgggcatccgaggtaggggcccccgtggcggcgctcgtggtcgtggctattatggtattagaggatatggatatccgggtagggggcgtggctactcttacccaaatcaccacccgtgatacctcggtgtctggaagccccctgaatggcaatggtaaattggccaatttgcgtggtaaaactgagatttatcccagattacagggctgctgttgttagcgccttattagtttggttcctgatggggttggtaattcaagaatcaaggccccccttttttttgtcaaaacacccaggaaaaaaaaaaaaaaaaaaaaaaaaaaaaaaagaaa

SEQ ID NO: 261886 - DNA, 679 bp, Zea mays
tcggttattcttcagacacgaacttcctatgaaaatgatgtgaaagatcggaaagtggtcctattcctgaatgattgctcttgcgcaaaaaaattctgcaaggaaagggctgcacttgcagtaccaagctgtcttaagagagtcacacttggggattgtgctactgatatctgccttgagcatcaggagcaaataaatttagatggaacatctgaagctgccccaactcttgtaggacatattcaccttgacaaggggcatttagaaaggataaacattagtactcaagacattctccaaaaatgtcaagaagtttctgggagatttggaaagaagaaaggacacctttgccacatctttaaaaaaattacttttgctacttgtgattgttcattcactcacatgccaatcgatggaaagctacataaggttccatgtgtgcagtttgctttttctgatgacattgtactatccgagtctattgagagagcagtgaatgtgatagctgactctgtctgctcagtgcttttagatacaattattaaaggtgatcctcgaattcaagcggcacatgtatctgagtcgatcagatgcagcacttgggtatacaccacggatgtatcaaggcgagcagcatagaatcatgtgacaagatatctgtagcatgtgatgctgagac

SEQ ID NO: 261887 - DNA, 2339 bp, Zea mays
ctctactaccaccacacctgcgcctccacagtccacactcaccgctgcgttcttccgctcgccccctcacaacgaaacctagagagtcccgcgcgtgacatggcggacggcgcgagctcggcgtctggtctggtggagaagctcgcggagctctcaacgggcggcgccgggcagaatcctccgccggcgggtgaagtcggagaggagttgcagctctcgaagaacgcgaagaagagagaggagaagaggaagaagctggaagaggagcggaggctcaaggaggaagagaagaagaacaaggcggcggctgctgctgctagtggaaagcctcagaaggcatctgctgctgacgatgatggcatggatcccactcaatactacgagaataggctcaagactcttgattcactcaaggccgcaggtgtaaacccctatccacataagtttccggttggcatctctgtagtggaatacattgagaagtacaagaccttgaacaatggggagaagcttacagatgcgacagaatgtttagctgggaggatcatgaacaagagaacatcgtcatcgaagctattcttttatgatctttatggtggtggcatgaaggttcaagtgatggctgatgccaggacctcagagttggatgaagctgaattttctaagtaccactcaggtgtgaagcgaggtgatattgttggcatatgtggatatccaggaaaaagcaaccgaggggagcttagtgtatttccaaagagatttgtcgtcctctctccatgtcttcatatgatgcctcgacagaagggtgaaggaagtgcagtgcctgtaccgtggactccaggaatgggtaggaacatcgaaaattatgttttgagggaccaggaaactcggtatcgtcaaaggtatcttgatcttatggtaaaccatgaagtgaggcacatcttcaagacacgatctaaaattgtctcatttatccgaaagtttcttgatgaccgtgaatttttggaggtggagactccgatgatgaacatgattgctggtggagcagctgcaaggccttttgttacacatcacaatgaattaaacatgcggctttttatgcgcattgctcctgaattatatctgaaggaactggttgttggtggattggaccgtgtttatgaaattggaaagcaattcaggaatgaaggaattgatttaacacacaatcctgaattcacaacttgtgaattttatatggcgtatgcagattataatgatttgatggagcttactgaaaccatgttgtcaggcatggttaaggacctgacaggtggctataagataaaatatcatgcaaatggagttactaaccccccaatagaaattgatttcacgcctcccttcagaaggatagatatgattaaagatttggaggctatggccaatctcagtataccaaaagatctagcaagtgatgaagcgaatcgttatttgatagaagcatgtgtgaagtatgatgtgaaatgtccacctccccaaacgacatcgcggttgcttgacaagttggttggccatttcttggaggagacatgtgtgaatccaacatttatcatcaatcatccagagataatgagtccattggcaaagtggcataggtctcgacctggattgactgagaggtttgagctatttgttaacaaacatgaggtgtgcaatgcatacacagagttaaacgatcctgttgtgcagagacaacggtttgaggagcaactaaaggaccgtcaatctggtgatgacgaagctatggctttggacgaaacattctgtactgcccttgagtatggtttggcaccaacaggtggttggggcttgggaattgatcgcctcacgatgttgctaacagattctcagaacattaaggaagtacttctattcccggctatgaagcctcaagagtagtaatccacagccaaaagccacaaaaggctcaaagcaaacatgatgctacataggctggaggatacatcaaagttggacctgttgtgaattatacttatttttgcccttgtgcgtgcgaggtttccatttttcattatttgtatttcccagcagacagttattaactaaatactgtaacgtcacagtaagttcagtttaacttcaaacattgtagttttgaggagattgcaaatatttcgggtcaatgcaattagtgcttttgatagccatgcaaaatgcctcttctcgtcatgatcgtgtttgctttatgctgatgttcagccatcattcaggttaaactggcatgtaaatgtaaaccgtgcaatcagctgggtttgatattataaattttaattggc

SEQ ID NO: 261888 - DNA, 555 bp, Zea mays
  unsure (1)..(555): unsure at all n locations
ctcangcgtccgcctaaaccctactaccacttgagcctccaccttctccgcgtctcattttcttctccgttctccttccgctcccctcttcacaacgaagccctagtgtcccgcgacatggcatctggtctggaggagaaactcgcggggctctcaacgggcggcgacgggcaaaatcctccgccggcgggtgagggcggagaggagccgcagctctcgaagaatgcgaagaagagagaggagaagaggaagaagctggaagaggagcggaggctcaaggaggaagagaagaagaacaaggctgcggctgccagtggaaaacctcagaaggcatctgctgctgacgatgatgacatggatcccactcaatactatgagaataggctcaaggctcttgattcactgaaggccacaggtgtaaacccctatccccataagttcccggttggcatttctgtacccgaatacattgagaagtacaggaccttgagcgagggggagaagcttacagatgtggcagagtggttagctgggaggatcatgaacangagaaca

SEQ ID NO: 261889 - DNA, 897 bp, Zea mays
agaggcgacggtttgaggaacaactaaaggaccgttaatctggtgatgacgaagctatggctggggacgaaacattctgtactgcccttgagtatggtttggcaccaacaggtggttggggcttgggaattgatcgcctcacgatgttgctaacagattctcagaacattaaggaagtacttctattcccggctatgaagcctcaagagtagtaatccacagccaaaagccacaaaaggcaaagaacgatgattgcctattaccctgtgctgggcttgaggtggatgagggaacatacaccctacactatggtgatatttcaagatatctgtatgattctagattcactgggcgtgctgtgtccattgttctactttattggaagttctgtttgagatgctgcatcttcagttgtctactgccccggtgctgattatgttgtataattcagacgtgctcattgttgattttgtacacgagtttgcactgcataggcagataggctggaggatacgctaacttggatatttgtgtcacagctcaaagcaaacatgatgctacataggctggaggatacatcaaagttggacctgttgtgaattatacttctttttgcccttgtgcgtgcgaggtttccatttttcattatttgtatttcccagcagacagtttattaactaaatactgtaacgtcacagtaagttcagtttaacttcaaacattgtagttttgaggagattgcaaatatttcgggtcaatgcaattggtgcttttgatagccatgcaaaatgcctcttctggtcatgatcgtgtttgctttatgctgatgttcagccatcattcacgttaaactggcatgttaatgtaaaccgtgcaatcagctgggtttgatattgt

SEQ ID NO: 261890 - DNA, 1093 bp, Zea mays
gtcaatctcacgtggcacgcagtcatcatccatccatccgctccaggctccagctctaggggagtgcatcctcctcctccagcccctcctccttcccctaccctccccgcgcgcagatcccgacgcgggacgcctgcattcccttgcgcgggacgcgacaactccacgctacacagttcacacgccaagcgagggccgcatctagatccgcgccgccgagctgacttgactattggacggccgccgcggggaggaatgcgggcgtcctcgcgctcttcgacgtcgacggcaccctcacagcgccgcgcaagggggtgacgccagagatgctagagttcatgaagcagctgcgccagcatgtgacagtgggcgtggttggcggatccgatctggtgaagattaccgagcagctcggcagtacagttattactgattatgattacgtcttctccgaaaacggcctggttgcacacaaaaatggccaactaattggaacccaaagtttgaaatcatttatcggagaagacaagctgaaggaatttattaacttcactcttcattatattgctgacttggatatcccaattaaaaggggtacattcatagagttccgaagtggaatgattaatgtatctcctataggaagaaactgtagccaagaagaacgtgatgaatttgagaagtacgataaggtgcataacatccgacctaaaatggtgtcagtgcttcgtgataagtttgcacacatgaacttgacattttctatcggagggcagattagttttgatgtatttccccaaggttgggacaaatcttattgcttgagatatcttgaggaatttcaagaaatccatttctttggggataagacctactagggtggcaatgactatgagatatttgaatctgaaagaacagttggtcatacagttaccagtcccagtgacacagctcagcaatgcagatctctctttttgtcttaagtgatcttcagcttattttcaacacatatttattaagtcatctttgactgaatgcctttttggatttttttcaggacaattcattgctaccattttttctttgaataatt

SEQ ID NO: 261891 - DNA, 462 bp, Zea mays
acaggcgcgggaccctgcattcccttgcgcgggacgcgacaactccacgctacacagttcacacgccaagcgagggccgcatctagatccgcgccgccgagctgacttgactattgcaagtttgcaacccaccgccacgccttcttctccccccggcccgcgatctacccggcccgggcgccgttgctgctactgctattactaatactactaccgcgtcgtagcggaggcagggacttgaggagcgggtgggttgcgatggccgccgcggggaggaatgcgggcgtcctcgcgctcttcgacgtcgacggcaccctcacagcgccgcgcaagggggtgacgccagagatgctagagttcatgaagcagctgcgccagcatgtgacagtgggcgtggttggcggatccgatctggtgaagattaccgagcagctcggcagtacagttattactgattatgat

SEQ ID NO: 261892 - DNA, 1356 bp, Zea mays
gttatagctaacttcccggccgccgctttcctttccctcgatccacagctcgcgccgttcctgcaagtgcgcacccatcgtcccgcctacgcactgccgcccaacgatctacgagctgccatggctaactcagcggcaccgggaggaatgaggtcgttcctgcaggccgtgtctacggtcaccgaggaggcgccgacgccactccgcgtcgtccagatggagggcctggctgtactgaagatcatcaagcactgtgaggagtttgcgccagctttagttacaggtcaattgcttggtttggatgttggtagtgttctggaagtgaccaactgttttccgttccctatcagggaagaggatgatgaagcagatgcagatggtgccaattatcagcttgagatgatgaggtgtttgagggaagttaatgttgacaacaatactattggatggtatcagtcttgcttgcttggatcttttcaaactgtggaactgattgaaacatttatgaactatcaggagagcatcaggagatgtgtgtgcattgtctatgacccatctagatctagtcaaggcgtgctagctctcaaagccttaaagcttacagactcgtttatggatctttaccgtaacaatggtttaactggggagaagttaagggagaagaaattgtcctgggttgatatttttgaggagataccaataaaagtttccaactcagcgcttgtcagtgcctttatgaaggagctggaacctgagtcacctgttacccagtgtgacctggaccgacttaaattgtcaaccgccccctttatggaaaggaacttggaatttctgattgggtgcatggatgatctttcatcagagcagaacaagttccaatattataaccgcaatctctcaagacaacagtcacagcagcaggcatggcttcaaaagagaaggcaggagaacatggcgaggaaagcagctggtgaggagccactaccagaagaagatccatccaatcctatatttaagcctattcctgagccctcacgattggagggctatctagtaactaatcagatctgcagttactgcaaccatatcaacggggttgctggtcagaatttcgacaggctatacctgatgaaggccttgcatgaggattagaagactgggctgtgatgaatgctgttagaattagcttgtgatactgctcaaaatcgtaattttgtgatgtacctttacatgggcgtgcctgtcctctacttaatgtttccatggaccagatggttagctcgtgatacttaatgtacttgcatatgtatgcgttgccgtataaaccaattttctccattagtatttttgtgacgc

SEQ ID NO: 261893 - DNA, 532 bp, Zea mays
  unsure (1)..(532): unsure at all n locations
ccacattggtatcatttcaagtgattgaacaatcgtagctttgttgcttatttcagtatgtgactattagatgccttcctagcatgatcatggtttttattttctcctattttgcattttatacataacattattcacttattccaggagagcatcaggagatgtgtgtgcattgtctatgacccatctagatctagtcaaggcgtgctagctctcaaagccttaaagcttacagactcgtttatggatctttaccgtaacaatggtttaactggggagaagtacaacctcttttctgtagctcatcattgtactagtttgtacaaatattttttatacaatgattttttgctgttgcaggttaagggagaagaaattgtcctgggttgatatctttgaggagataccattaaaaagttccaactcagcgcttgtcagtgcctttatgaaagagctggaacctgagtcacctgtaacccagtgtgacctgtaccgacttanattgtaaaccgccccctttatgaaaggaact

SEQ ID NO: 261894 - DNA, 332 bp, Zea mays
agactcgaacgtcctgctctctgctctcccccgcagacaaaaaaaccctagaattcccagccgccgctctcctttccctcgatccgttcctccaagcgcgcacgcatcctcacgccagcgcaccgccgcccaacgatctacgagctgccatggctaactcagcggcaccgggaggagtgaggtcgttcctgcaggccgtgtctacggtcaccgaggagacgcggacgccgctccgtgtcgtccagatggagggcctggctgtactgaagatcattaagcactgtgaggagtttgcgcctgctttagttacaggtcaattgcttggtttgatg

SEQ ID NO: 261895 - DNA, 701 bp, Zea mays
attaataaatctgcagtcaccatccatattccatccggactcccgcccgtctcggatccaggtccagggacgccgccctgcacccgcgccatgccgacgctcggcatcgcgcggctgctggacgcctccttccggcgccgcttcgccgcggcgggcctcgtcgaggcctccgtcccgctggacggcggcgcgaccacggtgcactgctggcgcttcccgccgagcgccgacgacggcggcggcgaggacgcccgccccgtcctggtgctcctgcacggctttgggcccccggcgacgtggcagtggcggcgccaggtgggcccgctctcgcgccggttccggctcatcgtcccggacctgctcttcttcggcggctcgtccacgtcgtcggcgcccggcgtctccgaggcccagcaggcggaggcggtggcgaaggtcgtggcggctgtggcgccggcgccgccggcgcgcgtgtcggtggccggcaccagctacggcgggttcgtggcgtaccacgtggcccggttgctgggccccgacgccgtggagcgggtgtggtcgccagctccgacctgctcaaggccgacgccgacgaccaagccttgctccgccgcgccggcgccgagcgcgtcgaggacgtcatgctgccgcgctccccggaccggctgcggcgactggtgcagctcgcctaccaccgcccg

SEQ ID NO: 261896 - DNA, 656 bp, Zea mays
ctaatccaacccgcccgataaaaactctaccgccagatcagcaacattcccacgccactcccagagctcctaacccggaaccacgaaggggatccatggcggcggcggcgggttggctccgacgtgcggcggcggtatcgctgccccgcctgccttccggacttcccttcataccgcctcctccttccggccctctcaccgaggcgcagtcgctcggggtccccggcctcggcgccgccgccgggccagccatggagctcatggccgtccctaagaagaaggtctccaagtacaagaaaggtttgaggaatggacccaaagctttgaagcctgtgccggtgattgttcgttgcaggtgctgcggccgagtgaagctaccccacttctattgctgcagtggagaaagaggaaacccaagcgagtcgaactcataaatgttttgttttcctactttgctcactatgctacgtctgaaatctggacatcgtaataccaatgaaataaattgtcagatcgctcttggtattcaccttgttctccttccaagcattgaatcaatacacacttactctagtttgaattcaaagtgtaagaccatcatcaagagcctttctaattttctgatatcatttgagtaaaacttattttttataaaa

SEQ ID NO: 261897 - DNA, 853 bp, Zea mays
gcgcgtctcacctcacacatgacacatgtaattgcttgaaaatctatggtttagaaagagggaatgagggaagtgaactagcggtccacgatactccgacgcccactttgctacctcggaaccctagccgccgcccatggatatcgccggagaccggcgccggtagcgatacgcaaaaggagtggtacgttctttgaccttgtttattgctgcgcccgaggcgtgtggcgcggggggagcaggaaggagaggggaagaacagaaggggaaggcgggcggggccgcgatgtcggtgcggatcaaggcggttgtagaccggttcgtgaaggagctgcaggaggcgctggacgcggacatccaagaccgcgtcatgaaggagcgcgagatgcagagctacatcgaggagcgcgagcgcgaggtcgccgagcgggaggccgcctggaaggccgagctatcccgccgcgaggccgagatcgcacggcaagaagccaggctgaagatggaaaaggagattttagagaaggaaaaaagcgtcctcatgggaacagcatcgagccaagacaaccaagatggagcccttgagatccctgtcagtggtgaaaagtacaggtgcctccgtttctccaaggcgaagaaatgagaaatggcctggcactgaactggaccaacacatgctctgtagtcagctaaatctagccccctagtcttgcaagacccttattttgattcaaattgcattctcttttcttgtccaggaaatcctggaatgccgttaatagaatagcggatacttatgccaaaaaaaaaaaaaaaaaaaaaaaaaaaaaaaaaaaaaaaaaaaaagggcggccgc

SEQ ID NO: 261898 - DNA, 1881 bp, Zea mays
cgtcgatatttcggatcacacttccgtctggccaccgcaaagcaccccctctccccccgtcgccatggcgagcgataaccgcgcgtcgctcctccccttcgccgccgccgtccttgtggtgctcctcgctggcggcgccgcggcggacgacgcctccagcgacgacgacgctgggacttcacggacacccggctgctccaacaagttccagctggtcaaggtgaagaattgggtgaatgggactgaaggtacaacttttgttggcctaagtgcaaaatttggagctcccttgccaagagatattcatgaagcaaaaaagtcatttgctgtcctatcaaatccaattgactgttgctccaacttgacatcaaagttaacaagttcagttgctatagcaacacgtggggaatgtgctttcacggaaaaagcaaatattgctcaagccagtggttcgaccggtttactagttatcaatgataatgaagagctttacaagatggtttgcggtgagaatgacacctccattaatgtgacaatacctgttgtcatgataccacagtcagcaggaaagaagctgaagaacttcttgcatcatggagcaagtgtggaagtgcagctatattcaccaaatcgaccaactgtggacctttcagcatgcttcttatggataatggctgtaggcaccatagtctgtgcttcactctggactgaatttgttacatgtgaacaggttgatgagcgttataatcagctgaccagaaaggatggacctgacacgggaataaactacagagaagataaagaggtcttcgagatcagcgcgaagggtgcttttatttttattatagtagcttcagttttcctcctccttctgttctacttcatgtcatcttggttcgtttgggtgctaattgtactattctgcattggtggtattgagggtatgcatgcttgcttggtcacgcttctagctaggatttttaaggactgtggacaaaagactgtacaactccctgttttgggggaggtcttgatcttatctgttggaattgtaccattttgtgcggtgtttgcaattctctgggctgtgtatcgccatgcttcatttgcttggataggccaagacgttctgggtatctgtttgatgataactgtgcttcagatggcacgtttaccaaatatcaaggttgcatcggcacttcttagtgctgcatttgtgtatgacatcttttgggtgttcatttcacctcttatattccatgaaagcgtcatgattgcagttgctcgtggtgataacactggggaatcaattcctatgctcctaaggataccccgcttctttgatccatggggtggttatgatatgataggctttggtgacattatcttccctggattgcttgttggattcagctatagatttgacagagcaaacagaaagggtgtcttgagtggatattttctctggctaattgtgggatatgcagttggccttttcattacgtatcttgcgctgttcttgatggacgggcatggtcaacctgcgttgttgtaccttgtgccatgtacattgggggttattgttattcttggttggttaagaggtgagctttatgaattatggaacttcggaaaaagtccagcagaaaattttgtcaatgaaccatgacaacaaaatccagggaagatgtattcttcagcgtagtagatagcttgaggatgtttattaggaggcaccgtgtattgcaagatgttatgtttagcattatttcaaagaaggatgctattgtgtttgaaaaaaaaatgataatacatgtaagatgctcgcatgtactcccccagtcgtttaataaccccctataagtgccgctatatagttcc

SEQ ID NO: 261899 - DNA, 602 bp, Zea mays
  unsure (1)..(602): unsure at all n locations
tcttcacgcgtccgctccagaaagcttcttctgccctgcttgccatccaaacaatggtgaagaatctgtatcacttgcacgctcagaggatgatgaggatagatcaagcactggagccggagctcacacgccgccggacagagtggtggagcgagacttaataaagcttcttagctgccatagcggtagctcatggagcgagagcagaagggctcctcatcgaacagctagaaggcgtagtagtttcgtcggattgttatgatgtgcaggaaccttcttagcaccgtgaattgattctttttagttaggttagaagcaggaacgatccatcatctgctgttgtaatttgtagctgttgacaggaggtagatgtagcaaggcagagctgtaagaacccattattattgatcttgtagcagtctgaggttttggaaattgtatcatatactaccgccgttcttgaatatttgtcgcctattgtttcaaaaaacgacaaataaaaaaattaaaaaagaatggagagtatttttatgctgctgctatgcacggctcaaaaaaaaaannnnnancnannagnanaataaatttttttaacatcatat

SEQ ID NO: 261900 - DNA, 1331 bp, Zea mays
cccacgcgtccgattttctctcactccatctcaagtcagctccggggacttgacgaggcccatctaagcacactacagcaccgggcgaggcggctaggccccctcaccgtccaccggcgactgggccggccgtcgctgccgccctgcctctccaccgtcgccggcgacgagcaccactaggtgtttttgagtctgttgcgagtgttgtggccatgtccatgttcaataggatcttcgggaagcccaaggagcaggccaactccaatgctttggccactctggacaagttaaatgagacacttgatatgctggagaagaaagaaaaggtgctggagaaaaaagcaaacgctgagcttgagagagccaaggagttctcgaaagcaaagaataaaagagcggctatccaatccttgaagaggaaaaaactttatgagcaacaaattgagcagcttggaaattttcagttgagaatccatgatcagatgatcatgttagaagcagctaaagctacaacagagactgttgatgcattgagaactggagctgcagctatgaaagcaatgcaaaaagcaacaaacattgatgatgtagacaagaccatggatgaaattaatgaacagactgaaaatatgaaacaaattcaggatgctttgtcagctcctctcggagcttctgctgatttcgatgaggatgaactggaagccgaacttgaagaactggagggagcagagttggaatctcagcttctggagcctgttgcagctcctccggtgcatccagtgcatgccccagccaacaagcaaccagcgcgccctgctccacagaaagctacagctgaagatgatgagcttgctgcactgcaagctgaaatggcattgtgatcaggtttccaatgaagaggtggaatgtgtatatgaatggcgttatgctaccaagatgaaagttgagtcaggatttattatatttgccatgtgtataatcttgggggatatttggcaagcagaaaaaaagctgctccaggcagtgtttgtttcagtgattttgggctctgttttccatcaacgacagttctgttaatgtcgcccggttagctctatgctaactattcaggtcaccaacgtgcattgtttgtcacagtatttttcagttacccatattgtctggagccatgtaagagtgttggaacgtttaaagcctcagggttcacatttgatgtgacggagggagtattacataaagtcagttgttcggatttgcagctgtaatctgtagagacaaaacactgtaagcagtagaagctgatatggattacagtcaagcgaataggctct

SEQ ID NO: 261901 - DNA, 921 bp, Zea mays
gctttttctactcattcggttaggattcgtcttacagaggcactccctaattcggggtcgcataacaaacggatcgatattacaacaaaccatattacaaaccacatcttcgtattccgcctcaccatgggcttgatgactaccatcagactgaaaacatgaaacaaattcaggatgctttgtcagctcctcttggagcttttgctgatttcgacgaggatgaactggaagctgaacttgaagaactggagggagcagagttggaatctcagcttcttgagcctgttgcagctcctccggtgcatccagtgcatgtcccagccaacaagcaaccagctcgccctgctccacagaaagttacagctgaagatgatgaacttgctgcactgcaagcggaaatggcattgtgatcaggttctcatggagaggtgaaacatgtaaatgaagatgaaagctgagtcatctatactatatttgctatgcgtgtacaaacttggccggatatttggcaaccgcagcagaaaaaagaggctgctccagcccagtgcttgtttcagtgactttggaatctgttgtcgatcgatgacagttcttctgttaatgtcgctcggttagctctacgctaattattcagatcacccaacgtgcattgtttcagtgttttgcttaattggcccatactgtctggagccgtgcatgtaaaagtgttgcagggttcacgtttgatgtggctgttcgcagcgctttcaacctcaggcaagatatgtttccttttatcagtactagagcaagactaataatacagtaggctactggctaaggatctttgtagtctctctcaacttactcgtatagcagttagctattcactgttaatatatggtctatttgtctcttataaagtttttacttatttatttt

SEQ ID NO: 261902 - DNA, 484 bp, Zea mays
tccaactcgtctcgctctcctcccccgaggccccgattatccaaaaactaaccaaaatacggaatcttccccgtggatcccaactctcacccgatctcctcgataggcttttccgtttttgcctccaaggccgcgccttccaacaagattcctcccctcctctctccgataacgctagcctccgccgccgccggcgacgaatccggcgttttgagtttctgttgccagtgcagccatgtccatgttcaacaggatcttcgggaagcccaaggagcaggccaactccagtgccttggccacactcgacaagttaaatgagactcttgatatgctggagaagaaagagaaggtgctggacaaaaaagcagccgctgagcttgagagagccaaggagttctccaaagctaagaataaaagagcggctatccaatccttgaagaggaaaaaactttatgaacaacaaattgagcaactcggaaatttt

SEQ ID NO: 261903 - DNA, 595 bp, Zea mays
accgtcccgtgtttccgtttgcttcgcctggtcaccttccgtggtgcctgtggctgtgtacgcggtcgtctccatccgacccatcaatcatccaaaaactaaaccaaatcttccccatcgatcccaacttccagtcgatctcctcgctcggctgttgcctcccaaagccgtgccttacaacgagattcctcccctcctctctccaataaccctagcctcctccgccgccggcgacgaatccggcgttttgagtttctgttgccagcgtaccatgtccatgttcaataggatcttcgggaagcccaaggagcaggccaactccaatgccttggccactctggacaagttaaatgagactcttgatatgctggagaagaaagaaaaggtgctggagaaaaaagcagccgctgagcttgagagagccaaggagttctcagaagctaagaataaaacgagcgggtatccaatccttgaagacgaaaaaactttatgagcaacaaattggacagcttggaaattttcagttgagaatccatgatcagatgatcatgttagaaacagctaaagctacaacagagactgttgatgcattgag

SEQ ID NO: 261904 - DNA, 526 bp, Zea mays
ggcttctggagcctgttgcagctcttcctgtgcatccagtgcatgtcccaggcaacaagcaaccagctcgccctgctccacagaaagctacagctgaagatgatgagcttgctgcactgcaagctgaaatggcattgtgatcaggtttccactgaagaggtgaaatgtgtatatgaattgcgttatgctgaaagctgagtcaagctttattgtatttgccatgtgtgtataatcttggtggatatttggcaaccgtcaaccgaagcagcgaaaggccgctacagccggtatttgtttcagtgattgggctctgttttctttccacagacaatttagttaatgtcgcccggttaggtctatgctaactattcaggtcaccaacgtgcattgtttgtcacagtatttttcagttacccatattgtttggagccatgtaagagtgttggaacgtttaaagcctcagggttcatatttgatgtgacggagggagtactacataaagtcagttgttcggatttgcagcaat

SEQ ID NO: 261905 - DNA, 394 bp, Zea mays
ggctgttgcctcccaaagccgtgccttacaacgagattcctcccctcctctctccaataaccctagcctcctccgccgccggcgacgaatccggtaagcgtcctcgcttctgctagacccaccgcctccagatcggtgcggcccgcgactagggagacggtcggtcgcgatccgccgttcctctgccttaggtcatcgcggtcggcgttttgagtttctgttgccagcgtaccactgtccatgttcaataggatcttcgggaagcccaaggagcaggccaactccaatgccttggccactctggacaagttaaatgagactcttgatatgctggagaagaaagaaaaggtgctggagaaaaaagcagccgctgagcttgagagagccaaggagt

SEQ ID NO: 261906 - DNA, 1381 bp, Zea mays
ctccacttatgcaagctgagaaatgcacctcggtgggtcaggagaaaaatacttctgttaagagaaatggtcagtatagtggtagcgctacaagtttaagttcttctaccggacttgtggggccatgtttctccatgaatggggtttctgggtctggaagtatggtgcctaaagttgatgttatcacaagttcagcttcagctgtgcccgtggtggcttcaggtgttaaaccctctcagccagtcaataattcagttgccaagatggtcatgtcaagcaaatccactgctaaggaatttaaactcaatccttgtgcaagggttttctctccatcttttgcaagttctaggcaagtacttgcagctatggcccctgttgacacatactacatttcacactctgcccctgaagtaccaatgggcgtacctgtatatgagtcaaagtctgtgcctggcgtttcacctctaaccaacaaggttcattgtagtaatctatctcctgcaaactatgccatttcacctcagtatgtgccgtctatcgtgggccataatgcatcaaggctagacccatccagaattggcacaccataccatcctatgcaggtgggggcaacttatactacccctagtcctcagcctgtaatggctgggaagttcagtcctgttgtttatgttcaaccaggtcctcaggatgcaatgcatggaacaaccgttggttttcaaggatggccttgccctttgttattgaattcgtaccaagctagcatgcagaaattccaaggcaacaccccggtgtatttagctcctccagtcatggcaactgggaaccttccattggtggtaccaagccctgcaccacttgtgcagccgttccaggccattcatcccatcatggtccctgctgcaagcagcgtggtcccaggaaaatacatgtgaacttgtcataccaatgacaatctccttctgttggaagagtcctggctttccagttacccctttggtttggggtatacgtctgaaaggactccgcgattttgcctggtctgttgattcacttgtcagttgctggtctgtgtccgtattttagttggaagggctttgcaacttcgtcattcttcatgctctgtgtgggttttcgaaatattctttttagaggggggaggcatggtgcagtaaaatgaaatagagagaaattgcagcaattctttgttatcttagcaacaccttttcttcttccgagagcactatgtacaaggtgacattataaaagattaagatagtgaaggccttattttcgcgaggctaatgtacattcatcttgcaagtgttgcaacttttttgaagtttgtttaagtaaaaaaagacatgaagtttgtttcgac

SEQ ID NO: 261907 - DNA, 664 bp, Zea mays
  unsure (1)..(664): unsure at all n locations
ttccccttcctcctcttggctcatctattcttggtttccattgaaggatgcaatgcatggaacaaccgttggttttcaaggatggccttgccctttgttattgaattcgtaccaagctagcatgcagaaattccaaggcaaccccccggtgtatttagctcctccagtcatggcaactgggaaccttccattggtggtaccaagccctgcatcacttgtgcagccgttcgaggccattcatcccataatggtccctgctgcaagcagcatggtcccaggaaaatacatgtaaacttgtcgtaccaatgacaatctccttttgttggaagaatcctggcgtacccattttgtctgaaaggactctagtctgttgattcacttgtcagttgctggtctgtgtccgtattttagttggaagggctttgcaacttcttgtcattcttcatgcttggtgtgggtttccaattttttttaggggcgggccagtaaaatgaattagggagaaaatgcagcgattctttgttatcttagcgacacctcttcttccaagagcagtatgtacaatgtgacattgtaaaagattcatatagtgaaggccttattttccccaggctaatgtacatcccccccgcaagtgtaaaaaaaaaaaaaaaaaaaaaanaaa

SEQ ID NO: 261908 - DNA, 911 bp, Zea mays
cccacgcgtccgcccacgcgtccgcccacgcgtccgcccacgcgtccgatctccgagaccgcgctcgtcgccgaggttcatcgcctcaacgctgaccccgccgtgcacgggatccttgtccagcttccacttcctaagcatatcaacgaagagaagatactgagcgagatttccatcgagaaagatgtggatggcttccatcctctcaacattggcaagcttgcaatgaaaggcagagagccactgttcgtaccatgtacgccaaaggggtgcatggagctcttgtcaaggagcggagtcactgttaaaggtaagcgggcagttgtggttggtcgcagcaacatcgtcgggctacctgtatccctgctccttctgaaggcagatgcgaccgtatctgttgtgcactcgcggacccctgatcctgaaagcattgtacgcgaagccgacatagtcatcgcggcagctgggcaggctatgatgatcaaaggtgactggatcaagccaggtgctgcggtcatcgatgtcgggacgaactccgtcgacgaccctacccggaagtccgggtaccggctcgtcggcgatgtggatttcgcagcggcgagcaaggttgctgggtacctgactccggttcccggaggcgttggcccaatgacggtggcaatgctgctgaagaacacggtggatggggcaaagcgggggatagtcgagtagctacgttcatctcacttctcgttgctgtacgactgtgttgcaaggatgtgagctgactcgaaaagcgtgtgttggttggtgtaacaatctgtttcccaagaataagaatgatagtcacagctgctttcctgtttaataaatgcaatgaagaaagaattttggctttaaaaaaaaaaaaaaaaaaaaaaaaagggcggccg

SEQ ID NO: 261909 - DNA, 485 bp, Zea mays
acgcgtgcgcccacgcgtgcgcccacgcgtgcgccaagaaccacagccaccgcgatggcgcagatcatcgatggcaaggccatcgccgccgacgtccgccgcgaggtcgccgccgatgtggccgcgctctcgtcggcccacggactcgtgccggggctggccgtggtcatcgtggggagcaggaaggactcgcagacgtacgtgaacatgaagcgcaaggcgtgcgccgaggtcggcatctgctccatcgacgtcgacctcccggaggacatctccgagaccgcgctcgtcgccgaggttcatcgcctcaacgctgaccccgccgtgcacgggatccttgtccagcttccacttcctaagcatatcaacgaagagaagatactgagcgagatttccatcgagaaagatgtggatggcttccatcctctcaacattggcaagcttgcaatgaaaggcagagagccactgttcgtaccatgtacgcc

SEQ ID NO: 261910 - DNA, 2056 bp, Zea mays
gcgtacagtaccctctagaagcctccgggtttttttttgtgggttgctaactactcgcagcagccagaggccagatccagccgccaaccccccaaacaaaaccctaggccaccattctgaccaccaggcacaagcagagcagaagcagacatggccaccattccgaccaccgattctggcctcgtcctcagttcctccgctctcctccggaggactaggagggccgcctcatccgtcaccgccaggctgccagccgtcgcccgccgtcgcccgcagctcctcgtgcgtgcctccgccaaggagatcgcctttgaccagggctccagagccgcccttcaggccggcgtcgagaagctcgccgccgcggtcggcgtcaccctcggacccagaggaaggaatgttgtcttggatgagtttggaacccccaaagtggtcaatgatggagttaccattgcccgcgctattgagcttgctgatcccatggagaatgctggtgcttccttgattcgtgaagttgctagcaagacgaatgactcggctggtgatggaaccacaactgcctctgttctcgctagggagatcatcaaattgggcatgttgagcattacttcaggggcaaatccagtgtccgttaagaagggcattgataagactgttcagaaattggtggaggaacttgagaagaaatcaaggccggtcaagggtagtggggatattaaagctgttgctgccatatcagctggaaatgatgaatttgttgggactatgatcgccgaagctattgacaaggttggccctgatggtgtcctctcaattgagtcgtcatcgtcgtttgagaccacagttgaagttgaagaagggatggagcttgacagaggatatatctcccctcagtttgtcactaaccttgaaaaatctattgttgagttcgaaaatgctcggattcttgtcactgatcagaagatatcatcgataaaagaaattattcctctgttggagcagacaacacagttaagagcaccacttcttataattgcagaggatgtaagtggcgaggcgctggcaacattagtcataaacaagcttagaggaattttaaatgtggctgcaatcaaagctcctggttttggtgagaggcgtaaagctcttcttcaggacattgccattgttacaggtgctgaatatcaatccaaagatcttggtctactagttgaggatacaacagtggagcagcttggcatagctcggaaagttacaatctcaagttcctcgacgaccattatagcagatgctgctagcaaagacgatatccaggccagaatcgcgcagctgaagagagagctttctcagacggactcgacgtatgactctgagaagttggcagagagaattgcaaagctttctggtggagttgctgtggttaaggttggagcatcgaccgaggcagagctagaggaccgcaagctccgcatagaggacgcgaagaatgcgacttttgcagcaatagaggaaggtattgttccaggaggcggtgcagcatatgttcatctatcgacattcgtaccggctatcaaggagacgttggatgatcctgaggagcgcctaggtgctgatatcattcagaaggctttggtggcacctgcagcgctgatagcccataatgctggggtggaaggtgaggtgattgtggataaaatccgggaaagcgagtgggagttcggttacaacgccatggcggacaagcacgagaacctggtggaggctggtgtgatcgaccctgccaaagtgactaggtgcgccctgcagaacgctgcctccgtggctggaatggtgctgactacccaagcaatcgttgtggagaagcccaagaaggctccagcagcagctgctgcagcggcaccattaggttgttctttcaccatgtaataatactttctagtgaaaaacaattttactaggcatggaccaggcacgttagagtgacgaggagaaaaaactatttttgtcaaaaaaaaaaaaaaaaaaaaaaagggcggccgcccgggaatccggacgg

SEQ ID NO: 261911 - DNA, 851 bp, Zea mays
caccacttcttatatttgcagaggatgtaagtggcgaggcgctggcaacattagtcataaacaagcttagaggaattttaaatgtggctgcaatcaaagctcctggttttggtgagaggcgtaaagctcttcttcaggacattgccattgttacaggtgctgaatatcaatccaaagatcttggtctactacttgagattgcaactttccgagctatgcctagctgctccactgctgtatatgatttccgtgaacaatattctaagaaagaagtgcccgcggactcaccaccatcagcagatgacattgaaggcgagtattggcgtatagtcgaaaagcctactgctgagatagaggcagcatatggtgctgatttggagactggaacttttggtaagcggatcccaaagtcttctcccgaagtaaaatctgatgttgagcataagtacttagagtctggttggaacctaaacaacttgcctagactacagggttcagtactatcttttgagggcggggacatctgtggtgttttggtcccttgtctgcatgttggaatgtgcttttcatcattctgctgacatgttgaagaccatcatttgtactcactgaactacatgcattggggtgctccaaagatgtggtatggagttccaggaaaggatgccgtaaatttggaggcagcaatgatgaaacatctacctgacttgtttgaggaacaacctgatttgcttcacaacctgattactcaattttcaacttcattgcttaaatctgaacgagtaccagtctaccgatgtgtgcaccatgagggacagtttgttctaacattccttcgggcataccatgct

SEQ ID NO: 261912 - DNA, 489 bp, Zea mays
ggtggaaggtgaggtgattgtggataaaatccgggaaagcgagtgggagttcggttacaacgccatggcggacaagcacgagaacctggtggaggctggtgtgatcgaccctgccaaagtgactaggtgcgccctgcagaacgctgcctccgtggctggaatggtgctgactacccaagcaatcgttgtggagaagcccaagaaggctccagcagcagctgctgcagcggcaccatagggttctttcaccatgtaataatactttctagtgaaaaacaattttactaggcatggaacaggcacgttagagtgacgaggagaaaaaactatttttgtcatgcgtgggccggaataaattgagtcaggaattgcatggattttgggccaggacgatttgcaaattggttggattagagtgtggatggctgattggacattgtatcctatctgcattctgttcactcagttggctaattcacatttctctcc

SEQ ID NO: 261913 - DNA, 438 bp, Zea mays
aatgtcaaatttaaatactttattacattaacgattcattagcacattctcacgtagttttgcacgcagacaattattaagcaaaagcgatattctaaacttgagcatatgcctccacaggacttctcctgaccgaccggggacaccaagaaggtacctgtggtcatctttagtaaactcgacacgacaactgcgtaattagacaatttagtaatccgctgcggtgggtactttgctcgtcccttcttgcacaaacgaaagagacagtgagaaaaaaaaatgacttgggtgacaactgacaagatgatgaggggagcacgcgcacagcgaaacggcgcggcctggcacagtggcagtggcaccccgaaggcccgaacacctactccgatgatccatctactgcttggcctgaccgggggcgcggagcttggccatgtt

SEQ ID NO: 261914 - DNA, 559 bp, Zea mays
tctctcgcgtccgtgaagatacagatgttcataaagagcctccacactttacaaatatatctcaatcagagatgtataattgcacaagttcaggcagaatgtcatctgatgaagatcatggttcaggcacagcaaatggcgatttattcatactgaagcgcataatggtggagaggggaaatgcagcttacttgagtggattgcgggagaaatactttggggaattattttcaaatgcttccaggactcttgaaggtttgtcgaggatagaatcatcgactatctcagtggacatgctatatgatcctgatatccatctagaaaagaacttgtcagctactgaagaaccacttaagcatgtggctaggtttatagaatcttttgaatcagaatcaagggaaatttggctggtgtatcacaatgaaggccactcattatcaaaattgatatatacagctgaagaaacgaagttagtcactggcaacaataatgagagggtcagacatatccaagttttgcacccatcgaagtggtggcattggctaaggacaacaaaagc

SEQ ID NO: 261915 - DNA, 746 bp, Zea mays
cccacgcgtccgcccacgcgtccgcccacgcgtcctgcgcctaaaaatggccgcgtcccactgaaccaatcgtctgcacatcctcttgctgttgccgctcgctcgccgtgccgcaatggctacggccgtcgcctcccatacgttgctctcctccgccttcgctccgcgccactaccaccgccgcctgacccggaccgcgtccgtggggccgtgccgggccgccccggtgggactggccgtgcggtgcgagaagagcgacaagcagaagaggcagccgctcgccgcgctcgtgccccgcgagcagcgcttcatgttcgagggagacgagctctgcggccccgacatatggaatacaacctggtatcctaaggctgcagatcatgtaactaccgagaagacatggtatgttgttgatgcaacagacaagatcctaggcaggctagcatccaccattgcagtacatatcaggggaaagaatgaacccacttacactcccagtgtagacatgggagcttttgttattgtggtcaatgcagataaggttgctgtttctggtaaaaagcggtcacaaaagctttataggaggcactccggaaggcctggagggatgaaagaagaaacttttgaccaacttcagaaaagaattccagagagaatcattgaacatgcggttcgtggcatgctccccaagggaaggctgggaagaagattatttacccacctcaaggtatacaaagggacagaac

SEQ ID NO: 261916 - DNA, 662 bp, Zea mays
gacatgccatcctcccttaccttagatcctatactgtagagccaacccacgcgttcgacgtcgcgttggcggacgcgtgggcgaatgtaagaaattaggtgatactgacaatcctgaagtaagtgagcttttgaaaatggctgtttgctgcctgaaggaaagacctgttctgttcaagtattgtgcagaggaggttgccaacatgaggcaccatgccttattcaggcggtttataagtgctcttactagaggtggacctggagggttcccaagaccaatagaagtgcatgcccatgatcctcttcgctatgtaggcgaaatgctgggttggctacatcaggccctggcatctgaaagagagcttatagttgtcttgcttgatcctgatgcaatgactgacagtggtccaacttttcgacgtcagtctggtagagatggtgattcttccaaaggagaacctgatgtaacttctgtgcttgatagaatatttgaaggagcatgtcggccatttaaagttcgagttgagcaagttttgcagtcacagccaagcctgatagtttctttcaaacttagcaataccttggaattctattggtacacgatatcagaactgctgggtgaagacactgcgctgtgcaatacaatatggtcacttagagatg

SEQ ID NO: 261917 - DNA, 187 bp, Zea mays
cgtccgctgttgcctatagcttgttttgatagaaagccgttgtagcacgtcttaaccataaaagagtacgactatgttgatccgatggatgggctattacaaatcatttgtgcattatgtattattttcaaatatttcttagatatttcctttcttattagatggatttaaaaatgacacttgttat

SEQ ID NO: 261918 - DNA, 906 bp, Zea mays
cccacgcgtccgcccacgcgtccgatcttcgttcagcccactgggagtggagtgactcactcgggtccattctataaaacctctgcccgggagctagggtttcctcccagccgcgtgggttcgcgtccgcctcagcccgccgcaaggagaggtaagttcaggagacatcttcgagaagctgaaatggctcctaaagctgctcctgccaagaagggtgatgccaagacccaggccttgaaggttgccaaggctgtgaagtctggggcagccaagaagaagaccaagaagatccgcacgtctgtgacatttcaccgccccacgaccctgaagaaggctagggaccccaagtacccacgaatcagcactaccggaaggaacaagcttgatcagtaccaaattctcaagtacccccttaccacagaatcagcgatgaagaagattgaagataacaacactctggtcttcattgttgacctcaaggcagacaagaagaagatcaaggctgccgtcaagaagatgtatgacatccaggcaaagaaggtcaacaccttgatcaggcctgatgggaagaagaaggcttacgtgaagctgactcccgactatgatgctcttgatgtggccaacaaaatcggcatcatctaagtgctgcattaggcatctgttgtttcctagttcaatctgttgtgtcctagttctatgtgaaaccagagttttgtagctatggctctcaatcgttccattaccatgtgttatgcacacttctgaatttgatatcatccaagtgaccttttgaactagtttgcgttctgcacttcattacacttggacaccgtcagtctttgtgaccagtaattttgtttgtcgtaatgggttggttttgcaactcgaccaaatagctgttttgag

SEQ ID NO: 261919 - DNA, 2152 bp, Zea mays
tttgtcttgtggcacttcctctcgtgctgcagtaggatgctgggaattgaataccagtcaaagcgtgggcacattggattggattactttggccgcactgtagggatcaagatcatgccagtgggagttcatatgggtcagttggagtcgggtctgcgcttgcctgatagggagtggaggctttctgagcttcaacagcagtttcagggcaaaactgtcttgcttggggtggatgatatggatatctttaaggggatcaatttgaagcttctcgcctttgagaacatgttgaggacacatcccaagtggcaggggagagcagtgttagtgcagattgctaacccagcccgtggaaggggtaaagatctggaagccatccaggctgagattgaggagagctgccagcggatcaatggagactttggccagtcagggtatagccctgttgttttcatcggccgtgatgtgtcaagtgttgagaagatcgcctattatacgatagcggaatgtgtggtggtcactgctgtgagggatgggatgaacttgacaccgtatgaatacgttgtctgtaggcagggtgcaccaggatctcagtcggtatcagaggtgagtgggccaaagaagagcatgctggttgtgtcagagtttattggctgctcaccgtcactgagcggtgctattagggttaacccatggaatatagaggcaacagcagaggcgatgaatgaggccatttcaatgccagaacaggaaaaacagttgaggcatgagaaacattaccgttatgtcaggagccatgacgtcgcttattggtcaaagagcttcatcatagacttggaaagggtttgtaaggatcacttcaagaggacttgttggggcatagggttgggttttggtttcagggtggtggccttggaccctcatttcacaaagcttaacatggattcaatcattaatgcttatgagctttcagagagcagggctatattgctcgattatgatggaactctggttccccaaacttccctcaacaaggaacctagtccacaggttttgagcatcatcaataccctttgctcagatagtagaaacatcgtttttcttgtcagtggtcgagacaaagataccttgggaaagtggttctcctcatgtccaagattggggattgcagctgaacatggttacttcttgaggtggtctagagaagaagagtggcaaacatgcactcaggcattggacttcggatggatgcaaatggcgaagccagtgatgaatttatatacagaagcaactgatggatcctacattgaggccaaggaaagtgccttggtgtggcaccatcaggatgctgacctaggctttggatcctcacaggcaaaggagatgcttgatcacctggaaagtgtactagcaaatgaaccagtctctgtcaagagtggccagttcattgttgaagtcaaaccacagggaataagcaagggaatagttgccgagaggatacttgcatcagtgaaggagagaggaaagcaggctgatttcttattgtgcatcggcgatgataggtctgatgaggacatgtttgaaaatattgctgatatcattgggaggaatttggttgctccaagaacagcactgtttgcgtgcactgtgggacaaaaaccaagcaaagccaaattctacctggatgatacattcgaagtggtcactatgctgagcgcactggcagatgccacaggtcctgaactggagactgattcggctgatgaatctgtcgcatatatctcatcacttgatattggtgacgaacaatcagaatccagtgatacaccaattggagggtcttagtcagttttctcttgaatttcagaatataatgattatttcaatagtcaattctacagaggggaagcttctcaatctgctgcactccaagtttctccagttgggcaagatagtagtctgttgctgcaaggcgtagatccatatgttcatagctgactcgccgacttggcatattctttgactttctcatttctggttgatctaaaatgaaagcctcacagaaggaaacggaactgtgtggctgaagtaattggggggaagttataggagtggcaatttctaaaggagcccgtgcgcagcttctgatatg

SEQ ID NO: 261920 - DNA, 609 bp, Zea mays
  unsure (1)..(609): unsure at all n locations
aactctaatagacactatagggaagctggtagcctgcagtacggtcggaatccgggcgacaccccatcgccnaggtccgcgaccgggacgttcgcgacccatcagaatccagcgataaaccagttgaagggtcttagccagttttctcttgcgttttcagaacatgatgattgtttcaatagtcaattctattctacacaattttctgatgggaactcaacgactaacaactggttctacgaatgctccagagtgaagcttctcaatctgctgtgctccaagttctccagttgggcaagatagtacagtctgttgctccaaggcgtagatccatatgttcatagctgacttacttggcacgttctttcactttctcattcctggttgaattaaaatgaaaacctcacagaagacaaagggagcgctgtttggctcattggctgaagtaatctggggggaggtataggagtggcgtatgtgaaaggagcctgtgcgcaggttgtgatatgattccttattaacacgacgttacaaagtggtgtcacttcttgaactaccagtagtaacaatcccaagagtgaggttcgaattgattaattaattgcttcc

SEQ ID NO: 261921 - DNA, 895 bp, Zea mays
ttaaaaacctctgctcgggcctagggtttcctcccagtcgtcatcggcttggcgtccgcctcagcccgccgccaggagagccggctcggtcggttcgtcgaagatcccggatctgctctgtcacgaggtctttcggcgggtgttgtctcgcgaggtgtagcgagccaagttcaggagagtttcgagaagctgaaatggctcctaaagctgctcctgccaagaagggtgatgccaagacccaggccttgaaggttgccaaggctgtgaagtctgggtcagtaaagaagaccaagaagatccgcacgtccgtgacatttcaccgccccaagaccctgaagaaggctagggaccccaagtacccaagaatcagcactaccggaaggaacaagcttgatcagtaccaaattctcaagtatcccctcaccacagaatcggcgatgaagaagattgaagataacaacactctggtctttattgttgacctcaaggcagacaagaaaaagatcaaggctgcggtcaagaagatgtatgacattcaagcaaagaaggtcaacaccctgatcaggcctgatgggaagaagaaggcttatgtgaaactgacacccgactacgatgcccttgatgtggccaacaaaattggcatcatctaagttaataggcaactggattcgacatctgtgtcctactagttctgagcataccaacagatttttctatgttactagtaattttgtttgtcatatttggtttttttgcaactaagtcttgttcgcagttgcagactacatatgcctgtattgagatcctggttgccaaattaaccatcttgaactggcattattccactttacgtataaaaactgaaaaaaaaaaaaaactcgagactagttctctc

SEQ ID NO: 261922 - DNA, 861 bp, Zea mays
cccacgcgtccgcccacgcgttcgcggacgcgtgggccgccgcaaggagaggtaagttgaggagacatcttcgagaagctgaaatggctcctaaagtttcattagctgctcctgccaagaagggtgatgccaagacccaggccttgaaggttgccaaggctgtgaagtctggggcagccaagaagaagaccaagaagatccgcacgtctgtgacatttcaccgacccacgaccctgaagaaggctagggaccccaagtacccacgaatcagcactaccggaaggaacaagcttgatcagtaccaaattctcaagtacccccttaccacagaatcggcgatgaagaagattgaagataacaacactctggtcttcattgtcgacctcaaggcagacaagaagaagatcaaggctgctgtcaagaagatgtatgacattcaggccaagaaggtcaacaccctgatcaggcctgatggaaagaagaaggcttacgtgaagcttatgcctgactatgatgctcttgatgtggccaacaaaatcggcatcatctaaagttaccgcgtcaggcatctgctgtgctctatttccatgtgaaaccagagtttttgtagctatggctcagtggctccatgaccatgtcttatgcacacttacgaatttgatatcatccaagtcacaggttgtgctcatcaatacttggataccatcacttattcgtattgggttggtctttggctctcacatttcttcgtattgggttggtctttggaaattgggcctgatagctgtttggagtatagtgtatggatctgcgttcataatgcgagcagcagcgcatggaaattggttacggcaattgtgc

SEQ ID NO: 261923 - DNA, 1395 bp, Zea mays
gctggcgctcgtctccctcgtgctcctcctcatgccgcgctcgcccgccggcgccacgtgcggcgccaggaggtccggcccgcccgtggccaacatgtacgccgtcatcttcgacgccgtgagctccggcagccgcgtccacgtcttccgcttcgacgccaacctggatctcgtccacattggcagcgagatcgagctcttcgtccagataaaaccggggcttagccactacgccaacgatccccgggaggccgccgagtcgctcgtctctctccttgacgatgccaagcgagtggtgcccgcggaattgcgcgaccaaacgcctgtcagagtcggggccacagcagggctgagaaatttgggtgcacaaaaatcggaggcgatattgcaagcggttagggaccttcttcgcgaaaagagttcctttaaaaaccaaccggattgggttacagctcttgatggaacgcaggaaggtgcatacgagtgggttactatcaattatctgttggggaacttgggaaagacttatgcagacacagttggagtagtcgatcttggtggtggatctgtccaaatggcatatgctattgcggagaaggatgcagaaaaggctcctaagccatccgatggggaagatgcatatgtgaagaaactgtttctcaaaggaaccacatattatctttatgttcatagttatttgcattatgggttgctggcagctagagcagaggtcttaaaagctggcaatggcaatggttacagcaactgtatgttagagggatttcaagggcaatacaaatatggcgacaattcatttgaagcatccgctccaccttccggtgctagttactcaaaatgcaaggatgatgcagtgaaagcccttaaagttgatgaagcatgcacccacatgaagtgttcttttggtggcatttggaatggtggtggtggtgctggacagaagaatctctttgtagcatcctttttctttgatagggctgctgaggctggatttgttaacgccaatgcgcctgtcgctaaggttaaaccatcggacttcagacaagctgcggagcgcgcttgctcgttgagcgtgaagaacgccgaggccaccttccctggtgtacagaaggatagcattccatatatctgcatggacctcgtttatcagtacacattactcgtggacggattcggcgtcgatccggaccacgagatgaccttggtaaagaaggtcccttacagcgacgcctacgtcgaagccgcatggccgcttggcagtgcctcgaggtgcatctcgagaggaggaacacagtttacagatatatgttacaggccaaggtcatctcacaatcaaatgctgttgaatccgaatatcgacggaagctttgaaacagc

SEQ ID NO: 261924 - DNA, 452 bp, Zea mays
tgccgccgccgtttctgcatctcccatcttcgcaacgccggcgctccatcttgcgctccctccctcactcgctctcggtacgcaggcggcggcggcggcggcggtggcggctctcagattcgggctctcagcgacggcgtcagcagcttccactcccgcctctcgccagttgcctcgcgccctcgcctccggtcctccgcacaccgccggttacccttctaaaacacctcatccccaaatgaagcacatattcaagattgctgcaatactggtagcaatctctgctatctggattgctctccttgaaacctccactgttcctcgaagttatacttggctgcttcccatctacttggtagtggctcttggatgctatggcctttttatggttggatttggacttatgttcttcccaactggtcctcgagaagctgtactactgcaacaggata

SEQ ID NO: 261925 - DNA, 562 bp, Zea mays
ttcgtacgggtccggttttctccgtgtctgtcccacttgtccttttcacttttccagcgccgtcgtgacggaaggaagaggaggagcaaggagcacgacgcgatgggccactccaacgtttggaactcgcaccctaagaactacggccctggctcccgcgtctggtaactatcccgcgacgctcccttctctgtatagcaggatctcggttcttttcgcttttttagaatgtggacgacctgcttgtgatagggactccatggatctgttaaggttctcactctttttttatggttagcttagtccccccccgttaagctttggaaggattaggtttcttggattagcgtgttgctgctgagatttgatgtgcatctctcgtataaactctgctatcttgttaaacatcagaagtctttgtatcctctagtttagtatctcagttcgatgtagagtaatttcagctggttatatgtagcagctgctttgatctgccgtttggtggtcttactcatggctgtttgatgaaataacctgattgatttttagctgatatattcta

SEQ ID NO: 261926 - DNA, 504 bp, Zea mays
cttcgtctccggctccgctcagagtcataagcggggttttactaggttagggtttacctgtgaggcctgctcccctgccgccgccgccatgggacactccaacgtgtggaactcgcaccccaagaactacggccctggatctagggtttgccgtgtgtgcgctaacccccacggcttgatccgaaagtacgggctcatgtgctgcagacagtgcttccgcagcaacgccaaggacattggcttcatcaagtaccgctgaaacttggggagctccaagcatggcaataatggaggcatggatggggacctaaaagatagtctgtactcttattcttactataaaaccatgtaatgaattgtttggctttgtgtggacgaagttggtgtattctggatggtactcttgaatcttgatgcttccctgctatgctagctgagcatgtcgaaccgctatgaatcagacaatacagtatcactgttaccacttaaaaaaaaaaaccaaaa

SEQ ID NO: 261927 - DNA, 507 bp, Zea mays
ccggttcggaatccgcggggccacgcgagtcctcacgagcgattgcggcggcggaagtaagaggcgatggggcactccaacgtgtggaactcgcaccccaagaactacgggcccggatcccgcgtctgccgggtctgtgcgaaccctcatggactgatcaggaagtacgggctgatgtgctgcaggcagtgcttccgcagcaacgccaaggacattggcttcatcaagtaccgctgaagtcagctgggcgggctatctgaatgccatctcttggacagtgtagtagaggcgatgccacaattttaattactgtcatttagatgttcccttcagaactctgctatttaagtccgccatgtttgtgatggagaactgaagctttgtttgttatactgattatgagttacctgtgctttgcttaagcttcttgtgttctactctcatactgggatggctaaggtgtcaaaataatagttgtacgctggacttgtgtggaaatgtttgctc

SEQ ID NO: 261928 - DNA, 634 bp, Zea mays
ccgaactccatctatctcttccccacgaacgcttgcggcggcggcggaattaggaggcgatggggcactccaacgtctggaactcgcaccccaagaactacgggcccggatcccgcgtctgccgtgtctgtgcgaaccctcatggactgatcaggaagtacgggctgatgtgctgcaggcagtgcttccgcagcaatgccaaggacattggcttcatcaagtaccgctgaaatcaggtgggaatggaccatgtggtagaggcgaggctgtagttttatttccagtaatttagatgttttgttcagaagtctgctagtaaagactgctacgtttatgatggagaacttagccatgttggtcatgttggtcatattgatcatgagttacctatgttgagcttaaactatcttgtgtccaaccatcgctgggtagtatgattactgtaatgtaggatggttaaggtcccaatctactacctatattgcatgtgtcgaagatccattccaattgtacgtctagcgcactatttgtgaaatgttgctgggcctgtaccgcattgacattaggtatcgcaccatatgattaagctgttccagtgaacgatgtcaaagatgcagatgcccgaaattttttc

SEQ ID NO: 261929 - DNA, 511 bp, Zea mays
cccacgcgtccgcccacgcgtccgcggacgcttggttcctcgcgccgccgccgccgccgccgtgacggaaggaagaggaggagcaaggagcacgacgcgatgggccactccaacgtgtggaactcgcaccctaagaactacggccctggctcccgcgtctgccgggtctgcgcgaaccctcacggtctgatcaggaagtacgggctcatgtgctgcaggcagtgcttccgcagcaacgccaaggacattggtttcatcaagtaccgttgaagaggccactgtgctgctgtggagaacttcctacatcaaagaaatgggtccttcattagaaggcctaatttatgcgctttagctttttgttcagaacttgagactcatgtgttaaactcgacttgttaaagttttgatggctactttgtgcttgttggaccagctataatcagaagattgaaattttctcactcaacagagagatccagaccttcgaaagggcggtcgttctagaggatcc

SEQ ID NO: 261930 - DNA, 456 bp, Zea mays
agcacgacgcgatgggccactccaacgtgtggaactcgcaccctaagaactacggccctggctcccgcgtctggaagtacgggctcatgtgctgcaggcagtgcttccgcagcaacgccaaggacattggtttcatcaagtaccgtggaagaggccactgtgctgctgtggagaacttcctacatcaaacaaatgggtccttcattacaaggcctaatttatgcgctttagctctttggtcagaacttgagactcatgtgttaaactcgacttgctaaagacttgatggctactttgtgcttgttggaccagctataatcagaagattgaaattttctcaaaaaaaaaagcacagcaacgggcagagagtacatatactgcgccaggatcgtctactaaaactgtaaaactgcgcaaaaaagggccggccgtgttcaggatccaaaattccgtacc

SEQ ID NO: 261931 - DNA, 411 bp, Zea mays
ggaccgtggtcacaatacaacaaattagcctcggtaactctttatgtttgtggttttgcagccgggtctgcgcgaaccctcacggtctgatcaggaagtacgggctcatgtgctgcaggcagtgcttccgcagcaacgccaaggacattggcttcatcaagtaccgttgaagaggccactgtgctgctgtggagaacttcctacatcaaagaaatgggtccttcattagaaggcctaatttatgcgctttagctttttgttcagaacttgagactcatgtgttaaactcgacttgttaaagttttgatggctactttgtgcttgttggaccagctataatcagaagattgaaattttctcactcatgatgtttgttcttatcctgcgtgtatgctcagtcttctttcttga

SEQ ID NO: 261932 - DNA, 948 bp, Zea mays
gcaaaacatcaatgtggcaagaatcaaccccacaagcaacttcactgccacaaaaatctccacagaatgaaccaaatgaaatgggggctaaaccagttacaaaggcaggggatctatttgccatgggtcctcccagtgccaccgggaagcagctgcatgttgaaattcttaatgatgatccacggcatatttctcctatgactggtgaaagtggaatcagtaccgtgctagacagcaccagaaatactctgagcagtagtggctgtgatagcatttccaaccagatcactgcccctactgaatcatccaatgtatataaggatgttcctgaaaccccaagcgccgaagggtcacggcatctgagccagcgtgaggctgcactgaacaagttccggctaaagaggaaggataggtgctttgagaagaaggttcgataccagagccggaaattactcgcagagcagcgtccacgggtcaagggccagtttgttcgtcaagatcatagcatccaaggaagctagggtccagttactgagctggaactctattctattatctaaaaaagtcactgcaagtgactccactgcggtctgcgggtatcctgatgtcagattttgtcgaagagttggaagcagtcacactgagttacagtttgctctgtatatttgctgaagtttgtaatatatgtatgtataggctaacgctgttctttcctaggttaggcacaggacctggcacgtttgaaggtttgtcagtaggcgttagaaaatacaggcatactttgtttcaggtcaagatgagatgtgaccttcagtagcgcatgtgtgctttaagtcttgtattacgtaattaagttgtttgatgtttcgggttagatgtacgctccgtggatgaaatgtaaaggatgtccaccaaaacatgcttgtttccgtgcagcttggtgcaatg

SEQ ID NO: 261933 - DNA, 393 bp, Zea mays
cctactacagttctgggcgcctccacctccaccaagcttcctgctgaactccagttgccagagggcagcgacgtagccaccaatgcagagctcaagacgccaggaccagaagctacggcttcaactctcaagacatctgctaatccagaaccacgcgtggatggcgatgacatcactgatgctctctacggtgaccatggtcatcgcaggctccctattttcagggagatctgtccagattgagtgtcagcatcagcattctcaacgtcgctgatggatgcatttcggcctagctgtatattctgttttatctatcttgtacccagggtcttggtagcaattactctgaagggtcatttctagtttcctaagagcttgttcggttgctaaggg

SEQ ID NO: 261934 - DNA, 458 bp, Zea mays
taccggttcggaattcccggggggacccacgcgtccgcccatgcgtccgcggatccgtctccaactcactagtactcagccgccgcaatcagggacaggtagctcgagcgcgcgctccacctgctccgacgcgatgcgggccaagtggaagaagaagaggatgcggaggctcaagaggaagcgccggaaaatgaggcagagatctaagtaggcgcatcttgtgaccgaggatggcgagcttctcctgcaccatggctgtgacgcgttgggatgattgtctccctttgtagacgtgctttgctgtagacgtaggcgatgtaaaccgtcctttttgattaattctagtatgttctgagactgggtttatattgtaatttgaggataattatatgatgctctaagtttattgatattcctgtcactcgaatatgttagatgtcctttcttcagcgttggtc

SEQ ID NO: 261935 - DNA, 404 bp, Zea mays
cccacgcgtccgctagtactcagccgccgcaatcagggaccaggggcctcgaccccccgctccacctgctccgaccgcgatccggcccaagtggaagaagaagaggatgcggaggctcaagaggaagcgccggaaaatgaggcagagatctaagtaggcgcatcttgtgaccgaggatggcgagcttctcctgcaccatggctgaggcgcgttgggatgatggtctccctttgcagacgtcctttgctgtagacgtaggcgatgtaaaccgtcctttttgattcattctagcatgttctgagactgggtttatattgtaatttgaggataattatatgatgctctaagtttattgaaaaaaaaaaaaaaaagaaaaaaaactaaaatataatataatataatac

SEQ ID NO: 261936 - DNA, 619 bp, Zea mays
ggtcgagaggcgtagacttggttcgcttgatgattattacttgttgcgctcttccgtatttgatgctgggatgtgatggaagaatcattggtccgtgttttctgatcaatcattgatgtgtaaaacactccataattctgatccctgacagttgcgtaatctttaagtctgactgttgtccgtttaatgtctgctattgtagtttcacatgatactgtctgtagaatctaagcatgtgctatgaatgtgggtgaactgattcttgtttcgtttgattgcagtggaagaagaagaggatgcggaggctcaagaggaagcgccggaaaatgaggcagagatctaagtaggcgcatcttgtgacgaggatggcgagcttctcctgcatcatggctgaggctcgttgggatgatggtctccctttgcagacgtcctttgctgtagacgtaggcgatgtaaaccgtcctttttgattcattctagcatgttctgagactgggtttatattgtaatttgaggataattatatgatgctctaagttaaatcagatttttggcaaaccaaaccaaaaaaaaaaaaataaaaaaaaaaaaaaaaaaaaaaaaaaaaacccaggggccg

SEQ ID NO: 261937 - DNA, 361 bp, Zea mays
  unsure (1)..(361): unsure at all n locations
ctcggcattaggctcgagggctgtcgccaccgcgaatgccatcttgctcttggctctcttcttcgccggcgctcacgcgaatgtcccatgcatactccccgtatgcaagacggtgggtggcgggagccggttcttcgacgtgcagttctgcctggcggcactcggctccgatggccggagcgtcgaccactgcctcgactaccaggtctactccgccattgccgctgacctcctcgcggccaacctcaccgctacggcggccaagatcaacggcctgctccggaagagcggcggctccgncgacgaggccacgacgcgctgtctccggtcctgtcaagcgttggacggcgacatggaacgg

SEQ ID NO: 261938 - DNA, 831 bp, Zea mays
acgacgcgtccgcccacgcgtccggccgtgcaaatccatttcttgccttgccggcacagctctgcatagctcctcccaagctttaggattaggatttggatttggatttggatttggatcgggtgtgtttcctgcgtaaccatgagcgagatcatgaagctaaagcgtgggatcagcaccaaaccaggagaccacctcgtccaaaatggccaacaacatccatgtcacgaatgggaggagcaacagcgctactggccctcgccgcgggcgccgccggcgagcccgacggagtcgcccaggaccccaggcgggagccagaagaaggcggttctgggcaaggtgaagagcaaggccaagaaatggatgcacatgctgcatcacaagaagaaacccgcgccaccggaggagatgatgtggacccccagggccgggcctggacccagcgcggcacaagacagcatgcccagcagggaggagcgacacgccgccgagcaccgtggcactggcactggcacccccaggaaaccgcagcaacacgcgccttcctgttcctcgagcgatccagagcgggcgtccgaggtgttcctggaagcgtcaccgaggcagaactcgccggtcccgagccccaccgcgcacaggcagcagcagcagccgcagccgtacttcaaggtcagcagcaggttcgagtcggagatgaaggaggccaacgagatgctgatggagtccaagaagctccgcgtcaacacgaccaagcccaagaccaagaccgtgacgttcgcgccgtcggccgtggagcgcgagcagccgggcccgggcggcgagaggagcggc

SEQ ID NO: 261939 - DNA, 457 bp, Zea mays
cgacccacgcgtaccgtgcgaataaaggaagtgatgacataccttcccatcttattattcggcatctacatgagctggatgggcctgccttacttccaaaggtgattagaagtaggccttaaaggggacccaagtgatgaattctcgttttcaagcttcttccctggatttttaaggcctattttggatcctattgcttctgcattccacacacttttctgtgggcgacctgcaagacctgaatgcacaggccagacattggatgggtcacagttccctggttcaggctccactgaggcaaacaggaggagagaaaggggccagaaggcactggagcagagactggcagagaagctggctgcggtcaggaaggcggagggcacgcctccgccgaagcagcatcaggaggaggacgcggagaatgatgcttctgataaagtctgagcgtgctttcagc

SEQ ID NO: 261940 - DNA, 854 bp, Zea mays
cactggcgtgtgggcggacgcgtgggctgctcccggctcccccacggtactccagccgctaccctgcgattccgccagtacgccaccaccaccgagcctggactaccgccgccgcccttcgccgatatcttcagcggcgaacagcgcccaccagatcccgcccctgcgatggagtccgtggtgaacccgaaggcatacccgctggctgatgcgcagctgacgatgggtatcctcgatatcatccagcaggccgccaactacaaacagcttaagaagggagcgaatgaagcgacgaagaccctgaataggggcatatcggagtttgtagtgatggcggcggacacagagcctctcgagatcctgctccacctccccttgttagctgaggataagaacgtgccatatgtgtttgttccatcgaagcaagctcttggccgtgcttgtggtgtgacaagaccggttattgcttgctcagtgaccagtaatgagggtagccagctgaaactacagatacagggtctcaaggactccattgagaagcttctcatctgatctgccgaagacctttcagtgtgatgggcctcatcgacacttttttcagaggcttggactggtgatggtgtcttgtttactttgcgcttttcaaactatatttgaacactgttaagtcgatcatacttgaattgtactgcatcttatgtttgtgattgtcatgtaatctgaagatgcctctgtatcgtggtggctggtttctgttctggatccgaccacatcattgtgatggctgattgctatgtttttgagtaaaaaaaaaaaaaaaaaaaaaaaaaaaaaaaaaaaaaaaagggcggccg

SEQ ID NO: 261941 - DNA, 827 bp, Zea mays
cccacgcgtccgggcctctcctcccggcttcctcacacggcactccagccgctagccctcactcaaccagacaaccagtacaccaccgccaccaagcccgggccgaataactctgccgggcaaccgccgcccttcgccggcaaagaacgcccaccagatccaccccggcctgctatggagtccgcggtgaacccgaaggcgtacccgctggctgatgcgcactgacgatgggtatcctcgatatcatccagcaggccgccaactacaagcagctcaagaagggagcgaacgaagcgacgaaaaccctgaatagggggatatcggagttcgttgtgatggcggcggacacggagcctctcgagatcctgctccacctccccttgttagccgaggataagaacgtcccatatgtatttgttccatcgaaacaagcttttggccgtgcttgtggtgtgacaaaaccggttattgcttgctcagtgaccagtaatgagggtagccagctgaaactacaaatacagggtctcaaggactccattgaaaagcttttcatttgatctgccgaagacctttcagtgtgatgggcctcatcgacccttttttcaaaggcttggactggtgatggtgtcttgtttactttgcgcttttcaaactatatttgaaccctgttaagtcgatcaaacttgaattgtactgcatcttatgtttgtgattgtcatgtaatctgaaaaagcctctgtattgtggtggcttgtttccaaaaaaaaaaaaaaaaaaaaaaaaaaaaaaaaaaaaaaaaaaaaaaaaaaaaaaaaaagggcggccgc

SEQ ID NO: 261942 - DNA, 406 bp, Zea mays
gtgcttgtggtgtgacaagaccggttattgcttgctcagtgcccagtaatgagggtagccagctgaaactacagatacagggtctcaaggactccattgagaagcttctcatctgatctgccgaagacctttcagtgtgatgggcctcagcgacacttttttcaaaggcttggactggtgatggtgtcttgtttactttgcgcttttcaaactatatttgaaccctgttaagtcgatcatacttgaattgtactgcatcttatgtttgtgattgtcatgtaatctgaagatgcctctgtattgtggtggcttctttctgctcagattccgaccacatcattgtgacggctgattactacgttttgagtactgtatcgtcaccatggttgcaacttccatgtgacca

SEQ ID NO: 261943 - DNA, 350 bp, Zea mays
cgtccgcctcccacacacgggactccggccgcgagatcccgcgactaagccaggacgcgggacgccacagccaccggcctcagcatccgcctaggacgaataacccttctaggctgccgccgccgccgtccttagctcatattgttgccggcgaagagcgccccagatccgcccctgctatggagtcggcggtgaacccgaaggcgtacccgctggctgatgcgcactgacgataggtatcatcgatatcatccagcaggccgccaactacaagcagctcaagaagggagctaacgaagcgacgaagaccctgaacagggggatatcggagttcgtagtgatggcggcgg

SEQ ID NO: 261944 - DNA, 339 bp, Zea mays
ccggctctcccacggttcttcagcctgttccctgcgactccgccagtacgccaccacggccgagcctggactaccgccgccgcccttcgccgatatcttcagcggcgaacagcgcccaccagatcccgcccctgcgatggagtccgtggtgaacccgaaagcatacccgctggctgatgcgcaactgacgatgggtattctcgatattatccagcaggccgccaactacaaacagcttaaaaagggagcgaatgaaacgacgaataccctgaataggggcatatcggagtttgagtgatggcggcggacacagaaccttttgagatcctgtttcacctt

SEQ ID NO: 261945 - DNA, 1121 bp, Zea mays
  unsure (1)..(1121): unsure at all n locations
ggccccgggggtaggctgcccccgccgccgcgatcgtacggcggcgccggcggatctggcgacgccgcgcactccggtggcggcgacggccgccgcgggggcatcctcgggctcctcctcgccgggtgggccgcccgcgtcgctgcggacccgcagttccctttcaaggtgctcatggaggagctcgtcggcgtcaccgcttgcgggcttggcgacatggcctcccgccctaacttcggcctcaacgagctggactttgtcttctccacgctcgtcgtcggatccatcctcaacttcgtcctcatgtacctcctcgcccccaccgcgggcgtcgccgccgccgcgtcgtccgccgcgtccgcgcttcccagccacatgttcgagcccggcgcgtactccctcggctcccgcgtcgccacgatcatgtccaagggcgccaccttcgcggtggtcgggttcgcggccgggctcaccggaaccgcgatctccaacgggctgatcgcgatgcggaagcgcatggacccggcgttcgagacgcccaacaagccgccgcccacgctgctcaacgcggccacctgggcgctccacatgggtgtcagcagcaacctgcggtaccagacgctgaatgggatcgagtacctgctcggcaaggtcgcaccggcgccggtgttcaaggtgtccgttgttgctctccgctgcatgaacaacgtgctgggtgggatgtccttcgtgctgcttgccaggctgaccggggcgcagaaatcagacaagccagcgacggtcgcggaagagaaggagaggttgatagctgtgggcaatgccgcagcagatgccatcaacgaggcgaggcatggagagggtaagtaggtggtagaggagagagacgagtaagttgatggtgcatcatctcagactcgtttgctggttcttggacatagaccaagaaactcacctagtcacctgtagagttggttggaataaggagtggagtgaggttcagaacttcttttttaaaaaactctgtttgtggtttatcggtgttgatgatgacatgcttagtgatggtagaataaagttttttctcccatgctcatttgatcgttgaaaaaaaaaaanaaaaa

SEQ ID NO: 261946 - DNA, 503 bp, Zea mays
cggacgcgtggggtcggcactcggcagcaaactgaatggcgcttcgcgctgtggagctccgtggattccttctccggcgcatcggcggcggcgaggcggccctgcctcctctcgcgtggcgcggccggccagcgagcacatccgccccggcggacgacgagctcgcggggaagagcgcctacgaggtcctcggggttggggagaccagttccagcgccgagatcaaggcttccttccatcgcctagccaaagagacccacccagacgtcgccgcggctgctggttcccgacggttccttcagatcctcgccgcctacgagatcctatcagattcacagagaagggctcactatgatagctacctgcgatcgcagaggcgggttgtggggaaacatcccaggccatctcagttcgtgtacccaagtggttcaggctcaggcattgtggtacctcgagagagcaatggttgtgaatggctgaaatggtacaggcttaccattgac

SEQ ID NO: 261947 - DNA, 1210 bp, Zea mays
tggatgatacaagtgatgttgtcgtccaacctttcatcttacttttgactctgaagcgggtgacactgaatgctgactgtgtggttgttcttgacaatacggctcttaataggattgccgttgagcgccttcatctatcaaatcctacgtttgcacaaacaaactctttggtctccacggttatgtctgcaagcacaactactttaaggtatcctggatatatgaacaatgatctggttggccttcttgcctgcttgattcccactccaaggtgtcattttttgatgacaggctatactccgttgactgaggagcgccaggttaacatgatacgcaaaacgacggtattggatgttatgagaagacttctgcagacaaagaatataatggtgtcatcatatgctcgaacaaaagaagctagccaggctaaatacatctccatattgaacatcattcaaggggaggtggaccctacacaggttcacgagagcctgcaaagaatacgcgaaaggaagcttgttaactttatagactgggcacctgcaagcattcaggttgctttgtcaagaaaatccccttatgttcaaacaacccacagggttagtggtctgatgttagcaaatcatacaagcatccgtcatttattcagcaaatgcctgggacaatatgaaaagctaaggaaaaagcaggcttttcttgacaactacaggaagttcccaatgtttgcggacaatgatctatctgaatttgatgaatctcgagagataatagagagcctagttgatgaatacaaggcctgcgagtcgcctgactacatcaaatggggaatggaggaccctggagaggcaaatgttgtggcggcacttgactctaagttggtagtgtaaatataaagtgttgtgcagcaatccacgcaactgaggaagtgctgtctacaatctacattcaagtcatgttggtcatccagaccaaacatgctactgtcacatctagtagtcatcagtttgacgccgcctgcttctatagatccaatcggagtgcagccaaagtgggttttgacgttattttgacctcaaatttgcctttagtctgtgctatgtatatttcgaaacccacttcctctggcctgttttcatttctttagggctagtttggaaactccattttttcaacggatttttattttctcaagttgaaatagttcattttt

SEQ ID NO: 261948 - DNA, 284 bp, Zea mays
cttggacaactgtcacttttagaagcaaataattatggtgctgtaattcctcacgtactatgtttagtctgataattttggaaattgcagtgttgtgcagcaatccacgcaactgaggaagtgctgtctacaatctacattcaagtcatgttggtcatccagaccaaacatgctactgtcacatctagtagtcatcagtttgacgccgcctgcttctatagatccaatcggagtgcagccaaagtgggttttgacgttatttcgacctcaaatttgcctttagt

SEQ ID NO: 261949 - DNA, 1653 bp, Zea mays
cctctgcctcctcgtggggaattcttaatcccactccatcctctcgctgccgatccgacctcaattccgaatccctcccccatctcccggcgtccccaacgccctccgccatgccggacgtgcagccgctcgtcagcgacttcgtcctcaagcttaagcgccggaaggtggaggggtcgcacgcggtggcccggcagacggcggaactgctacggtcggttgtgtcgcagcatcggatgggtagcagcgccaaccaggcagccgcgcttgccgatgctgtacgcgctgtgggggagcagctcatctccgccaatcccattgagcttgctgttggaaacattgtgagacgtgttttacatataataaaggaggaggatatatcttccacagcagttggaattgaaggtctttctgttactgttgacagtgatgatgaatatgacagtgaacatgatgatcgccctgcattatctgctgctgttcttgctgcacatgctagaaatgcccttcgtgcaccttcattgcagactctgctagaagacattcctgtgagtcctgcaatttccggcactgcatcatcaaccggtgactcagacggaaaaagtaaatcagctggagataagagctcaactagaaaactgaagcatgatgtcatcgcagccattggtgatcttattgatgagattgactcatgctatgagccgatttctgagcaagctgtggaacttattcaccaaaatgaggtaatcctaactctaggtcgttctagaaccgtcaaggagttcctgtatgccgcgaaagaaaagaaacgatcttttcgtgtatttgttgctgaaggtgctccaagatatcagggccatgttctcgcaaaagagctggttgagaaaggtgtacaaactacagttataacagattcagcagtttttgctatgatatctcgagttaacatggtcatcgttggagcgcatgctatcatggcaaatggtggagtcattgcaccagtagggatgaacatggttgcacttgctgctcaaaggcatgctgtgccttttgttgtggttgctggtagtcacaagctgtgtccgctgtatccacacaacccacaagtgttgctgaatgaactcaaatcgccatctgatttgctcgattttggcgagttctcagattgcatgaatttcagtactcaggatggcagccccttgctaaatgttgccaacccaacatttgactatgtgccaccgaagcttgtgagcctattcatcactgacaccggggggcacagtccgtcttatatgtatcggcttattgctgagtattactcagctgatgatctggtagtgagacggaaggcaacatcttgaaagaagacgaaagcactgcaaagtctccttggtggtctgatgtgccatggaattgttggtgggtccagtcactgtcaaacagcaggagatcgatggaagcattctcgcgtttgggcgtaaactgtcgagggaatgggatgtgacgtcatggaattgttgtcgtactacaggagaggttcatatacatgaatatatgattgactggttgtgtaaaaggtcgctgtttctgatctgggccttggctggcccaaattttgtcttataaattccagcaagctgttcggtgtcacgt

SEQ ID NO: 261950 - DNA, 1166 bp, Zea mays
  unsure (1)..(1166): unsure at all n locations
tcgtttacgccgcccgaagccacaaaggaggcaggggggacgagggtatggacgcctccatcgcctccctccctgcacggagcattccagactaccgtccgaagccacgatcaggcccacacgaggagggtatgatcttctccattgcctccctccctgtgtggtatgaactatcctcttccatcgcccagataagaagctcttctgcattaagattacttccttgccttcttcgtgcacacacacggccgcatggcgtgccagtgggatgcagtcagcgaacggcgcgcgggcgtgaggcagtcgtgtgctgtgcgcgagaatgggaggggttgcaggaagccgggacgggagccatacgctggggcgcttgagccggattgctccagcttggacgcctcctctggatagctgatggactcgcttccctaactcaagagttgccatgtgtcttcaagccgccctgatgagagaacccacaaggagatccaggccaagaatgacaacgtcgggacggacatggggctaaccttctagagcattgagaccataggcagagaggtccagatcaagaacgacaacatcaagacggtcatggcgccaccttttagagcgttgacaccatagttggagaggtttagtgctaggcgagatggggtgacatgagcagggctacagctgcgttggggctgctttattctccatttctttaatcttctatagtttcgtgacttaatttatttattcccattaaagatagaggataaaaaaacctagaacattaagatatcttttctccaccaaaaactcattttaagttatagaacagtatacatcgtatcgagatttcaatggtccacagggatgttttacagttctggtttgcgtagtgcacagatgtttattaatcagggtatattacctatgcattatgcataaatggatcatctctatgttgtggctgggctgattacgctagggcagaattattgcatagactgcaggaaattctgcatctagatgcttctgttaatttaaaggttccaaaacgaggagaaaacaatccaatattacagtatatatactattggatgctgccttgaaaaaaatgttgaaaaaacatacaagtgttacggtaaagaactgtgggactnctaatttctttt

SEQ ID NO: 261951 - DNA, 1327 bp, Zea mays
ctcacgggccgatacacgcctctagagagagggagccaagggaagctctcttctttcttcctcctcctcgtcctctcgaattccgtctcttgtctctgtcgtcctcgctcggcttccccggttcttgagaggggaaagaggaggcggaggagagggatggggagggacgagaggttcccagtgtgggaggccgcgctcggcgctggggtcgccgccgccttcgccgctgggctcgtcggggtttacctttccatgccggactccgactacagcttcctcaagctgccacgtaatctccaggaactccaaatcctcactggccatcttgagaactatactagcgactacaccctacaggtgttggtaggctactgcgccgtgtacatcttcatgcagaccttcatgatcccagggacaatattcatgtcactgcttgctggtgctctgtttgggcaactgcgtggcgttgccctggtagtcttcgccgccactgctggcgcttcttcgtgctatttcctgtcgaagatgattgggaagccactggtgttcacgctgtggccagataagctcagcttcttccagagacaggttgctaaaagaagagagaagctcttgaattacatgcttttcctcagggtgaccccaacattgccaaataccttcatcaacttggcttcacccatagtagatgtcccctaccatatattcttactgggaactctcattggccttatcccagcttcttatgtgactgtcagggctggaatcgctcttggagagttaacttcgctaagtgacctttacgacacccagtcgatagcactgctattcctgatcggtgttgtttcagtcacaccagcattgctgggcaaggatgaggcacaagagaaaccaccagaaatggcggtaggcgcgtcatgatcaccaaagcacctagcggtgtccacgtcacctgtatatatgtcaacatccagcatgcagtggcttcattagttcggatcaacgggcccttgtggctggatgataaaaacggttcgcatggccacacagcttggcgggacctcggccttaaacttccctccactgctggcctacagaggcgcctgtgttgccatcatcagaacatgattcggtagccattcaccacattattaatgaatgaacctgggaagcagaattgcctgtagacgagctgctctgatgtgtaaacgagtagcgctgttcggataggacaggcatttagtccaatccctgtatatattaaccagattcattcaatccatattcagtggttcaaagataatgccctgttcagctgctgtgttct

SEQ ID NO: 261952 - DNA, 471 bp, Zea mays
agtcagatattatgcttgtttgcttgttgccatctagtattctagtgtcgttttgttgtgctaccagttctgcattcaggctggaatcgctcttggagaattaacttcgctaagcgacctttacgacacccagtcgatagcgctgctattcctgatcggtgttgtttcagtcacaccggcgttgttgggcaaggacgaggcacaagaaaaaccatcagaaatggctgtaggcgcgtcgtgatcaccaatgcaccgagcacctgtacatatcaacatgcagccatgcagtggcttcattagttcagatcgacgggcccgtgtggctggatgacaaaaacggttcgcatggctactacacagcttggataggtcattcagcacattatgattggcaaccaatcatgcccattaggaacgattgaatgaatctgggaagcagaatgcccggtacacacgcagctctgatgtgta

SEQ ID NO: 261953 - DNA, 366 bp, Zea mays
cggcccctcttctctccctccctccctccgtccccgcattaaactcggcgaacgggccaagaaaagcaaaccgagggaggagaaaggcaaggaaagtgggaaggtaggagagagagggagacagggaaagctctcttcctcctcctcctcctctcgaattccgtctcttgtccctgtcgtcctcgcccggtttccccggtttttgagaggggaaagaggaggcggaggagagggatggggagggacgagaggttcccggtgtgggaggccgcgctcggcgccggagtcgccgccgccttcgccgctggactcgtcggtgtctacctttccatgccggactccgactacagctttctcaagttgcca

SEQ ID NO: 261954 - DNA, 665 bp, Zea mays
tacgtcgctcgtcttcgcgctcgagccgctccgcgctcgaccgcctttgcctgccttcccattccccccgtctcctcttcccttccgccatggcccagcccgtattcctctcctctctccgctcccgcctctgctccgcgccgccgtcgccgcaccatcacctccagcccagccgcggctaccacgtcgagctcggcgctcgcgagaaagcgcttttggaggaggatgttgctttgaagaggttcaaatcatacaagaacagtgtgaaacaggtctccaagattgggaatgttctcactttagctgttgtatttggttgtagctacgagcttggtttgttggcggcaagcatgaagtgaaggaaaacacagccattattccgggaagtgatccatcagcgtagactgtcattctatcacctcgtgtttttagcctgtctgtctctctcttattttgtcgtgcaccatgtataaaataaaactaaactaggttaaccttgatttgcgaataacgttttctgtttctatggcctagtcgcaaacgaagtggcacaaacattccatggctaatcttgatgcatgagcatcggctgcttttgtttgccacctggcagagtggcagtgcatcctgatgcacagacagtataacagacgtgtcatttgtcg

SEQ ID NO: 261955 - DNA, 492 bp, Zea mays
cagaaacagcaagaaccaccacaaggcgagtccgattctagatcaagcgagtcctcccgtttcatcgcctcggaaaaaggcgagaaatctgcaacagaagaagcagcagcgacacgattccttcctcgtacctttcgttgcgctcgcgcactcggatcgacccctctagggttttgcatcggcctcccgccagctcctatccctcccctctccctccgccgcgcgcccgcgcggggagccaccaaaccctaggacggcaaatccggtgcgatcacccacggtggaggcctcgtcggcggccgagaggagccgctcagggctcgggtcagggttccggtacctcgccggcgccgcctctggctggtgggaccggtggatggtcatgggagccagcggctccaagcttgagaaggccctcggagaccagttcccggaaggcgagcgctacttcggcctcgagaacttcggcaacacctgctactgcaacagtgt

SEQ ID NO: 261956 - DNA, 468 bp, Zea mays
aaacagcaagaaccaccgggcgattaagcctgcatgtccccaatttcgcccgatctgagtcaagcgagtcttcccgtttcatcgcctggaaaaaggcgagaaaccccaaagcgaaggaacagcagcgcgagtgctagcagcagcagcgattccttcgccataccgttcgctgcgctcgctcactcggatcgaaaccccctagggttcgcatcgtcctcccgccaactcctatccctcccctctccctccgccgcgcgcgcgcgtgtgagctaccaaaccctaggacggcaaatccggtgcgatcgcccacggtggaggcctcttcggccgccgagaggagccgctcggggctcggatcagggtttcggtacttcgccggtgccgcctctgggtggcgggaccggtggatggtcatgggagccagcggcttcaagcttgagaaggcccttggagaccagtttccggaag

SEQ ID NO: 261957 - DNA, 939 bp, Zea mays
cccacgcgttttgttcgcttcagaacttgtgaagattttggagggtgcaaaccaatctgtgccaccacaattaaaagaaatggcccttcgtggaggatatggtggaagatcacgtcgatgggcatcttctgatgactcttatggtagtcagggatatggtgctaaaagatcaactgatagtttcaagaacagcagcttcggcaaccaggccgggggtggttcaagctttcactcgagcttccataacagctctagtggcaatcagttcggtgatactacaagctttcatgccagctatggtaacagcagccagaacaatcagacgggtgacaatccgagcttcccacccagctccagcaacaatcagtccggggatggtctcagttttcatgaaaggttctatggatcacgcggaagggacgagagcagatcaaacaatgatggattccgtgctaggagcagaagtcctggcaagcctgtggaagtttccaactggtgattgcatccactaggtgcaatccaatttttgcgatggtgacgaaaccaagtaaaagatggtacctcgacaagttatattttcctcttatcctgcttaaatctaaggatgtcctggaacatcactaacttaggatatgggtgatggtctgatcccaatggacaatggtctcctactttcttgatttgacgcctgagagacgcctgattccataccatatgcctgtggttgtagtttgtaaaatgttaaaaacttgactttgctagtatatttcctaatgctataacccaatcctgggtaaacagacgcatggggatgaattttggacggaaccatggacatttgatgtatgtgtttaatgttgtgtacaatctatgtcgaattctgttgtaagtgccgtccgcatcgttttatatctttgtgcccgttattacaggtcttaa

SEQ ID NO: 261958 - DNA, 625 bp, Zea mays
ccaggctggaggtggttcaagctttcactcgagctccagtggcggtcagtttggtgatactgggagcttccatggcagtgtccgcaacaatcagacgggggacaatgcgagctttccacccagctccagcaacaatcaatctggggatggtctcagttttcatgaaaggttctatggatcacgtggaagggaccagagcagaacaagcaatgatggattccgtgccaggagcagaagtcctcctggcaagcccgtggaagtttccaactggtgattgcatccactaggtgcaatccaatttttgcgatggtgacgaaaccaagtagaagatggcaccctaacaagttatattatttccttttcttatcctgcttagatccaaggatgtgatggtctgaaccctaacggtctcctgctatcttgatttgacgtctgggagacgcttgattccgtgcctgtgggttgtaaagcgttaaaacttgactttgctagtgtactcccaatgatataacccaatcctgggtaaacaaacgcatggggatgaattttggacgaaaccatggacaactgatgtgtgtttaatgtcatgtacaatctatgtcgaaggctgctgtaaatgccgtcc

SEQ ID NO: 261959 - DNA, 1180 bp, Zea mays
gacccacgcgtacgggaaaaatcgccccatcccctgactatcactggctcactgcccttccacctacaggttccaggttaagtttaagattgataaagattgccgtcctctccctgagagtagtctcaagcaagccatcaaggaaaattacaatgcaaagagcaaatttgatccagagctcaccacaaaacaagtccaaaggttacttttgctgtttaagcctgttagtgcacctcaatctgtttcaaataatcaccttggagaaaggcgccactatgaaaaacgaaggaagccacgccattttgaagaaaggcggcctattgaagcagcgcgtcggccacgatttgatgaggaaaggcgccctgcggttagacatgttccttttgaggatccatacagggcaccacgctatgctccagttcctgttgactctcagcatggccattctttggctagtgatcaccacagatattatcaaccagcacttacacctgagcctcggcagcttcctcttgttctagagcctcgatatgttccgccggccctagatcatcatcatgtgccagagcttcgacatgccccacctgcatattatcgcactttggctccatctggtgattcatactatcggtctgttgagaatctggtgcctgagcgatatgcagacagaaccatggctgacttgaccactagagatccaattattagggatcacacagcactaccaggggaggcacttgctcgagcagaccgcttggatgatctctaccgttctgatcgtgtggaggaactctaccgttctgatcgacttgttaaccgtgctgtggaccgccctcatccagcctattttacagctgcttatgagaccaaccctgcttatgctgaaacgagcattaggcctgtctctgcaagggtcaatggacccagtgcggcagtttcgtcactctattccttcagtggtggcccagtatatcggtaatgaatgatcatggctctgttgaaagccttagccagactaagaagacagggtattcgtctctttaactgcaactgttgtttgccttagcttctattcggtattttcttaaatatccttccctggatgaatgacattcgttatcaagacttgatggtctaaactgtcgaaattatgtactgtacttggcgtgctttgaagctc

SEQ ID NO: 261960 - DNA, 1763 bp, Zea mays
ggtaaattcgctccatgccctgactatcactggcttactgcccttccacctccaggttccagcggccatggtgaagaagcccaacggtgtcgccaaggccacggcgacctctgctgacgcggcaccccagccattcaaggagaatccgaacactcctgtgaagcgatgctgttcctgcacaagcagacaggggcaacctgccaccatggaaagcaggcagtcgctgcagccgctattgaccaggccagccccggttggggcagtcactggtgatggccacgcctgtgactgagaggctttaccgcaccctatccgatcgtcgccgaggcattacctgtggtgcaaacgccaaagtcaaccacttttgctgaggcatcacctgtggcacagacgcagaagccagccactgatgctgaaggattggtgcctgcaccaataccaaccactgctgtagcatcagcttcgtcgccaaagccaaaaccagctcaagctaatgctgatgctgcagctgcaatttctgccagcaagggcaatggtgtgggtgctgataatagtaggggtgatggtgagatgaagaacaagaaagagagggccatgagtggcaaggggaaggaggttttgggggatggaggaagtaagggaaaggggaaggggaaggggaagaaggctgtaggcaagaaggaagaaaggggtgaccataaggttgcagggtttatattcatgtgcaatgcaaagactaagaaggagtgctaccagagtcgcttgtttgggatgcctagtgggaagattgaaatggtcaagaagattaggccaggggtcaagctgttcctgtatgattttgacttgaagcttctgtatggcgtgtacaaggcagcatcacatggtgggctgaaccttgtccatgaagcatttaatgggaagttccctgcacaggttaagtttaagattgataaagattgccgtcctctccctgagagtagtctcaagcaagccatcaaggaaaattacaatgcaaagagcaaatttgatccagagctcaccacaaaacaagtccaaaggttacttttgctgtttaagcctgttagtgcacctcaatctgttccaaataatcactttgaagaaaggcgtcactatgaagaacaaaggaagccatattatcattttgaagaaaggcttcctctgttgcctattgaagaagtgcgtcagccacggtttgatgatgaaaggcgccctgcagttagacatgttcctcttgaggatccatatagggcacaagcaccacgctttgcaccagttcctgttgagtctcagcttggccattcgttggctagtgctcagggtgatcacggcagatattatcaaccaccagcacttgcgcctgagcctcgacacattcctcttgttctagagcctcgctatgttccgccagcccatgtgcctactgtgccagagcttcaacatgtcccagctgcatattatcgcacttcggctccatctggcgactcatactatcggcctgttgataatctggtgcctgaggaggtatgcagacagaattgtggcaaacataaccgctagagatccaatcattagtgatcacacagcactgccagtggaagcctctgctcgaccagaccgcttggatgatctctaccggattcgtggtgctcatgtggaggagctgtaccgtacacgggaaattgctgatcgtgcggtgatcactgctagagcagatcgtgtggaggaactctacggtatgatcg

SEQ ID NO: 261961 - DNA, 489 bp, Zea mays
cccacgcgtccggaaaaatcgctccatcccctgactatcactggctcactgcccttccacctccaggttccagcggccatggtgaagaagcccaacggtgtcgccaaggccacggcgacctctgctgacgcggcagcccagccatccaaggagaatccgtccacccctgggttggtcaaggcctcgaagtttaagaagagaaaggtcaaggccaaccgtgcgaagcaggcagtcgctgcagcagctattgacgaggtcgcccctgtaggtgcaggcactggtgatggcgatgcatctgcatcagcggctttaccgcaaccatccgatgttgccgaggcattacctgtggtgcaaacgccaaagtcaaccacttttgctgaggcatcacctgtggcacagacgcagaagccagccactgatgttgaatgattggtgcctgcacccaataccaaccactgttgtagcatcagcttcgtcggcaaagccaaa

SEQ ID NO: 261962 - DNA, 665 bp, Zea mays
gcgattggattcaaggatatgactagccactgcgaagccctgacgatcgggaaacagcagaaagtgtctgccttcatgagcttccagcaaagcgtgcaagctgcagggctgccaggcagccagcccaaccagacgacggagctggaccttttccaagacctgcagttgcctcaggccggggcgcagagcacaaacccattctctgatgagagcgttcagggatacccacagtacatgaacgggcccaacggcgacaacgcacagccaggccaggacttccaacagcagtctctgaagctaccggcggcgagcccgtacgacaatttcctaagggctgctggctgttaggagtccagttacatggacgacaaccacctcacctcaagatagtcccaacggaagatcctgcaatttttccacattttgcagggaaagaagaggggtatgtccgcgtgtgaggtcttagctagagactcaaaccgggttcgacacccattctttatgtatagctgtacgtggttgggctttgagccctttgctgctgctgctgttgttttcaccaatgcaacgtgtagagagggactgtgggggagcagtgccttctaccagactgtacatgtaacatgttgcagaaatatatgaagaaaaaatgacgtttgaaggat

SEQ ID NO: 261963 - DNA, 816 bp, Zea mays
aacaacattgcccggatcgagaagatggtgtggacgctggcaggctacggggagcggggcggggaggttggtgggttcgtgttccaccggttccccacgatcgagcggctcgcgctcgtgtcggagcaggaacttcgtcaggccgggtttgggtacagggcaaagtacattgttggcactgctaaagaattgcaggccaaacctagtggaggtcaaaaatggcttgcctcactgcgtgagaaggagctttcagatgtgattgaagctctttgcactctcccaggtgttggtccaaaggtcgctgcctgcattgctctgttctcccttgatcaaaatcatgctattcccgtcgacacacatgtttggaaggttgctacacagtatctattaccagagctagctggcaagagcttgaccccaaaacttagcgttgttgttgccgatgcttttgttactagatttggaagctatgctggttgggcacaaaacgttctcttcattggcctgctaccagctcaaaaagttgttgtggctcaagttaccagtgacaatggtaccacaaagcctaccaaaaggaagcgcagggtgcaaccggaaccatgttgaggacatgtgatcatgagggagcacggataccagcgatagcattcggtggctcctgagttggcatatcgttttctccaagtcctgacgaagtgaagtgcaaagaaattaaaattcaggcaatacgaaagtcagaacttgatggcaactttctgtcctctggcagtaggaatccgtgagaaggtatctagaatcctgatcacactaacatat

SEQ ID NO: 261964 - DNA, 1217 bp, Zea mays
ctgctcccgtcccacccgccacaccgtccaccggcacgtccaccggctcccatggcgctccacgccgtctcctccgcggcggtctcctccccgttgcgcgccctctcacgcagcctcccccagcgcccaggctgtggttgtttaccaaagcagtccgtcatgatttactccacaaaatttgcaagacctcaggctggaccggtggacttcgctggcaggcctctggttcttggacgctcggacaagagagcagttttgatgcatgccactattgaagaaatcgaagcggagaaatccctcatcgaagaccaagctaaagaaaagatggagaaggcgatcgaaacagtccaaactaacttcaacactgtgaggacagggcgtgcaaacccggccatgcttgaccggattgaggttgagtactacggaactccagtgaacttgaagagcattgcacagataagcactccagatgcaacttctcttcttattcaaccatatgataagtcaagcctcaagcttattgagaaaactatagttgctgcaaatcttggtgtgacaccaagcaatgatggagaagtaatacgagtgactgtcccaccattgacatctgatcgcagaaaggaattatcaaagacagtagctaaattagctgaagatggcaaggttgctataaggaacataagaagagatgcaatcaaagcttatgataaactagagaaggaaaagaagctttctgaggacaatgtgaaagatttatcagctgatttacaaaaagtcacagatgagtacatgaaaaagatcgaatccatccagaagcagaaggaacaggaactgatgaaaatttagacctcaagctgactgtatggctggtgaggagtaaccgcctccgtgaagcatggacccctgcatatgttggtgtttctgaagcaatttgtttggttcatggctttggcgtctcggcgctgcgccagggatgcacgttttgaatcaggcgctttgctggaacttttgggtgcacacaagttgagacaatgctgctgctgctgtgtgtgtgtgttttgagattaagacaatgctgctgtgttttttctttgagattaagacaatgctgttgcgtgtgttcttctcgttttctgtaatgttcgtaaatagtctcttcgtcgccgtgttgtctgactgctacattgtcaatctttcaaaacatacgtctctgaatc

SEQ ID NO: 261965 - DNA, 362 bp, Zea mays
caaaatttgagtttgagtttgaaagaaggaagctggccagagatgatgttcgagaattaattgagcagagagacattggaataccatcctcagatgttgcaggagtttcttggtggtcgcgtcggggcgaactttgtgtacccgagtggggtggatcgtttcaagaggcaattcgttcatctcgaagaaattgctgctaagggtgagaagactagcccacaattgcgacaacatacttccttaccaagagcaggtcgaaatgacagcggcgacgaccttgagaaaccaagtgcagattactgcataagattgcatgtatgtgatcaactgtcaagctctcgtaactttctgaagagcgaaag

SEQ ID NO: 261966 - DNA, 1607 bp, Zea mays
ggcagaggcttctagatctactggcagctcgggagcaacaaagccgaagcgtctcgcgtgcgcggccgccaccggggattagggatggcggcgaagaaggtgctcatgctctgcggcgactacatggaggactacgaggtcatggtcccgttccaagcgctgcaagcgtatggggtgtccgtggacgccgtctgccctagcaagaaggccggcgacatctgccgcaccgccgtccatcagctgaccggtcaccagacatactctgagacaaaaggccataatttcacactgaatgcttcatttgatgagattactgctagtgaatatgatggattggtaattcctggagggcgtgcaccagaataccttggcgatggatgaaaaggtgcttgacctagtcagaatgttctctggtgctaagaagcctattgcatcagtttgtcatggacagttgattttagcggcagcaagagtagtcgagaaccgtacctgcacagcatttccggctgttaaaccagttttggttgctgctggtgccaagtgggaagagcctgacacaatggcaaaatgcactgttgatggcaatctcatcacagcagcgacttataattctcatcccgaattcatcagcctatttgtcaaagcactcggaggttcagtggcaggctcagataagagaatactgttcctatgtggggactacatggaggattatgaggtcatggtcccattccaggctctccaagctcttggctgccatgtcgatgccgtttgccccgacaagggagctggggagacgtgcccgacagccattcatgatttcgaaggtgaccagacctacagcgagaagcctggccacgattttactctgacagcgtcgtttggaagtgtggatgcttcgagctacgacgcgcttgtggttcctggcggacgggctccagagtacctggctctgaacgataaggtcatcagcttggtgaaggccttcgcggagagcggaaagccaatcgcgtcgatctgccacggccagcagatattatccgctgccggagtcctcaaggggaagaagtgcaccgcatacccagccgtgaagctgaacgtgttgctcggtggcgggacctggctggagcctgacccgatccaccgctgcttcaccgatggcaaccttgtgaccggcgcagcctggccaggccacccagagttcgtgtcccagctcatggcgttgctcggcgtcaaggtttccttctgaagtccaaactgaaagggcaaggcagaaagagctctggctcaacctggggaggggcgtgatagcatagctttggatttccagatagaagagaacagactcaaaacgacaccttatagcgatcgctgcacttaatccttgttccatgcgcagcaagcctcaggcttattacccttgtttgtcagcgttgtgtaaaaactgtaacccggatgctgtttcttcttcttcttcttggttccttcttttttctgagtcgtcctttgtggattcaaataataaataaagtcttgtattaaaaaaccccaaaaaaaaaaaaaaaaaaaaaaaaaaaagggcggccgctcgcgatcccacgagtccg

SEQ ID NO: 261967 - DNA, 1767 bp, Zea mays
tcgtccacgcgtccgcccacgcgtccggtcagctatatgactggaaagctgctgcttaagctggagagtgtaaaattcatcattgcaaatcattctccagagaatttcccatttcttgcagaatacaaatgttcacgtagtagaactacgttctattacatccttggctccttagtcttcatggaagacagccctgtgaaattcaggactttcatggaaccacttcaacaggttgcattaaacctggaggcaactcctgatgctgcttttcggactgatgtcgctaagcgtgcatttgttggttggatgagagatctacgtggcatagctatggcaaccaacagccgcaagacatatggcctcctatttgactggttgtatccatctcgcatgccacttctgctgagagccatctcactttgcactgatgaaccagaggtcaccacacccttgctcaagttcacgtatgaatttgttttgaacaaagctcaaagactgacatttgattcatcatcaccaaatgggatccttttattccgagaggttagcaagataatcgtggcttacgggtcacgaattctattgcttcctaatggcacagacatttatggaagtaaatacaaaggcatatggatctcactgactgttctttcaagggctttgtgtgggaattatgtcaattttggcgtatttgagctctatggtgacagagcacttgctgatgcccttgatatatctctgaagatgaccctctcagttccattatctgatatattggcattcaaaaagctgtcgaaagcgtactttgggtatatggaagttctgttcaacaaccatatcaagtttgttctcaagttggacacaaacacattcatacatattgtcagctcactcgaatctggcttaaaaggtctagatgcagggatatcatcacagtgcgcttctgccagcgacaacctggcagccttttactttaataacattacatctggtgactcacctccatcaccagcttcagtaaatctcgcacgacatattggagagtgtcccaatttgtttcctcagatactgaagactctttttgagatcatgctctttgaggatgctggtaatcagtggagtctgagtcgaccaatactgagcctgataatgaccagtgagcagatgttcagtgaactcagagcgcacatattagcatcacagactgtggaccagcaacaacgcctttcacagtgcttcgataagctgatgacggatgtcaataggaacttggaacctaagaatcgtgacagattcactcaaaacctgacagcatttagacgtgattttcgactgaagtaacagctccttggtaccagctatcagtttgaaggtgttcctgcatgatgtaaatactccagttaccttcttttttggaaccacctttctgtgggttgagaaaagaagagcttgtccttaggtttgccttggattggctgaagatggtcttgttgatgcatgtggtagtgaaagcagctgtaaatttcatagcatgtcattttaatcagaatggtgaaaggtggagattgtttcttttgttttttattttatatggcatccctttagcatgtccagcaaaattggtgctagaacaggggtggctgtttgcccaatttgttaagtgggaggcagtcatctctcagatataattcatttgttaaaaagtcaccgaggtaaaggatgtaaatgattccgttggctttgctgatatgaaagctgaccagtatt

SEQ ID NO: 261968 - DNA, 417 bp, Zea mays
ccgtcccgacggcacgcgtccgcccacgcgtccgcccacgcgtcctcggactcgtgggcttcaacaggttgcatgaggccgggaggcatctcctgatgctgcttttcggactgatgtcgctaagcgtgcatttgttggttggatgagagatctacgtggcatagctatggcaaccaacagccgcaagacatatggcctcctattcgactggttgtatccatctcgcatgccacttctgctgagagccatctcactttgcactgatgaaccagaggtcaccacacccttgctcaagttcacgtttgaatttgtttttgaacaaagctcaaagactgacatttgattcatcatcaccaaatgggatccttttattccgagaggttagcaagataatcgtggcttacgggtcacgaattc

SEQ ID NO: 261969 - DNA, 1846 bp, Zea mays
cggctcgagctcggccacggaccacccgtctcgccctcatctaattacgccccgctcgctgtccctctcagatctcttccttgttctcgcctcgtcgtccccaatcgtcgccgggagtctcccgatccttcttccaccacctcaccggtggtgccagggccggctcgcggacggtgcttggactgcccccgtcccgtcatggatcgcgccgagctcaccaccgaacaggttctgaagcgagatattccatgggagcattacatgtcaactaagcttatctccggaacgtgccttcagcttttacggcgatatgaccacaaaccggagagccagcgagctcctttgcttgaggaggatgggccagcatatatccgagttttcctgaatatcctgtggagcatctccaaggaagagactgtggaatacgtgcttgcactcattgatgaaatgcttgcaacaaatcctaagcgtgcagcactgttttatgatcaatctttgtcgggtgaagatatttatgaaccgttcttaaggttgttatggaaaggcaactggtttgtacaagaaaaaagttgtaagatattgactgttataattagtgcacgaccaaagcttcagaatggcacacttccaaatggagatgcttcgaattcgaagagcaagcttacttcaacacacgatgtattgagaggtttggttgattggctctgttcacagctgaggaatcctacacacccgagctgctctattcctacttctatccattgcctctccactttgctaagagaaccatatgttaggacattatttgttcaagctgatggcatcaagctgctcattcccttaatttccccagcttccacacaacagtcaattcagctcctttatgaaacttgcctctgcatctggcttttatccttttatgatgctgcagttgattatttgtccaccacaagggttatgccaagacttgtagaggttgtcaagggctctactaaagagaaggtggtcagagttgttgtgttgtccttccgcaatttgctggcaaagggtgcatttgctgcccagatgatcgatcttggattgccacaaatggtacaaaacttgaaagctcaagcatggactgatgaggatctgttagatgctctgaatcaactagaggtgggactcaaagaaaacctcaagaagttgagttcctttgataagtacaaacagcaagttcttcttggtcatctggactggtctccaatgcacaaagatccaagtttctggcgtgagaacattaacaattttgaagaaaatgatttccagattctgcgagttctcatgacaatcattgacacatcaagtgacaccaccgctcttgccgtggcctgctacgacctctcacaattccttcagtaccatccatctggccgaatcgtggtggcagacctcaaggctaaggaccgagtcatgaaactcatgaatcatgagaacactgaagtgaggaaaaatgcattgatctgtgtgcagaggctcttccttggcgcaaagtatgccagtttcctgcaggcttgagaaaagctgagtcttgtatttagatccagagaacccctggtcatttttcagaatggctgttgagaaagaaaaaccttgaaaattcttgttcagtgtatcctattgttatttgatttctgaagccgatgtataataaataatcagagtcatagaatgctcgatgtaataaagtgtccatgggcttgttgattcatttatgtaaattttgacttgtaacattagcaaacctcttttttgttattcttctgcctgacaacattgcctgattcgtgtgcattacatgtttgcc

SEQ ID NO: 261970 - DNA, 288 bp, Zea mays
cccacgcgtccgcccacgcgcccccgctcccctccgagcgcttccttgttctcgcctcgtcttccccaatcgtcgccgggagcctcccgatccttcttccaccccgcgcggtcgtgccagggccggcacgcggacggtgcttggactgcccttgtcatggatcgcgccgagctcaccacggagcaggttctcaagcgagatattccatgggagcattacatgtcaactaagcttatctccggaacgtgccttcagcttttacggcgatatgaccacaaaccggagagc

SEQ ID NO: 261971 - DNA, 502 bp, Zea mays
gtagggatggctcgggtgagtggtgtggctcgccctccaggggcggaggcagcccttattttggggtcagctgaccccgcttcgctactgtcgccctctcatgaggcttgtcaccatgagccgcatgccgatcctgcagcagctgcacctggaggagcagctcctgcgacgcacatcagacaactggcgtattatcaacgagggcacggcccctgctaccatcgttatgggcgtgtctgggagagtctcggagcttgtcaatatacagctggtcctccgggacaaggtgccgattgtgaggaggttcagtggaggtggcaccgtcattggtgatcagggaacggtgtttgtgactttcatttgcaacaagaatgttgttgctgggctgcagccctttccacgggacatcatgtcatggagtggtcagctatatgggaaaagttttgacagatttggtgaatttcatctacgtgagaatggcatgaaaccacacagaattctt

SEQ ID NO: 261972 - DNA, 544 bp, Zea mays
gctcatttgtgtgatgaacccaaaggtctaaaatctgggatgttcatgtctctggtgtttcttggttttccaattgcaaatgctctcattgcaaagatcaacgatgggagtcctttagttgatgagcttgttctgctgctgctttattgtgcatatacagtgggtctctacctgcacctcgctgtgtcggttgtgcatgaaatcaaggatgcccttggaatctattgcttcaggataactagaaaggaggcttgaactttgtagtgaagatatattattattacttcacaagtgctagcgaggagcaacacagttcgtcaccgtgcacgctgggagtgtgtgtgcccctggaaatgccacagccatctgattgtattgcgcagttatcttggtcatataacaatatagcagtgtgatgtacactgtagtagggtcgttagaagatatacggtgaaaaacttgcttggagaaagtgatcgtagcatgtctacaccctccgtttttttttaaaaatatgttttataaaaaaaacaacaaataaaaa

SEQ ID NO: 261973 - DNA, 564 bp, Zea mays
cggacacgtgggccagccgcggcctgctcacctcggacaacgccctcatcgaggacccgcagacgagggcgatggtggagaacttcgcccggaacgagccactgtggcagcagaagttttcccaggcgatgcagaaggtcgggatgcttgacgtgctcatcggcgagggcaagggccaggtaaggaagcagtgccgcctggtgaacgggcaggagaaggaggagaagcagcagcagccgcaggaggagcaggaggagcagcagccaccggagctggaggaggaggagcagcagcagccgcatcagccacagcttccatggttcctgcagaggcagcgcccgcccgttcttcttccatggctccggccccatccacggccgcgtcgaccgttccggaaacatccggtggccgacctggttaacggatttttccgtggttttcactgaaggcgagcactatgctcgggacgtagacctccaaaatatgcaatgctacggtacatatcaatggacgtaaaccggtgtatccatgagcttaattaacatgaacaatcctgctttgcct

SEQ ID NO: 261974 - DNA, 1118 bp, Zea mays
gaattcccgggtcgacccactcgtccccgcacgcgtgcagcgccgccagacactctgtaccgtccgataccccaagcaccagcgcggcggcggcggcgaccatggctgtcggaaagaacaagaggatctccaagggaaagaagggtggcaagaaaaagaccgtcgaccctttctctaagaaggattggtatgacatcaaggcaccgtcggtgttcagtgtgcgcaacatcgggaagactctcgtatccaggacacagggtaccaggattgcttctgagggtctgaagcacagagtctttgaggtttgcctagctgatcttcagggcgacgaggatcaagcttacaggaaaatcaggctccgtgctgaagatgtgcagggcaggaatgtgctcacaaacttttggggcatgaattttaccactgataaactcagatccctagtgaagaagtggcagacattaatcgaagcccatgttgatgtcaagacaaccgacaactacatgttgcgtttgttctgcatcggcttcaccaagaggcgcccaaaccaggtcaagagaacctgctatgctcaggcatcccagatccgtcagatccgccgtaagatggttgagattatgatcaaccaggcttctacatgtgaccttaaagaacttgtttctaagttcattccggaagttattggcaaagagattgagaagtctacctccagcatcttcccacttcaaaacgtcttcatccgcaaggtgaagatactcaaggcccccaagtttgatctcgggaagttgatggaggttcatggcgactacaaagaggacgttggtgtgaagcttgagaggcctgtcgagggtgatgaggctatgcaggaggttgctgctgccgagtagtttatttgctacttctttatctagacgaatctggacaggaggtcccttatgacgcgaacttcataaaattgtctggcgacatgttttcttctgtccctgccctaaactctaaacccaaaggttattcgtaacaagtgttttaagattatttttgtttatgtttgggttcgagtactgctgtgtgcatgattatttttgtttggttatcgataatccagtttctcattcgtgctt

SEQ ID NO: 261975 - DNA, 846 bp, Zea mays
gggataatcggggcatccctaaccatcacccccgacatgcttgttgctaccgacacacttatctcccagcgcctatttcctgcgaggggaatcagctgtctgatgatgctgactatttcatgtttgatattgtaattctctcgtaaatgtagacattctagagtaatggtacatattagtgacacattttggttttgtcaatgcaggcacaaggatcacttgaaagagatgatgaggatgtgtattttgatgatgaatcagctgaggttgtaatatcttctttgcgtctgggagatgaccaggacagctccctctttacaaattcaaattggttcacatttgatggagagagaggcattgatgatcgtttatctgcctctgttccttcatcatcccccaattctctggagacttcactagaggccgaggaagctgatgatggtaaagtcattggcactgaggatgaaatggaaacagtatatcttggaaatggtagtgctgaggaggtaaaagatgtagcagaatgtaatgaacagccaaattgttgtactgaggatgagcgattgaaaaatacagaagggattgaacggcatccagatgtttcaaatcactataccgacatatgtacaaacgaggctgcctctgttgcagcagaatcttcagccccatcagttgagatagtggcagagaaaacagtagatgaaccatcggaggcagaaagagcagtggatgaaccggcagaatcatctttggacagttctgtctctatacctttgcctgctcctgttaatagtagtgagcctgctaactcggaagcctcttccgaacaagttgcccatgacaact

SEQ ID NO: 261976 - DNA, 569 bp, Zea mays
tcggaacctgctatgctcaggcgtcccatttccgtcagatccgccgtaagatggttgagattatgatcaaccaggcttctacatgtgacctgaaagaacttgtttcgaagttcattccagaagttattggtaaggagattgagaagtctacctccagcatcttcccacttcaaaacgtcttcatccgcaaggtgaagatactcaaggcccccaagttcgatcttgggaagctcatggaggttcatggcgactacaaagaggatgttggtgtgaagcttgagaggcctgtcgagggagatgaggctgtgcaggaggttgctgctgccgagtagtttgtttgctacttctatatctaggcgagtctggacatgaggttgcttatgacgtgaacttagagttgtctacttgttttcatctgcccctaagattttgtctggaaacaagtttaaaattaagattattctcaacaagtgtttaagattactcgtggtgatcttctgagttcgagtactgctgtactaagttccatcatcctcatttttgtttggcatcgatattttacgttctcg

SEQ ID NO: 261977 - DNA, 462 bp, Zea mays
tggttgagattatgatcaaccgggcttctacatgtgacctgaaagaacttgtttcgaagttcattccaaaagttattggtaaagagattgagaagtctacctccagcatcttcccacttcaaaacgtcttcatccgcaaggtgaagatactcaaggcccccaagttcgatcttgggaaactcatggaggttcatggcgactacaaagaggatgttggtgtgaagcttgagaggcctgtcgagggagatgaggctgggcaggaggttgctgctgccgagtagtttgtttgctacttctgtatctaggcgagtctggacatgaggttgcttatgacgtgaacttatagagttgtcttggctacgtgttttcatctggccctaagattttgtcttgaaacaagtttaaaattaagattactcgtggcgaaaaaaaaaaaaaaaaaaaaaaaaaaaggccgcccgc

SEQ ID NO: 261978 - DNA, 893 bp, Zea mays
gctgaaagcccaattgcatggccgaagccggggggacctttaaacctgtgtcctccctgcttcccgatatgcttgaaatgaaagaacttagaggacgtccagatggtgttggcaaagccgcgaatctgttcagtgttaaacaggttgacaagaaaacagtgaagacacgtgcctttcaggaagcttgcatttattctgtggtcgatgagctggctaaacatttgacccaatggagctactccattgccttctttgagatgtcctttattccacttgttcggctccgaagtttttgcaaaaccattaaagcggacagatttaggaaagagatgaaggatcttatctatcagatagaggccaatgtcgagttcattaagtcaaaacgagtggggattgcattttcacccaatgacccagctgtagagtcatttctgcagaccgaaaaggaagaacgttgcagccctctctcaaaatttgtttcgaagttcattccagaagttattggtaaggagattgagaagtctacctccagcatcttcccacttcaaaacgtcttcatccgcaaggtgaagatacttaaggcccccaagttcgatcttgggaagctcatggaggttcacggcgactacaaagaggatgttggtgtgaagcttgagaggcctgtcgagggagatgaggctgggcaggaggttgctgctgccgagtagtttgtttgctagttctatttctaggcgagtctggacatgaggttgcttatgacgtgaacttatagagttgtcttggctatgtgttttcgtctggccctaagattttgtcttgaaacaaaaataaaattaagattatttgtaacaaaaaaaaaaaaaaagggcggccgcgcgggaattcggacggta

SEQ ID NO: 261979 - DNA, 467 bp, Zea mays
gaaagctgtgacgcttccaggtaccgattctccagttccgacccacgcgtctcggcatctcgacaacttcctttaccgtccgagaccccaagcaccagcgcggctgccgggggcggcggcggcggcgaccatggctgtcggaaagaacaagaggatctccaagggaaagaagggtggcaagaaaaagaccgtcgaccctttctctaagaaggattggtatgacatcaaggcaccgtcggtgttcagtgtgcgcaacatcgggaagactctcgtatccaggacacagggtaccaggattgcttctgagggtctgaagcacagagtctttgaggtttgcctagctgatcttcagggcgacgaggatcaagcttacaggaaaatcaggctccgtgctgaagatgtgcaaggcaggaatgtgctcacaaacttttggggcatgaattttaccactgataaactcagatccc

SEQ ID NO: 261980 - DNA, 308 bp, Zea mays
cgagcggacagatttaggaaagagatgaaggatcttatctatcagatagaggccaatgtcgagttcattaagtcaaaacgagtggggattgcattttcacccaatgacccagctgtagagtcatttctgcagaccgaaaaggaagaacgttgcagccctctctcaaaatttgttgctactttacaccagagagcgcaagacaggatggatgctctggatgagaccagtgtgattgtgggtgccgagtcctcaaccttctcacggaggttatcagaagcgcagaagcaacaggatgagcaggacgatga

SEQ ID NO: 261981 - DNA, 436 bp, Zea mays
  unsure (1)..(436): unsure at all n locations
acctacgcgtccgagaacgcgtcagaccccaagcaccagcgcggcctcggcggccgcggggaaccagggttgtcggaaagaacagacgttgttcgcggggaacacaggggcgcacaaaaaaaccggcgaccctttcccaaaaaaggtttggtatgacatcaaggcaccgtccgtgttcagtgtgcgcaacatcgggaagactctcgtatccaggacacagggtaccaggattgcttctgagggtctgaagcacagagtctttgaggtttgcctagctgatcttcagggcgacgaggatcaagcttacaggaaaatcaggctccgtgctgaagatgtgcagggcangaatgtgctcacaaacttttggggcatgaattttaccactgataaactcagattcctagtgaagaagtggcagacattaatcgaagcccat

SEQ ID NO: 261982 - DNA, 468 bp, Zea mays
  unsure (1)..(468): unsure at all n locations
tctgcttgtttnaagttattccnaagtatggggaggagtttgagaagtctagggtcagcatcttcccacttcaaaacgtcttcatccgcaaggtgaagatactcaaggcccccaagttcgatcttgggaaactcatggaggttcatggcgactacaaagaggatgttggtgtgaagcttgagaggcctgtccagggagatgaggctgggcaggaggttgctgctgccgagtagtttggttgctacttctgtatctaggcgagtctggacatgaggttgcttatgacgtgaacttatagagttgtcttggctacgtgttttcatctggccctaagattttgtcttgaaacaagttttaaaattaaaattactcgtggcgatcttctgtgttcgagtactaatgtactaagttcctttgcatcctcatttttgtttggtcatcaataatttactttctcattcatatgat

SEQ ID NO: 261983 - DNA, 186 bp, Zea mays
ggcgagtctggacatgagggtgcttatgacgtgaacttatagagttgtcttggctacgtgttttcatctggccctaagattttgtcttgaaacaagtttaaaattaagattactcgtggcgatcttctgtgttcgagtactgatgtactaagttcctttgcatcctcaaaaaaaaaagcagagaag

SEQ ID NO: 261984 - DNA, 1002 bp, Zea mays
ttcacgcgtccgctgaggaacaagttcccagaattagtacaaacactgggaggaaggaggatactgaggaaaaagctcccacaaatggagcgactatcttttaagctgaacgaaggtgctgctcatgggccaactgaatctaataactcggcatctatgctatccgttgagacaattgagaaaatgatggaagatccagctgtgcagaagatggtgtatccctacttgcctgaagagatgcggaacccaaattcattcaagtggatgctgcagaatccaatgtaccgccaacaactacaggatatgctaaataacatgggcgcaactcctgatcaatgggataaccgcatgcttgatcaccttaagaacttcgaccttagcagtccagaagtgcggcagcagtttgcgcaagttggcatgactcctgaggaagtagtatcgaaaataatggcaaacccagatgtagctgttgcattccagaatccaaaaatacagacagccatcatggactgctcgcagaaccctcttaacattgtaaagtaccaaaacgacaaggaggtcatggatgttttcatgaagatatcacagatcttcccccaaattaacggctagctgatcttcgtcgtgggatagcacttctgatttttgtcggcccgtcatctccagtctggagggctgctgcggtagcatctatcaagaaaagggtcgtgacgctccgatataccctccccgtgtcaaggtttttgagtttcttatgtacatcatgtgatgtagcggcccttggtttagctatgagtaattgagtatgacccttgccagttcattaagtcaggctagtggcatagcagggtccaagtttttactaagccagccagtcagtggaaaggtgcagcagagacggttcgtatcagatcaattttgatatataattgttattattaatctgtaatatattagagacacaatggcaatgcaagtaatctgttaccacatttcctgacc

SEQ ID NO: 261985 - DNA, 458 bp, Zea mays
gtaaagtaccaaaacgacaaggaggtcatggatgttttcatgaagatatcacagatctttccccaaatcaacggctagctggtcttcactgcgggattgcagtcttgattttttttgtcggcctatcatcccctgtgtctggagggcctgctgcggtaaccatctttgaaggaaaagggaacacctgttgctgttgggccgtgacgctctggatacaccctccctgtgtcgagctttttgagtttcatatgtagtagtacatcgtgtgatgtagcggccttggtctagctatgagtatgattgacccaccctcttcccgcttcataaagtcaggctagtgagcgtacaggggcaaatatttgttatttacattgcatgggcagccagccggtctgcgctctgacgttgcatggtttatctcgtaggatgtgaaaggcgcacagacagacatggttcgt

SEQ ID NO: 261986 - DNA, 1772 bp, Zea mays
  unsure (1)..(1772): unsure at all n locations
tcgcttacgcgtccgaattcctctccgggccgagcagccgttccaatccgctcacgccgcctctctcgctgccccgcttgaccgcctgctagcgctgcagtttgatgctgatgacctgatccctccgttgggtaggttcttgggcgcggaaagaacaaagaactcgtggtgggtccgggtccgcaagaccctaggtgttcgtcagcagcgaggatgcccggcctgcctctgcctcaatcgttaaatcagaatattggatgtgaatatgcctatcctgggtctacaggccaggccttccgtcagcagctaagaactgcattgtctccagatgagaaacttaccgctgaaaaagatttggctctgttttgcaagccagtcgagctctacaatattattcaacggcgagccatgaaaaatcccctttttattcaaagatgccttctttataatatacatgcgaggaggaaaaagaggattcagataaccatatcactttctggaagtacaaatactgagttgcaaacacattatgtctttcctctttatgttctgttagctagacccactagtaacctttcacttgaagggcattctccaatttatcgattcagtcgggtttgcttgcttacttcctttagtgaacatggaaataaggacaacagtgaagctacattcatcattcctgacgtgaagagtttgtcaacctcccgtgcttgcaaccatgatattatctttattagctgtgggcaagttggacaaagtaatggtgaagataactgctctgggaaccatgtggaagattcttctctccaaatgcttgaagggaaatgctcctggggtaaaataccaactaatttacttgcttcatctttggagagttgtgtcactttaagttcgggacatattgtggagttggcatctaaagttacaatgagcccaagcttcttagagccaaaatttctggagcaagacagttgcttgacattttgctctcataagggtgatgctacgggttcataccaattacaagtatgcatatccgcagaagaggctggcgcaagagaattacttttatctccttattattgcaattactcatataataatgtcccaccttctctattaccagaaatcataagggtgagagctggaaatgtactttttaattacaagtactacaacaatacaatgcaaaagactgaagttactgaagatttttcctgcccattttgcttggtaccatgtggaagcttcaagggcctaggatgccacttaaattcatcacatgacctgttccactatgagttgtggatatctgaagagtgccaggctgtgaatgttagtctgaaggctgatgcctggaaaactgagtttgtggcagagggagttgatccaaggcatcaaacattttcctactgctcgaggtttaagaagcgtagaaggttggaaaccacagctgagaaattcaggcatgttcacccacatattatggaatcaggatcacatgaagatgcccaggcagggtctgaagatgactatgtgcaaagggaaaatgggctttctgtagcaaatacttcagttgaccctagccagcctgtacatgggagcaatctttcaccaccaacagtgctacagtttggaaagtcaagaanactatctgccgagcgatctgaccccagaaccgacaactgttgcaaaagcgtcagttcttccattcacacagggcacagccaatgccattggaacaagtcctctcagatcatgatagcgag

SEQ ID NO: 261987 - DNA, 587 bp, Zea mays
tgaaaaatggagggggcatcatgttcaatttcaacggtgcgatcgtcgaggccaggcctctcatatatgagcgtggtccatcatgcaggtgcccgccaacatgccacaacagggtgagtcagcatggtgtcaaaattccactagaaatattcaagacaggcaagacaggttggggtgtaagatccctcagttctatatcatcaggcagtttcatatgggagtataccggtgagctattggaagatgaagaagctgaaaagagagagaatgatgagtatctatttgatattggtcataactaccatgataaagaactttgggaggggctgaagtcagtggttggcctaggatctgctacttcgtcttctgagaccatggaaggcttcacaatagatgcatctgagtgtggcaatgtgggaagatttatcaaccatagttgttcaccaaacctctatgcccaaaatgttctctgggaccatgatgatatgaggatgccacatgttatgttttttgctgttgagaatatcccgccactacaggagctgacctaccactataactataagataggggaggtctacataaat

SEQ ID NO: 261988 - DNA, 668 bp, Zea mays
gcgtgctatgctacagcaacatataacccatagagataattcagtagatctagtagtttaactcgataattgttggatttcaatacattcaggttcttgctaatttgatcggttttaaatgtttgatggaatcggttggactgtggaccgaggccggcgaatcaatcaagaacgccatctcctaggttagggtgtgttggacctgccatgggggacaggccggcgccgatcgagaaggtcgcggtgccggagaagatggccttgttcctccacgccgccgtcacgtcaccgggacaccagcagcagcacggcgcctcgtcgcacgaggcgcccgccgcgaacatcacgccgcggacaacagccaggaataagcagcagcacctgccggtgagccccggggcgtgcctctgctcgccgaccgttcacgagggctcgttccggtgcaggctccaccgcggcagcggcagcggctccggcctccacgagatgaagatgagcaagacggccggcgtatgacgacgcgacgcagcgggcggcgacaagcgttcgtactacgccttaccgcaaatgcacaggtgcctttgcctgcatttcggcctctgcttttgtcccctcatttgttttcgctgcatacagtaatacagaaggggaagagtaccttgtttttt

SEQ ID NO: 261989 - DNA, 685 bp, Zea mays
  unsure (1)..(685): unsure at all n locations
tcgccttatccacccgtcctgttcctgaacaccgtgacacacagacacaggtactagtactaccatatcatgtgacgtgcatgcggctgtgatgcacaccaacccagccatggccaaggcagctcctcctctcctcgccgccggcagccgcactgccatcacagcgcagcagccatcgtcgaggaaaggcgccgctggcgcaggtttgttctgcagtcgcgtcatcgtcagcaagcgcgccagggtaacagcgaagctcggagacggagagctgaagcctgcaggcaagcggaagttcatcaccaaggaagaggagccagaacagtactggcagaccgcgggggagagggagggcgagaaccccatgatgacacccctgccctacatcatcatcttcggcatgtccacccccttcgtcatcctcgccatcgccttcgccaatggctggatcaaggtccctgtgcgatgaccgtaacgcgatcagccagcctggatcatagatgctgactcgtcagcctgcatcttatccagcgtgtgtcctgcgactttggaccttcatatatagagacaagagttcttgcgtgtgagcataattgcatgatcgcgtggtgtatgtaacccgaaactgtttaccttttcgcaaaaacttcagtcttcattcaaagnaaaagagacgcgccctgta

SEQ ID NO: 261990 - DNA, 2300 bp, Zea mays
ttcgtccttttttttttttttttaactcgaattttttttttttttttttaaggacatcaagacatcgattgagagacttgtcactttgatactatatgagagaccattcgtccatgcttgacaaacagcagcgttacaagaacatcatctcaacctcgtctgcatattcacgggcttatctacacgcttattcaaaagacactcgatgatgccggcgccagacctgcggcctgggcgcagctccgcgtcctccggcccgccttttactcctcgtccatgccgtcctcgtcctcctccatgatcctcatcttcttgacggcctgcgcagcgtcgctcctggtggagctgttggggacctggatcaggatgtccgacttcatccccgtctcagcgttcaccagaccgccgctccggtccaccctgtagaccagctcgtccttgccgggcgcggcgtcgatgtagaccgtgcagttctcgtcgatctcctcctggatcagcatcttcgacagctgcgtcaccaccctcttctcgatccacctcctgattggccgcgcgccatacaccggatcgtaagagagagacaagatgatgtccaatgcggcgtcggtcacagccagagcgatgcccctttcggcaagacggacggccacatccttcatctgaaggcgagcgaccttcctcagctgctcgtgggacagaggatcgaagatcacgatctcgtcgagacggttcagcagctcagggcggaagtgcctcctcacctcctgcatgaccagatcgcgagcgaccttcatggagttcttgcccaccatcccagcgaggaggtgctcggcgccgaggttcgatgtcatgatgatcacggtgttcctgaagtccaccgtcctgccttgcccatccgtcagcctgccgtcgtcgaggacctggagcagggtgttgaacacggcgacatgggccttctcgacctcgtcgaacaggatcacgctgtacggcctcctcctcacttgttcagtcagctgcccaccctcttcatggccgacgtagccaggtggtgctccgatgaggcgagcaaccgagtgctgctccatgtactccgacatgtcgatgcggacaagaaggttctcgtcgtcgaacagctgttcggctagggccttggccagctcagttttccccacgccagtcggacccaggaagaggaacgagccagtgggctgttgtggcctgccaagaccggccctcgacctcagcaccgcctctgcgacggcgctcacagcctctgtctggccgaccaccctctggtgaagcctgtcagccaggccgaccagcctctccttgtcgttctggccaagccgggtcactggaatacccgtccaacggctcaccacctctgcaatttgttcagggccgacggtttcggtgagcatcaggttctcccctgtttcgctctccagcttggagatcgcggcgtcgatttcctggagggcgccgtacttgaggtcggccacacgggccaggtccatccggcgctcggcctcctgcagggtgaactggagctcctcgcggcgctgcttcagcttcctgatctcatcgattctctccttctccttcctgtacttcatggtcaggggatgcagcttgtccctcagatcgtccaattccttcctgacctcaatcagccgggctttgctggccttgtccttctccttctcgagcgcgtggagctcgacctcaagctggattctcttcctctccaggttatcaatctcctccggctggctgtcgagctgcaccctcacattggcgcaggcctcgtccaccaggtctatggctttatcaggcaggtgccgacccatgatgtacctcgcggagagctgtgccgcgaccacgagggcgcggtcctggatcctcacgccatggtgcccctcgtacttctccttgagtcccctcagaatgctgacggtgtcgggcacgctcggctccgcgacgaacacctgctggaaccgccgctcgaacgcggcgtccttctccacgtacttgcggtactcctccagcgtggtggcgccgatgcacctgagctgtcccctccccagcattggcttgaacaggttggccgcgtccatggaaccctccgtcctgcccgcgcccaggacgaggtgtatctcgtcgatgaagagaatgaccttcccctcggcctcttccacctccttgagcacggccttgagccgctcctcgaactcgccgcggtacttggcgcccgcgacaagcgcgcccatgtcgagcgcgatgaggcggacgtcgaggag

SEQ ID NO: 261991 - DNA, 1185 bp, Zea mays
ggacagtatgcatatattggacttctgaattcggagctgtcatcaaactgcacagcttctcctgcattgcccttccaggaatacccacctggaataacacttgtacctatgaagagtaggacactagcgccattccgtacaactaatcttgtggtagtaagatcaaccaatggtgctggtggatctacatgttctgatttttttgcttcgggggaagctctgcttatagatcccggatgcagctctcaggttcatgcagagcttgcagatctcattgattcccttccaaaaaggttattagttcttggcgcgcgtcatcatcaggatcacattgagggtctttcagtcgttcagagatgcaatcctaatgctgttcttctgacacaccaaagtacaatggatcgcattgggaaaggaacttggcagattgactacacttcagtaactggtggtgaaaagatatgcataggtgaccaagaactacaagttgtttttgcacctggtcatacagatggtcatatggggcttctccatgtaaataccaatacattggttgttggagatcattgtgtagggcatggaagtgcaaccttggacagtagaaatggtggcaacatgaaggattactttgaaactacatacaaattcttggagttgtcaccacatgtattaattccaatgcatggaaggattaatctatggcccaagtatatgctttgtggatacctcaggaatcgaagggctagagaagcgtccattctgcactctatagagaatggggcccaaactctttttgatatagtttcgaagacttacagtgatgttgacaggaagttgtggattcctgcttctttcaatgttcgccttcatgttgatcatctgaactccctacataaattgcccaaggacttctcattggagaactttaaggaaagctgtggagtgcatttcatgttgcgttgggcggtggcatatgtgcattcaaggagctccccagctatccttgcggcaagtgcccttgctggtggtcttgcaattgcttgtgctctcagaaggaactactgcaagcaatcataggttctctcggtcgataattttccagctagatgcccattatattattcacaagcctctgctaccagtatgccgagtcgaacggtgaattgccagaactcttattctcct

SEQ ID NO: 261992 - DNA, 574 bp, Zea mays
  unsure (1)..(574): unsure at all n locations
atcgagatgagtcacacagactacacaaatatattcggacgtgctagatggcctgatgctccacagcgggtcctggaaacacccttctatgatgagtggaagaataatttcccagaccaggaatcagaggaagatcatccccatcataggccactctatcatccatggtgtgcacaaggatattcgtcggtttgccggtactgttccaaacgcgacggcaacaggagatatcgacatcatggccatgtattcgggtcagggtgttgggctaatcacggagatcataccagctgctcaagttgtcaaaagtctggtcgctgaagcgaaggaagtcatcagagaaaagctttctggttaccaatagaatccttcctgaactgcaaactagaagtatctgtgtgtgagtagtcaccaatcagaataatcgcaagcaccaaggtttaggtttgattcttgtgctatttttaagtacagtaaagtaaaaaatgatgaaaataaacgagactaacaaaggtattatgtcacacattcgggtgtgtgtgtgcgcacancatatctgtaatagttttggagt

SEQ ID NO: 261993 - DNA, 817 bp, Zea mays
gactagttctagatacgccgccaacgcgtcggttcgcaagccaccgcaaccgaagcccgccttcgccgccgccgcctctgcgatccccgcaaggtcgcaaacatgtctaccgtgctccagcgcccgacccccggcacggtccagtgcttcggccgcaagaagacggctgtggccgtcgcctacaccaagccggggcgcgggctgatcaaggtgaacggcgtcccgattgagctcatcaggccggagatgctccgcctcaaggccttcgagcccatcctgctggcggggcgctccaggttcaaggacatcgacatgaggatccgcgtccgaggcggcgggaagacgtcgcagatctacgccatccgccaggccgtcgccaaggggctcgtcgcctactaccagaagtacgtcgacgaggccgccaagaaggagatcaaggacatctttacccgctacgatcgcaccctcctcgtcgctgacccccggcgctgcgagccgaagaagttcggcggacgtggtgcccgcgccaggttccagaagtcgtaccgttgagcggctgcctgctccatctcgatttttcagatcgttgtgggtgttcttcgctttatttcctatcaatggatctgcttatctggttctatatctagctgctgctttaccataatgtttagactttaatgcctagcctgaaaccttgtttgcaatgtgaaattaatgtgagagattatgaagactattttggctagtccctctattatgattttcataagcacagtataaagaatactgatattgtcccctaatgcctttgttgtgt

SEQ ID NO: 261994 - DNA, 750 bp, Zea mays
gcgcgccgccaccatcaccttcgcagccctagccgccgcctccattgctgctatacccgcaaccatgggtcccgtgctgaagcgcccgaccccgggcacggtgcagtgtttcgggcgcaagaagacggccgtggccgtggcctacacgaagccaggccgggggatgatcaaggtgaacggcgtcccgatcgagctgctccgtcccgagatgctgcggctcaaggccatggagcccgtcctgctggcggggcgctccaggttcaaggacatcgacatgaggatccgcgtccgaggcggcgggaagacgtcgcagatctacgccatccgccaggccgtcgccaaggggctcgtcgcctactaccagaagtacgtcgacgaggccgccaagaaggaggtcaaggacatcttcacccggtacgaccgcacccttctcgtcgccgaccccaggcgctgcgagccgaagaagttcggtggtcgtggcgcccgcgccaggttccagaagtcctaccgttgagcgctcggctgcccgcgcttgccgtaccgatgcctgtgttgtcccaacttgccagttcgatgcctgtacccgtggcttaattttctatcatcggagctacttatgtggttctataactagatgctgttttaccttcaacttgtgctgttgtaccttcatatttggactttttaagccttgtgtcggacgcctttggcattgaaatatgagagatcttgaagccaaaaactaaaggt

SEQ ID NO: 261995 - DNA, 2341 bp, Zea mays
cctacgtgaccgggccaccgcgtgcgccacgcgggcggcggcgctttcgaccatcatcacgggtccggcacgccacgcgccgtcttctgccgtgcgcccgccatcggccacccccgcccgccgcgccgccggctggtgcttctgcgccgacgcctcctcggcgtcgtcgccctacacctgggataggacccgatggagccgcccctcccacgaggtcgaccaggctgagagctacgcatccctcatccagatccagctagaggaggcggtggagaacgaggactccgcggaggccgccaaactcaagagggacatcatagaggccaccggaaacgacgctgtagcccacgtcatggccgagctcaagaatgctatagaggaacagcggtaccaggacgcgtcaaggttgacaaggcttgctgggaccagcttggtaggttggtgggtgggatatgctaaggacactgatgattccatcgggagaattgtacgaataagccctggtgtcgggagatatgtggcgaagagctacaacccaaggcaattggtcactgcatcttcaggaactccattatttgaaattttccttgtcaaagaagatgatgagacatatacaatgaaggtggtacacatgcgaccaacaaaaggaacttcaggtgcaccatccatatcatcaacaataacagaaagcccagcaaaggtagagaatgaaaattcatcagcaagcagcgctatatctgacagtgttacagaggaggcaaatacagatactacggtaagaggaaatgaggatgctgaagagaaagcacaagatgttggtagcagcaaggatagtagtgtcgaaggattaaaaagtgttttgaatttttttaagtctcggattcctgaattcaaagttcaggtgataaatgttgatgtggctgaggaaactgaattagctgcaaattcgtctgaagaattagtgcaagatgatgtgaaaagtactccagaaagctcattggaagagccagccactgaggaactcgagcaggaggaagatgttccggaagaaaatacggatgaagaaagtaaaagcacggaagtgaagctttttattagtggagtggttcacaataaagaagatgctggagcaaaatcatatgttcgagttccagctgaaataaataacatggaaaaggactcctttgaactgtacattcctggagaaggttctgatcgtgatttggctgaaacaaaggctgcaaaacagaaagttgcagatatggctgctaaattagcctcagagcttatgccgtctgatgttgccaaggcattatggggtacagccaagagttcttcaaagataaataaagaagttcaggagcttttaaggcttacgttaagcaaggcccgagtcaagctgaccgaaaataccatttttaaacgaatcattatggacactaacagcacagatccatttaatggtctctatgtgggagcatttagtccatatggaccagaaattgtgcagcttcgtcggaagttcggccactggaacagtactgatgacgttgagtttttcgagtatgtcgaagcagtaaagttgactggtgatctgagtgttcctgctggccagataacgttccgtgctaagattgggaagggcaagcgacttgagaatcgaggagcatatccagaggaatttggtgtgattgccagttacgaaaggtcagggtagaatagctcagcctggattcaaaaatcctcgatgggtggatggtgagctgttggtactcaatggcaagagtacaattccacaccttggaggcgcagagctcggtttcctgtatagtgtacctgagcagagttttctggttctcttcgatcggcttaatcttcccgagtgatgagactcctaaagggagcagactcctcacatgtagattgcatgaacgcgcagaggccggccacagctccaagtgaccgaaacaggtctggggggccgtttccccatcgtcttctgccctctgggcttcctgccaatcctttctccgcacctactttttaggagctcatgtgcttaactcgtttcagagtgtgagggaaagtcgacaccattgctggtctaaactaacggaggagtcttaatactaataatatatatgttatagcatggtagtttgctctccaatgccacagttgtagctgtattgggtatgggcatgacagttttgcgagttttacccgtcatcgttgatttcagtaattaccgaattgaataaaaatcgttctggtgtatcgtgatgttacaattataataatataaaacaaggcaaataaagtctcatgatttatgatcgtt

SEQ ID NO: 261996 - DNA, 928 bp, Zea mays
aggacgcgtgggcggacgcgtgggccgccacacactagtcggggaaaacgatcgaacgagcacaggcacgcacgcaccatggcccgcgctctcgccctcgcctccttcctcctcgtcgcctccgccaccgtggctttcgccgcggaggccccggcagcctcgccgaagcattcggcctccacgccgtcaaaggcgcccagcagttcgcccgacaagtccgagaaggcccccacggcgtcggctgagaatgctgcagagacgccgaaggcaaccccggccaaggccccggcggcggcctccaagtcagaggcatcgccttccgaggcgcccgactccgggtccagcgctgcgtcacctactagcgagagcgccgcgtcagagaaggcccccgccggtgcccccaacgactcgtcggccagcccttccgcgtccccgtccgaagatgaagccactgcatcgcacgatagcagcagcggccgtggcagtgcccgctcggaagagccctcgacggccgaggccggccgcgaatccgccgatagtccacccgagccagcccatgcttcggagtcaccagcagagtctcctggcccggccgctgaccacgagagcggcagcccgagcatgggcaccggtgtcgtactggccatgctggccgacgatgtcaccgtgacgcttcctttctagatgaccatggtggctttgcgctaacatcatagtcacagagcagcaattcttctgggaatctgtgttctcatggtcatgcatgggaatgggagtcgatatgactacgcttattaggagtttatgaatttctcctcaagatatctaggcctttgtttcatcctttgggactggttggttaacttgtttgcatgtttttcttcgtttgtaatttgaatgacaatcaatgaatttattgtgtagttgt

SEQ ID NO: 261997 - DNA, 1137 bp, Zea mays
gtgtcaaataaaatttactattattttgacttctttttgttacttcaaatgccctaggccatctctctttggtggtgctcgccccagggaacaagttctcaaagaacgtggagtggatgttttggccagtgatctcgagaagacttcaccagttggcaggcctaaaggcgaatttgcaaaggttgagcagaaggttgaagctatgtccattaacccttctgttgaaagacatgagagttttgcagctggtcatagaggcccaaggaatggtgataagaaagatcataagtggaatactgacagggctgatgcatataggcttactcgtcgagaggacaacaggagggttgctagagatatggagaagccacaggagcaaccacgcccagagcctgagacctggcgtaagccggtggagcctccaaagctagaggttgcaacacctcgttttgggaaagcagcaaccgcgttggagctcgcccaggccttctcaacgtctatgtctgatactgcaccacagagccggttgaccagcgctcccagtccaagagttcctcctagcccaggggctagtagggatcagtctggcttttcaaggctcactgacagcaggacgttacactcgggcccttcccagcgaaagataaatggctactgatcgcttggcacacatattacatgtgccacgatgatagcccaggcatcatggcctcgatgaagcgcccagctgtatcttcatactcaactgtccctgcgtggagaagtccagttgttgctctgtccaatggtggtacgcgagggtctctaatctcattgctggcaagcaaaaggctcctctcccataagtttctggtcagtgatttataactgacggttcgtttcctctcttgataacgagagatgtgaatttgtgaactgtttctgcttatgttcgccagccactatttattgctggggaataattgcagctacctgtgcaccgtagttggttgcacttgcagacgctgcaaaatcgggattttatcgtgctagtttttttttggggggtccagaagaaactattgatcctttggagtcttgtttcctttgcggtccccctatgatttacaaaatacacccttcgttcttggttgtcaa

SEQ ID NO: 261998 - DNA, 660 bp, Zea mays
ccggaattgccggcccggcccgaccgacccgcgcgtgaacaccgttcccaaccaagattcctcttacccagggctaaggatcaatcggggtgctaaagctcactggcagcaggacgttacgcttcagccctttccagcgaaagataaatggctactgatcgcttggcacacatattacacgtgtcacgatgacagttggcctcgatgaagcgccccgctgtatcttcatactcaactgcccctgcctggagaagtccaattgttgctctgtcagatggtggcacgtgagtggtgataatctcattggtagcaaacaaaaggctcctcttccataagtttctggtcagtgatttatgactcagggttcatttttcctctcttgataacaaaaatgtgaatttgtggactattttttcttatgttcgccagccctgatttgttgctggggaataattgccacctgcgcatcttttagttggatgtgctctcccgtgcttggttttatgatgttgccagatcggtggtatgtagcctgcgtcataatgcaaaattgggattttactgcgagaacaaattattggtcttgtacggttaaatcaggattaaaggatgtaactttcaaaaaaaaaaaaaaagggcggccgctcgcaatctagacaa

SEQ ID NO: 261999 - DNA, 456 bp, Zea mays
gacttcctcggtccaagccaattgaggctcctgaaccatctcctacatatgtcgcagcgaagcaggtgcaccaggtccaggttactgctggcctcatgaaggctgaggttgaccatgatctgcaccagaatgcaagggctgctgaaacaggagttttgggagcagatgctgagagcagggtagctgagcgaccacgtttgaatctgaagcctcgttcctatgccacaggacaatctgatgaaatggctgttaaggaaaggccatccctctttggtggtgctcgcccccgggaacaagttctcaaagaacgtggagtggatgttttggccagtgatctcgagcggacttcaccagttggcaggcctaaaggcgaatttgcaaaggtcgagcagaaggttgaagctttgtccattaacccttctcttgaaagacctgatggtttttcagctggtcata

SEQ ID NO: 262000 - DNA, 1190 bp, Zea mays
ctttaccgaggcgctccgggcgaacaagctgcgcactatgtcgaccagatggttgctgaggctgaggagtacttctcaaagtggggagaaagtggcactgttgatttgaagtacgagttggagcacctcatcatactgacagctagccggtgcttgctgggaagggaggtgcgagaaaagctgttcgacgatgtttctgctctcttccatgaccttgacaacgggatgcagccaatcagtgtcctcttcccgtacctcccaatccctgcgcataagcgccgtgacagggcacgggcacgtttggcagaaatctttgccaccatcatcaagtcccgcaaggcctctggacagtctgaggaagacatgctgcagtgcttcattgattccaagtacaagaatgggcgccccaccaccgagggtgaggtaaccgggctacttatcgcagcgctctttgctggacagcataccagctcaatcacctcaacctggactggagcgtacatgcttcgcttcaagcagtactttgcagaagccgtagaggagcagaaggatatcatgagacggcatggcgacaagatcgatcatgacatcctggcagagatggatgtcctctaccggtgcatcaaggaggcccttcgtctccacccgccgctgattatgttgcttcgccaatcacacagtgacttcaccgtgacaacaaaggaaggcaaagagtacgacatccccaagggccacatcgtcgcgacatcaccatccttcgccaacaggctgccccacatctacaagaaccctgactcatatgaccctgaccggttcggtcccggaagggaggaggacaaggctgcaggtgccttctcgtacatctccttcggtggtggcaggcatgggtgcctcggtgagcccttcgcctaccttcagatcaaggcgatctggacgcacctactgaggaactttgagttcgagctggtatcgccgttcccagagaacgactggaacgccatggtggttggcatcaagggcgaggtgatggttaactacaagaggcggaagcttgtcgtggacaactaagattgtggtcgccagtctctatctcttaaatgcttgcttgcttcttgttgattcaattgttttcacatgtttgtcagcatttgttcagtgcaagttctgctgtacgcaagccagccttgtta

SEQ ID NO: 262001 - DNA, 380 bp, Zea mays
gaggaactttgagttcgagctggtatcgccattcccagagaacgactggaacgccatggtggttggcatcaagggcgaggtgatggttaactacaagaggcggaagcttgccgtggacaactaagattgtggccgcagtctctagatgcttgcttcttgttgattcaattgttttcacatgtttgtcagcatttgttcagtgcaagttctgctgtacgcaagccagccttgttaggggtgtttctgttgtttaggattttgaaatttgcttcactatggggccgccatgatctgcaacttctgcatgttcagcttcctggctaagcattcccctatgtcaaatctgtaacttgtagcatctataagcctgtgggtctttt

SEQ ID NO: 262002 - DNA, 1282 bp, Zea mays
tccggaattcccgggtcgacccacgcgtacgcaaaatttcaagaaccccaaaaggttatgatatttttcagtgctcatggagttcctctggcgtatgttgaagaagctggtgatccatataaagcagaaatggaagagtgtatcgatcttatcatggaagaactggaaaaaagaggaataacaaatccgtgcatacttgcttatcagagccgagttggaccagtggaatggctgaaaccgtacactgatgagacaattattgagcttgggcagaaaggggtaaagagcctgcttgctgttcccattagttttgttagcgaacacattgaaactttggaagaaatcgatgtggagtacaaagagttggctttggaatctggcatcaagcactggggacgggttccagcactaggttgcgaacccacattcatttcggatcttgctgatgctgttattgaaagcctaccttatgttggcgcaatggcagtttccaatcttgaggctcggcagtctctcgtacccctcgggagcgtggaggagctgctagcagcatacgactcgaagcgcgatgagctccctccaccggtaatcgtgtgggagtggggctggacaaagagcgcggagacctggaatggccgtgcggcgatgctggccgtgctggctctcctggtgctggaagtgaccaccggcgaagggttcctgcatcaatggggaatcctgcctctgttccgctgagccgacagttctgttcatgatggggtcataattttgctgcagccgaaggaagttttgaacttctgatgctgtatatgaatcaatttgccttaaatcgtcgaggggaaaagaggagaaaatggtaaaatatggacagaattcgacggtatatcatgttatattgtacctacctacatgacatgggacatgaaatagggctcagacatgcgctatggaacttggaatacacacaaacctaacacgccacatgctgcacaaactcctgcctactgccactagtaccttgtctgtccataagtggatgcgcgttgcttttagagaataatcatatgagcggatgagcctctgcattgtcatgtggatgctatatcaatccagcattccagctcaacaatttcagggttagctttagctcaagcagattaatttttcggttggctgagtttatatggtttttgtgcctctattgatggagattaattatagattttccatggatgacttagaaggtgacttaattctaaatgtcaacagagttgatattatt

SEQ ID NO: 262003 - DNA, 628 bp, Zea mays
cagaaagctcttgcttatgggtccatctttccacggttgattctggtcgcccggcggccagaagcccagaacctttgctggcaggccgcgaaccaaccaaacagctgaagtctgacgacgagccttggttcagagaaacagggcactgggtttagagcccttcggatctagtattgtcgttcaccggcggcgaccaggccaaaccctagaaccttgccaagatgaggtcgttgcgagcggcgcagaccctagtctcccgttcccttttctcagcgcgccattaccgctccttgaagtcagcggaagcctttcactggctcttctcggcggactccaaggcgccggctcctcgctcccatggcctccaccgtcgactcacccgggagctcatccgacttcaccaagcgtatagagcgcgcctggctaatctcccagcaaccaagaccagtttcttgctcttcctgtcaatctgctggccacgttgagtgcaagtggtgtgcaggaacaggcttctttatccttggtgacaacatattgtgtgaagtaccctcaagaaattcaaaatgtgtgatatgctctggaaagggcttcacaagttgtgctgattgccaagggacaggttttcgtg

SEQ ID NO: 262004 - DNA, 918 bp, Zea mays
cggacgcgtgggctacattgcaaaacatggtaatttagtcaaaagattctagagcttctgaggttgtgcgatatatgttaggagataagacatgcacaaggtgctcatcaacccaccttcagaagctctagaatcttttgactacattgcaaaacatggtaatttcagttttacagagaggtttgccgtgaagtatgctggtgctgcggccatgtacatggtatctaagaaactaaagaagaaatacaacataactgacgagcgtgcttcattgtatgatgctgccaatacatggatcgacgcactgaacggaagagatttcctgggtggctccaagcctaacttggcagatcttgccgtcttcggtgttctgagacctatccggtacttgagagctggaaaggatatggttgagaacactgaaattggcgattggtaccgacgcatggaagacgcagttggagaaccatcaagaatacaggatgcacaagcaaactagaattttgacaacattcttttaaatattttagaggtatccgtgcctatgcatggaggctattcaaattttttgccagaatcaagtgtatgcaataatgctctgccagattattaagcataataggctaatagcacctgaggaacagtgttttttgacttgggaacttggttgtgttactgtgtaaggttttgctcccctagctgttcacgtctgtattgtctgcgatgtggttttgaagattcagcatcagcgattctgctgtgccttgcatacagtttaaagaatttcggaatgctggatctgccgaagcgatagattcatggttgtttaattaattaatgacaatctcatgtggcttattgactgggacaaattaattatatatttatttttttttttaaattatttttttctttttt

SEQ ID NO: 262005 - DNA, 965 bp, Zea mays
  unsure (1)..(965): unsure at all n locations
tcttgcttatgggtccatctttccacggttgattctggtcgcccggcggccagaagcccagaacctttgctggcaggccgcgaaccaaccaaacagctgaagtctgacgacgagccttggttcagagaaacagggcactgggtttagagcccttcggatctagtattgtcgttcaccggcggcgaccaggccaaaccctagaaccttgccaagatgaggtcgttgcgagcggcgcagaccctagtctcccgttcccttttctcagcgcgccatctaagcggcgcagcctcccccgccacggccgccgccgcgggcgcgcggtggtgtgcagcgccggcgccaccgccccgttcgccgcttccatcctcgagggtgatgcctgccggggttgccggcgcagtatccttctcccttaccttcgctactgtagcggcggcggaggccaaggccaatgagcgaccgcaaccggatcttgtgccgcagaacgtggtgctgtaccagtaccaggcgtgccccttctgcaacaaggtcagagcctttttagattatcatgatataccatataaagttgtggaagttaatccattgagcaaaaaggaactcaagtggtctgattacaagaaagttccaatattgacagtagatggtgaacagcttgttgattcatcagatataatcaatatactacagagcaggatcaaccccaatgacgaactcactagtgacgaggaagcaaaatggcgaaggtgggttgatgagcaccttgtgcatgtcttatctcctaacatatatcggacaacttcagaagctctagaatcttttgactacattgcaaaacatggtaatttcagttttacagagaggtttgccgtgaagtatgctggtgctgcggccatgtacatggtatctaagacactanagagagaatacaacataactgacgagcgtgcttcattgtatgatgc

SEQ ID NO: 262006 - DNA, 343 bp, Zea mays
ggaggcccacgataccctgcctcctgccgccgcgcctctctcctacccgaagcgaagcgccggaggtgtccctccgtgcgatgcagacgccggcggcgaccatctgcggggcccacggggcagccttcaccccatgcccccgtcgccccacccctcctggaagcctccggaagcctttcactggctcttctcggcggactccaaggcgccggctcctcgctcccatggcctccaccgtcgactcacccgggagctcatccgacttcaccaagcgtatagagcgcgcctggctaatctcccagcaaccaagaccagtttcttgctcttcctgtcaatctgctgg

SEQ ID NO: 262007 - DNA, 761 bp, Zea mays
aactatcagtccatctcaatctatattagttcttgaaggaatagtaaatggttctattgatggaaattggaattgagaatacatgtcttgacatatataagaacctgtttgttgtttgatgaactaggaaataactaaaaattatttggacagagacatcacaaatggatctgatcacaaatcacaaatgtgacaagcttgctaaggtgaaactgctaaagaagttgtatgactactatgccgcgggcacatgacatcaattgactcaaggagaaaagagaggcgtcatccaaaattctgagtttgttcgctctattagagcccagaggcggtactgggcgaggagctatgctggatggataaggtttaggagagcacaaccaaatgcagcccattacgatccttcccttctgtctgcgcgccttcactttcatctggcactgggagttcctgtacatagacttgtaaaagcggccggctaggtttcggtatgcctatctaaagggttaggcgcacccatcggatcagttgttgttggttcagaggccttcatcgacaaggctagaattcttaggaagaccctaggcggtgggatgaggcaggttggagttctttgtgccgctgcttatgttgctgttcgtgacaccgtgggaaagcttgcggatgatcacaggaaggctaaagccttggcagagggcctgaagaaaattaaacagcttacggtggattcgtcttccgtcgagaccaatatggtgttcttc

SEQ ID NO: 262008 - DNA, 742 bp, Zea mays
cccacgccgccgcccgccgggtcgcccaccgcgtgcgctccccttcccctgctcctcgaccacctcaacgagcttctgctccgacgacgacgacgtgccgccacatccacatggcggacgacgccgtcgccggcggagcggccgttcgctgcgcagggccggcgccggcctcgctgtcttctagcaggaagcagcagcagcagcccgacgacgccggctgcggcagcagcgacgaccactaccagcacgacgtgatcatgctgaggcggacgaggagcgggcgggcgttcccgccgccgatctccgtgatcggcaagggcgggcggccgtggctctgcctgcgggcgcaccgcgagggtggacgcctcgtgctgcggcagatgcgcctgccgtcgcaggagctgctgcagccctgcaaggaggacggcaggttcaagctcctcatgcacccggaggcccgcgcgcggccgtgcgggggcggcacactgcaggaacggcaagggaatgatagctagcgctcttaattgatcagctgatcagatgatctgccgccacgcacacgtcgtcttgtatgggctggctgctacaatgcaaccggtagatctccctgcttagtttcttgagatcgagggctccagttcttgctttgcattctgcaaccgttgtccaaatgtccacaatctttgccttccgtcaaattttaatacatggtcggaacattgaggcaaaaaaaaaaaaaata

SEQ ID NO: 262009 - DNA, 1649 bp, Zea mays
gttcggtgcctttttctagcggggaggaggcaggcggcgcaatctggcaccggccatcacgttccctccggccgcttccccctccctgccctccctttccccagatccgaagccattaaaaccagcggatctcacctcggggcgcgtccgcggcatctgggcaagcgagtggtagagccagcagccatgagatggtatgcatcggtagcctcctgagggcgctggtcctgagtgcggcggcgtctgcgggcaggcgccgggggcccaggatcctgtgtggccacgaggcggatgtacgcgtgactcctcggcacggacacggctggcgcggattccgggcagtcacgggaaggatgatgctggactcctctgactgtgcctctgctgccgccgccgcggaggcggggcaggtgcagccgcagcgccgcgcggtgggggccgtgcccctggcgcacgacggcggctacgccagcggcggatgggagagagaagatggcaaactgagttgtggatactcaagttttagaggcaagagagctacgatggaagatttctatgatgtaaaactaactgaaattgatggacaagctattagcctgttcggtgttttcgacggtcatggtggatcacgtgctgctgagtatttgagggagcacttgtttgagaaccttctcaagcaccctgatttcttgacagatacaaagcttgcgataagcgaaacatatcagaaaacagatacagatttcttggaatcagaagcaagcgctttcagggatgatggttcaacagcttcaactgcacttttggtgggtgaccatttatatgttgcaaatgttggtgattctcgtgccgttatttcaaaagctggcaaagctatggcgctttcagaagatcacaaacctaacaggattgatgagcgaaagagaattgaaaatgctggtggtattgtcatttgggctggcacttggagggtgggtggtgtattggcaatgtcccgtgcatttggcaatcgtttactgaagccatatgtggtggcagaacctgaaattcaggaagaacaggtcagtggtgggctggaatgcctggttcttgctagtgatgggctttgggatgttgtggaaaatgaggaagctgttttccttgggagatcggaggacacgccagagtctgcagctaggaaattgacagagattgcttactctcgcggcagcgctgacaatatcacatgcatcgtggtccaatttcaccatgacaaaaccggatgagccgtatggctgccaatttcagttgtaccctgcttcagtctattattatcctgcaagctgggtggtggcctggtgggcttctcccagatttaccctgcttcatgctattattatcctgcaagccgggcggtggggtttctcagatctatcgctcatgtagcaactttcaagcactcgtccattgattcttttgttgtcttgtaggaaacatttgttccgacaggtgtagtagacacttttaaactgataattcaataaacgtatgtttacgattactgtttagtggaaattggttttcattttgccttatataagaagattttaactagtctgtcatgtgcgtgtgccatcccaaattaggtattaaaatgcacccttttttgg

SEQ ID NO: 262010 - DNA, 601 bp, Zea mays
tcggtggaatctggcaccggccatcacgtcccctcccgccgcttcctcctccctgccctacctttccccagatccgaatccattaaaccagcggatcttgcatcggggcgcgtccacggcatccgggcaagcgagtggtggagccagcagccatgagatggtatgcatcggtagcctcctgagggcgctggtgctgcgtgcggcgtcgtctgcgggcaggcgccgggggcccaggattctgtgtggccgcgcgacggatgtgcgcgtgacgccacggcacggacacggctggcgcgggttccgggcggtcacgggaaggatgatgctggactcctctgagtctgcctcttccgccgccgccgccgccgcggaggcgggagctggggcggtggcaggccaggcgcagccgcagcgccgcgcggtgggggccgtgccccaggcgcacgatggtggctacgccagcggcggatgggagagagaagatggtaaactgagttgtggatactcaagtttagagggaagagagctacaatggaggatttctatgatgtaaaactaactgaaattgatggacaagctattagcctgcttcgtgttttga

SEQ ID NO: 262011 - DNA, 435 bp, Zea mays
gaacagttcagtgatgagctggaatgcctggttctcgctagtgacgggctttgggatgttgtggaaaatgaggaagccgtttcccttggcaaatcagaggacacgccagagtctgcagctcggaaattgacagagatcgcttattctcgtggcagcgctgacaatatcacgtgtatcgtggttcaatttcaccatgacaaaaccggatgagccatgtggcggccaatttcagttgtaccctgcttcaggctattattatcctgcaagccgggtggtggggcttctctcagatttatcgctcttgtagcaacttccaagaactcgtccattgattcttttgttgtcttgtaggaaacatttgttccgacaggtgtaatagatatttcccatgggttaatttctaataaaactatgtttacaattactgtttagtgg

SEQ ID NO: 262012 - DNA, 1858 bp, Zea mays
atgaaaggcaaggctgctaagggattatagatttcttgtgaaagataagatttttttggggagcaatttatgcaacatgccatcctgcattataattattacaaaagcgacaaacacctccaatcacacgtgaaggtggggccgagggtgagagagaagtcttattagaaggaaggaggaaaatgacgaaattaagaaataatgggacactctgtcacgtccactcatcatatatccaacgacgcgcgccggccgggcggtttactcgctgcccggaccggaggtagctttcgtgacaccggtgaagatgacgctggtgccgagcagctccttgccgacctcggcggtgaatgtgtcgtagcggaggaagagctcgacgaggaggagcctgccgaccagcaccacgaagttcttcccggggcactgcttgttgtcgacgctggggttctcggtctcacggccgttggaccagtacacgtactgcagcagcttgctgccctcctcgccgaggaagcggtcgggcacgaagtccccggcggtgtcgccgaacacgcgggggtccttggtggcgcacggctggtagccgaacagcatctcgcccttcctcacctggaacaccgcgtcgtggctctccaccagcaggtccttcttggcgtgcccgtactggaacttgacgggcgggtccaggcgcagcgactcccacaccaccgacttggccagctccatcctctccaccgccgcgagggtgaccttgccgccggcgtcggccacggcgccgcggatctcggccaccagccgctcgtggagcttctcgccgccgctggccacgttggccagcaggcccgggaacagcaccttgaggccgccgtagctgttgaaggtggtggcgaagaggaggttgtggcaggcctcctcgcgcgacaggcccaggccctcggcggtgtccagcgcctgcttcgccaccgtggagaagtacttgtacagcgccctgtagtcgcccttgacgaggaaaggcgggaggtggaacgtgtggagcagcggctcctccaggaccatggggaggccgagcgtgaccagcgggtggagctgccagatgagccacttggccgccttgctcggcccgcccttgccgagctcggtcgccgaggggcgcacgccgaagtaggcctcgccgatgaagtcgaaggaggtgacgtcgttgagcttgttgaactcggccttgccgcccttggccagctccgcctccacggtggcgaggagcgaggagaagttggagcggaaggtggggatcacgtcgtccttgcgggagagcaggagggagaagagcagctgcttcaccttggtgtgggtgggctcggaggggtccaggtacgagcagacgcggtagccgccggtgagggaggtggacggcatgtaggtgcccgtgaacaggtccttcttctccaccttgtccatgtcgaagagcacggggaagctcttggcgtccaggaccgccaccacccgcgggtcgcgcgccatgaaggggcccggcggcacgttcatgcgcaccacggtggagccgtagcgctccacgcgggactcgaagtacttgtcctgcccctggaagtagtagaagtcgaggcggtcgcgcacggcgcccaccagcggcaggccgtagctgcccggcacgtccttgggggcggtggtggaaccatggtcggagctcgccatagaggaggctcgcaacaagttgcttcttccccggcaatggatcgcgctctgggtgcagttgctcaaattcgtcggtttgaaggcttacgaagaaggactggccgccccccgacgcgtggtgaccaggtccggacgtgccggacgctgg

SEQ ID NO: 262013 - DNA, 1950 bp, Zea mays
cccacgcgtccgcaccaacaacaccaccagtccaccaccacccacctcccacatgtgcacacgcgcccacctcccgtccaccaccgctatatatcccggcgccccttcctccctcccccgtccttccctccgcctccgcctccgcccccgcccccgcccacgcccactcctcgctgccaccactcctgtcacctcttcccgcgccgacgcagccgccatggaccccgtcgccacatgggggctaaccccgctcgcgggcgccgacccggagatctacgacctcctggagcgcgagaagcggcgccagcgtcgcggcatcgagctcatcgcctccgagaacttcacctccttcgccgtcatggaggcgctcggctccgcgctcactaacaagtactccgagggcatgcccggcgcccgctactacggcggcaacgacgtcatcgacgagatcgagaacctctgccggtcacgcgcgctcgctgccttccaccttgacgccgcgtcctggggcgtcaacgtgcagccctactcgggctcccccgccaacttcgccgcctacaccgcgctgctcaacccgcacgaccggatcatggggctcgaccttccctccggcggacacctcactcacgggtactacacggccggcggtaagaagatctccgccacctcgatctactttgagagcctgccgtacaaggtgagcgccgcaacggggtacatcgactacgagaagctcgaggagaaggcacttgacttccgccccaagctcatcatctgcggtggcagtgcgtacccgagggactgggattacgccaagctcagggccgtcgccgacaaggtcggggccctgctgctctgcgacatggcgcacatcagcgggctcgtcgccgcgcaggaagctgcaaatccttttgaatattgtgatgtggttaccacaaccacgcacaagtccctcagagggccaagggctggcatgatcttctacaggaaaggccctaagccccccaagaagggccagcctgagggtgctgtttatgattacgaagacaagatcaactttgcagtgttcccatctctccaaggtggccctcacaaccaccagattgctgcacttgctgttgctctacagcaaactatgtcgcctggcttcaaggcctatgcaaagcaagtgaaggccaatgctgttgcaattggaaactatctcatgagcaagggctacaagatggtgactgatggaactgagaaccaccttgttctctgggatctccgcccccttggcttgactggaaacaaggtcgaaaagctatgtgatctttgccacatcacattgaacaagaatgctgtcttcggtgacagcagtgcattgtctccgggtggtgtccgcattggcgcgccagcaatgacctcgaggggtctactggagaaggatttcgagcagattggggagttcctccaccaggcagtgaccatctgcctgaacatccagaaggagtacggcaagctcctcaaggacttcaacaagggcctggtgaacaacaaggacatcgagaacctcaaggtccaggtggagaagtttgccgactccttcgacatgcctgggttcacgcttgagagcatgaaatacaaggagtagatatgcctctttcatgcgcggcaaggtcctcctgtaccgatgtctttccttgtggtggcgcagggtgccatggcactgcattgccgccacacttacgatgatgatgatgggttatggattttgtctacaatgtcagcaggataggctcacaattgccccctgccctccggtttggtcgcctctcaggttttcatttggtagttgttcgcagggaaccatatgagaattgcaatgtcaatcaggtgtttgccaataataattgggtggtttctgctctagacaaaaggtgcctaccgtcaagggtggccgctctactg

SEQ ID NO: 262014 - DNA, 393 bp, Zea mays
catgtaggtgcccgtgaacaggtccttcttctccaccttgtccatgtcgaagaggacggggaagctcttggcgtccaggaccgccaccacccgcgggtcgcgcgccatgaaggggcccggcgggacgttcatgcgcaccacggtggagccgtagcgctccacgcgggactcgaagtacttgtcctggccctggaagtagtagaagtcgaggcggtcgcggacggcgcccaccagcggaaggccgtagctgcccggcacatccctgcagggggcgctactgaaaccacgaacggaggtcgccatagatgctaagcactagctgcttggatgattgccccaaactcgtctcggcttcaccaaggtttcagggttttcgaaggactggaggagacg

SEQ ID NO: 262015 - DNA, 417 bp, Zea mays
acgcgccctcctcccgtccaccaccgctatatatcccggcgccccttcctccctcccccgtccttccctccgcctccgcccccgcccactcctcgctgccaccactcctgtcacctcttcccgcgccgacgcagccgccatggaccccgtcgccacatgggggctaaccccgctcgcgggcgccgacccggagatctacgacctcctggagcgcgagaagcggcgccagcgtcgcggcatcgagctcatcgcctccgagaacttcacctccttcgccgtcatggaggcgctcggctccgcgctcactaacaagtactccgagggcatgcccggcgcccgctactacggcggcaacgacgtcatcgacgagatcgagaacctctgccggtcacgcgcgctcgctgccttccaccttga

SEQ ID NO: 262016 - DNA, 694 bp, Zea mays
ggaggccgagcgtgaccagcgggtggagctgccagatgagccacttggccgccttgctcggcccgcccttgccgagctcggtcgccgaggggcgcacgccgaagtaggcctcgccgatgaagtcgaaggaggctggaaacaaggtcgaaaagctatgtgatctttgccacatcacattgaacaagaatgctgtcttcggtcacagcagcgcattgtctccgggtggtgtccgcattggttagtatcatttatttgttcatttcttctgtgcaagcttcaattaagtattagtccaacattgctatccacatgtcagttcgatattttttcatggtctttgagctaccttctccgcccacgggcccggtgtctagatattttcttggtgtctggccctggtatggccattgttggcaaaccaaaatttagattagagctctcatttggtcacatagttcatcttgatgatcaataagccaaaaccttggccacaaaagtgatgcccctgattatggtaatgttttgggggggggggggggcatgccctactcagactaatcccacaaatgatgcctggaatcggtcagcttacagtcattctgggagtgatcgatgaaattaggaattgccactatgctttatacattgcttaccattgagccaaatgcatctagagtgatgcttgagcctttat

SEQ ID NO: 262017 - DNA, 311 bp, Zea mays
tggtgggttatggattttgtctacaatgtcagcaggataggctcacaattgccccctgccctccggtttggtcgcctctcaggttttcatttggtagttgttcgcagggaaccatatgagaattgcaatgtcaatcaggtgtttgccaataataattgggtggtttctgctcttgctctggtcattaccatgcattttttattctgttggtgagttggtcgatttattatctcctgcagtcctgctggcactgccggtggtcgtttgatcatcatgtatgaatcttcctccccccctgttgctcgattaac

SEQ ID NO: 262018 - DNA, 597 bp, Zea mays
atctacaatgaactagttgcttcctcccctttgggcgcttttcaaagtgacatcactgcaggtgccagaattaaaaatttgcaagagaggaaccagtcaagttacatcggtagccttgcacgccgggtgcgagacctagaatcaccaagccaaacctctcttcttaaagagatttacagaagtgacccggagcgtgtcatacaaatatttgaaagccatccttcattacattctaatcccgcagcactttcggagtatgtaaaagctcttgtaagggttgataggctggatgaaagtgccttgcttaaaacactgcagagaggtgttgcttcctcgacaaggggcgaagaaagctttcgtagcattccagcattaattggtgctggtcaagtaacaaaagatggagctcttggcactgcaaatgcacctattcacatggtcacagcagaaacaggtcaatttaaggatcagtcttggcgtacctttcgaagcattgcactaactttccttcttatttcgggtattggtgctctcatcgaggatagaggaatcagcaaaggccttggtctgaatgaggaggttcaaccaagcattgag

SEQ ID NO: 262019 - DNA, 1623 bp, Zea mays
ggaagacgaagaggactacatgggcgtcaagccgctcattgagaagctcgagcgacgcaagaccaaggatatggccgccggcgaaggcttctgggagcccaccgactccgacagcgacgaggacgacgagcgctacacgcccgatgccatcaagcagcgcgtcgacgagttcgagcgcaagtgcaagcgccatgaggagttcctgcaatcattcgcagaggccgacaccctagacgaggctcacaaatggatgaccaaaatcaacaactttgaggagcgccatctcaagctgccactggagtacagggtcatcggcgacatgatgaaccgtctcaaggatgccacggggaaagagcgcttcgttctccttcagaagctcaaccgagccgtcaggatcatggaaatcaaggaagcctacgaccccagtaaccctgcaaactttgggatcatccagcaccagcaggttggttctcctgaggatgtcgtgctcaatgccggctttgataaggagaagcagatgatccaaggggcagaacttgaggatgtcgacgaggaattcaatgatgtgaaggagagggatgatattctcatagataaactcgatgctattgaaaagaagattgaggggaagctagaactgttggatcataccttcggtaagaaaggcagagctttggaggaggaaatcaaggatttggtggaggaacgcaattccctgtccgagaagagcaggagacctatgtacagaaaaggttttgatgtgaaagttatcgatgttaacaggacatgcaaagtcacaaagggaggccaaatagcaaaattcacagcgctattggccactggaaattacaatggtgttgttggcttcgctaaggctaaaggcccaacagccaagattgcaatacagagagcgtatgagaaatgcttccagaatctccactacatggagcgatacgaggatcacacaatcgctcatgctatccaggccaaatatgagaaaacaaagatatatctctggcctgggccaatgaggagtggaatgtctgctgctggtaggactgttgagactgtgctgtacttggctggtttcagcaatgtcaagacaaagattatcggatcaaggaacccacttaatgtgattaaagctctcttcatagctttgaatgctattgaaaccccgaaggatgtccaacagaagtttgggcgtactgtcgtcgagtcatatttattgtgatcatcatgattgtttggaggacacagaggcgagcggagcctgtataggttttgccatgagaagaccaaagaggcaaatgccaggtccaaccaacgtgagccctctttgttttggacttttggtggtgatgttgaccagaccattgatgttgaagtggcaagaatgtcagtgtcaacagtaatcggataaatagatggtatttccctgaccctttgtttgtagaacttgaatgaacctggggacagaaacacatttgagggttcttgtataaatcaaggtcaagatcagaattgcctcgtcgtgcctttgttttgttaccatagcttcttctccctacatactgttgtttggatgataaatttaattgaatattaatttctcctgaactg

SEQ ID NO: 262020 - DNA, 1203 bp, Zea mays
cggacgcgtgggcggacgcgtgggcaggtagtccgagccagcgcagagaccaactattcgtttgcttttcgtcttcgtcctctctttgcccagttgtcggtcgcccgcgccgtcgtctccgctccgccggccggcctgcgaaaccctagcgaggcgagcgagagagaaactagcggccatgttcggctacaggaaggctgacccggacctcgaggccggcgggtcctcgctgctgtacccggggatgacggagagccccgagctgcggtgggcgttcgtccgcaagatctacgtcatcctagccgtccagctcgccatgacggccgcggtctccgccttcgtcgtcaaggtgcccgccgtctccaacttcttcgtctcctccaacgccggggtcgcactctacatcttcctcatcatcctgcctttcctcgtgctgtgccctctgcgctactaccaccagaagcatccggtcaatctgctgctgctcggcctcttcaccgtcgccatcagctttgccgtcggcatgacatgcgctttcactagcggaaaaatcattttggaggctgccattcttacagcggtggtggtgaacagcttaactgcttacactttctgggctgcgaagaggggccatgacttcaacttcctcggccccttcctatttgctgctatcatggtgctcatggtgttttcactaatccagatctttttcccgctgggtaagatatctgtgatgatatacggtgggttggcatcgcttatcttctgtggatacatcatctatgacacggacaatgtcatcaagcgctacacctacgatgaatacatatgggctgctgtttcactctacctcgacgtcatcaacctgttcctgtctctgctgcagctgctgagggcagccgatagctgagctcgtcaagctttcacttggatcttgttctcacatacatttgtgtatatcacaaactctgtaatggtcatggatactccaatttataactatactctgtcggtgttaccttggttcaaatggtatgtctggctttaacggatacccaagagagttttaagagcgcggacgcgcggtcaatagctcagctgcttaacaaccgagcttggataaaaatcataagcggtgcagtaacagtacatctgtacatgtcttggtcaattatttgcaataagtctttatgattttgcacc

SEQ ID NO: 262021 - DNA, 501 bp, Zea mays
gcagcccagaaagtgtacgcattaagctgatcaccaccactgctgtaagaatggccatgacttcaacttcctcggccccttcctatttgctgctatcatggtgctcatggtgttttcactaatccagatctttttcccactgggcaagatctctgtgatgatatatggtggattggcatctcttatcttctgtggctatatcatctatgacacagacaatatcatcaagcgccacacatacgatcaatacatatgggcagctgtttcactctacctcgacgtcatcaacttgttcctgtctctgctgcagctgctgagggcagccgatagctgagctcattaatggagtgtttggtttgaggaatgatatagtccatcatcttctcactcccacttttttgtttggtttgtggaatgaagtgagttaatccatcaccacctcattctctatagttagttgtttagtactaatatgtggaatagagtcatcccactaaattt

SEQ ID NO: 262022 - DNA, 1013 bp, Zea mays
cggacggtgggcggacgcgtgggcggacgcgtcggcggacgcgtctcctaccccacacagaagcggcggcggcggagcaaacgcaggcgaaggcgagggtgtgagggaaggagcaccagccatggtgcacgtcaacttctaccgcaactatggtaagacgttcaagaaaccaaggcgtccttatgagaaggagcgtcttgatgctgaactgaagctggtcggtgagtatgggctgaggtgcaagcgtgagctttggagggtccagtatgcactgagcaggatccgtaatgctgcaaggcacttgctcacccttgacgagaagaacccccgtcgtatctttgagggtgaggcgcttcttcgccgcatgaaccgctatgggctgcttgctgagggtcagaacaagcttgattatgttcttgccctcaccgctgagaacttcctcgcaaggcggcttcaaacacttgtcttcaaggctggcatggccaagtccattcaccatgctcgtgtcttgatcaagcagcgtcacatcagggttggcaggcaaattgtcaacgtcccatcattcatggtgagggtggagtctgagaagcacattgacttttcactgtcaagcccattcggtggaggccccgcaggaagggtgaagagaaagaatcagaagaaggcaagcggtggcggcgatgctggcgatgaggatgaggagtgaggatggacaagtagcgttacccaatataataatattatctagttttcttgaacttgttcgaatgatgagtgcttagctgtgtgatctgacgcagagttccctgtgctgactctgtgtcatggatggtccattttatcttgtggtattatcagcctttacataactgctatgtttggatatgttcaattctgttgcaattttatgtggttgtttttttgaaaataaatgaaaaaaaaaaaaaaaaaaaagccgccccgggtattccggaacggggcccgccggcggcagctttccctatagatgagtc

SEQ ID NO: 262023 - DNA, 536 bp, Zea mays
ggcgtagtagggcgccgccgccagcgggctgcactgcggctgcctcaggtactccgcgtaggggtacagcccgccggcgcccatcattcatggtgagggtggagtctgagaagcacattgacttttcactgtcaagcccattcggtggaggccccgcaggaagggtgaagagaaagaatcagaagaaggcaagcggtggcggcgatgctggcgatgaggatgaggagtgaggatggacaagtagcgttacccaatataataatattatctagttttcttgaacttgttcgaatgatgagtgcttagctgtgtgatctgacgcagagttccctgtgctgactctgtgtcatggatggtccattttatcttgtggtattatcagcctttacataactgcgctgctgggttgtgttcaattctgttgcaattttatgtggttgttttttgcgttttgttgctattaagctgttctttcaatcggctaatggtttgcttaaatgttatttaaaaaaaaaaaaaaaaagggcggccgctct

SEQ ID NO: 262024 - DNA, 543 bp, Zea mays
ctggatttgaaaacactagaatgaagctcctgagacatgtttcttttgttgattatgttcttgccctcaccgctgagaacttactcgcaaggcggcttcaaacacttgtcttcaaggctggcatggccaagtccattcaccatgctcgtgtcttgatcaagcagcgtcacatcagggttggcaggcaaattgtcaacgtcccatcattcatggtgagggtggagtctgagaagcacattgacttttcactgtcaagcccattcggtggaggccccgcaggaagggtgaagagaaagaatcagatgaaggcacgcggtggcggggatgctgctgatgaggatgaggagtgaggatggacaagtagtgttacaccaatataataatattatctagttttcttgaacttgttcgaatgatgagtgcttagctgtgtgatctgacgcagagtcccctgtgctgactctgtgtcatggatggtccattttatcttgtgatattataagcctttccataaaaaaaaaaaaaaaaaaaaagggcggccgc

SEQ ID NO: 262025 - DNA, 472 bp, Zea mays
tgctgagggtcagaacaagcttgattatgttcttgccctcaccgctgagaacttcctcgcaaggcggcttcaaacacttgtcttcaaggctggcatggccaagtccattcaccatgctcgtgtcttgacaatttgcctgccaaccctgatgtgacgctgcttgatcaaggtacattggttatcaaggaatggtatgtacattgcggtcattggaagcctcaagggactgcaagagaggaagcgtgctactgctttctcaatcaggcctataaccgatttcaatgaggttacgctgcatttcattcagtgtgttcggatgcatatagagaacactgaattaaaggctggcagtcctgcacgaatcaattcttctatgggagtgtcattctcaaatggattcagtgaatcaagcacaccgacatctttgaaatccagtcccgcaccggtgaccagcgggtcatccgatactgat

SEQ ID NO: 262026 - DNA, 494 bp, Zea mays
  unsure (1)..(494): unsure at all n locations
ccattcggtggaggccccgcaggtaggttgaagagaaagaatcaggagaaggcatgctgtggcagtaaggctggatgatgagttgaggagtgaggatgtgtcatgttggtgtgtgcaccgagtataatggaattgtctagtgtttttggactagttcgaatgatgagtgcttagctgtgtgatccgacgcagagtcccctgtgctgactctgggtcatggatggtccattttatcttgtggtattatcagcctttacataactgctatgtttggatnaaaaatatgaaaattttttaatttaaattttaattaaataaattataataaatgatatttttttattatttgtttagttctggtccttttcgtttatatttaaattatcgggggcaaatgcttttttctttatagttgttttttttctgtaatttagtttttttttttttgttaatttagtgtggtttctctcttttatatatcttttatttttgta

SEQ ID NO: 262027 - DNA, 841 bp, Zea mays
cctgaattcccgggtcgacccactcgtccgggaatcttgacgggtctgtctacagtgtgcttattcatgggcattgtagggcaggaaagagtgggaatgctctcagcgtccataggcaaatgctgcagcgtggttttgctccaaattcaacaagcacgatttccttgattaggggtctatttgaaaatgggatggttgtggaagcagatcaggtgattcagcagttgttgaactgttgttcccttgctgatgcagaagcatcaaaggctcttattgacctcaacttatatgaaggtaatgtggacgcagtcttagacgttctgcatggcatggcaaaggatggactgcttccaagtccaagatgagggtgattttcaacattcaagaaccaccctctctgtggaatactggagacctgatggtcatgtttggtacatattgtctcatgagtcataacacgagcatccgaatcagtgttatgtggtaagaacggtctgccctaaatcatgatgtgctccatatggaaaaggctgaaagaagttgcctcatgctgcattattgtgtaaagtgagcaaccatttctatctcattaaccgctctgctcttaacaagtgaaattaattttggttcttgataaatacttgattttgaagggcaggctggtttagtgatgagagttgtttcactaagtcaccggatcgtaagttcgaagcaacatctctgcatttgcagaggaaggctggtattgatttattctttttctaggtcccacacacgtgggagtctctggcactaggtcttgccccttttataaatacttgattttgtattaacagctttt

SEQ ID NO: 262028 - DNA, 527 bp, Zea mays
  unsure (1)..(527): unsure at all n locations
accgctccggaattcccgggtcggccgacgcgtccgcaagcagtagctaatgaacggggctctctcgcctggatatagtagattcattacacattgntgggtatgatccatatgaagcctgagtgatcaggatcttgttatttcatttgtgttcgggagaggggttggtccacagccatacggaaacgaaaggttgatgtacagggagcagagaggactaaagtcggtagaagtgagcttgatctaggacagtgctctccaattcgttccattgaacacaagtagcagtacaaatagaactcatcctaagatccttggaggcttcacttgtatatactcagctgggtggataggtggtgggtgtatggtgtgattttggcatccaattggaatggcaaaggtaatagtgttattgtactaggaattctttcccttttttttctttctcggggcctataattctcatgttgcaaattatttttgagttgccacagagatttgccaggagggctcgaagtcatgttggt

SEQ ID NO: 262029 - DNA, 844 bp, Zea mays
gcacgtaccggtccgaattcccggtcggccgccccctccgagcctcagttcgcatccacgcgcgccgccgccgcctcgccggtcgacgctcaccgcgcagccatggcggaacagactgagaaggctttcctcaagcagccaaaggttttcctcagctcaaagaaatctggcaagggtaagaagcctggcaagggcggcaaccgattctggaagagcattggccttggcttcaagactcccagggaagcaatcgaagggacctacattgacaagaaatgcccattcactggaactgtttctatcagaggcagaattattgctgggacatgccacagtgctaagatgaacagaactatcattgttcgcaggaactacctccactttgtaaagaaataccagaggtatgagaagaggcactccaacattcctgctcacatctctccatgcttccgtgtgaaggaaggtgaccatgtcatcattggccagtgcaggcccctgtcaaaaactgtgaggttcaatgtcgttaaagtcattccagctggatccgcagctgctggaaagaaggccttcacagcagcctgagtttatagactatgttccatgagtagtctatagaatgatgtctttttaattcaaaagaaatctctcttctaggctggtgcttttcgactataatttggagattgttccatgtccgtgcaatcatctgaacatgttactacttattgtaccttgtcgtgcaaagttttgctaagatctctattgtttcatgtcttctgaaaaaaaaaaaaaaaaaaaaaaaaaaaagggcggccgctcgggaattcggacggtcctgctggcg

SEQ ID NO: 262030 - DNA, 728 bp, Zea mays
ccggaattcccgggtcgacgccacgcgtccgcccacgcgtccgcccacgcgtccgctcagctcaaagaaatccggcaagggtaagaagccgggcggggtcggcaaccgattctggaagagcattggccttggcttcaagactcccagggaagcaattgaagggacctacattgacaagaaatgcccattcactggaactgtttctatcagaggcagaattattgctgggacatgccacagtgctaagatgaacagaactatcattgttcgcatgaactacctgcactttgtaaagaaataccagaggtatgagaagaggcactccaacattcctgctcacatctccccatgcttccgtgtgaaggaaggtgaccatgtcatcattggccagtgcaggcccctgtcaaaaactgtgaggttcaatgtcgttaaagtcattccagctggatccgcagctgctggaaagaaggccttcacagcagcctgagtttatagactatgttccatgagtagtctatagaatgtctttttaattcaaaagaaatctctcttctaggctggtgcttttcgactataatttggagattgttccatgtccgtgcaatcatctgaacatgttactacttattgtaccttgtcgtgcaaagttttgctaagatctctattgtttcaaaaaaaaaaaagcttgagagcaaaaaaaaaaaaaaaatacaaaaatggaaccaaaa

SEQ ID NO: 262031 - DNA, 667 bp, Zea mays
  unsure (1)..(667): unsure at all n locations
accggnccggaattcccgggtggagccacgcgtccgactacctccactttgtaaagaaataccataggtatgagaagaggcactccaacattcctgctcacatctcccgatgcttccgtgtgaaggaaggtgaccatgtcatcattggccagtgcaggcccctgtcaaaaactgtgaggttcaatgtcgttaaagtcattccagctggatccgcagctgctggaaagaaggccttcacagcagcctgagtttatagactatgttccatgagtagtctatagaatgatgtctttttaattcaaaagaaatctctcttctaggctggtgcttttcgactataatttggagattgttccagtgtccgtgcaatcatctgaacatgtgactacttattgtaccttgtcgtgcaaagttttgctaagatctctattgtttcatgtcttctgataaaaaaaaaaaaaaaaaaaaaaaaaaaaaaaaaaaaaaaaaaaaaaaaaaaaaaaaaaaaaaaaaaaaaaaaaaaaaaaaaaaaaaaaaaaaaaaaaaaaaaaaaaaaaaaaaaaaaaaaaaaaaaaaggggcgccctttttaagggtcccaagtttacttccccgtccttgcaacttcaaaccttttttatggggcccccaaaattaaattcccgggc

SEQ ID NO: 262032 - DNA, 504 bp, Zea mays
gctttgtcagatttgagggcacgtagtgtcagatttgagggcacgtagcaggataattcaggggctcttatgcacagtttgagccaacccatctcgccctgctatataataagattggtccctagggttttcgccgccgcaccccacgacttccgtccgagtctgagctcatctccgcgcgcgcgccgccgccgccgctcgacgcccaccgcgcagccatggcggaacagactgagaaggctttcctcaagcagcctaaggtgttcctcagctcaaagaaatctggcaagggtaagaagccaggcaagggtggcaatcgattttggaagagcattggccttggtttcaagactcccagggaagcaattgaagggacctacattgacaagaaatgtccattcactggaaccgtttctatcagaggcagaattattgctggaacatgccacagtgcttagatgaacagaaccatcattgttcgcatgaactatctccactttgtta

SEQ ID NO: 262033 - DNA, 459 bp, Zea mays
taaaagtttagatacagacgggattcgcataatttcaagaactatataatcaagtcctcctttcatccatgttgtcaaggatggtttctcaaccactgcataatcatctttgacaacatggatgataggaggacttgattatatagttcttaaaagtttagatacagacgggattcgcataatttcaagcgttcttggtcaaagtatcgcccttgatcactatattcggcaggtcgatgatatggttgaggaattcactgaaattaatcgtgtcatggagaaaaccggtaactttaccatgcaaagaaaaaaactctttcaacttgtgggtaaggccaattctaatcttgcggatgttatcatcagacttggtctttttgacaggtcagaaattgcttggaaaaatgcaaattatgcacaaattctagaatatcttcgggaggaatatgaactgaatca

SEQ ID NO: 262034 - DNA, 1396 bp, Zea mays
ccctttcgtccgcccacgcgtccgcccacgcgtgggcccactcgtccgcagagcttgaggaagatgatgaagctgctggtgccgactgggcgggacgaggacttggatatcgctgatgcaagcgaggtggtggcaaatggtggtgatggtgttgatgtagaagagggtgagccaaatgaggaggatggtgaggagggtggctgggacctggaagatctggaacttccgcctgaaactgagactccaaaagctgttggcaatgctcgatctgctttattcgttgctcctacaccaggtattcctgtcagccaaatttggactcagagatcttctctggctggggagcaagcggctgcagggaactttgacacagcaatgaggttgcttagccgccagttgggtatcaagaactttgttccactgaagcccttgtttcttgatctgcacatgggcagtcatacatatttgcgtgcgcttgctgctgctcctgttatatcagttgcagtagagaaaggttggaatgagtccgcaagtcctaatgtgaggggccctcctgcacttgttttcagcttctcacaaatggaagacagactcaaggctgcctacaaagccacaactgagggcaagttcccagaagcactgaggcagttccttagcatcttacataccattccagttatcgtggtggactcacggagagaagttgatgaggtgaaggagttaatcgagatagtgagggagtatgtccttggtctgaggatggaactcaagagaaaggaattgagggatgatgtgacccgtcaacaggagttggctgcttacttcacaaactgcaagcttcagagaattcatatgaggcttgtgctcgctagcgccatggctctttgcttcaagcagaaaaactatgcaactgcagcacactttgcaaggatgcttcttgagaatagccctcaggaggcccaagcaaagaaggctcgacaggtgctgcaagcttgccaggacaaggacgattctcaccaactgaactatgacttcagaaatccattcgttgtttgtggtgctacgtatgttcctatctatcgtggccaaaaggatgtttcgtgcccatactgtggatcccgatttgttccttccatcgaaggacagctttgtaccatatgcgagcttgctgcggttggggcagatgcatcaggcctcctctgctctcctacacagtcgagataagcgatggtagttagaggtcccctatattctttctagcgtctcaagttccaagatttcatcatatatatgttaccagagagtttactgattgtaaggacccggtattatacaaaaaaaaaaaaaaaaaaaaaaaaaaaaaaaaaaaagggcgcagctcgcgatctagaactag

SEQ ID NO: 262035 - DNA, 378 bp, Zea mays
atcccgatttgttccttccatcgaagggcagctttgtaccatatgtgagcttggtgcggttggggcagatgcttcaggtctcctctgctctcctacacaatcgagataagccatggtagttagagcccccctatattctttctagtgtcttaagttccaagacttaatcatatattttaccagggagtttagtgattgtaaggaataagtattatacatgtttttatcaagttttttttttcttttttcgtgttctgttaccataatttttgtttgcctagagggtgctgtcatcacctgccgtatggtttagacttctgatcaactttggaagctatgctggaaattgatgtatgagatgtctctttccctctttaa

SEQ ID NO: 262036 - DNA, 586 bp, Zea mays
atttattgtttgcggtgctacatatgttccaatctaccgtggccaaaaggatatttcttgcccatactgtggatcccggtttgctccttccatcggagggcagctttgtaccatatgtgagcttgccatagttggggcagacgcctcaggcctggtctgctcccctacgcagatgaagtagacgatgttatcttacctcctgctgtccgcatcttcagcagcaccatctcgcaatgatgtctggatgtctcgatctggaagggatgaaacaattcactgaacaccaaacttatcaacgccctgcatggcattccaaattttcgtcccgaggggattcatcttggtcttgtctcaattatcgcagctgcgttttcagctctgttttgtaaacatattgatgtacgaaagctgatgtgagtgctggttcactgaaaccgattttctgttatggcatgccattttaatctctacagtttcagtatattgcacagtagattgtaaacacttaaaatttgattgtaccgaggattgagaccagtgttttaacactggaaaattatgattgatacacaaccttttgtcactg

SEQ ID NO: 262037 - DNA, 500 bp, Zea mays
cggctcgagcagttccacaatgcattgtatcttggggatgccagagatgcgggctgagatcctggagaatgctggacagctacctcttgcttatgttactgctgtcactcatgggctcacagaaattgctgagaggattgcttctgaattaggcgagaatgttccttctctgcctgaaggaaaatcccactcactactgatcccccctgcacctctcacagcctgtggtgattggccattgctgagggtagtgcgtggtatttttgaaggtggactggattctactggaagggcagagcttgaggaagatgatgaagcttctggtgctgactggggtgatgaggacttggatattgttgatgcaagtgaggtggtggcaaatggtggcgattattttgatgcagagggtgaaccaaacgaggaggagggtgaggaaggtggctgggacctggaagatctggaacttccacctgaaactgagactccaaaagctgttggca

SEQ ID NO: 262038 - DNA, 1636 bp, Zea mays
ggagcccgagagcgtgcggttcatggcgcgcgagatcctcatcctgcgccgcctcgaccaccccaatgtcgtcaagctcgacgggctcgtcacctcccgcatgtcctgcagcctctacctcgtcttcgactacatggtccacgacctcgccggcctagccgccagccccgacatcaagttcacgctgccccaggtcaagtgctatgtgcaccagctgttgtcaggacttgagcattgtcacaaccggggagtgctacatcgcgacatcaaggggtctaacctgcttttggacaacaacggtgtgctgaagattgctgatttcggtctggcgtccttcttcgaccccaaccataaacagccaatgacgagtcgggtggtgacactctggtaccgcccaccagagctgctgctgggtgcgacagattatggagttggcgtcgacttgtggagcgcaggatgtatactagctgaattgctggctggaaagcccattatgcctggacggactgaggtggaacagctgcataaaatttttaagctatgtggctctccgacagaagaatattggaaaaaatcaaagttgcctcatgcaactatatttaagccccaacagccatacaaaaggcgaatagcggatacattcaaagatttccctcaatcagcacttcgactgatcgagacactacttgcaattgatccagctgactcggttaacggcaacttctgcattgaacagtgatttctttgcaacagagccttatgcgtgtgaaccatcaagtctgccccaatacccaccaagtaaagagatggatgctaaacgaagagacgaagaagctagacgcttaagggctgctggtggtagaggtaacggagatggaacaaggaagacaaggacacgggatcggcctagggctgttccagcgccagaggcaaacgccgaactgcaagcaaacattgataaaagaaggttgataactcatgcaaatgctaagagcaagagcgaaaagttccctccaccgcatcaggacggcgcgctcggctttcccttgggctgttcgaatcacatggaaccttcattcgagcccccggacccttcttccttcagcactgtatttcctttcgagaaaagcgcggtgccaacctggtccggaccgctggcggactccgcagctgggaaccagaagcggaaacacaagtctgcccgctcctcaaaacaaccagcaactgcccgtgctagatgatacacaccatgccgtgcttagcgcagatcaagtcttcaatacccccaaagaaatacattgtagtggttcctacaaactgggatgtctgattcggaatcaagagctacaacaaggaattgtttacttttttctcggatccaattcatgtatgaaattttttttgaacaacggtcaatgtataggctggagagggagctcgattagaccattatgtacaataggttctcttttccattcttgcaagccccatgtctgttagattaattcgaagtgaggaatggaactggtaggtcagcttagcaagtcatcactctgcatagattacttccaatcaattgaatatttttttccctgctattttgtccaggcaaaaaaaaaaaaaaaaaaaaaaggaa

SEQ ID NO: 262039 - DNA, 1145 bp, Zea mays
ctcgaactccacgatcgatcactgatcgtcatcgctgccggttgcgcggcttccttctctccccatttccggggcccagatcctgcggcgaattccttccaactccaggatcgagagcacacgcagatggcgaggcacccccgtgcgccgctgctccggcgtctgctcctcctgacggccctcgcggcctcctgctcctactacctcctcttcctgcaggcgcaggcctccgtcccgccgcggtacgacgggttcgcctacggcggcggcgccgcgacggcctggaaggacgccgtcctcgtcgaggcctttctcgacccgctctgccccgacagccgcgacgcctggcagccgctgaagctcgccgtcgagcgatacgcgccgcgggtctcactcatcgtccacccgttcccactaccataccacacatatgcattctatgcctgccgcgcactttacatagctaacaagttgaattcatcatcgacatatccattgctggagctgttcttcaagaaccaggaaaagttctacaattctgccacatcatctctctcgggcccttccgtagctctaggaatgtcgaagatggctgcgcagactgttggtaactcagtatccgagtttctgtcgggcttcagcgatgggaagacagactcggcagcgagagtttcattcaagtacgggtgcacgaggggagtctttggcgcgccgttcttctttgtgaatggcttcctccagcctgggggcggatcgcctatcgactacagcacgtggatcggcatcctggacccccttgtttcccagaacggtgaacggatcgagatgtttacttcgatgtaagtgattgaagtggccttgctacggaggatacggtcgtacagatgtttcgctagtgccgacggcggacaagcaaacagctattatgcaattgcaaactgtgtgtaagctctgcagtggtaaatagcatcccactttgctcgttgtactgttaagctagcagttgtgtgctagctagtagctacagctagtatatcgggtaagtatgtgaagaagctcttgcattggagcctgcgatatgttaaacttcgcataatcctatgttcacattcgctcttaaaaaaaaaaaagaaaaaaaagagaaa

SEQ ID NO: 262040 - DNA, 488 bp, Zea mays
ccacgcatccgcagacgcgtgtgtgtcttcccatcgctgaagcccgacatactcggcaccgagagtttcattcaagtacgggtgcacgaggggagtctttggcgcgccgttcttctttgtgaatggcttcctccagccatggggcggatcgcctatcgactacagcacgtggatcggcatcctgtgacccccttgtttcccagaacggtgaacggatcgagatgtttacttcgaggtaagtgattgaagtggccttgctacggaggatacggtcgtacgggtgtgccgcccggggcgacggcggacaagcagacagctattatgcaattgtaaactgtgtgtaagctctgcggtggtaaatagcatcccactttgctcgttgtactgttaagctagcagttgtgtgctagctgtatatcgggtaagtatgtgaagctcttatattcgcgcctgcgatatgttctgcatcatcgatgggagcaacgagt

SEQ ID NO: 262041 - DNA, 1109 bp, Zea mays
  unsure (1)..(1109): unsure at all n locations
ctaccgcaggccgcagcccagcaccgtccctctctacgcctccacctccctcgattcgttccgagcccatcgcctccgcctcttcgtcaccgtcgaggtcgcaccacatggcggcgctcctagcccggcaggcagcgcaggcgctccgcgcgagacagtcggcgcactcgggccgacaacgtcggcgatgcaggggcacctccgtacctacatgaacgcggggattcccaagcggttcaaagaggatgaggagaaagaacagcttgcaaaagatctcgcaaaagattggaatgctgtgtttgaaaggagcatcaatacattgtttttgactgaaatggtccgtggcttgatgctaactctcaagtacttctttgatagaaatgtcacaattaactatccgtttgagaagggtcctctgagcccccgcttccgtggtgagcacgctctcagacgttatgaatctggggaagagcgctgcattgcttgtaaactatgcgaagctatatgcccagcgcaggcaattacaattgaggctgaagaacgtgaagatggcagtcgccgaaccacaagatatgatattgacatgaccaaatgcatttactgtgggttctgtcaagaggcttgcccagtcgatgctattgttgaggggcctaactttgagtttgccactgagacacacgaggaactactgtacgacaaggagaaattgcttgagaatggtgatcgctgggagactgagattgctgagaacttgagatctgagagcctctatcgctgaatctgtcttccattatggttgataaactgggttcttccattttccatattttgctcaactagctgatgaataagcaaacgatgtatcataacttaggtacgatgtttttgtaccttggcaccatctgtgtgttttgttcattgccttgctaaaggtggcaccagatgttctttgatgggaaaattccttctgtagcactgagctgttttcagtcacaccttattttgtatacaatgaaacagaacgctgtgctcatggcacagtgatttggtggaaaaaacaagnaactatacaaatggaccaaannnggggcggccgccccgggaattcc

SEQ ID NO: 262042 - DNA, 558 bp, Zea mays
ttttcacgcgtccgcccacgcgtccgtccacgcgtccgcccacgcgtccgcccacgcgtccgggggcctaactttgagtttgccactgagacacacgaggaactactgtacgacaaggagaaattgcttgagaatggtgatcgctgggagactgagattgctgagaacttgagatctgagagcctctatcgctgaatctgtcttccattatggttgataaactgggttcttccattttccatattttgctcaactagctgatgaataagcaaacgatgtatcataacttaggtacgatgtttttgtaccttggcgccagtcgtgtgtgttttgttcattgccttgctaaaggtggcaccagatgttctttgatgggaaaattccttctgtagcactgagctgttttcagtcacaccttattttgtatacaatgaaacagaacgctgtgctcatggcacagtgatttggtgaatgttcacatgtttgtttccgactccgttttaaaaaaaaaaaaaaaaaaaaaaaatccaaatacaaaaaaaaaggggggggggaggg

SEQ ID NO: 262043 - DNA, 502 bp, Zea mays
gtcgatctatcacatggatcagtgggtgcggcttatgcactctctagaggtctattgactatgatgattgtcccttttgctctgtgcctcatgtgttacaccccactgtatacagtgttcaagcgtgaccgagaaaatgctagattggccagcatcaaggagcaggaacttacttgaaaagctttctaacaaggagtactgatgtagtttggattactatagtctacaacaccgccaacctggaggttttgattgaagtactttggttgatgtctaggatactcaggttttatgtttcttcagtcggatatcatttatgagtacacatcttgtacacaggcgatagattgtttgttctcgtcgtatgtaactggttcagtatacattcggacctcaacctggagagtggagagaggatgttgcagctttccattgaactttcagcatatagatacagttctttctcgttttgttactatttacggtctgtaatcttgttttg

SEQ ID NO: 262044 - DNA, 612 bp, Zea mays
ccggaatttccgggtcgacccacgcgtgcgatccaggtggagtgggccgagaagcggccgcctgatcgagccgaaccaacggccgacgcggcgcacgccatggtagcagctggcaatccaccgtgcaaatccgtgggaacgtgccggaaattcatctggcccagcgccttttaagccgccctctggtggtagcaccagtgatgttgttgaagcttctgggacagcaaaacatggagaagttgtttctgcttctggaaacaatgttgccttcaatgtaaacagcacaatttcaatgcctgtgcccccaaggccttggcagcagcaaggctatgaaaactcttatgggggttatggctccagtatgtatagctcttacggcggatatagtggaccctatggaaataacatgtactcaggttatggaggaggttatggcggtatgtatggaggttctggaatgtatggtggaccaatgtatagcggtggaatgggaggaccctatggtggttatggtatgggcatgagcccctataatcagggaccgaattcatttgggccacctaccccaccccctggtttctgggtgtccttcctacgagtgatgcatggtgt

SEQ ID NO: 262045 - DNA, 495 bp, Zea mays
gttgctgcaagcttttttgtccatgtcgaccctgatgcaacaggtgataactaagtgacaaatctgcttacagcatacctgtgaactgaatggagaggctacgacctaactgcagagttagccaatagcattgccctgcgtagataaggacctgcaagagtcctgaatttggaagcaacttgtgggcagaatctcggaccgagggtttaacttggggctcaagattacaaggagctgatgcagcttttttaggatagcaacagcatcgcccgttgaggaactgtaactttatgtgacggaatcacaaaaatttaccattgtatttgttcaagctacacgtgccacagttttttatgttgtgattggtaggtacggtgaagttagacctctagtgctattgggaagaaaaaaattaccattacatttatttaatatattttccttttttccttgtaaaaaaaaaaaataaaaaaaaaataaaaaaaatgataaacg

SEQ ID NO: 262046 - DNA, 769 bp, Zea mays
aaaaaaaaggggggcccccccctttttttttttcgttctccctttttttttttttttttttttttttttttttttttttttttttgcagcaccaagaagcaccattttttccttaagattaacttagaataaagcctgacgggggtaacagcatccatcgatccgcagtccatgctgtttgatgcatgggtctgctgaaaccgaggatgaacacagcactaacaactgacacagagcgaccttgcaatcaaaaacacagatgggcaacaacaaacacgacacgaacgaagataaaccctctggactagggtaaacatcacggtagcgaacaggataacttggccgcgcgggccccaccgctcagttcctccagttcccgtcggagttgccgtagccgccgccacggttgccaccgccgtagccgccgccaccaccaccgtagccgccgccgccaccgtagccgccgccaccgccgtagccgccgccgccatcacggcgcccgccaccgccgtagccgccgcctccacggccaccaccgtacccaccgccgccgcctccacggccgccgcgggactgggcctcgttgacggtgatgttgcggccgtccagctccttgccgttcatgccctcgatggcgttccgcatcgcctcctccgtggagaaggtgacgaagccgaagccgcgggacctctgcgtctcccgatcgaggatgatcttggactcgaggacctcgccgtaggtgctgaaggcgttgtgtaaaacggaaaca

SEQ ID NO: 262047 - DNA, 1124 bp, Zea mays
tcactattctctttttgtttattttttttttcttttctttctttgctttttttttttttttttttttttttaccaaaatgttctttcaagcaaaagtaactttcctagttacaggtcctccgagttaagagtctgacagagaaacaggaaataaataaccaaccaaaattactggtccacttttctaacagatgctcacttcgttgcagttcatggtgtggtgagtaaatgtaaaatttaaagctttcgctcagctcaaactaccaagagttcctccaggcaaaaaccaccagctacaacttcaactgcgccgaactataagtagatcaacgtctcttcttgcttccttttgagctgctcttcgacgggctcgcaacgaggtagataaacaatccaacaaatgagacaacagacacaagtgacccatatttcgccacaagcctcttagcccattcaaacttcttctcaggaagtctctcagcgagaatatccagtgggaagatgggagttgagtaggcctcctgaagagctgtctttgtgggaacacggtatgtaataatagctggtgaaccctggaacctgccctgtgttttggtctccaggacatatgtgtgtgaagcagtggcaccagggtcaagcctttccaatgtcttcgatttctctccagtgacaagctcaaacgcttgtgttggccaagagtcgtcattaagtgacacatcataggcagtcgcggatccctggttgtagaggtcgagggagacggcgacgcgctcgacgcccggcttggggcgggagagcgaaaccttcttgtgcgcgacgacaaagggcgcatcggcagcggaggcggcggaggcgaggccgaggagaaggagggagacgagcgcgaggcaccgcgccatggctgctctctcgcctccgacctgctagctagggttcgggctaccagtcgaggcgcgcaggtgcagttgggaatggatctcgtctcgctctcgctcccgcgctctgggaagaacaggcaccccatccgggggcgtgacgcggctcgtgaggctgcacgtgggacccacccgcagccgcctcgcctcgtcagcgcgcgtgcgagtgcgtggaggcgtggagcctgg

SEQ ID NO: 262048 - DNA, 692 bp, Zea mays
gaaaaactggcaacctttgccttattcgcactcaaagcgagagtaagtattttttttttttttttttttttttttgcagcaccaagaagcaccattttttccttaggattaacttagaacaaatcctgacaggagtaacagcatccatcgatccacagtccatgctggttgatgcatgggtctgctggagccgaggatgaacacagcactaacaactgacacagagcgaccttgcaatcaaaaacacagatgggcaacaacaaacgagacgaacgaagataaaccctctggactagggtaaacatcacggtagcgaacaggataacttggccgcgcgggccccaccgctcagttcctccagttcccgtcggagttgccgtagccgccgccacggttgccaccgccgtagccgccaccaccaccaccgtagccaccgccgccaccgtagccgccgccgccaccgccgtagccgccgccgccatcacggcgcccgccaccgccgtagccgccgcctccacggccaccaccgtagccgccgccgccgcctccacggccgccgcgggactgggcctcgttgacggtgatgttgcggccgtccagctccttgccgttcatgccctcgatggcgttccgcatcgcctcctccgtggagaaggtgacgaagccgaagccgcgggacctctgcgtatccc

SEQ ID NO: 262049 - DNA, 718 bp, Zea mays
gcatcagcagtagaagcagtctcggcggcgggcggtgcaggggtgtcttctttcttctcctcgtcatgggtctcttccttcttctcgacgacggcggcgggggcaggggcttcctctttcttctcgtcaacaggcgcttccttcgtggctgcctcctcagtggcgggcggggccggggcctccttggccggctcctcggcagcgacgacagggagcagcgtggagaccttctcgaacgtggcgaagatggggccggacagcagggccgggccggccttggagatgccgtcgctcacttgcttggctccagggaattcgatcttggccagctcctcgaagaacttggtgattgcggcggagttcttcttgatcccggacaccttgctcctctccttgatcaggaccttgagtggtgcaggggcagactcgtagatctcgacgaccttgggctggagatcagccttcttctcctggaactcgccatcgatcccctccttggactcgtcgaaggacttgacgagctcggcggcggcggcggccttcttgccggcgctcttgacgaagacgagcttgatcttgggcaacaccttggacttccaaatgtccatggctatgctatgggaaggcaaaggcaggacagctgcggctggcaggcaggtgcagcacgggctaccttgctaatgagtggacgtgatgctgtggctgtgcccagcgtccg

SEQ ID NO: 262050 - DNA, 526 bp, Zea mays
  unsure (1)..(526): unsure at all n locations
ttnaatttttttttttttatttttttttttttttgttttttttaaaggggaagggggaacacacatgggcaacaacaaacacgacacgaacgaagataaaccctttggactagggtaaacatcacggtagcgaacaggataacttggccgcgcgggccccaccgctcagttcctccagttcccgtcggagttgccgtagccgccgccacggttgccaccgccgtagccgccgccaccaccaccgtagccgccgccgccaccgtagccgccgccaccgccgatagccgccaccgccatcacggcgcccgccaccgccgtagccgccgcctccacggccaccaccgtacccaccgccgccgcctccacggccgccgcggggattggccttgttgacggtgatggtgcggccgttcaggttcttgccggttaaggccttgaagggggttcggaatggcttcttcgtccaaaacgttgaggaagcggaagcggcgggacttttgggtttccggatggccaagggtccccg

SEQ ID NO: 262051 - DNA, 494 bp, Zea mays
ttaaaaaaaataagaagaaaataaattttatttccagcaccaagtagcaccattttttttccttaggatttttaacttagaataaagcctgacgggggtagcagcacccatcgatccgcagtccatgctggttgatgcatgggtctgctggagccgaggatgaacacagcactaacaactgacacagagcgaccttcaatcaaaaacacagatgggcaacaacaaacacgacacgaacgaagataaaccctctggactagggtaaacatcacggtagcgaacaggataacttggccgcgcgggccccaccgctcagttcctccagttcccgtcggagttgccgtagccgccgccacggttgccaccgccgtagccgccgagtacgaggagggcgacgagcgcgaggcaccgcgccatgcctgctctctcgcctccggcttggtggctagggttcgggctacgagtcgaggcgcagctgaagtcggacgcgtggg

SEQ ID NO: 262052 - DNA, 467 bp, Zea mays
  unsure (1)..(467): unsure at all n locations
gccgccgcccttttttttttttttttttttttttttgcccgtaaggattaaacttagaataaggcctgacgggggtaacagcacccatcgttccgcagcccatgctggttgatgcttgggcctgctggagccggggatgaacacagcactaacaactgacacagagcgaccttgcaatcaaaaacacagatgggcaacaacaaacacgagacgaacgaagataaacactctggactagggtaaacaacacggtagcgaacaggataacttggccgcgcgggccccaccgctcagttcctccagttcccgtcggagttgccgtagccgccgccacggttgccaccgccgtagcccgccgccaccaccaccgtagccgccgccgccaccaccgtagccgccgccaccgctcgtagccgccgccaccaaaaaaaaaaaaaaaaaaaaaaaagagaaaagcncagcgtccg

SEQ ID NO: 262053 - DNA, 624 bp, Zea mays
atggcataagtttgttgtaatcagctgttgctattagctgtttgaaaaactggcaacctttgccttgattcgcactcaaagcgagagtaagtagcttttcagatgagcacaaccattttgcagcaccaagaagcaccattttttccttaagattaacttagaataaagcctgacgggggtaacagcatccatcgatccgcagtccatgctgtttgatgcatgggtctgctgaaaccgaggatgaacacagcactaacaactgacacagagcgaccttgcaatcaaaaacacagatgggcaacaacaaacacgacacgaacgaagataaaccctctggactagggtaaacatcacggtagcgaacaggataacttggccgcgcgggccccaccgttcagttcctccagttcccgtcggagttgcggtagcggccgccacggttgctacagcagtagagtcagccaccaccacagtagcggtcgtcgccactgtagccgctgcctcggctgtagccgccacggctatatcggtgtccccctccgccgtagattcagcttccacggcaagtatcagtacccatatgcttccgaaaacacggccccgaggcgtcggacgaggcgtcgg

SEQ ID NO: 262054 - DNA, 551 bp, Zea mays
gtgttttggtctgcaggacatatgtgtgcgaagcagtggcaccagggtcaagcctttccaatgtcttcgatttctctccagtgacaagctcaaacacttctgttggccgagagtcgtcattaatggacacatcataggcagtcgcggatccctggttgtagaggtcgagggagacgccgacgcgctcgacgcccggcttggggcgggagagcgaaatcttcttgtgcgcgacgacgaagggcgcgtcgccctcggagccgccggcgccgccgagcccgagtccgaggagggcgtacgagcgcgaggcaccgcgccatggctgctctctcgcctccggcttggtggctagggttcgccctccccgtcgaggcgcagctgaagttgggaatggatctcgtctcgctccctcgcccgccccctctgggaagaacaggcaccccatccgggggcgtgacgcggctcgtgaggctgcacgtgggacccacccgcagccgcctcgcctcgccagcgcgcgtgcgcccacgcgtccgcccacgcgtccgcccacgcgt

SEQ ID NO: 262055 - DNA, 470 bp, Zea mays
gaacaaatcctgacaggagtaacagcatccatcgatccacagtccatgctggttgatgcatgggtctgctggagccggggatgaacacagcactaacaactgacacagagcgaccttgcaatcaaaaacacagatgggcaccaacaaacgagacgaacgaagataaaccctctggactaggggaaacatcacggtagcgaacaggataacttggccgcgcgggccccaccgctcagttcctccagttcccgtcggagttgccgtagccgccgccacggttgccaccgccgtagccgccaccaccaccaccgtagccaccgccgccaccgtagccgccgccgccaccgccgtagccgccgccgccatcacggcggaaagcatcagaggcggcggcggcgttttcgatggccttttcttttttagtgttttgcacgaatcgtagtccaaaatctctactattgacgtgtttg

SEQ ID NO: 262056 - DNA, 344 bp, Zea mays
ccccggttcacggggccacttgtccgcgggcccccctttttttttttttgctcttttttgaaaaactggcaacctttgccttattcgcactcaaagcgagagtaagtagcttttcagatgagcacaaccattttgcagcaccaagaagcaccattttttccttaggattaacttagaacaaatcctgacaggagtaacagcatccatcgatccacagtccatgctggttgatgcatgggtctgctcggctagccgaggatgaacacagcactaacaactgacacagagcgaccttgcccacgcgtccgcccacgcgtccgcccacgcgtccgcccacgcgtccg

SEQ ID NO: 262057 - DNA, 546 bp, Zea mays
ttattatccgggttagtagcttattaagatttgcgaccacgttttttttttttttgcagcaccaagaagctccattttttccttaggattaacttagaacaaagcctgacaggagtaacagattccatcgatccacagtccatgctggctgatgcatgggtctgctggagccgaggctgaacacagcactaacaactggcacagagcgaccttgcaatcaaaaacacagatgggcaacaacaaacgagacgaacgaagataaaccctgtggactagggtaaacatcacgggagcgaacaggataacttggccgggcgggccccaccgctcagttcctccaagttcccggcggagttgccgtagccgccgccacggttgccaccgccgtagccggcgctcttgacgaagacgagcttgatcttgggcaacaccttggacttccaaatgtccatggctatgctatgggaaggcaaaggcaggacagctgcggctggcaggcaggtgcagcacgggctaccttgctaatgagtggacgtgatgctgtgg

SEQ ID NO: 262058 - DNA, 311 bp, Zea mays
cacctacagtttttacacttgttggtgtttctagctttttttttttttgtgtgtttggtgcttttcagatgagcacaactcattttgcagcaccaagaagcaccattttttccttaagattaacttagaataaagcctgacgggggtaacagcatccatcgatccgcagtccatgctgtttgatgcatgggtctgctgaaaccgaggatgaacacagctctaacaactgacacagagcgaccttgcagaatcaaaaacacagatgggcggccgctcgcgatttagaactggacggtccgtagcctagaccg

SEQ ID NO: 262059 - DNA, 1209 bp, Zea mays
tatttttggtaaaagctagtggtggtacgtgctgatctcaacggtcatttgaaggcattgaaagattattttcttttagcaaaaggtgactttttccagtgttttcttgaggaaagccgccaattaatgcggttaccacctcgtcaatctacagccgaagcagatctcatgattccatttcagctggctgcactgaagactatcggtgaggaagacaagtactttaccagagtctcattaaggatgctatcatatggtatgaaaagtagcacgtctcagaaagatctccaaaagcctaatgcttcagagcttccttcacaaggaaaagctgcatcagaattgacacttgatgggtgggatagtattgctctggaatattctattgactggcctctgcagctcttcttcactcctgatgttctgtccaagtatcgcaaggtttttcagtatctcatccgattgaagaggacacaaatggaacttgagaaatcctgggcagctgtaatgcataaagaccatgctgatttttctgattattgcaaggatcggaaaaataactctgcaacacaactgcgtcgacaacggtctaagcctttgtggcgagtaagggagcatatggcattcttgatcagaaacctacaattttacatccaggttgatgtaattgagtcacagtggaatgttttacaatctcacgtgcaagattcacatgattttacagagctagtgagctttcatcaagaatatttgtcagcgctggtttcccaatccttcttggacatcggatcagtctctaggatactggatagcataatgaagctttgcttgcagttctgctggagcatagagcaatatgaaactcggccaaatatttctgagattgatcacataactgaggagttcaacaagaagtccaattcgctgtacactatcttgaggagtagtcgcctcgcgggtagtcagagagcacctttcctgaggcaatttctgatgaggctaaattttaactctttctttgagaccaccgcaaggggagtgatgaattcaggaaggctgcgaccaatcactgcaggtgctcagctgtaacggtgatggtatgtttgggggtagtgctgcagcaagagacaagggaggagtttctggtagtttatgtaaattatgatcggatggtggttgtctgtcatggaaaaatcgattgcaggtgattcc

SEQ ID NO: 262060 - DNA, 443 bp, Zea mays
ggttttaaaacctagaatacatcatagttgtgagatgtagagttgtcgattacatgcaacacacaacagggcagcaggcatcgctttatttacaacaggacgcctaaatcagtcacaggcgtgcattcacatatgtgaacgaaaccgttttgtacatcaaggtgaggccacaccaaagttggcccaaggaatgacaaagcaaatagcagaccaatgtgatctgatgatgcctgtgaagcaggtctcgtctcaatccttgacatctgcaataccttcagaagctaactgaaaccttgcttcggcttcagcaaggcagggagagcttattactttacagatccgttcctcccctcgccccttgcgaagagcaagccttgtggttgacgcatgacccatgatgtttccaccaatgggaatgaactgcggtccagcaaacatagcag

SEQ ID NO: 262061 - DNA, 350 bp, Zea mays
ggggaaaaaatatacactttccccacaaaatagcagcaatctggggacaaatagaagtccttggaacattgaacttcactgatccaccaatctaataaagacgccacctatattacaggctctgggcgctgccatgggggtacactcgattggaactgacattggctaccgaatgaatatcatgcccctctagcctgtgtaagagcacctggggttcggttaaggggggaaaactaaacccgttgttgagatgcaaataaataaataattacagtgtagaatgccacggacaatcgtccttggaattgttatatttgcaaatcatcaagcgacagttccttcggtgataa

SEQ ID NO: 262062 - DNA, 275 bp, Zea mays
gcccgtgattgatttgggttacttgtttgcggggtcgcaggaacgcggcgagctcggacgaaatccagctgcggatcgacccggtgcacggggacctcgacgaggagatcgacgggctgcactccagggtccgcatgctcaaaggggtggcccaggagattttttctgaagccaacctccagaatgattttcttcatgaactgcaaatgacccttgcaaaagctcaggctggagtgaagaacaacatgcggagattgaacaagagcatcatccag

SEQ ID NO: 262063 - DNA, 1064 bp, Zea mays
tctacttctctcctctctcccaccgcatccgatctcgtacctcacttcatcgccccgccgccgcttcgacggcgcgccgaccggctaggacgcgcctccgacccggatagtgttccgctcggtcgaatccgacggccgctcgctgctgcagcgggcgcttgctgtgcgtcgcgtgggctcggctggaggcaggcggaacctttcctgggtctcggagatggcggcgcctccggcgagggcccgggccgactacgacttcctcatcaagctgctcctcatcggagatagcggtgttgggaaaagttgtctccttttacggttctcagatggctccttcactactagcttcatcaccaccattgggattgacttcaaaataagaacagttgagcttgatggtaagcgcataaagttacagatatgggatactgctggtcaagaacgttttcgaactattacaaccgcctactacaggggtgcaatgggaattttgcttgtctatgatgttactgatgagtcatctttcaataatataagaaactggataaggaacattgagcaacatgcttccgacaatgtgaataaaattttggtaggcaacaaagctgacatggatgaaagcaaacgcgctgtaccgacttcaaaagggcaggctcttgctgacgagtatggcatcaagttttttgaaacgagtgcgaagaccaacctgaatgtggagcaggtttttttctccatagcaagagatatcaagcaaaggctttctgaatctgattcaaagccagaggatcgcacgatcagtattaacagacctgatggcggtgaggcttcggcttcacaaaaatcagcttgctgcggatcgtgagggggttacattgtcacaaggaagataaatagtgtgataccatgcttgtaatttacccttctacctttttatctggcttaatcgtccacttctaacttttaattgcaattccttggattcagacttctgtgttgtaatgtgaacaattttagttgtacccccctgttagcaatgcaagtgctcgtaagtcaatgcaccttgt

SEQ ID NO: 262064 - DNA, 996 bp, Zea mays
  unsure (1)..(996): unsure at all n locations
cgggtcgacccacgcgttcggccacgcgttcgnccacgcgttcggcgtattttttctggtgaggactacctaatccactgggggcaggggaaaaaaggttattaaaaaggttattttgcattttgaagcctggtcaacttgctaggccaccaattgcctaaaaaacccacctaactacctttctgggcacttctgggtaactacaacccccaccaggggtacaaagaagttgttacccagcaggataagcacgaagaaatagctttcgttgaagagatcgctagaacagcgccaattaagtacttgcaccggtacttagtgcagaagggggctgtgcctcaggactacgaggacttcaagagaatgctgacatccctatggtttgatttgtatggaagaggtggcaactctagctgctcttctgcctttgagcatgtgtttgttggtgagatcaaaggacggggacaaggggagagtgaggtatcaggcttccataactggattcagttttacctggaagaagccaagggaaatgtggattaccaaggttatatatttccaaggcgccgtggtgaatcgcctgattcagagatacagctgctgactgttcagtttgagtggcatggcgtgctgaaatcggtatccagcacgttgattggcgtcagtcctgagtttgaggttgcactctacacgttgtgcttttttgttggaggggaagataaccgcgtcgatattggcccgtatagtgtgaacgtcaagtgctaccgattggggaacaacaaaattggatcagcctttcccattgcagagaactgattatctggtgctatgcttctgcaggtttccaaatattcactttcttcgtttcataatcaattacgtgaagttaacactgtactattttacttgtgcatgaaaaggtaccatactgttcaatttgttgctgccatctgcaatcgtattgctacttgcactgctaaaaagttgacgaccgag

SEQ ID NO: 262065 - DNA, 758 bp, Zea mays
  unsure (1)..(758): unsure at all n locations
ccgggtcgacccacgccgttccgtgattcttaagatggggcctcgaattgcttatttaaccaactnggcttctaacatgtccaggaggctttaagtttaacctgatgacatgtcataatttgggcgctaaactcatgtgcatgagatatattcttttgtgcacaatcgttttcttagcgggtgtctgattctgtatcacctttgtgtcgttgacttgttttatgtggctctgttattgcgggtgcagctctgttataagggctattaataaggtggtggttgttaaactatgtcctgcatatagtagagactgtgagctgatattatgttttcagctaatcattaaggatcggaaatcttcatacaaattccatctctactgaccattcacttgctgcagcttttgtgatccttaagacggaacagataattgcttatttaaccacgttggcttctaacgtgtccattaggctttaagtttaacctgatgacatgccatatatttgggactttttagttgcccctatggcttatatgctgtgcctgtgggatgaacacgtcccaacattcacctcatttttttcactttgtcagctaatagccatacatgtttagctgattgttaagattgggaaatgtacgcttttcatactgtgttgtatatgctctgtttgcctgcttgaacatatcttgttttgagagtaaatacgttgccccgatggtggcaatggtgcctgtgggatgagcaggtctcgatg

SEQ ID NO: 262066 - DNA, 640 bp, Zea mays
cccaccttctggtgtgtacttgtgtttggctagggtttgctcgcgtctcctccttcccttggctgctgtcgtgccggtcggcggcgacagcaagggagggaacatgtcgaagaagaacaatcttgccaagaggaagaagcagtacgagttcgacctccaacgggagaaggaggccaaggagaagcaggccaagaagctgcaagccaagaaatccaagatgaagatagatggtgctgaaaagaaacgtaaaggtggccaatttaaggtcggcaagaaaaaggtgaagacgaaactttcagccttagcaaaagccaaagccgcgcaagccatggaggtcgacaagtgactgcggagcacaagcatcatcaccttaagcgtcgagccagagttggaactctgaattctgtgcccacatgaatagctcccgtcgggtgcagctgcagctgcagcttgttgaacctttctttctaaaaagaatgtcattcttgcttttttaagggtaatcaagctctagttataggttttggtgataacgactatgatgttagagaactaatgagatttatggagctaaatgaaaaagagaaaaatacatgtgatttttgatgcttcaaaaaaacaaaaaaaaaaaaaaaaagaa

SEQ ID NO: 262067 - DNA, 417 bp, Zea mays
gtacccctcgccgcggcctccctcgccgccgccgccttcggctacctcttctgctagatccgcgctggatacgtggttcctgctccaaaatatgattcgtctggtctggcgtgcgtgagtccagctcgtgtcgtgtgtgtctctgtgtgaggtgtcggcgggcgtgtgtatgtatggagtcggccgcggcggcggaggaggtgtgcgcgtggtggtggtggtacgtgcttcgacgcgccactgtttgtcgcggcgatcatgtactaccctgctgcgttttctggttatcaatgagatgatttatttgattcttttcagcctgggcactaatataagcgcaaaggaaagcaccaaaaggagcggaggaaaaagagacagaatcagcaagaatgtggacgaggaggagcccaaggggta

SEQ ID NO: 262068 - DNA, 516 bp, Zea mays
atccacgatgttagagatcattctaaactaaatactacgttccgatctcctttcattggacccgcgcgggcgattgagaagaagattgtagcgaacgtgtcacccgacaactctgatgttcagtatcagtttatgcttgaacaacgtgttcttcggcggctttgtgttcagaagatagtggtgcctacaccgatgaaggacaggctagacaaggatacaaacttcacgatagcggaggatggatctcttcatgtccttccaaaaagcgtctaacggattcacatcaggggaaggaaatgacaatgtagggaaggaactcatttcatgcccgcgaaatgcatgagcaagcccatacacacgtctgagttcctctgtgctcatattctcatttaagggcacctcgctcgtttgtagtgtctgtttggaaatattaatctttccttcactcattagttctagtgttgattttcaccataatatcgcttcaatgtatgcgtgtggaaatttggatttctg

SEQ ID NO: 262069 - DNA, 3007 bp, Zea mays
cccacgcgtccgcggatgcgtctagggttttagtgcttctctcccggcggcgcctccacatctcgtctctcagatcgggaggcgaaaccaaggcatacatatacatatttgtagtggtaccatcataacaagtaaagatggtgaagttcacggctgaagagctccgtgccatcatggacaaaaagaacaacattcgtaatatgtctgttattgctcatgtggaccatggcaagtctacacttacagattcccttgtggcagctgctgggattattgcccaggaagttgctggtgatgttcgcatgactgatactcgtgcagatgaagccgagcgtggcatcacaatcaaatctactggtatctctctttattatgagatgactgatgagtcactgaagaactacaagggtgagagggatggtaaccaatacttgatcaaccttattgactcacccgggcacgtcgatttttcttcggaagtcacagctgctcttcgcatcaccgatggtgctctggttgtggttgattgtattgaaggtgtctgtgtgcaaactgaaactgtgcttcgccaagcccttggtgagaggattaggccagttcttaccgtgaacaagatggacaggtgcttccttgagcttcaggttgagggtgaggaagcttatcagactttctcccgtgtcattgagaatgccaatgtcatcatggcaacatatgaagataagctccttggtgatgtccaagtatacccagagaaggggacagttgccttttctgctggtctgcacggatgggccttcaccctcactaactttgcaaagatgtatgcatctaagtttggagttgatgaaactaagatgatggagaggctatggggtgagaacttctttgaccctgccacaaagaagtggaccaccaagaacacaggttctcctacctgcaagagaggatttgttcagttctgctatgagccaatcaagcaaatcatcaagacctgcatgaatgaccagaaggagaaattgtggcccatgctgcaaaagctcaatgttaccatgaaggctgatgagaaggagttgattggcaaagctttgatgaagcgtgttatgcaaacgtggcttccagctagcactgctctgcttgagatgatgatattccaccttccttccccagcaaaggctcaaaagtatcgtgtggagaacttgtacgagggaccccttgatgatgtgtatgcaactgctatcagaaactgtgatccagagggtcctcttatgctgtatgtttcaaagatgattcctgcatctgacaagggcaggttctttgccttcggtcgtgtcttctcagggaaggttgctactggtatgaaggttcggatcatgggtcccaactatgtccccgggcagaagaaggatctgtatgtcaagagtgtccagcgtactgttatctggatgggaaagaagcaagagtcggttgaggatgttccgtgtggtaacactgttgctatggttggtctggatcagttcatcacgaagaatgctacactcactaatgagaaggagactgacgcttgcccaatcagagcaatgaagttctccgtctctcctgttgtgcgtgttgctgttcagtgcaaggttgcctctgaccttcccaagctagtcgaaggtttgaagcgtctagcaaagtccgatcctatggttctctgtacaatggaagaatctggtgagcatatcattgctggagctggtgagcttcatcttgagatttgcctgaaggatctgcaggaggacttcatgggtggtgctgaaattattgtttcccctcccgtcgtctccttccgtgaaacggttcttgagaagtcctgccgtactgtcatgagcaagtctcccaacaagcacaaccgtctgtacatggaagcgcgccccttggaggagggtctcgctgaggccatcgatgacggccgtattggcccacgtgatgatccgaaggtgcgctcccagatcctctctcaggagtttgggtgggacaaggacctggccaagaagatttggtgttttggacctgagaccactggcccgaacatggttgtagatatgtgcaagggagtgcagtatctcaatgaaatcaaggattctgttgtggctggtttccagtgggcatcaaaggagggtgcactggctgaagagaacatgcgtggaatttgctttgaggtctgtgatgtcgttcttcatgctgatgctatccacaggggtggtggtcaggtcattcccactgccaggagggtcatctatgcctctcagctcacggccaagccaaggctgctggagccagtctacctggtggagatccaggccccagaaaatgcacttggtggtatctacggtgttctgaaccagaagagaggtcatgtctttgaggagatgcagaggccgggtaccccgctctacaacatcaaggctttcctccctgtcatcgagtcctttggtttctccagccaactgagggccgcaacctctggtcaggcgttcccccagtgtgtctttgaccattgggacatgatgggctcagatcctttggaggccggctcccaggctgctcagctggtgctggatatccgcaagaggaagggtctcaaggaacagatgacccctctttctgagtttgaggacaagctctaaaatttttggctgttggtgatactgtttcatctgccggtttaatcatcaattcgtctactgtaatagcagcgacttcaatattttattttgttttagttgtcaaatgcacctgtttttgaacaatatttgtgatgtagtgccctgccgcgcttagagtctgagactattttgttatctgctgtgatgtttcagatgaaacagagttgatgtctggtttagtaaatggttatattcttagtgtattgctcttttgtattgtcttgtcttattaagacctgtttgtgcaaaatgaagtggcattcaaaccggtgccaagaggtcgaaccggtgcctgcttc

SEQ ID NO: 262070 - DNA, 519 bp, Zea mays
ttttgcggacgcgtgggcaccgcagccgccgcccgctcgctcgcctccgctccggcagcgagctctatctcccgcgacgagcagcagctgccaccgacgcacgcagaccggggaataaatattggtattggtagtgtgatatctataagaagtcaagatggtgaagttcacagctgaagagctccgtgctatcatggacaaaaagaacaacattcgtaacatgtctgtcattgctcatgtggaccatggcaagtctacgcttacagattcccttgtggcagctgctgggattattgcccaggaagttgctggtgatgttcgcatgactgatactcgtgcagatgaagcagagcgtggcattacaatcaaatctactggtatctctctttactatgagatgactgacgagtcactgaagaactacaagggtgagagagatggtaaccaatacttgatcaaccttattgactcgcctggacacgttgatttttcttcggaagtcacagctgctcttcgcat

SEQ ID NO: 262071 - DNA, 474 bp, Zea mays
tggagatgcacaggcctggtaccccgctctacaacatcaaggctttcctccctgtcatcgagtcctttgggttctcaagccagctgagggctgcaacctctggtcaggcgttcccccagtgtgtgtttgaccactgggacatgatgggctcggatcctttggaggctggctcccaggctgcccagctggtgctggatatccgcaagaggaagggtctgaaagaacagatgactcctctttctgagtttgaggacaagctctaatcttttcgtttttgctactgttactggttttaattgtcactcggagtctgggaactatttatatcttgtttccttttagttgtcaagtgcatgtttctgaacatcattggtcatactgtactatccaagtgctgttgagacacttttttctatcaatcgtgatgtaacagttggtaaaaaaaaaaaaaaaatggtaaaataagaggggggg

SEQ ID NO: 262072 - DNA, 449 bp, Zea mays
aacctctggtcaggcgttcccccagtgtgtgtttgacccctgggacatgatgggctcggatcctttggaggctggctcccaggctgcccagctggtgctggatatccgcaagagaaagggtctgaaagaacagatgactcctctttctgagtttgaggacaagctctaatcttttcgtttttgctactgttatcccatactggttttaattgtcactcggagtctgggaactatttatatcttgtttccttttagttgtcaagtgcatgtttctgaacatcattggtcatactgtactatccaagtgctgttgagacacttttttctatcaatcgtgatgtaacagttggtatatgctggcttggtggaagtgtttgtagtaaatgcttgtgctatcttgatttaattcttgttcccttacatccttagtaaacaggttggtttgagac

SEQ ID NO: 262073 - DNA, 649 bp, Zea mays
tcatgtctttgaggagatgcagaggccgggcaccccgctctacaacatcaaggcttacctccctgtcatcgagtcctgtgggttctccagccagctgagggctgcaacctctggtcaggcgttcccccaggctgtctttgaccattgggacatgatgggctctgatcctttggaggctggctcccaggctgctcagctggtgctggatatccgcaagaggaagggtctcaaggaacagatgatccccctttctgagtttgaggacaagctctaaatttgtggttgttggtcacactgttacagctgccggttcaatcgtcaattggttttactgtaaatgcagtgtgtgctgctgtgctgacagtctgatgctctattttaatactccctccgtttcgttttagttgtcgctggatagtgcaaaattgaaccatccagcgacaactaaaaagaaacggagtgagtatttgttaagctatctccaacatcttattcatctcacccgtccatcccaccccctatcttaaacttcatgctgtaaacaaaataatctacagttatttgcatggacatataatggtaccacattagacaaagttggtatgtggggtcttgtaagtggttgtaaccttattccagtctcctgccc

SEQ ID NO: 262074 - DNA, 485 bp, Zea mays
taccgttggttacttcccgtgttccgtcatccctcccccagtcatccatcactccgcagcagcctgcagctgcctgcccgcctccgcgtctgcgacgagatccggcgccggcagcgagctctggcagcccaggaataaatattggtattggtagtgtgatcttcataaggagtcaagatggtgaagttcacagctgaagagctccgtgccatcatggacaaaaagaacaacattcgttacatgtctgttattgctcatgtggaccatggcaagtctacacttacagattccctttgtggcagctgctgggataattgcccaggaagttgctggcgatgttcgcatgactgatactcgtgcagatgaagcagagcgtggcattacgatcaaatctactggtatctctctttactatgagatgactgacgagtcactgaagaactacaagggtgagagagatggtaatcaatacttgatcaacctta

SEQ ID NO: 262075 - DNA, 891 bp, Zea mays
ataacgtgccaatatcagctggtattgaagacaataagttatttcccatatacaactcggctagccgagggccaccctttttggaagggggaatcgatgttattttattctgatgcatgtccaagcggattagttttgaaagtgctccaatgcaacctgggatggctgtaagtagattctttgcgagattcaattctgtgagcattgtccatgacacaaacatgttttcagaaagtgccacaagcttgttaccctctagatccaatttacttaacttggaacagccagcaagtacatctggtactctggatatgttgttgtttgatgccttgagttcggacaagtccgggcatgtggcgaggttaggtggaagctcagtaaggcaattgtttgagaagtcaaccttgactaaagcagtagccaggccaatctcttcgggcagagtgtttatttgattgaaagacatgtccagtgattttagcaacgggagatctccgatagctgctggaagggaagatatcttgttgtgacttatatttagaacaacaagcgaagacaagttcctaaggtcttctcttaacacctcaagattattgtgagccagaatgagcttttggaggtccactccctcccaccatttctcatcctggctgccagtgtccaagttgttgtacacctccttgggtatctccctgagggagcgattggagaggttcagggagcccgactccctggcggacttgaggatccgctccatgtccaagcttccagatgccttggttgattcagatcgccattgatgggagttttttttttgttgggagggggatatggacgtatggttgggactgccgctcccgagtcccgagctgaccggacctgggaaggaag

SEQ ID NO: 262076 - DNA, 1277 bp, Zea mays
ttattattttttttttgaacagagaaaatatgttggttccaataaaacatgtgggctataaccagtatatccaacaacacactcacaaagctctcttctcacacaaggtccagatacttttgcacaaaattcagtccagaaaactgagatacagtggcaaaaaaacattttattccattactccaacaatagtttgttctataaatattattcagacggcaatttttctttgaggtacttgagaactgctttcgttcctcgctccaacagagttcgtcttatgcttcttagcggatttccatccagtttcagcacttgcaggttagcttcaagcacatccagtccgctgggagtgctgttatattgttgtcagacagatcaagctcaatgagtgcagtgaaattcttgatgccctccggcacagttgtaaggtgattctgactcaggtcaagaatcctaagcagttttaggcccagcaaaccattaggaaattcatggagtttcattcgtcttaggtaaagctcttgcagctgtggtaatgcagaaactgcagaaggttcaggaagtgctgaagcattgccacttagatcaagtacttcaagtttggacagaggcacaagatcagtggatgatatctctaccaaggggttattgtccagctttaaggaagacagacagggaagggaggaaaccactgtgtgaggccacctttttatcttgttattagacaaaactaaggattgaagtgatgagcataatgacaactcatttggtagatcttctattgaatttttagaaagatccagtttcaccacatcacttgtctcccacgcggcagctggtacactggtcactccaaggccactcaagtccagttcctttgaagataaggacaagcgccttgctgcagcaatttggtcatctttagttggggtgcttctggatcctgatgcttcctcatcggatgaaagccggctgcgcagatacttcagcaatgttgttgttggtccagaaaccaatgaactcctaagtgtcctcataggatttccagtaagcagaagctttcttagggtagtcattttacctagttcagctggtagaccagataatgagttatttgatagatcaaggaaagataatttgaggttgcaggctccaactggatactcctttagatgtgacaacatggatagacaagctcactattctgatgcatgtccaagcggattagttttggaagtgctccaatgctacctgggatggctgtaagtagattc

SEQ ID NO: 262077 - DNA, 485 bp, Zea mays
cccacgcgtcccgccccgcgcgtgccctcggacgaggcaaccatggccgcggggggcaccgccgacttcttctaccgcgagtcgcagcgtctgggctacgtcgcccgctctgcgtttaagctgatccagatgcagaagcagcacaagctcatcgcgccgggcgccgctgtgctcgacctcggctgcgcccccggcgcgtggcttcaggtggcttgtcagaacctgggtcccctcgagaagggtggcattgtcgtcggcgtcgatgttaagaaggtgaaagtgccctctgcgcactgtgactcacgggtcaggacggtctgtgcagatgtcatgacgctgatgaagcggcaggctcgggcaatgtcgccacaggaacgaggattctctgtgatactgtcagacatgtgccccccagtttcagggatcacgactaaagatggagctatatcttagaagtatctgagcttcactgagcctgagtctga

SEQ ID NO: 262078 - DNA, 998 bp, Zea mays
tgctgatggagcaaacaatagtgagagccaaatcttgcacagtagattgcaagaagtgttgacaggaagcttcgccagattcttgacatgactgaggatgaagctcgttttcatatgcagcagagtgcattcctctacaatctcggtgcccagacattgccgaaaagtcaccattgcctctccatgaggctgacactagaatatttcaaatcatcttcattggattctgatgattctcctggcaggttcagcagtccagaatacaggcacttcgttatactatctaggaacgttcttgcggcttctgtagcaatcaactcaactgtgagcagttgtaaggagccaggctactttgcttttcatatcctaactgacgctcagaacttctatgccatgaaacactggtttgccaggaattcgtataaaaatgcagctatccgtgtcataaactacgaagcaattattttggagaaacttccaaagtatactatccggcagctgtttttgccagaggagttccgtgttctcattaggagcattaagcggcctactgaaaacacaagaatgaaatacctgtcactgttcagccactcacatttcgttattccagaaatattcaagtatctaaacaaggtggtcgtgttggatgacgatgtagttgttcaacgtgatctgtctttcttgtggaatattgatatgggagacaaggtaaatggcgctgtcgaactttgtggtctgaaactgggtgagatgaaaaatgtcttgggtaaaacagcatatgatcccaagtcgtgtgcatggatgtcgggggtgaatttgattaatctggataaatggagggagcataatgtcacagagaactatctgctgctcatgaaaaagttcgaagtcaaggatgagctgtccctgcgagcagcagcattttcctctgagcttgctatccttccaacatctaatatatcccctaaatgaaaaattgaccctggctggacttggat

SEQ ID NO: 262079 - DNA, 1596 bp, Zea mays
tgatgcctctctctaatcagctttctcaccgacggcgaccgaccgaccagccatataataaagaagcgaagctaagcgagaccggacgggcacgagcgccaccgccttgatcccgcccgctcctccccagatctcctcgccattgccgccgccctgccaggattcgcgccctactcgccgcccagatccgaccgcggctctgattttccaaccgacgcaggagcggtacagcgtgatccctgcggctcgattgtaaattcgtgatctttcggggcattccttggtttgtctgtcggtgccggtggtgctgcgtttggagggccgcggagatgggcgtcggcggggagaagttccagctggggacggtgggggcgctgagcctctccgtggtgtcctctgtctccattgtcatctgcaacaaggcgctcatgagctccctcggctttaacttcgccactaccttgacgagctggcatctgctggttacattctgctcccttcatgtagcattatggatgaagttctttgagcataagccttttgattcaagaactgtcatgggatttggagtacttaacggaatctccattgggctcctcaacttgagtcttggcttcaactctgttgggttttaccagatgactaagctggcaatcatcccgtgcactgtcattttagagacacttttcttcaggaagaagttcagtcggagtatccagatgtccctttctgtgctccttcttggtgttggtgttgcaactgtcactgatctgcaactcaatgctgtgggatccatactctccttgctggcaattatcacgacttgcattgctcaaattatgacaaacactatccagaagaagttcaaggtctcatcaacccaactgctctaccagtcttgcccttaccaatcactgaccctgtttctcattggccccttccttgatggctttttgactaaccaaaatgtctttgcttttaattatacatctcaagttgtgtttttcatcgtcatgtcatgcttgatatctgtttcagtgaacttcagcactttccttgtgatcggaaagacatctcctgttacttaccaagtcctgggccatcttaaaacatgccttgttcttgcttttggttatgttttgcttcacgatccgtttagctggagaaacatacttggaatcctaattgctgtagttggaatggtcttgtattcatacttctgcacagtggagacccagcaaaaaaatgttgaagtctccccacaacaggtgaaagaaagcgaggcagcccctttgatcgcagactctttgagcaaagttgaaaacgggggtggtggtgttgatgacgagcctttgaaggtacccatgtggagctcaaagtactcgcgggagtgaaatggtctcccgcttgacggtggcatcatacaggattcagtttagtaggcagatagtagggttggaagccaacccagagtgtaatgaacatttgagttacattttttggccttttttagcgtcacgatctactactggtaaaagggtctgtttcttgggaggatcttaccttcaagattgccagatatacattgaaactaga

SEQ ID NO: 262080 - DNA, 462 bp, Zea mays
ctctaatcagctttctcaccgacggcgaccgaccgaccagccatataataaagaagcgaaagtagcacgtaccggagggcacgagcgccaccgcttgatcccgcccgctcctccccagatctcctcgccattgccgccgccctgccaggattcgcgccctactcgcccagatccgaccgcggctctgattttccaaccgacgcaggagcggtgggtctgaccgggcgcgacccgtcttctcatgggcgatacagcgtgatccctgcggctcgattgtaaattcgtgatctttcggggcattccttggtttgtctgtcggtgccggtggtgctgcgtttggagggccgcggagatgggcgtcggcggggagaagttccagctggggacgatgggggcgctgagcctctcagtggtgtcctctgtctccattgtcatctgtaacaaggcgctcatgagctccct

SEQ ID NO: 262081 - DNA, 754 bp, Zea mays
  unsure (1)..(754): unsure at all n locations
agaccgtggccatcaagcagctggacaagcatgggttccaggacaacatggcgttcctgagcggggtcgccaagctgagcaagctccaccacgagaacctcgtcgacatcattggctactgcgctgacggagaccagcggctgctggtgtacgagtccgtgcccgccggcaccttagaagaccacctgttcgatctgccggcggacaagaagccgatggactggtgcacgaggatgaaggtggcgcacggcgccgcgcaggggctggagtacctgcacgagacagcgaacccgccggtggtgtacggggaattcaaggcctcccacatacttctcgacgagaagctcacgcccaagctctccgacttcgggctcgcgcagctcggccaggcggggggcagcatgccggtggcgtcgcccatgatgggctccttcggctgctgcgcgccggagtacgaccgcaccgggcaggccaccatgaagtccgacgcctacagcttcggggtggtgctggtgcagctcatctccgggaggagggccgtcgacaccagcaagccggtggacgagcagaacgttgtcacctgggccatgccgatgttcaaggaccagaagagataccatgagctggttgatccactcataaaaaaggagtacgctgccaaagcgctgaaccaggtggtcgccatggctgcgatgtgcttgcangaagaggactccgtgcgaccgctgatggccgacgtcgtcatgacgctggg

SEQ ID NO: 262082 - DNA, 1115 bp, Zea mays
acccacgcgtccgggaacgaggtggaggaggaaggggaggagttcgccgcgtactgccggaggggtttatgggaaggagaagggtggaaatggaggaccggcatgtggccaaggtcgctctcggcggggacccccaagtggcactgtttggtgtgttcgatggccacggcgggaaaaacgcggcagagttcgccgcggagaacatgcccaagtttatggccgaggagttgacgaaggtaaacggcggagagatcgaaggagcggtgaagaggggttacctcaagacggacgaggagttcctcaagagggacgagagcgggggcgcgtgctgcgtcacagccgtcctccaaaagggtggactggtcgtctccaacgctggagactgccgtgcggtgctcagccgagcagggaaggcagaggcgctcacctctgaccaccgggcgtccagggaggacgagaaggaaaggattgagaatttgggtggatttgtggtgaattaccgtggaacatggcgagtccagggctccctggcagtgtctaggggcattggggatggacacctaaagcagtgggttgtggctgacccagacaccacgacgctcctggttgaccagcagtgcgagttcttgatacttgcttctgatggcctctgggataagatcgacaatcaggaggcggtagaccttgcacgacctctctgcatcaacaatgacaagacctctcgcatggctgcctgcaggatgctcaccgagacatcgatttccaggggctcgactgatgatatcagtgtcgtgatcgtgcagttgcagaaattttcaagctcgtaacctagttggagaagctggaacaaaactctagccagtagcactaacagactggtgataggtagacatgatatgttacttcgctggcgaaagttttcatgagtcagcgctatttggaggggattttaacattcattctttggtgtagagccattcgtcttattattacatcatttaattcattcttggtaagcactgaaataaggggtgaaaaaaaaaaaaaaaaaaaaaaaaaaaagaaaaaaaaaaaaaaaaaataaaagaaaaaaaaaggggggcagcccaagaggt

SEQ ID NO: 262083 - DNA, 499 bp, Zea mays
gcgtctccttagcccgcagccgacatctctgcctcttccgctctcggcggagatcccgagatgactctctttggtgtattcgatggtaactggggcaaaaatgctgcagagttcgctgcggagaacatgcccaagtttttggccgaggagttcaagaaggtgaacggcggacgagagatcgaaggagctgtcaagaggagttacctcaagactgacgaggagttcctcaagagggacgagagcggcagctcgtgctgcgtaacatccgttctacaaaagggtggtctggtcgtctccaacgctgcagactgccgtgcggtgctcagccgagcagggaaggcagaggcgctcacctctgaccaccgggcgtccagggaggatgagaaggaaaggattgagaatttggtatgtccagggtgtcacagccctctacgtctcttctgatgcaattgaacacccataatacatgagttatacattgttgtgtgcagtttttctt

SEQ ID NO: 262084 - DNA, 981 bp, Zea mays
atatcccccatctcttcgactcctttctggagcagctagggttccgtcctcgatccgatccgccgagtgcacaccacctttccccactccgatcgaatcgatggccgccgagggcgagaagaagatgataaccctcaaaagctccgatggcgaggagttcgaggtggaagaggcggtggcgatggagtcgcagaccatccgccacatgatcgaggatgactgcgccgacaacggcatccctcttcctaacgtcaactccaagatcctatccaaggtaatcgagtactgcaacaagcacgtacatgccgccgccgccgccgccgccgcctcgaaggccggttccgacgacgtgggtgccgcctccgccaacagcaccgccgcctccggtgaggacctcaagaactgggatgcggacttcgtcaaggtcgaccaggccacgcttttcgacctcatcttggctgcaaactatctgaacatcaagggtctgctcgacctgacctgtcagactgttgctgacatgatcaagggcaagacaccagaagagattcgcaagaccttcaacatcaagaatgacttcacccctgaggaggaagaggagatccgcagggagaaccagtgggccttcgagtaaggaggtgctggatctattgatgcctaagtttcgtggtgtctactactatgtctactttatgttgtcctaatggttgtaagtattttgggagtcactttgcttgcgaatgtctcgcgtaagacttatgtggtcaatggtcggttattaacttattaccatgaaagcacttcgtctgctgccctaagaggtttagtcccatttgcattataaccaattcaatccttgtggatgatttgtgtgattccatcgtgaatctcatggtaaaatattttcattgttgaaaaaaaaaaaaaaaaaaaaaaaaaaaaaaaaaaaaaaaaaaaaaaaaaaaactcaagactagttctctc

SEQ ID NO: 262085 - DNA, 788 bp, Zea mays
cgtagtttctccaagctctcatatcaatacatcgtgcttttccagatgagtcctttgtccagagatattgccacaaaccttatgtttgctgcagcagctcctctcagtgatgccaccgcttccctgctgcgtgcatgcaacaccctcaaggtatcatccacagatattgctgattgcccctggcctgttcgtctgtcgagctccttaatgagatgaagtcggttctgagcatcctgccacaatcgaccggcgacgtagaaggaggccatagtaccgaacatagcgagcatcatggcggacatgggcgaccgcagcgccccagcggcggacggcgcctgccgccgcgcgaggccctcccgaatctgcatcgagatctcgagctcggagaccttcacctgctcccgccccgcactcagcacgggcccgccatggccgcccacgacgagatatccgaagccgctatcagaaaactcagcgcctaggggttgtctggttccgggaacttctacaactacaagccgccacgggggagtggtggcgcagcgcagacgagggttgtgagtacagttttggtggtttcgcttgcaacgatttagaatttggagaaccctatgagcctatgaggcgtcgaggcactagacgacggtcgtctgctgccctaagaggtttagtcccatttgcattataaccaattcaatccttgtggatgatttgtgtgattccatcgtgaatctcatggtaataagttaataaccgaccattgaccaacataagtccggacgcataaa

SEQ ID NO: 262086 - DNA, 457 bp, Zea mays
agatattgctgattgtccctggcctgttcgtctgtctagctccttaatgaggtagactcggttctgagcatcctgccacaatcgtccggcgacgtagaaggaggccatggtagcgaacatggcgagcatcatggcggacaacggcgaccgcagcgcccccgcggccgacggcgcctgccgccgcgccgggccctcccggatctgcatcgggatctcgagctggcagaccttcacctgctcccgcccgcgcactcagtactgacccgccatggcaccgacaacgagatctcgaaagaccaaagccgccttcagaaaactcggcgcacagtggttgtctggttccggaagcttctagaaggcgccacgggagagtggtggcaaggggtgagagactgagtgagaggtgccgggctgccggccggtttgatggtttctctagcaacgatttggaatttgg

SEQ ID NO: 262087 - DNA, 1630 bp, Zea mays
tgcaccgtcgtgtctttggcggctgccgctggcgccggcggcgaggcatcttcggcccccgtggctgtgtcggctgtcgcccccgcgggcgctgccagggacaaggtgcggcgccacacgatttcagtgttcgtcggggacgagagcggcatgatcaaccggatcgcaggggtgttcgccaggagaggctacaacatcgagtcgctcgccgtggggctcaacaaggacaaggccctcttcaccattgtcgtctccgggaccgacagggtgctcaaccaagtcatcgagcagctcaataagctcgtcaacgtcctgagtgtggaagatctatctaaagaacctcaggttgaaagagagctgatgcttataaaactaaatgttgaacctgatcagcgccctgaggtcatggttttagttgacattttcagagcaaaagttgttgatatatctgagaaaacacttaccatagaggtagctggagatcctggcaaaattgctgcagtgcagaggaatctatggaaattcggcatcaaagaaatttgcaggacaggaaaaattgctttgagacgtgaaaagattggtgcaacagcccgtttctggcgattttctgctgcttcttatccagaccttatagaggcattaccaaaaaatccgcttacatctgtaaataagacagtgaatggcagttttgttcgaccatccaatgctgggggtgatgtttatcctgtggaatcttacgagagcttatcagcgaaccatgtacttgatgctcattggggtgttctggatgatgatgatgcgactggacttcgctcgcatactctctccatccttgtgaatgactgtcctggtgtcctcaacattgtaacaggagtctttgctcgcaggggctacaatatacagagccttgctgttggcccagctgagaaggaaggcatttcgcggattacaacagttgttcctggtactgttgaatccattgagaagttagttcagcagctttacaagcttattgatgtgcacgaagttcatgacattacccactcaccttttgctgaaagggaacttatgcttattaaggtttctgtcaacactgctgctcggagggaaattctagatattgctgaaatcttccgagcaaaacctattgacgtttctgaccatacagtaacccttcagcttactggagatcttgacaagatggttgcactacaaaggttattagagccatatggcatctgtgaggtcgccagaactggacgagtagcactggtccgcgaatcgaaggtggactccaagtacctccgcggctactctcttccactgtagccttgcagtcgtgatgatgatggcaccatgaagagctcggctggttgtttatagagcagaccatctcgcgctgggttgtgttgtgcaattacaggacttgtttctttcatgtcgtgaactccccggcctgcgtgtccaataacgcgtgttgaggctgcatgtgtattccaacgactgtcagaataagatgcataccgtatctgtttacttcagtgaagagatgcaggcatcgttcgaaaaaaaaaaaaaaaaggccggcccgctcgcgatctagcggacgcgtggtcggacgcgtggacgc

SEQ ID NO: 262088 - DNA, 436 bp, Zea mays
gtccgtgaatcgaaggtcgactccaagtacctccgcggttacgctcttccattgtagcctggcatttgtgattggtggtggacccgataaagagcttggtttgttgttatagatcagaccatctcgcgctgggatgtgttgtgcaattacaggacttgtttctttcatgttgtgaactccctggcctgcgagttcaataatgcccctttttaatgcgcgttgaggttgcatatgtatcccatcgactgtccgaataagatgcatagcataactgtttcctaaaaaaaaaaaaaaaaaaaaaaaaaaaaaaaaataaaaaaaataaaaaattggcgggccgtttataagaatcaaacttacattaatcttgtatgcaacggaaaaagtttatatattgttgtacctaaatttaaaatttactgtaccctatattttt

SEQ ID NO: 262089 - DNA, 790 bp, Zea mays
gatataccaaatggattagcttcaggagttgcaactgcatttgttccttctgatgtggactattcaaatgaagctcaaacccatgtccttccccacagcacactggaagcatatccaagtgatatgtctgttgggaacggcacaacttatcctaatttgggaatggcatgtggaagtgcacatgttactcaagatgcttatgcttatgctgctcctatcgccagtaatgagcctttggacattgatcccttgtatcttgcaaaatatggtgatggtttgctgcaaagattggacctgctggaaaggctctgtggctcgaacaaaggtcttgaattgataagaagagaaattgagatacggatgtcggacttaaatgcactttcatcttatggatcttctttgctcccattgtggttgcatgctgaggtgcacctgaagcaactagactcttctatttccaagctggaaatgaactatcatgcagattcagaacctaggaattcaaagacagaggttgctgaacacagggcacctgatgatgctgacttgataaacaccctccaatggcgagcctttggagtatgaagtttgtgctgggattactatcgatgcaaatatgtagattggtaagccagcttcaacgtctcagaattcacaaagatagggataatgcagctgttcctccaaaacatgaatctgacaatgatgaagatatggatgtggaaatggaagttgatgaagataatgtcgaagagcaggcacagtgcagttctgtacctgaaaaggagca

SEQ ID NO: 262090 - DNA, 445 bp, Zea mays
cggaattcccgggtcgacccacgcgttcgcaacctcagagtccatatcggtccctttctcctctagtactggacaagctgttcgtccttttagtgcctcagtttttttgggttttgatgcagatccatcattgaatatcacagctcgaatccgtggtccaaatgatcagtacataaatcatatcatgaaagaaacaggggttactgttgtactaagaggaaaagattcggagaatcttggcagttgtcatagtgaagcctcacaacaacctctacacctatacctcacacccatgcatttaaagaacctagaagctgcaaaagttttggcagagaacctcctggatacagtagcagcagaattcggtgcttccagaatttcttcttcaaaagtatatggtgctgttccacctcctcagcagttgttagctggtgtcgacacctca

SEQ ID NO: 262091 - DNA, 465 bp, Zea mays
gcggccacgcgtccgggtcgagctgcttcggcgacagagagccgcttcggagcaagcagcaatggacgcggagcagaggcaaagttcgggtggcatgtggggttggctcgctggaagcccgacaccagcagtttagttccgtgattcatatattttacttgtaacattatatatcatttgactgacaccctctacaatttttttatttgggtacttacggcattcgtgttcattttggacccacaaagaataaggtgttctagcgatcgttatactcacaattactcaaaatgtattctttaggtttagcaagggggtgctcatgttagtcgatgtgctggttatccttttgacgctgtgctggtttggttgtccatagattgttcgcttcaaaggggatgttcatgttagtcgatgacttttttgtgaaactgcagtttgatatatgaagtgcaagtatcgtga

SEQ ID NO: 262092 - DNA, 1120 bp, Zea mays
ggacactgtctaatgtttgctaatagggttcggtcgtacagagagttgcctcttcgcatggctgattttggagtgcttcatagaaatgagcttagtggtgctcttacaggtttgacacgtgttagaagattccagcaggatgatgctcatatcttctgcagagaagaccaaatcaaggatgaagttaaggctgttttggaattcatcaattatgtttatgagatatttggcttcaaatatgagttggagttgtctacgagaccagagaagtatctaggtgaagttgaaacttggaacaaagctgagcaacaattgacagaagctttaaatgagtttgggaagccatggaagattaatgaaggggatggtgctttctacggcccaaaaattgatattggtgtgtttgatgcccttaagaggaaatttcagtgtgcaaccctacagctggattttcagctgcccattcggttcaagctggcttattctgctgaggatgaagccaaaattgaaaggcctgtgatgatacacagggcaatcctaggttcggttgaaaggatgcttgccattcttttggagcattacaatggtaaatggcccttatggctaagccctcgccaggccattgtttgctcggtatcttctggttcagtggaatatgcgaaacaggttcttgccactctacatgaagctggttttcatgttgatattgacgcgagtgacaggacaatacaaaagaaggtacgggaagctcaactggcccaattcaactacattcttgtcgtaggtgcacaagaggccgagactggaaatatatgcgttagggtaagagacaatgctgacctggtcacaacgagtgtagatggcttcatcacacgtttgagggaggaaatcgcagccttcaaatgattttgatgctgcataatttcctactactcgtttgtgattttgacgagtttttagtgaccagcatcgagttcctcgtgttactgttcttgtttgtatgaagctaaaaggttgtctttttgttattaattacagatgcgaagttaaatactgccgctagtaaaaaaatatgcttgttgacttccagtgatttacgttactgttggacagtgtcttc

SEQ ID NO: 262093 - DNA, 688 bp, Zea mays
cccacgcgtccggtgctcttacaggtttgacacgtgttagaagattccagcaggatgatgctcatatcttctgcagagaagaccaagtaggttttatttgtgtaaaccatgcctgtttactatcctttagaatggaatgaattcgtgttgtacttccattagtgtatgatgttacgataattaattttatatccttaagtgcttaacacctgcaccctgcatactttctaatttgcattagaaaagtttacaatatggttactgtttcttccttttctctgacagtagatgtactttaaaagattgttttttgttgcagatcaaggatgaagttaaggctgttttggaattcatcaattatgtttatgagatatttggcttcaaatatgagttggagttgtctacgagaccagagaagtatctaggtgaagttgaaacttggaacaaagctgaacaacaattgacagaagctttaaatgagtttgggaagccatggaagattaatgaaggggatggtgctttctacggcccaaaaattgatattggtgtgtttgatgcccttaagaggaaatttcagtgtgcaaccctacagctggattttcagcttgccattcgggtcaagctggcttattctgctgaggatgaaaccaaaatttaaaggcctgtgatgatacacagggcaatccta

SEQ ID NO: 262094 - DNA, 701 bp, Zea mays
cccacgcgtccgcccacgcgttcgcccacgcgtccggtcttgtgttgttcggagcgggcagcagcacacagccccatcccaatcctagtcgatcttcttcccctcctcaaggaagaaaagaagctgaaccatggggaagagaaagtcagctgctaagccacctcctaagaagcggatggacaagcttgacactgtcttttcctgcccattctgcaaccacgggagtagtgttgagtgccgaattgacatgaagaatctgattggcgaagcatcttgtagaatctgtcaggaaaacttcagcacaactgttaatgcactcactgagcctattgatatatatagtgaatggattgatgagtgtgagcgtgtcaacactgttgaaggcgacgatgatgcgtgagcttgccccatgcgatgaaactgttacctacaatcgtaatgtaatgtgctggtattctcgaatgccatagcccatagtcagccatggcttggaataacgtagtggctgactgatatgccagtaggcaccttatctagtacttacagaactacaaaaagtttgtactatacatatatggacaaccttataagtggctatgtgtgtacctatcctaacgcttatcccagatggtgtatcagcgtttttctgtgtatggccaccgtgtgtgtgggtgtgggggtgtggggtggaggaggttgtt

SEQ ID NO: 262095 - DNA, 571 bp, Zea mays
gccttatctagtacttacagaactacaaaaagtttgtactatacatatatggacaaccttataagtggctatgtgtgtacctatcctaacgcttatcccagatggtgtatcagcgtttttctgtgagattgttttcaaacaaggggttgttcattcattgggtcttctcagaaaaaagagaattatgctgcagtcaaccagatggccgttgttgtgccgacaatacagggtaaaccaaatgcaaccagaatataatctgcagcggaagatattcatagatacaattgttttcagttcattcaacgctgaaagcggtttcggtctggaggctgagctttggatcattggatggcactatgcagctttggcacctggagtaccgctcattagtttttcatcaagtcccgttcatttcttgtgcacattgctggagattgagagatcgagatcaagactgtacgcatcataaaccgatcagtctattctttgctgtgtacacctgggttgtctttgtgcctgtggtctctgccaggagggtgttcttcgaagtttgaagtacatgtggtttgtg

SEQ ID NO: 262096 - DNA, 882 bp, Zea mays
cccacgcgtccgcccacgcgtccgcttgtgttgttcggagcgggcagcagcacacagccccatcccaatcctagtcgatcttcttcccctcctcaagccggttccttcgtccacacgaccgcgcgctcggaaaactccgcggagggcgaaggaggcgaaccaagggcgacgtatccgccgccggagaaggtagccctcgatccgccgtctcccgcgattcgtttgtcttgcgacagctgggcgaccgtcgtcgccgccgcccttctccaggtgcccaggtcttcgccggtccctttgccgcctccttgccgccgacgagcaccagccaggaagaaaagaagctgaaccatggggaagagaaagtcagctgctaagccacctcctaagaagcggatggacaagcttgacactgtcttttcctgcccatttgcaaccacgggagtagtgttgagtgccgaattgacatgaagaatctgattggcgaagcatcttgtagaatctgtcaggaaaacttcagcacaactgttaatgcactcactgagcctattgatatatatagtgaatggattgatgagtgtgagcgtgtcaacactgttgaaggcgacgatgatgcgtgagcttgccccatgcgatgaaactgttacctacaatcgtaatgtaatgtgctggtattctcgaatgccatagcccatagtcagccatggcttggaataacgtagtggctgaccgatatgccagtaggcaccttatctagtacttccacacctacaaaaagtttgtactatccatatatggacaaccttataagtggatatgtgtgtacctatcctaacgcttaaaaaaaaaaaaaaaaaaagggcgcgcgacacgggaatacggacg

SEQ ID NO: 262097 - DNA, 313 bp, Zea mays
cagcagcacacagccccatcccaatcctagtcgatcttcttcccctcctcaagagcgtgcccaagggtgcccaaggttgtctaggagacttaattactgtaatttgggttggtttgaaggaagaaaagaagctgaaccatggggaagagaaagtcagctgctaagccacctcctacgaagcggatggacaagcttgacactgtctttatcctgcccattctgcaaccacgggagtagtgctgagtgccgcattgacatgaagaatctgattggcgaacatcttgtagaatctgtcaggaaaacttcagcacaa

SEQ ID NO: 262098 - DNA, 329 bp, Zea mays
cgccctccctctatctttcgctcgctctcggcgacagctgggtgaccgtcgtcgccgccgcccttctccaggtgcccaggtcttcgcaggtccctttgccgcctcttcgccgccgacgagcaccagccagtgacatgaagacatctgattggcgaacatcttgtagaatctgtcaggaaaacttcagcacaactattaatgcactcactgagcctattgatatatatagtgaatggactgatgagtgtgaacgtgttaacactgttgaaggcgacgatgatgcgtgacttgccccatgcggatgacactgttacctcaatcgtaatgta

SEQ ID NO: 262099 - DNA, 1134 bp, Zea mays
cagatcacttgttcttggaaaggacaatcaaaatgacttcactgcctttgagtactctatttgggctgaccttggggaggacttcatctttgtcccccatgattctagcattggaaggaacaaagtcctattttatccagcaagacagcagtattcagtttctatgaatggatgccaagatactgttcctctaatcactgcaagaactggtctatatcttgaaggatcagtgttacctgcaacttctgatgttgacatcaagattctagcagctggaaagagcaactatgcccatctgaacaaaggggatgtagcaacagaggcaaagacagattctgaaggatcattttttgcaggtcctttgtatgatgacatagtatataaagttgaagcttcaaaggatggttaccatctcaaacaaactggcccatacaccttttcttgtcagaagcttggtcagatattagtgcggatttatggtgaaaattcagagcttttaccttcagtattattatcattgagtggcgagaaagggtacagaaataactcaattagtagttctggtggaaccttcacctttgacaacttatttcctggaagtttctatctccgaccacttctaaaggaatataaattcaatccgtcagcagtagctattgatcttaattctggagagtctagggaggctgaatttcgtgcaaccagagtggcttacagtgccatgggttctgtaacactattaactggccaaccaaaggagggtgtttttgttgaagcaagatctgaatccacaggtttttatgaggaagctaccacggattcttttggtagatttcgtcttagaggacttgtgcctggatcgacttactctataagagtggctgcaaaagataatcttcagtttgcagcagttgagcgtgcttcacctgaatatttgtcagttaatgttggtcatgaagacatgactggtattgatttctgtggtttttgaacgccccgaagtaacaatcttgagtggccatgtggcaggagatgggattgatacgatacatccgcatgtctgtgttgaaatcatgatcagcaacagactcttctagagtagaagctgtacttgctcttactgtttcatactac

SEQ ID NO: 262100 - DNA, 433 bp, Zea mays
cccacgcgtccgaccaccggcccgtgccccagccacaacaaggcgaaatcaggggtggtcacgccgagcgactacgcgaagacgcatcggcgggggcgaagatctcccaacccacattgcgcgcgcgtctacgcccgaggatcgatggttggcggcggggggcgccgcgcggcgctggggcgctggtgcctggtgatcctggccgtggcctccgcgctaggggtctctggccccgccttctactggcgctacaagaagggcttctcctcctcctccccctcgtccaccgcggcggcggtggcttcttccccgtcgtgccctccctgcagctgcgactgcccggcgcccctttccctcaagtccatcgccccagggcttgccaacttctcaataacagattgtgggaaaaacaaccctgagcttgccaaagaga

SEQ ID NO: 262101 - DNA, 613 bp, Zea mays
tgcgtagcgttcacggttctcctctctgtctctcgcgcacgggatctcgttctccgcggcagctggtgtttcgctcccttctcgccctccgacggctggtgggctgccggcgccggcgccgccaaacgccaggtgctgaggccttcgccagtgtcttcgacggcgacgagcacgtaccagcaccaagcatcatgtcggaaagaggtcgcctggcaggacgattgattgataaccgcagcagagggtaccatgtagtccctctagttgaggatcccagaggccatcctgaagtcctcgtggatggggatcggaggggctactctgacattcgtggggttcagcaacgtcggggctaccctgacacccatctgcttgaggaacctaggggctaccctggtgttcgtgtggtcgaccataggggctatcctggcagtcgtggggttgatgaacgcatggcctatcctgagctccatcaaggctcacgcatgagggcggctcctcccccttacccagctgccttcgaggatgagcttgagttacaggaagttgaactccggaggctttcggcacataaccgtgctctagttgaggagcgtgaactgttaagcagggg

SEQ ID NO: 262102 - DNA, 518 bp, Zea mays
ggtccggattcccgggtcgactacgcgtccgcggacgcgtgggcggactcgtgggcgaggctgctgtctcacggctgcggctgcggcggttcgggctcctcctccagactccagggatggccgccggtgcgggaggcggcgaactggaggcgctggagggcgtgcgctccatcgtgctcaagccgtcggagtcgctcgacgagtcgcggttcacgaggatcgccggcgccgacttcaacgacccggccatcggactccaggggctgctcgcctcgctcgcgtccaccgggttccaggcatccaacctcggcgacgccatcgacgtcgtcaaccagatgttagactggaggttgtcgcatgagaagcccagcgaggattgtgatgaagctgaacttgaccctaaatatagagcatctgtgaagtgcaagatatttctgggcttcacctcgaacctcgtgtcttctggcatccgggatataatccgttttctagctcagcatcacatggtggatgttatt

SEQ ID NO: 262103 - DNA, 672 bp, Zea mays
tggattataggcttcaacacttttagcatcagtagccgatggtcagagtgcaccccctctcagtccaactcgcttgcctgttcttcaatttgctacctgtggtttgaggggaatattgtgctcctcaaaaacatccctcaattcaccactgtcatgcatagcaataacaatatcacatccaccaagcagctcgcctttgcagtacagttgaggaaaagtgggccagttggagaacttcttcataccttcacgaacatcattatctgtaaggatgtcaaagctcccaaatttgaccccttcttgcttcaaaatgttcaccactttacggctgaaaccacaccttggttgttctggggttcccttcataaataaaaacacaggatgggaattgacaagctgctccaatcgcttattcaatgcatcttgagtactgccagagtttgtgctttcagcagcagaggatccattttgctgtgccatcttttggatgttttcaagtacagcaggcccagcagcgactccaaggctagcaggtacagcagactcagcaacactagcaggcccagctacttttgcaaccttattggccaggctggctgggtttgctccctccaaagtatcgacagttttgccttccttgcagaaaacaaaatatggcaccgctgtaactcc

SEQ ID NO: 262104 - DNA, 1223 bp, Zea mays
aaatacacaattacacgtacacatatactctataaatattttacttcatccgtctataaatcgtgacaatacccgaacaaaaaagcttccatccgctaaatagaactggtgatataagaacaatgcaatcagtaccgaacaagcgtaagttattccttctgcagatgtgtcacaattctagcaatgtggcactgcagacaagtaccaacgtggatctatgaatacaatggcatgaataccagagtagagtgatccaatgcaggcaatatgataaaaacgccagcgaagcaagaatgctagctaggtgtctactctgacagggtcgacttcagctctccgctcttctccatctcaagaacgatatcacatcccccaatcagctccgatttgtagtagagctgggggaaggtaggccagttggagtacgtcttcaaaccttgcctaacttcctcgtcagataagatgtcgaaggacccaaagctgaccccttccttcttcaaggcgttcacaaccttcgaactgaagccgcaacgaggagcatctggagtgcccttcatgaaaagcatcaccggtgcagaggaaaccagggacttcaatctgtcctccaggctttcctttggaataacccctttctcagacagaaccttcttcagctcaccactcttgtgcatctccatcactatgtctgagccgccaaccagctcaccttttatgtacagttgagggtaactgggccagtttgagagcaccttcagcccctgtctaacctcatcatctgaaaggatgtcaaaacttgagaaaggaatattctcttgcttaagtatgtggaccaacttcccactgaacccacactttggttcctctggtgtacctttgatgaataccatcactgggctggaattaataaggctttccaaacgagctttctgagcatcagtaagccccattggttcagaaactgcagcacccttctcagttgcagactcgggctgacctgcttcttcatttttgctaccctgtggtttgaggggaatattgtgctcctcaaaaacatccttcaattcaccactgtcatgcatagcaataacaatatcacatccaccaagcagctcgcctttgcagtacagttgaggaaaagtgggccagttggagaacttcttcataccttcccgaacatcattatctgtaaggatgtcaaagctcccaaatttgaccccatcatg

SEQ ID NO: 262105 - DNA, 1483 bp, Zea mays
gccacgcgtccgcggacgcgtggcagctcccattctccgccaaataaacccccgaaaagcaggagaggcgagacccggaagtggaaggctagggttagggtcccagctccccgttgcctgggcgagccgagtgatggccgcccctgccccctccggcgcagctagtgccgccgcctcaccgtccccgctgatgcagctgccgtcgccgttcgcggagctcgtcaagggcccctccggcctcgagaaggtcgtgcttcgcggcgctcgcaactgctgtgccgagatttatctttatggaggtcaagtaacatcatggaagaatgacaatggggaagacttgcttttcctcagcagcaaggctattttcaaacctccaaaagctattcgtggtggtataccaatctgctttccccaatttggatcacatggaaatcttgaacaacatggattcgctaggaaccggttttggactattgacaacaatccacctcctttaccattaaaccctgctattaaagcttttgttgatctgattctgaagccttctgaagaggatttaaagatctggccccacagttttgaatttcgtttgagagttgctcttggaccttctggagatttgagtctcacatcccgaatcaggaacaccaacccagatggaagacctttctcttatacatttgcatatcacacatacttctctgtctctgacataagcgaggtgcgtgtcgaaggactggaaactatggactaccttgacaacttaaaggcaaaggaacgtttcacagagcaaggcgatgctattgtttttgaatcagaagttgacaaagtttaccttgctgcaccctccaaaattgctatcattgatcatgagaagaaaagaacatttgtcgtgacaaaagaagggcttcctgatgctgttgtttggaacccttgggacaagaaggcaaaagcaatgcaagattttggggatgcagaatacaagagcatgctgtgtgtggagcctgcatctgttgagaggcctattactctgaaacctggtgaagagtggaaaggaaggcttgtgctctcagctgttccctcgagttactgtagcggacagttagatccattgaaggtccttcagggttgaaaatcctcactttctgcatcttgtacagaagttcattgcccttaatatttgatgctgggctggcgtcaacgccgcatgttccttttgccatttccaccccctatatttctggtcccttttgtatctagaatttgagtgataggttgattccgaataacagtctgtgatttgagcttaggattgggtcatctcatcgatgaatgataccgctggacaaaatgctggcgtacgtgtcagtttcataaatcatgcttctcataaattctttagcatgtattcgtagttaaaaaaaaaaaaaaaaaaaaaaaaaaaaaaaaaaaaaaaaaaggacggcagctcgcgatctagaac

SEQ ID NO: 262106 - DNA, 480 bp, Zea mays
atacccttaatacacacacttactcatactctgcaatatatcgtgaccactgaccatacccgatcaaaaaagtactctcatccgctaaatagactggtgataatagagcaatcagtaccgaacatgctctcaagttattccatctgcagatgtcacgattctagcaatgtggcactgcaggcaccaaacgtggatctatgaatacattggcacaaacgtcatagtagaatgatccaatgcaggcaatatgataggaacgccagcgaggcaagaatgctagcttaggtgtccactctgacagggtcgacttcagctatccgctattatccatctcaagaacgatatcacatcccccaatcagctacgatttgtcgtagagcccggggaaggtggcccagttgcagtacgtcttcacaccggacgagtgcgcgaacgcgtggacggacgcgtgggcgaacgagtgcgtccaaccgggaattc

SEQ ID NO: 262107 - DNA, 558 bp, Zea mays
cggttcgaatcccgggtcgacccagcgtccgcccacgcgtccgctcatttcgccctccctccgccggctagggttactgccaccgccttccacccctccccgactgcccgtgggtggaggaggctggttggcgtgcagggtacctcggcggcggagatggagccggacttctcgaccgtgggcgggcccagctttgagttcgctttcaacgaggccaacttctccgaccgggaattgcggatcgaggtcgtcgcgggggattacgacgcgccggggtccactggcggcggttccggaggaggtggcctcgccgactgggcgcgccatcggaagcgccgacgcgaggagctcttcaaggagaaagaatctacaacctacatgtcagaccaaactaattttaatgaagtcgaagcagaagagtgtgatgcatatgaagaaaatcaagaggaacctgtagcaatgatggaaggatctccacctgatgttgatcaagatggtgatgatgagcaaggtattgatccatcttgggctgctgtggttacgccggttttacgagtc

SEQ ID NO: 262108 - DNA, 392 bp, Zea mays
caccagacttcaaatattggaccagatcttcaagaggcctaccacattggatgttcctcctacgacggctagctggtgcttctaagaaacacccgagactattttggtagcacaggatgtttctcgcgttgtcatcgacgaagcacgtgtacaacagtccttgtgtgtaaaacgttgtcctttctggaatgtatccaacccatcaggtgtcctttttgtactttggttagtgtatgcatattgtcatgtgctgtacaaatatattagcattgctactttattacgggtggggcctagcccaaacttgatacagctaggataaagttagagcagttgctacagtttctagctagctaccttattctatacgcatcaccccagctgactgctgc

SEQ ID NO: 262109 - DNA, 2073 bp, Zea mays
cgtccctgcacacggcggttttcagactgcgatccattccgagcttcgaggaatcgatggtgaagcttcggtgactaagagatcaaactcttcaagttctacgaggctgaagatcctgagcatctgtttggtgaagattcttatgccatggaaattcatcgattgatacgtccttttcatagtcgatcatggttcaaggagattgcatttgtggatgctctaatggagtcgaaaggtggcaagaagtctagtagtagtagtagtaatttcatgtacgaagctccccttggctacaagatcgaggacgttcgcccagccggaggaatcaagaagttccagactgctgcttattccaactgcgtccgccagccatcctgatatcgcctcacatgcaattcgcggtagagtaggattttaattcagttttcctcttgtgtcggtagttttccgttggctctggctgccttcctctgcttctgagattccaacttgtcttgcccatctctccttttcctctctcatcctctctttcttgcaacacgtcatccagtggcgatgtcttcagcagattcttgtgtctcttctcctgcctcccctattggctttgagggctatgagaagcgcctcgagatcacgttctctgacgcgcctgtctttgaggacccttgtggtcgtggcctgcgcgccctctcccgtgagcagatcgactcgtttctggatctcgcacggtgcaccatagtgtcacagctctccaacgagagcttcgactcatatgttctgtccgagtccagcctctttgtgtatccccacaaggttgttctgaagacctgtgggacgacgaagctgctgctcgccattcctcgcatccttgagcttgctgcagggctgtcactgcctcttctttcagcgaagtactctcgtgggaccttcatcttccccggcgcgcagcccgcgccacaccgcagcttctcggaggaggtatctgtgctgaacgctttctttggtaacctcaagtccggtggcaatgcctacctgatcggtgaaccgttcaagcccaacaagaagtggcatgtctactacgccacagaggagcctgagcgtcctatggtgacgcttgagatgtgcatgacagagcttgacgttaagaaagctgctgtgttcttcaagaactccactggtggcagctgcacttcagctaaagagatgacgaagctctcggggattcatgagatcattcccgagatggagatctgtgacttcgagtttgacccctgtgggtactcgatgaatggcgtcttcgggcctgcagcctccaccatccacgtgacacccgaggaaggtttcagctacgcaagctacgaagctatgaacttcgaccccagctcactggtctacagcgatgtgatcaggagggtcctggcaggcttctctccttcggacttctcggtcgcagttaccatctttggtggccgtgggttcgccaaatcatgggcgacgggtgcagacatcgattcctacatgtgcggtgatcctgtagagcaagagcttcctggtggcggtctgctgatgtaccagagctttactgctgttccctctggctctgtatcgccgaggtcgaccttgcagacggatggctggagcagcgatggaatggagatggcctcaaatgacgagatgtgtattggctgctggaatgcggtgaagaaggtggtgaagaaagatttggatgcttaaagatttggataacttaggtggttcttcacctaagttatgaagaagtctgagacctctgtctctctgttcttttggtttcagttaagcagttagctgggctaccggcaatttgtttgcttaatatttttcctgttcaataagtactctggatggcttgctgcgtctgccatagtgagctgcatattgttgtttagtcatattgtttctgctgccgatgcccttgtggggagaatgatcttgtaacagacttgcctattcccgcaatatattggaaattttggttaaaaaaaaaaaaaaaaaaaaaaaaaaagggcggccgctcgcgatcggacgcgtggg

SEQ ID NO: 262110 - DNA, 309 bp, Zea mays
cccacgcgtccgagaagagccgccctacctattccttctcccagccgtcgagctgcccaacccagagcaccagcagccctcaccttcttcctctcggccggtccttcaaacgagcccgctcgtcttggagccgccgccggtctcgttctggacgaacgttcaaggagattgcatttgtggatgctctaatggagtcgaaaggtggcaagaagtctagtagtagtagtagtaatttcatgtacgaagctccccttggctacaagatcgaggacgttcgcccagccggaagaatcaagaagttccagactg

SEQ ID NO: 262111 - DNA, 1235 bp, Zea mays
cattatagccccggaatccgcggcgcgcccccgccttccgtcctctctcccgccacaaatcgccgggcgcccgcgccgccccagcctcccttgtccctccccccctcatcccctccgtgtcccggagcccagggagcggaggcgggcgggccggcgggcggccatggacgtggactgcgtctcgctgcccgacgccccggcgggcgacgtggatggcggcgccgcccggccgtggcccaaggccgtgaccaacggcggcgtccacgagctgctggagtgccccgtgtgcaccaactccatgttcccgccgatccaccagtgccccaatggacacacgctgtgttccacatgcaaggccagagtacacaaccgttgccctacctgcaggcaagagctgggcgacatcaggtgcctggcgctggagaaagtcgccgagtcgctggagctcccctgcaggtactactcgctggggtgccccgagatcatgccttactacagcaagataaagcacgaggcgcagtgcggcctgagaccgtacaactgcccctacgccggctccgagtgcggcgcggccggcgacatcccttccctcgtctcccacctgagggacgaccacaaggtggacatgcacagcggctgcaccttcaaccacagatacgtgaaatccaacccgcgggaggtggagaacgccacctggatgctgacggtgttccactgcttcggccactacttctgcctgcacttcgaggcgttccagctcgggatggcgcccgtgtacatggccttcctccgcttcatgggggacgagaacgaggccaagaactacagctacagcctcgaggtcggcgccaacgggaggaagatggtgtgggagggcaccccaaggagcgtccgcgacagccaccgcaaggtgagggacagccacgacggcctcatcatccagaggaacatggcgctcttcttctccggcggggaccggaaggagctcaagctcaggatcaccggacggatctggaaagagcagcagacaccagacggcgcatgtactccaaatctgtgcagctaattaagcaatcttcaaacacacacaccttgcctgtccttctttctctttctaattaatcgtggtggtggtgctcaaagggattatttattactaattattaggaggacgtaggatgctcgtgtaaatgaaactgtgtatattatatggatggcatggcatccctggcctt

SEQ ID NO: 262112 - DNA, 1401 bp, Zea mays
ggttgttccacgcgtcttctcacgcgtccggcctgccaccacgccgggcggggccgtgcccgccatacagcgacttcctgcagtcctgcgctgcgcccctcctttccgcctccacgctgccgacgtccaccacacagcacggtcgactcacccgatccctccatggcggcggcggtggcggcggtcgcggctgccacgacggcggaggacgaggcgcgcctgctgcgtctggaggagcaggcggagcacggcggcggcggcgcctgggactacctctgcctcgcccgccggctccgcgcccgccgtcccgcccacgtcctccgcgtcggcctcgctctcctcaacaacgcctccgctcgctccggtgtcgcctcagaacagtggacgctctacgagcaggtggccacggcggccatggattgccagcgtctcgatgtggcaaaggactgtattggagtcctttcaaagcaatttcctggcagcacccgggttgcccggctagaagctcgtctgtttgaagcgaaaggtgaatgggctgaagctgaaagagcctacgcgctgatcctggaaaacaatccatttgaccagattgtccacaagaggaaaattgctatcgcaaaagcacaaggtggtatgtcgatagtgattgattatctcaataaggatctggaattgtttatggctgatcatgatgcttggagagaacttgctgaaacatacagttccttacaaatgtacaagcaagctgccttttgttatgaggagctaatattagcccaaccaactattccactctatcatatagcctatgctgaggttctgtacactatgggtggcttggaaaatcttcagacagctaagaagtactatgcatcaacaatccagttgactggaggcaagaatacaagagccctctttggtgtatgtctgtgtacttcggcaatcaatcagttgacgaaaggaaggaataaagaggaagaggactcggagctgcagagcttggctgcagaggtactgctgaagaattacaagcagcaggctccatcaaaggcgccccttatcagcagcatgttgaagaacatgaaactcagctgataccaaccagctccacacattcagagtggcctgatttgatagatagttaagttaaattgatgtggcttaatatatgcttgtttttttatatataaaaaaattgtggcaccaacattgtgcaaggcttaaaagtagatgctcccaaggccatgggttgtacaacacctgcttgcttacctcgaaatatgcatggcttcttcagtggatgttctactatatagatcaacaaacccccgattgtacttgagcacaaacaaaattttgaatcagtcgctggtgaagttgtacgtgttgattttcattggt

SEQ ID NO: 262113 - DNA, 495 bp, Zea mays
ggccggaattccgggtcgactacgcgtccgcgaggaaccgaatgccctgtctcacgtcttcacccgtgctcgtgcgctgcgcccatcccttccgcctccacgctccccacgtgcaccgtgcaccgtgcacagcaccacacagccaggtccccatggcggcggcggcggcggttgcgtctgcgacgacggcggaagacgaagcgcgcctgctgcgcctggaggagcaggcggagcacggcggcggcggcgcctgggaatacctctgcctcgcccgccggctccgcgcccgccgccccgctcacgtcctccgcgtcggcctcgccctcctcaacaacgcctccgcgcgctccggccttgcctcagaacagtggacgctctacgagcaggtggccacggcggccatggattgccagcgtctcgatgtggcaaaggactgtattggagtcctttcaaaacaatttcctgggagcacacgggttgcccggctagaagctc

SEQ ID NO: 262114 - DNA, 615 bp, Zea mays
  unsure (1)..(615): unsure at all n locations
aagaatacaagagccctctttggtgtatgtctggtaaggccatgctagtgtaggaaaggcttgaagtctnagttgattctttctgtgttacccattggtgattctcacgcatacctttaacacccagtgtacttcggcaatcaatcagttgaccaaaggaaggaataaagaggaagagggctcggagctgcagagattggctgcagaagtactgctgaataattacaagcagcaggctccatcaaaggcgccccttatcagcagcttgttgaagaacatgaaactcagctgataccaactagctctacacattcagaatgtcctgattcgatagatagttaagttaaattgatgtggcataatgcttgttttttttgtggcactggcaccaacattgtgcaatggttaaaaagtaggtgctcccaaggccatgggttgtgtacactacacctgtttgcttgccgagaaatatgcatgacttctttttcattggatgttctattatagatctcaataaaccccggccattgttcttcagcccaggcgtaactttaactcagtcgctggtaaagttgtacctgttgattttgattggtaaaaaaaaaaaaaaaagaa

SEQ ID NO: 262115 - DNA, 173 bp, Zea mays
gcttgtttgcgttataaaaaaattgtggcaccaacattgtgcaaggctttaaagtagatgctcccaaggccaccggttgtacaacacccgaaaaatatgcatggcttcttcttcagtggatgttctactatatagatcaacaaacccccgtttgtgctcaagtacaatcgggg

SEQ ID NO: 262116 - DNA, 902 bp, Zea mays
  unsure (1)..(902): unsure at all n locations
ggaattcccggctcgacccacgcgagcgctctggagaaagcaacaacgaacccgactgtagtacacgagcacaaagcatgactgacagacggatacttctgctcatcagattgcactaacttcattggagaacgttctgacaaccgagtctaatggatatgatattaatcagaggaaaaatcgttattatgagaggagtcctttcgatgacagtcatatctgcagaggagttgccacctatggacattggcggcaaggctgacccatttgtggtcctgtacttaaagaagggcgaaaccagaaagaagacaagggttgtgacagacacgctaaatccaatatggaaccagacatttgatttcatggtagaagatgcactgcatgatttgctcatggtggaagtatgggaccatgatacatttggaaaggattacatagggaggtgcatcttgacactgacgagagttatactcgaaggtgaattccaagatacctttgtcttgcaaggtgccaaatcgggaaaactaaacttgcatttcaagtggacgccacagccaatctatcgtgatcgtgacagggatcagtgagacttgtaaacgaaaaaggccgataaacacttatccccaacgatgctatgtatattagtcgttctgtatttacacaaatcccacggttcttatagccacgtgaccaaaaagagatcaacccaccgacctgtattttctcctttgtgatgcaagtcagcaagtgcatggacctgtatatttgagtcgtgaatgaataggaaatgctgttactatgctgcaagcacatatatgcttagtggtaccgtggtggtggttgctcccaaaaaagggttaaaaaaaaaaaccaaaaaaaaaaaaaaaaaaaaaaangtaann

SEQ ID NO: 262117 - DNA, 930 bp, Zea mays
caaagttgacacttggtactgttgctcctcagtttactggtgtttcaatcttggagagtgatgattctgccatcatcatggaacttgagttgcaatgggatggcaatcccaatatagtacttgacatccaaacaacacttggaatttctcttcctgtacaggtgaaaaatattggattcacaggagtacttcggctcatatttaaaccgctggtgtctgaattcccctgttttggagctgtttgctgttctttaagggagaagagcaaggtggaatttaccctcaaggttattggtggcgaaatgactgctattccaggaatttctgatgcaattgaggggacaatacgtgatactattgaggatacactgacatggccgaatcgcataattgttcccattgtacctggagactatagtgacttggagttgaaacctactggggtattagaagtaaaactggtggaagctagggacctaaagaacaaggatcttgtgggaaagtcggacccttttgcattgatattcatagtgctcattccagatgggattccaatcattgttaatttgtggttgaggacatatctacgcagcacttgactgtaaaaatttatgatgatgaaggactccaatcatcagagatcattgggtgtgctcgagtagacttagctgatatacagccaggaaaagtgaaggatttatggttagatcttgtgaaggacctggaaattcaacgagacaagaaacctcgtggtcaggttcacctggagctcctctactacccttacgcgaacatgaacgggttcctaatccttttgctaatcagattcaactaacttcattggagaaggttctcaaaaccgagtctaatggatatgatattaatcagaggaaaaatgttattatgagaggagttgccacctatggacat

SEQ ID NO: 262118 - DNA, 728 bp, Zea mays
gtcgtggtcgagttccagcacggcggcacgctgaagacgctgctgtacaaccaccgcgacaagaagctttcctacaggaaggtcctccggctcgcgctcgacctcgccagagggctgagctacctgcactcgaagaaggtgatgcaccgcgacgtgaaggcggagaacatgctgctggaccggaagcggacgctgaagatcgccgacttcggcgtggcgcgcgtggaggcgcagagctgcgaggtgacggggcagacgggcacgctgggctacatggcgccggaggtgctgcaggggaagccgtacgaccacaagtgcgacgtgtacagcttcggcatcctgctctgggagacctactgctgcgccatggcctaccccaactacagcctcgccgacatctcctaccacgtcgtcaagctgggcatccggccggacatcccgaggtgctgcccgcgggcgctggtggagatcatgacgcggtgttgggacgggaacccggacaaccggccggagatgtccgacgtggtggcgctgctggagaagatcgacaccggcagcggcaagggcggcatgacgcccgtcgacgacgtcgcgcacgggtgctcctgcttcggcttcaaccgcatcgtcacctaggctagctctctagctcgtcagctcagacatcagttaaattaataataagctacagctaagtatgcatggccggccatgggcattgatcgatc

SEQ ID NO: 262119 - DNA, 689 bp, Zea mays
accggttcggaattcccggctcgacccacgcgttcgcggacgcgtgggcagccaagaggttcagtctatggcaaatttgatgacatcgtactactgtcagatggagaaactgtatacatgggacctgcaaaagaagaacctctaacatacttctcatcattagggtaccagtgtccagatcatatgaaccctgccgagttcttggctgatctcatttccattgattatggctcaactgaaagtgtacagtcatcacagaaaaggatcgaggatctcattgaggcgttttctaacaaatctgtggtcactgaaggtaacaatctaattgcaattccagaggatcctgaattgtctgccaaacttgttcggaagactacagtgaagaaaagacatggttggtggaggcaatttcgtttgctttttaagcgagcatggatgcaggcttttcgtgatggaccaacaaacaaagtgagatcacgaatgtctgttgcttcagcagttatatttggatctgtgttttggcgaatgggaaaatctcaaacatccatacaagacaggatgggactacttcaggtggctgccataaacacagcaatggctgcattgacaaagactgtgggagttttcccaaaagaacggagtatagttgacagagaacgagcaaaaggttcctatgcacttggaccata

SEQ ID NO: 262120 - DNA, 642 bp, Zea mays
cgtctcgcgtccacttcccgcgtctagtcctctcctcgcgtgcctctcgcctccggcgccccaggccgtgcttgcctgccgcgcccaccgccggtccgcgctcgcgcctacacggagcatcaggagttcaggcgcggcgaacaggggggagaagcagccaacctcgctcgctactcgctagcctagtcggcggttgccatggggatcggctacgtagtgggcgttctcggtggcgccatcctcgcccacgccgcctacgccaccatccagtaccgggcggtgctcaagatcacggaggaagagttctcgcggccgcccatggatgtgatgatggagttgctcctagggttggccttgtgcatgtgggcaggtcttgctgttcccactaaatttctctcggtgcttccacattctgatgagaataggatcgtctcgctcccggctaacctggatttcatgatcttcaaccaccgtggaagagcgctgccgtcagactcagacctgaaactccatacatagacatgtccagaatccagatcttttttctttattctctgtaaggccttgttcggttattcctattacacatggattagatgagattggaaaaaattaaaaatacatttgacttgcttgagattt

SEQ ID NO: 262121 - DNA, 417 bp, Zea mays
ttttctaatccatttgtcaccatgcgtgcaggatcgtctcgttcccggctaacctggatttcatgatcttcaaccaccgggaagagcgctgccgtcagactcagacctgaagctcaagacatagacatgccgttccagaatccagatcttgttccttatttcccttgtaacctggaggaggttccaattttgtgcccgtttgtttaggggggaaagaacttttcctgaattcagatcacaagtagcttatctatgctgtaactcgataatttgtggcgtcttaatttctactatctgtatggaggtgattcaagcttttgttgtagtccgagcagatcaatcctgtgattaatcagtagcttttgttacccttgctgacgttccagttaacgaaaactaagagcctgtttggttggc

SEQ ID NO: 262122 - DNA, 542 bp, Zea mays
ctttccacttcaggcaactcaagtgatgaaaggtctattgcaactagcacgccagatgcaaacctatcaaatgagaatgtcattagtggcataactcctgatatcatggaaaaccatcttgctgaaatgcagtatcagaagttacctcggaattttgtgcagtgggttaatcacggtgataccttttggtactaagatcgcaattactggaattcaatatgtcgccagcttcacagggtgggcattaacacggatctgagtagtagattatagagtgatatggatgctgcggcaaggcatttctcccgtgatatactccgcaccatccccaaagtcctttattggtccacgtgtttttacaatgggtgagtagatagatatctttctgttgaaagaaaatagagatgataattaggcttattattgttgacctgaaattgtcattattcatgggaacatgtcagattttcttgtgtgaatacagatgcttggggggcccgacaaaaagcgaatagagataaaaagcaaaaaaaaaaaacaaa

SEQ ID NO: 262123 - DNA, 1043 bp, Zea mays
gcacggtgcacgcacctgtcgacggccccccatcgaactcgcaccctcgctacgccgatccgtctcttctcccctaatcctccttccccgatccagtcccgcagcaacgccgagggagagcgaggagagacagatacagatcgcgcgctgagatgtcgtcggactcctcgtcgtgggcgcgcgccctggtgcagatctcgccctacaccttctccgccatcggcatcgccgtctccatcggcgtctcggtcctcggcgcggcatggggtatcttcatcacggggagcagcctcatcggggccgccatcaaggcgcccaggatcacatctaagaacctcatcagtgtcatcttctgtgaggctgttgcaatttatggtgtaattgtggcaatcatcctccagacaaagcttgaaagtgtgccaacatcccaaatgtacgatccggagtctcttcgagctggctatgcgatctttgcatctggtcttatcgttggcttcgctaatcttgtttgcggggtatgtgtggggataatcggaagcagctgtgcactgtctgatgctcagaactcatcactctttgtaaagattttggtgattgagatcttcggcagcgctctgggactgttcggagtcattgtgggcatcattatgtcatctcaggcgacatggccagcaaaagcttgatccttaccgttagtgctctgtatattattcggatggaatgtatcggaatatgcatgcggtccaacggactttccctgttcttttttcttttgcatcttttcggcaaaacacgaaatgttgcaagcgttgcgctaccgattgtagagttgctattccaaatgccggagcgttccaatgtgttacgatatcttgtaggtgctattgcttttgtaagacatttggcaattggcgtattaaataaatgcttgaactgaataagattagcaattattgttttctcaccctccgtttaaaaaaaaaacccacaaaaaaaaaaaaaaaaaagggaatataatagggcggccgatcgcgatctagaac

SEQ ID NO: 262124 - DNA, 446 bp, Zea mays
taatcttgtttgcggggtatgcgtggggataattggaagcagctgcgcactgtctgatgctcagaactcatcactcttcgtaaagattttggtgattgagatcttcggcagcgctctgggactgttcggtgtcattgtgggcatcattatgtcatctcaagcgacatggccagcaaaagcttgattttcaccattagtagctctgtaaattattcggatggaatgtatcgaaatgtgcatgtggtccaactgcattttcctgttccttttctgtggcgtcttttttggcagaacgcgaaatgcggcgcgcgtagcgccaccgattgtagagttgctattcctactgccggagtactccatgtgtgttggatatcttgttggcatattaaataaatgcttggacaaaataaaatgattttttgcccattaaaaaaaaaaataatatt

SEQ ID NO: 262125 - DNA, 655 bp, Zea mays
agggcgatgataaggagtcactcagctgaattacttcgggatggcgtatcactggagcaaataggtcttgatttttctccagaactcactgaaacaactgctccagattccatccggatgcttgttcaaacagttctctcagataagaaaccagaagaaattcaatcagttgtagaatcactcttgagcaaagtaattaatgaacttgagcaccgtattgcaagccagaccgacgcggccgaagaaactatggataccaacggctgtaactcagttttgagaatggagtctccctgtaacaccggggacagtaaatcattatccagagtggaccctccacaagtggagttgacttcctgcagtgatctggagaaggtgaaagaaactatggataccaatggctgtaactcagttttgagaatggagtctccctgtaacaccaatgacagtaaatcattatccagagtggaccctccacaagtggagttgacttcctgcagtgatctggagaaggccactgaaaatattaagatggacgaagttgatgagaatgcgttgagtctgacagaagatgtaagcacattagtacatgcaccactaagcaatgataatgtaaataaaaatatgccaaagccagtgagaaattttgatcgag

SEQ ID NO: 262126 - DNA, 1455 bp, Zea mays
gagacggtcggaattccgggtcaccacgcgtccgggacggtgggctttgacaagggaaaaaaaccaggtctgtgtgtgtgtgagagagagagagaggcgaaggcaactcaggcgacgcgatggcgatggcggcgctgcgacgcgaggggaggcgcctcatcctctcctccaccgtccccaacccgtctctggcggccgcttcctctgcggtgacgcgatcctccgccgtctcgcaaccggagatggctccacttggtgcacggtctatttcaactcaaatcgtgaggaaccggatgaagagtgtcaggaatatccagaagatcacaaaggctatgaagatggttgcagcatcaaagctccgggcagttcagacaaggactgaaaattcacgtggcttgtggcaaccgttcaccgcccttcttggggatgctcctagtgttgacgtcaagaagaatgtgattgtggccattacctctgataagggactctgtggtggtattaattcaacatcagtgaaagttagcagggcccttcacaaattgacatctggtccagaaaaagaaaccaagtatgttatattaggagaaaagggcaaagttcagctgttgcgtgactcaaaggacagcattgaaatgactgcaactgaactgcagaagaaccctatcaactacacacaggttgccgtgctcgcggatgacatattgaaaaatgtggaatatgatgctctgagggttattttcaacaagttccaatctgtcatatcgtttaagcccacaatggtaacaatactttcccccgaggttgcagaaaaagaatcagaagctggtgggaagatgggtgacctagattcttatgagattgaaggcggcgagacaaaatcagagattttgcagaatctagctgagttccagttttcttgtgtcatgtacaatggtgccctagagaatgcatgcagtgagcttggagcccgtatgtctgccatggacagctctagcagaaatgctggcgatatgcttgatcgtctcacgcttacttacaacaggacacgccaagcatccatcaccacagagcttactgagattatatctggtgcatcagcccttgaaggataggtgaagagactatgtggacttctccctttttccccatttgtgttcctctcacatgaaggcttcttttcttccggaggctcagtttcaacccttctcgtttcacttttccttgataaacgtattctcatgctttattgcaataattaggccaacgacagtgatgatgccgtgcgcctttgcatattgcaaaaagaatgttctacatctatggtgaatggctggttttcataaatggtgatgatcaatatatgtatcttgcacatgattagcaaaaaaaaaaaaaaagggcggtgagccatataacgatatagtcattaataaaaaaaaaaaaaaaagggcggcc

SEQ ID NO: 262127 - DNA, 538 bp, Zea mays
ctgacgcgtgggaaaaaggatatctagtcggttaacttcaatgcaattctggactcttctaggcccaaatgaaattctctgctgtaacagtcaagagtataaaaattgatcatcctctttgcaaagcagctgagtgcctgagtctttgtgacatcaaactattgagtatatgataaactgatgctaggaagacctgaccatttgtgtgcttccaatcgttttcttagtagcacttggattatgaaaatatgtcttagcatgttgttgggttctaactttagcttccttagatgtcaggaatgtattgtttctgtgatgaaatttgtgaatacattcactttagtacatttttttatataaatatagtttcctttgttgctctgaagtttaatgctttcaattgaatgaattgcaggttgccgtgctcgcggatgacatattgaaaaatgtggaatatgatgctctgagggttattttcaacaagttccaatctgtcatatcgtttaagcccacaatggtaacaatactttcccccgag

SEQ ID NO: 262128 - DNA, 440 bp, Zea mays
gattatatctggtgcatcggcccttgaggggtagtgaagagactgcggacttcttccttttgccgtttgtgttcctctcccatgaaggcttttttcctcgggagtctcagtttcagctcctttcatttcacttttccttgagaaacttgctctcatgctttgttgcaataatcaggccaacgacaatgatagtgccgtgcacccttggcacattgcagaaagagtgtaaacagctatggttaatgggtggttttcatgaatggtgatgatcaatatatgtattgttgcacatgatcagcaatgttgtattggtggggtgactaatgcctgccgccaaactgagcgatataacgcgtcattaatgacatttgttcaatctggactttaaacaaaaaaaaaaagggcggctgctcgcgatctagaactagcggacgtgtggg

SEQ ID NO: 262129 - DNA, 1312 bp, Zea mays
cccacgcgtgcgcccacgcgtgcgctcactcgtccggacacgcgtgcggccaaaatgcacaggttttcactgcattgaacaatgcaaagaaatctgctacgtcgaatggcactggatttgctgggcgtaagagtgttcgatcttcccagcattttgggtatagtaaggacaacttcaattgggtggatgatatggacatttcagacagtgagcactcggatgagttagagaatatgagtgatggatccgattcagactgggtacagtcgaccaggaaagccaaaaaacaccagagaagagtgtctagccattcaaatcctaacctggattgtcaaaatacacaaggcaatgcagaaccagagaagccctcagatgaaaagtgcattttgcccaaatatatttcatcagacggctgttcatgctcaaaatcctcctcatgcaagaccaacaaatgcgagtgcagaggctcaggtgcacaatgcggtgcaggctgtggttgtaaggattccaaatgttctaacagggattcttctatagaaaaagccaatcagggagccatgcttcttcagaacgcgttttctgagaaggattcccaagatgcaaagccaaggaagcctttgattaacattggtaataatatggttaaccaaactgccgagacaaagaagcccaggaaaaactggcgcaagtcgacaattcaactcgtcccaggacctctcctgccgtccgagccagtggccaccgaagctgcccctcgggacagagccgacattcccctcaagctaccgagagccatgtcctcggtgactcctgtggagagcaaccctcctcccctcacagaccgcaatgctgccaaaccggacgaatcagtgagcaccggcagcaagaatagcaccggagctgcagtcacgagggcaccgtctcagctgagaaaaaacgcaaccaccgagaaggagaaccagttgcgataatccgattgctgacatgcagtatccgtgtcgcttaaggccttgttcgtttgtgccggattggtgggtcggaacgattcgtaatcggattgcttctctaatttatataaactttgattagctggaacgattccgggtgcaatccgacgcaaacgaacaaggcctaagcttctgtttaacagctggctcagtgtggagaggctgcctcggcgtcctttggagtggcatgtagactctggaagggctggcgctgtggggaatgacgtgttctgtggaaagccttagctctgctttggctggaatgctaccttgtataatggccaagtaacatgctggattaagct

SEQ ID NO: 262130 - DNA, 860 bp, Zea mays
aagcagaagtgcaaactcaacattcagggatcaaataccgcaggtggtaggttcatattccggttaacaaactcatggaacgccgtatgttcatgtgccattgcgatgccacatgaacgtcagttcaagataaccagttaggccttgttcgtttctatcggattggtgggttggaacgattcctagccggattacttctctaatttatataaactttgattagctggaatgattccggttgcaatccgacgtaaacgaacaaggccttaatcatccccaacatacatcataagctacagttttcaacagagacctggcttccggttgggcggtcacttggggttcctcagcacgatgatgaccgagtcgcccctgaggaacatcttgctgatgaatctatccttgttcacaggcagagccttctttttgcccttgccagtcttggggacctctgtccacatctcccgcacgttctcgagcaccatgttacagtggcgatcaaaagcacgaacacggccaagcagcttcttgttgttgcggcaattgatgaggacctgggtgttgttcttaacactcatcattaggactgacagagggcctgtgctaaattcctcctcctctttctttccagcctgattctcatccgccatcgagcctccgccctccttttccgcgccggtggcgagtcgctccggtctccgggtggtgttggtgcgctccaagaggtgaaaacctcggaatttttgggcgtgcttccctccccgttctcctacttctgcggtttgagcggcggcgtgaggcaggagtactgggctactggctgcgctgctgttgccgacgcaagagagaggcggtcgtag

SEQ ID NO: 262131 - DNA, 583 bp, Zea mays
aaaaaaaaaagaactgcatgttttaagacagcctcgggaggcaggcgagcatcccatcccatccaacatcaggaggcactgcatgttttacaaaagaagcttctcacagaacaaaaacttccttatgcacaaacggacacagagaagcccaagaatggttctgggaacacctcccggcaaaggcacaagaatgaagaagcaatctgaaacgcccgcgcctgccggcaaaacaatctggggaagcctaaaaatcagctataacaaattcccagagactaaggccttgttcgtttgtgtcggattggtgggtcggaacgattcttagccggattgtttctctaatttatataaactttgattagctggaacgattccgggtgcaatccgacgtaaacgaacaagccctaaaggattttgcacgcgcctctgcatgaacccccacctgaactcggcaaagaattgtaggagagcttcctcaccggtcaccgccgcttcctccagctggtcgatcgcttgtcgcccgacagtagtctagggaggttcaggagggaattcacccgtgtcacgccttcgagcgcggctc

SEQ ID NO: 262132 - DNA, 690 bp, Zea mays
aatataacttttattcactgggtgctgtctgaaacacagtaaacctaatactgtactgcaacacggcaaaagcagcactaaacgtccttctataccatgtacattgcacccccaatagaacagactgaatgccaaccaactcactcagattcctgggctgattctggaaaatgagctctttcgatctgccgtgtgatctgtgaaacagcatactgcgagccagttgatgccgcgtagtaagacgtcactgtgagctgaacaaaccttggaagtgcatatgcaccaaatacagcactggcacctgagaatatcagcagtggtggcaccccaacgagcaactgcagccacttcggccccttgacatgcttctggacaaaagggatccctgtgttaaacccgtgcacagcactgagcaaagcgccggcaccggaaccagccacggcagtggcgtcgtgcaggacggaggtgatggcccagtccctctttcccgcggtggggttgaggagggagaggcatcgcgggcaccggggcgagccgaggcctgggttgatggtgggatcgcggtggaggtgcgcaccgctgcggagcttctcctcgtacacctcccgcgtgcccatgccgattgctggagagggtagtgccgccgccgccgctcctgttcggttgtcgggggaagtttttgctcgagcc

SEQ ID NO: 262133 - DNA, 423 bp, Zea mays
gggaacaaggtttcagaagattacaatcctgacacttccccaagttgtagcagagttggaatgtcatgaaaactttaattcatccagtcctgtcccggggaacaaggcttagccaattctgccccgttccgggtaactgagattaatttgtccatgctgtaatgtttagccagtcctgccccgttccggggaactgagagattgtctttatcgcaacattaacggctagcggttagtatcatcttccagtcacctggaatgttactagtacaacccagttgtctgtttcctgccgcttacatgtaaaagtccatattcaagttttacggaaagaaacatgttctgtcatttattacaaaataaagccaaataaatataccagctgaaaaagtgaaaacctgcttttgactatgatcatgaaga

SEQ ID NO: 262134 - DNA, 593 bp, Zea mays
tggacaaaaggatccctgtgttaaacccgtgcacagcactgagcaaagcgccggcaccggaaccagcctacaacaacagcacaaacagggtaacgcacacaatttagcagcaattttcctaaggccttgttcgtttgtgccggattagtgggttggaacgattcctgaccggattgcttctctaatttatataaactttgattagctggaacgattccgggtgcaatccgacacaaacgaacaagcccttaggttattcttgtagcttggtgtatttgcaaagctaggaatggctgcatctttgatgaagcctctcctagggttcttgatgttgttcaaaacataaaggatgaggctgaaatctggtgcagggctggtgctaagggacttgctgcaatctggtcaggttagtgtggggtccctttttctttctgtaatgggtgtttgctagtgtgtgtgttcttgccctcctgggcttttgtactttggaccatttttgaacttctctccttaatataatgatgcacaactctcctgtgtgttcgagaaaaaaaaaactataggtaaaataaagatgtagccagtgctgaaag

SEQ ID NO: 262135 - DNA, 769 bp, Zea mays
  unsure (1)..(769): unsure at all n locations
ccttttcgtccgagatttttgaaatctggcgtctaccttgtactggagaaacttgaacttcaagtctatcagagattagttaagaaaatccacatcattcagagacagaaggaaccagctaaggcacatcagattaagctagatgttgtcgtaaaagctctgaaatggcttgaaatcgacatggatgtggatgaggtggagtgcatcatggcatgccttatatacaagaaccttataaaagggtactttgctcacaagagtaaggtccttgtcctcagcaaacaagaccccttccccaagttgaacgggaagcctgtttaaatacaattgtcacggagaaatcctgtaatacaatgattttttttttgtttagtatgcagagatgctttccatattaagtgaaactccaagcctgacaaggacatttagggcctgttcggttataccggaataagccaggattcattctagctcatcaaaaatctatataaggccttgttcgtttgtgccggattggtgggtcggaacgattcctaaccagattgtttctctaaattatataaactttgattagctgaaacgattccgagtgcaatccgacacaaacgaacaaggcctaaattagagaagtaatccggctaggaattaatccgggactccaatcccaaacaaccgaacaaggccttatatttaatcacctctggatgtaatggaccctgtatctttgaaacccacaagactttcattttccataaaaaaaaantattna

SEQ ID NO: 262136 - DNA, 442 bp, Zea mays
gcatggcccgggaattccaaaggtccaaaacaccgggtggcagggaacaaggtttcagaagattgcaatcctgacacatcccccagttgtagcagagttggaatgtcatgaaaactttaattcattcagtcctgtcctcgttccgggtttagccaattcttcctcgttccgggtaaggccttgttcgtttgtgtcggattggtgggtcggaacaattcccggccggattgcttctctaatttatataaactttgattagccggaacgattccgggtgcaatccgacgcatacgaacaagccctaactgagattaatgtgtccgtgctgtaatgtttagccagtcctgccccgatccggggaactgagagattgtctttatcgccacattaacggctagcggtcagtatcatcttccagtcaccttgaaaaaaaaaaaaaaga

SEQ ID NO: 262137 - DNA, 448 bp, Zea mays
gagaatagtctggatttcacaggacaaccaaaaaaaaagaactgcatgttttaagacagcctcgcggaaggcaggcgagcatcccatcccatccaacatcaggaggcactgcatgttttacaaaagaagcttctcacagaacaaaaacttccttatgcacaaacggacacagagaagcccaagaatggttctgggaacacctcccggcaaaggcacaagaatgaacgaagcaatctgaaacgcccgcgcctgccggcaaaacaatctggggaagcctaaaaatcagctagaacaaattcccagagactaaaggattttgcacgtccgcctggctatgaaaatgccagtactggggttgagccgcgcctctgcatgaacccccccctgacactcggcaaagaattgtaggagagcttcctcaccggtcaccgccgcttcctccagccgt

SEQ ID NO: 262138 - DNA, 520 bp, Zea mays
tacagacccaacaccattccctttccctgatctcaattacaggttcagaaattcagccaaaaagccttgcacaaatccaatgaagttccatttcaattgaaacaaaagaatcaaccttacagtttattcaagacatgaagtacccttgaggccttgttcgtttgtgccggattggttgggtcggaacgattcctacccggattgcttctctaatttatatagactttgattagctggaacgattccgggtgcaatccgacagcaaacacgaacaagcctcagctgcgtgatttctggctgcaataaatcaataaatcatgaactcatcgaataagttactccaagtggtgttgacggctcagcagatttcatatgccgagcagatggcgtgcagacccgaccccttgaaggaaccagagaaccaaaaattggagtttgttaattcattccccagatcaacattgcgaatttacggccagtgaagcagcgaataaggccccgtttgatccggacgcgtggg

SEQ ID NO: 262139 - DNA, 534 bp, Zea mays
gggaaaaagccatcgcacagcattcagctttatacaaactacaaactgcccaacactgtcaaggcttttaagcacaactattaacagacaactcctggccatagtctttcacaagtgctttaaacacagaggcacagcaaattagctgcacgtacttgtttcctttggcgataaggccttgttcgtttctgccggattggtgggtcggatcgattcctaaccggattgcttctctaatttatataaactttgattagctggaacgatttcgggtacaattcgactcaaaagatcaagcccttagtcagctgttaacattcttttccccctcataaaagaactgtacattccatcaacggtcgatgctgttgtacgaccagtagtatgcaatgtggaaccaataagctttgtatgcatcgtctaaaaccccttcatgtgtaaatctgaacagaacggtcaagatgggctctggcatagtggcgctgaccacaacgctattaacccaaattaattttatatcaatccgttgtgctc

SEQ ID NO: 262140 - DNA, 327 bp, Zea mays
ttaatagcacaatgcacttaagtttctagcaaaataactggagggaaacaggatcacttgcatgagaacctgggtgtcgttcttaacactcatcattaggactgacagagggcctgtgctaaattcctcctcctctttctttccagcctgattctcatccgccatcgagcctccgccctccttttccgcgccggtggcgagtcgctccggtctccgggtggtgttggtgcgctccaagaggtgaaaacctcggaatttctgggcgtgcttctcttctctctcatgcggtttgagcggcggcgtgaggcaggagtagtggcgtcgcca

SEQ ID NO: 262141 - DNA, 574 bp, Zea mays
tatatatatggtgtgtgtgagtgtgtttggaacttggtttaatttgtgctatcgctaaggcgtcgtcgttgactttctaaagggatttgatagtgttaatttgcctgtttgggccgataaacaaaccatgcgctcgtattgcacggcacggctggtacagtagttatacatgacgagtctaaaaccgtgctgcactgcacgtgtcgatacggttatcgtggccgtgtaaggccttgttcgtttgtgccggattggtgggtctgaacgattcctaaccggattgcttctctaatttatacaaactttgattagctggacggattccgggtgcaatccgacataaacgaacaaggcctcagcctcttccaagtcccatcactgctcgctcacagactggtcccacgtggcgagactgtgctgcctgtgactgtgaatacatgtgcttgcgcatccggaaaatccatctgggcagtctggcagcaggccactcgctcctgccggcgacacgctgcagcagtcaagtttcactgacatgtggaccagccaggggcgacgtgatgtggctccggacgcg

SEQ ID NO: 262142 - DNA, 674 bp, Zea mays
atagaaaaacttaactaaaactctttaaacttaaacttaaaacttcgtaaatattaatttaactttcctcagcaaatataaatctaaaatagtgctaaaaattatacaagtggttgttacatagccgtcctgattcggtcactcaggctggcacttcaacacacgaagttagcacgactgtttgtcaccataaggccttgttcgtttgtgccggattggtgggtcggaacgattcctagccggattgcttctctaatttatataaactttgattagctggaacgattccgggtgcaatccgacgtaaacgaacaaggccttaactgatttctcatcccttgggctgacggaagcttgatttctccgttggtgatgctatggatgtgatcagatcagccatttgcaagctgattgcagccacggatgagtattgtggcagcgggcaatcccaaaatatagctctcttgttataggttagtttattatgagtagcattcggcttatgtttttctggaccgtccccattatgcattagcttgggctgcttggctgtatgtaataataagcaacattctgcttattatgatttgcattctcttggaggcttagtttggaaacttaaatcctctccgatatttccaaaaaaaaaaaaaaaaaaaaaaaaaaaaaaaaaa

SEQ ID NO: 262143 - DNA, 412 bp, Zea mays
gcatcgtaaactaacagtttcaccagagcctataaagatgcatcgtaaactaacagtttctcaatatggacttctggcttctgtattcctgtgggctggtgcactgcggaaggcacccccgctcaggccttgtttctagtctggttatccactcaggccttctattttgacttgtactttgaaagttgaatagagttaggccttgttcgtttctgccggattggtgggtccgaacgattcctgaccggattgcttctctaatttatataaactttgattagctggaacgattccgggtgcaatccgacggaaacgaaacaaggccttatgcctggacgtgtactgtggcatggcggtgccgtccggtttatcccaatttcgggcacacctgccagctatttatcactaagtg

SEQ ID NO: 262144 - DNA, 974 bp, Zea mays
gtcgcgagggccgcccttttttttttttttttttttgtttttttttttggttttttggttttttttttttttttaaccgaatcaccgactttttctgggctaactgaaacgtttttctttcagggaaacgtcaagcagctgacagattaaacaaacagcaacaccacaaaccatatagaagtatggttaatgaagcagcatcagatattaaagaaacagcatcagataacgaaacggtcaggtagaaaccagacacaacggacttcacaaggtaatacatgagttcaacagggcacaatggtcctcaaaagtccattcatacttgcgacttgactggttatttaggtgataacgatttggggtccggcacattcaccagtttggccagcttttagccttgcttctagcccatggcatacttctgtgtccaggagcgtgcggtggactcatacttggccctgtcggtcttgtacatgtgagcaatctcagggacaagaggatcatcagggtttgggtccgtgagcagtgagcagattgacaggagaacctttgagatagttaaagcaggactccactgttccttaagaatgtcaaggcaaatgctgccgttgctgttgatgttcgggtggaaaaccttggtgcggaaagacacctttggtggcttgaaagggtaatccggtgggaagtgaatgttcaccaagaataccccacctgcaaatgggctgtccgaaggccccatgatggtcgcttgccaatggaacatgtcctcaccaacaggacctgcgctgcaggaggtgggcgggtccttctgcaggtccttcaactccttcaggatcctcttcgacgccatcgatcaaacccgatcggtgccgggggaggcaggcgggggtggcgcggggtcgatgcagcggccgcctctatctcttctccgaggcgcgcggcggcgacggaacgggaggaagcgaggagtcggg

SEQ ID NO: 262145 - DNA, 523 bp, Zea mays
gcggccgccccttttttttttttttttttttttttttttttttttttttttttttttttttttttttttttttttttttttttttttattaaagaaacagcatcagataacgaaacggtcaggtagaaaccagacacaacgggcttcacaaggtaatacatgagttcaacagggcacaatggtcctcaaaagtccattcatacttgcgacttgactggtttatttaggtcataacgatttggggtccggcacattcaccagtttggccagcttttagccttgcttctagcccatggcatacttctgtgtccaggagcgtgcggtggactcatacttggccctgtcggtcttgtacatgtgagcaatctcagggacaagaggatcatcagggtttgggtccgtgagcagtgagcagattgacaggagaacctgttaatacagaacagaacagatcagtaaacagacatctatcttgaacatactgttctcaaggaacataaccacaatatctcattagctaacc

SEQ ID NO: 262146 - DNA, 675 bp, Zea mays
tcttgatcgcgagcggccgcccttttttttttttgtttttgttcaagtgagatattcaattgttcagatattcaaattctttgaaaaactcagcacaaacattcaaatgttcagatattcaaattcttcgaaaatgttcagactttagacaaaaagtaactctaatatagcagcttcacacacgcacaggggacaactccgaaactgagtgggcagaagacttaacacggtcgaaaagctaaagcctatgggcgagcagcaaccggtgctggagctggagctgtagcagcagcaccaggaccagggcgggggcctccttgtccaccagcaggcctatcctccctgcgcctgaagcgctccggcggcttgcggtccctgcgcttctcacgggatcggacgcggacgatgtgagcgtggatcgcgcacgagacgcagtggtgcaccttggcgtacagcttcgggaggacgtagccatcatagacgcatgcttcctggacgtccctgatggccgcctgttccacgatgttcctcacctgaaacctcttgatcgccttgtccttggggcagcacttggcgcagtttgagcaccggatgtacttgacgtgaccgcggccatgcttgttgcggccgccgttgcggcgcttgaaggtcatggcggcggcgcaagaggtcgag

SEQ ID NO: 262147 - DNA, 606 bp, Zea mays
atttaattttaagcgccccaaaaaaaaagatatattttcacaccccccgggttaaaaaaattgattttttaaaaaaaccccccccttatttattttttttttatttctataaattaaaaaaaatttttgtaaaatttatttttttttttaattttataaatttataattttttttttttttttttattttttttttttttattttttttttttttttttaagccatataacgttcaagtgagatattcaattgttcagatattcaaattcttcgaaaaactcagcacaaatattcaaatgttcagatattcaaattcttcgaaagtgttcaggctttagacaaaaagtaactctaatatagcagcttcacacacgctcaggggacaactccaaaactgagtgggctgaagacttaacacggtctaaaagctaaagcctatgggcgagcagcaaccggtgctggagatggagctgtaacagcagcaccaggaccagggctgtagccttcttgtccaccatcaagcctatcctacatgcgcacgttccacttcgaccgtttgctctctatgcgctgctcacatctcaacactgataccacctcatatg

SEQ ID NO: 262148 - DNA, 402 bp, Zea mays
ggtttgtcacagctagatgcacatatggcagcaattgtagtacgttgtcatagtagttgcagggtcaccggctatctgctggtagattgatagtttgatgtcgtgtgtcattttgtaagttaatatgttgaagcatggatacttgtcatcgattccgtatacaaatatgttgaagcaaggtgtgccctcagaggctaataagattacaacaagtatttatgatttgaaaccaaatccatacgaaaagaaagaatgcctaacacataagccatataacgttcaagtgagatattcaattgttcagatattcaaattctttgaaaaactcagcacaaacattcaaatgttcagatattcaaattcttcgaaaatgttcagactttagacaaaaagtaactctaa

SEQ ID NO: 262149 - DNA, 1060 bp, Zea mays
  unsure (1)..(1060): unsure at all n locations
caacagtcgcaacgtcgtgacggtttttaaggctcaaaacggtataagcaagtacaaaattatccagcagcatatgccgattataagggaaacctcatcgaggctccgaaaagaacaagcatgaaaaattgatccaacccgtatggaaacaccactctctcctctccatggaaaactaacacctggaaagatcccatgcctgaggcaccttaacatgggggcatgttaacaacatttgcaaagcattcttggcactcgatcagcttcacgtggctggtgccggtgggggaggcatgcttgctcttgccaatccaacccaagcacaaatgcccgcgccaaggatcacccatccacaaacatcgtaccagaactcgttgtccttcttcttcttcttcttccttgattgcgttggatttgaggctgaggatgcttgtgttgccgcttgagaagccatttgcctgtggatctccgagtgcagttcaggtgccttcgctgacaagtctaatgacttcctgtacagctcatttgcaggttccacatcagcagccttctggaaacattcagttgccttcgcaaagaactcatttgccattgcagtgtctggagtgaagaatccatgagaagtctgagcatttcccaagcaccagagtgcatcagacttgttgggatcaatttgcagtgcctcctccagcttggcttccgcatcttggaggagcttgaggctgtcggggccggttcggacctgcgacagctccagcagcgcgccgccccaccgcgtcaggttgtcggcgtcgttggggttctgctcgtacgcgacctcggagttcttgcaggccatctcgaagaagaacagccgctcagcgtcgctcatccctcccatctccatggcggccggggtggggttccgcgctccggcggccggatccgattcggggggttagggttttaggctctcctcttcctgtgccccgtctcgcttagaattggggagagccggagcgcgatggttggcggtaggacgtggcgtgctggttttcagcggacgcgtgggtggncccgg

SEQ ID NO: 262150 - DNA, 433 bp, Zea mays
  unsure (1)..(433): unsure at all n locations
gttctagatcgcgagcggccgccctttatttttttttttagtcgctactctgtttgttctttgcctcaaaacggtatcaaggtaagcaaagtacaaaactatccagcagcacatgaggctcgaaaagaacaagcatgaaaatttgagcaaaccgtatggaaacacctctctcctctccatacaacactagcacctagaaggttctgggacaccttaatataggcatgccatcatttgcaaagcgttcttggcactcgtcactcgatcagttctcacctggctggtggcgtcgggggaggcatgcttgctcttgccaatccaacccaagcaacaatgccggcgccaaggatcacccatccacaaacatcgtaccagaagtcattgtccttcttcttccttgattgcctnggatttgaggctgaggatgcttgtg

SEQ ID NO: 262151 - DNA, 431 bp, Zea mays
catttgccattgcagtgtctggagtgaagaatccatgagaagtctgagcatttcccgagcaccagagtgcatcagacttgttgggatcaatttgcagtgcctcctccagcttggcttccgcatcttggaggagcttgaggctgtcggggccgttacgcatctgtgatagctccagcagcgctccgccccatcgcgtcaagttgtcggcgtcgttggggttctgctcgtacgcgacctcggagttgttgcaggccatctcgaagaagatcagccgctccgcatcgctcatctccgatccatggcggccgggggcagggttccgcgttccggcgggcggtgggatctgattcgggggctagggttgcttaggctgcctcgtctcctttagctttcggaagtaccggaacggtggagcagggttcaccaaagtg

SEQ ID NO: 262152 - DNA, 367 bp, Zea mays
ggctaaaaaaaaaacaaagcatacatttatttgcggggttgaacagcatgtccacttttatgtatggcaccatttgagaacattcagtattcatagagaacgcaaaaagtcgcaacactgtatgttttttgcctcaaaacggtatcaaggtaagcaaagtacaaaactatccagcagcacatgaggctcgaaaagaacaagcctgaaaatttgagcaaaccgtatggaaacacctctctcctttccatacaacactagcacctagaaggttctgggacaccttaatataggcatgccatcatttgcaaagcgttcttggcactcgatcaattctcacctggctggtggcgccgggggaggcatgctt

SEQ ID NO: 262153 - DNA, 636 bp, Zea mays
aatatggcccacgacctaacgaaactatttacacaaatctcccaaaatgtatcgaccgaggcagcagtagtatcgtcaccaaggaagagggccgaagggcggaggaaggcgggtataaaatttggcgggttctcggttccgccggcgaagcgtttacttcttcggccgcgatctcgaggtcggagggagcgaccgagcgggaagaaagaggggggcgcgcgcgcgcccatgttttgacctcgcccggcgtcgtctcggcagcgatctagatctgaggttctgaggttcttgattgcgcggtcacaagacctgtcactgcaatggtcgccaagatgttgccatgctcatggatctcggcgtgcgtgctcgtgctgctcttgagcctgcacccgcgtgtccatgccttctacctccccggcaccttcatgcacacctactcccctggagaggtgatctcggccaaggtcaactcgctcacctctattgagaccgagctgcccttcagctactacagcctgtcctactgcaagcctctggatggcgtcaagaagagtgccgagaaccttggtgagatccttatgggtgaccagatcgacaactcttcataccgcttccaagttaatgtcaatgagtcag

SEQ ID NO: 262154 - DNA, 2305 bp, Zea mays
cccactgccaccgcctcctgccgccgcctcccagaccgtctcctccgccccagccgggatgccgacggtgagcgtcggccgggatcgtctcttggctgccattggtcgaacctacacacaggaggagttcgaggcgctctgcttcgagttcggcatcgagctggacgatgtgacgacggagaaggctattatcaggaaggagaagcacctcgaggacgacagtgaggtggacgaagatgacgaggtcatctacaagatagaggttgccgccaacagatatgatttgctatgtcttgaaggactagcaagagctcttcgtgttttcactgggactgaagcaagccctgtattccaagtttcatcaatccctcggggttcaatgcttcagatgcatgttaaaccagagacttcaaaaattagaccgtacatagtttgtgctgtcctaagaggggtaacttttgatgacgcaagatacaacagcttcattgatcttcaagacaaactccaccagaatatctgccggtagaggacactcgttgctattggcacccatgatctggacactctgcaaggacccttctcatatgaggctctaccaccgaatgaaatcaattttgtcccattaaagcaggagaaaagcttcagagccgataaactgatggaattctataaatcagacatgaaactgaagaaattcttgcatataattgagaattctccagtgtacccagttatctatgatagcaacaggactgtattatcattacctcctatcattaatggcgcacattcagctatcacccttgcaacaaggaatgtctttattgaatgtacagctactgaccttaccaaagcaaatatagttctgaatacaatggttaccatgttctctgaatattgtgagactaaatttgaagtggaacctgttgaagtgatacatcatgatggaaggaaaacagtttaccctgatctttcatgttacaaaatggatgttttgttatctgacattcttgggcctattggcatctcccaggacgagaaacaggttgtctgtcttttgaataaaatgcaactgcaagctgaaagtcactccttgaaaggggaggctcgcatttcagtgtctgttcctccaacaagaagtgatattctgcatgcccgtgatttgtcagaggacgttgctattgcttatggattcaacaatgtgccaaaatcaaagccgaagtgtatgacaataggaggaaggcaaccattaaacagattctcagataaaattcgtgctgaggttgcaagagctggttatatggaggtgctcacatttatcttgtcttcacacgaagagaactttgacatgttaaacaggacagatgacaaaagtaaagcagtcattattgcaaaccctcgcacttctgaattcgaggttgttagaactagcctgatgtcgtgtttattaaaaacactgaaacataatatagaccatccaagacctataaagatttttgaagttggtgatgttgtgatgctggactcgtcacgtgatgttggtgcctctaataatcgcaggcttgcagctttgtactgcaatagggtttctggatttgaggaaattatgggattggtggatagtattgtcaaagttgtcagagctccacatgttaactttggcgagaattactatgtacctacagatgaacctgagttcttcccgaaaagacaatgtaaaattgtgacaagtgatggcaagcaagttggctacttaggaattgtccatgctgaggtcctaaggaaatttggcattccggatccctgcactttcgttgagatggacctcgaagcactgttgtaatgcagtcaacctgaaacaaaggaatgcttgaagctgatacctcatacctgccacatattggttttgttcgtaagcatggtggggtaccagcaagaagtgcatattacccaagctgcagtatctcgatgtacttctcaattgcattggattttgctgtgggaaaaaagggtacaacgatacagcaaatacccagcctaatttttgtgttagggattatgtttgcattgtaagggcttattcctatccaactttctatgaaaagtgtaccgtacatccttttgtaaaccatcgcgcgtccaaaagttatttctcaactcttgtcacctccacatgaggtcaccatgatgtaaagcaggttcagaatattagacctctaatatctccttgtgtttgtgaatggcattaaaatttgacattaaggattgtttggtttataaaaactaattttagtccttttttttt

SEQ ID NO: 262155 - DNA, 486 bp, Zea mays
ggacagatgacaaaagtaaagcagtcattattgcaaaccctcgcacttctgaattcgagatttttgaagttggtgatgttgtgatgctggactcgtcacgtgatgttggtgcctctaataatcgcaggcttgcagctttgtactgcaatagggtttctggatttgaggaaattatgggattggtggatagtattgtcaaagttgtcagagctccacatgttaactttggcgagaattactatgtacctacagatgaacctgagttcttcccgaaaagacaatgtaaaattgtgacaagtgatggcaagcaagttggctacttaggaattgtccatgctgaggtcctaaggaaatttggcattccggatccctgcactttcgttgagatggacctcgaagcactgttgtaatgcagtcaacctgaaacaaaggaatgcttgaagctgatacctcatacctgccacatattggttttgttcgtaagca

SEQ ID NO: 262156 - DNA, 907 bp, Zea mays
gtgctgctggagctgaaaggtgcagaagtagatatatcgactcagtgactgccactgcaatactagttcctagatatgttcttactctcacaacagtacaaagccagaggaatgctgggctccctagttcaaacctcaacagcattttctggactcaatccaaaatcgaacatcagaactgctgattgctgaatacagtacagatacttggtttgctatcgaccttccgcggcaattattctctacaaactcttggtctcagattcatacaagcttggaaataaacaactaaccaacatataggtaagaaacaggatggttcacagtccccgtgaaagtccaagaaatacaacagccgaggacatctgcactttaagatctgcgatatcaacgtcatgacctccttccaccaagccccatcgatcaacctggtggtcttcttcaagcctgatcaactcaatggcctcctcaatacccaacctttctctaaatattgcaagagggatcaccaaggaatgggctgctgcagccatagcatcaatggatgccaactcacagtcagttgctttcttcagaacagtttctacagctttagcaaggccctcgtcttgcttccccccaaagaagcttgtgtagacaacgggtttgaacccaaattcagtgtctacccactccagaatcggatcgattttctccttctgcttttgatgaactccaatggtcagttcactatcagcaggtgagcggcaaaataccaaatcttgatgaaatttcttcatcaaattgtcaatcacttttctgcgtgtcaaaggaactctctccaatgcagtgcaagcaagcttcataagaggcattgtgaaaggtcgaattccatctgattcctggtactccccggacgcgtggaaga

SEQ ID NO: 262157 - DNA, 1753 bp, Zea mays
tgggtcgcccacgcgtgcgcccacgcgtccgcccacgcgtccgtccacgcggccgcgcgagtgtagcaggctgcacacacaaggaaggggacaaccacaagcgcctaagatcccgtcctccgcgtcgagatctttgccgaggcggtgaccgtcgagggatcgccatggcgttgagggcgtcccccgtgtcgcatggcaccgcggcagcgccgctgccgcctttcgcgcggaggaggatggcccgtggggtggtggtggccatggcgtccaccatcaacagggtcaaaactgtcaaagaaccctatacccctccacgagaggtacatcgccaaattacccattcactaccacctcaaaagcgggagattttcgattcacttcaaccttgggccaaggataacctactgaacctactgaagccagttgaaaagtcatggcagccacaggacttcctaccagagccttcttctgatgggttttatgatgaagttaaagaactgagggagcgggcaaatgaaatacctgatgaatactttgtttgcttagttggtgatatggttactgaggaagccttacctacataccaaacaatgcttaacactcttgatggagtccgggatgaaactggtgcaagtccaaccacgtgggcggtttggacaagggcatggacagctgaagagaacagacatggtgacctccttaacaagtacatgtaccttactggacgggttgacatgaaacaaattgagaagaccatacaatatctgattggttccggaatggatcctggaactgagaacaacccctacttgggtttcctctacacatcattccaagaaagggcaacatttgtgtcgcatgggaatactgcaaggcatgccaaggagtatggtgatctcaagctggcccagatatgtggcacgatagcagccgatgagaagcgccacgaaacagcctacaccaagatagtcgagaagctcttcgagatggaccctgattacacagtgcttgcgtttgctgacatgatgaggaagaagatcacgatgccagcccatctcatgtacgacggtaaggacgacaacctgttcgagcacttcagcgcggtggcgcagaggctgggcgtctacaccgccaaagactacgccgacatcctcgagttcctggtccagaggtggaaagtcgcggagctcacagggctgtctggagaagggagaagggcgcaggactttgtctgtaccttggcgccgaggatcaggcggctggatgatagagctcaagcgagggcgaagcaagcaccggttattcctttcagttgggtttatgaccgcaaggtgcagctttaatcaagaacgctaggcaatgtgggcatttactacgtatatcattttcagtcctggggttctctataagaaacagtctctaggttatctagcagggtagaattcaactactcgtggatctcactcggtgcaaagtagtgcaaagtacgctatctgttgttaccgtgcaagctgcagagtttggattactatgtgggcctggtggtggagaggaattctgtggggtgcctgcagccagttatgagtggcagctccatcgcaactgagttgttgtattgaatatgttacaggacctatagtaaccgaaagtaataatatggagtttgtatatcgacaagcttgctttggtgattgatgagaatctgaagtaataatatggagtttgcataaaaaaaggagaaaaaaaaaaagaa

SEQ ID NO: 262158 - DNA, 856 bp, Zea mays
gaggcttgctaggcacacgtgctgcaagcatcgactaccctgtccgaaccaaccagatcccacgagagatccctgagcgcaagttcccctcatggttgcttgtgctcggtgcgggaacattgccatttggtactctcttcattgagctcttcttcacctttccagcatttggttgggaaggttctactatgtctttggcttcctgttcattgtcctcttcctgctggtcatagtctgtggtgaggtttctctggtcctgacctacatgcacctttgcgtggaggactggaaatggtggtggaaggccttctttgcttctggctctgtcgcattctatgtgttcctctactctattaactacctggtgttcgatctcaggagcctgagcggaccagtttctgccacactctaccttggctattccctgatcatggcccttgcaatcatgctctccactggcgccattggtttcctgctctccttctacttcgtccactacctcttctcgtctgttaagattgattagaggtgtgccccgctgcctctttctgcaatagagtcatctgatcatggtaatagttaccctcttagaaatactacacaataaatcaaatggaaaaaatggatacatggcaacgcccatggcttttggtcatgattaattcaatcatttagcgcagcacagtcactcaagttgaaacttaattcttaggaatgattgtaagttcttcagctatgtttattgcactttgtaataccattcagttttgcttgctctgggcatttgtgagcagcctttggttttggaacacttgagatctattcaatatgaaaatgaagctattcatttacagtt

SEQ ID NO: 262159 - DNA, 925 bp, Zea mays
actagttctagatcgcgagcagccgccccccccccttttttttttgccctttttttttttttttttttttttttttttttttttaagaagcatgaaacgggaatttcagttctcatagcattatcatgaatctcagaacataacaggtgaaacacgaatcaagcagaggcgccatggggttcacagatccacacctaaaccgctaaattaaactgcgagcgatacatgataaactaagaccaccactcagatcaccaccatcttattcagatccaaaggaacggacgcagggggagtcgacgatgacggagggagggcggccgaacagaccagatcagagagatctaggagagctgtccgcagtcagcgaccttgaccaccttggaggtggagccgttgcgggtgcccaccttctcgatggccttgacgacgtccatgccctcgacgacctggccgaagacgacgtgcttgccgtcgagccaaggggtcgcgacggtgcagatgaagaactgggagccgttggtgttgggcccggcgttggccatggagagcacaccgggggcggtgtgcttgcgcacgaacttctcgtcggggaacttctcgccgtagatggactcgccgccggtgccgttgccgcgggtgaagtcgccgccctggcacatgaactcggggatgacgcggtggaaggtggagcccttgtagtggagcggcttcccggacttgcccacgcccttctcgcccgtgcacagcgcgcggaagttctccgcggtcttgggcacctcgttggcgtacagctccatcacgatccggcccgccggggcgccgccgacggtcatgtcgaagaagacgcgagggttcgccatcgagatcgggagctagggtttggggatatttttccttctctctacggcgtggctcgccccgg

SEQ ID NO: 262160 - DNA, 491 bp, Zea mays
aattaactgatccacataatttattcataagctggatatgttacacacaagagcaagagcaagcgaagcgacgacgcagagcgcttgcttagcatttggggatggctatgccgcacgaggtaaaggttttggcggtgttggggttgttgatgtattttgcaaacttggggtctttggcgtacacgcacaaccatgcctcctgcgcacgcagggtggagcagcatgctgccgcgggtttcgctccgtccatgaacgccggatcgcacaccaccagatactggagcatcaaccaactttatctgtcggcattcagcttctaatcttctgttcggccgccctccctccgtcatcgtcgactccccctgcgtccgttcctttggatctgaataagatggtggtgatctgagtggtggtcttagtttatcatgtatccctcgcagtttaatcaagcagaggcgccatggggttcacagatccaccggacgcgtggg

SEQ ID NO: 262161 - DNA, 585 bp, Zea mays
aaaatataaaaataaataaattaatttttttttttccactaattaactgatccacataatttattcataagctggatatgttacacacaagagcaagagcaagcgaagcgacgacgcagagcgcttgcttagcatttggggatggctatgccgcacgaggtaaaggttttgacggtgttggggttgttgatgtattttgcaaacttggggtctttggcgtacacgcacaagcatgcctcctgcgcacgcagggtggagcagcatgctgccgcgggtttcgctccgtccatgaacgccggatcgcacaccaccagcggcttgggatcgcacgccgctgccgccctgccaccgcctgtgctcgtcgtcgccatcaccaccaccagggccagggcggctacaaacatcgcggtcgacttggccatggtatcttcagtacagtgatcgaagagagtgagtgaatgaagatgattatgtgaggactggttgcggtggtgcaagggaatgctctgtcttgctatctatatataggatagggccgtacgtgtacacgcctcccccccttctatattattgcgcggacgaaaa

SEQ ID NO: 262162 - DNA, 493 bp, Zea mays
gctttggccatttgtttgctgagctgcaatttcagatctcatagcgttatcatgaatctcagagcataacaggtgagactcgaatctagcagaggcgccatcgggttcgcagatccacacctgtcaaaccgctaaattgaactgcgagccagatacatgatcaactaggaccgccactcagatcaccgccatcgtattcagatccaaaggaacggacgcagggggagtcgacgatgacggaggcagggcggccgaacagaccagatcagagagatctaggagagctgtccgcagtcagcgaccttgaccaccttggaggtggagccgttgcgggtgcccaccttctcgatggccttgacgacgcccatgccctcgacgacctggccgaagacgacgcgcttgccgtcgagccaaggggtcgcgacggtgcagatgaagaactgggcggacgcgtgggcgcacgcgtgcggtcgacccggcaattcaggaccgg

SEQ ID NO: 262163 - DNA, 829 bp, Zea mays
  unsure (1)..(829): unsure at all n locations
ttaagcccttttatttttaatttcagttttatagcattatcatggatcccataacataacagctgaaacaaggattaagcagaggcgccacgggattcacagatccacacctaaaccgctaaattaaaaccgcgagggacacagacacaaacgacttgaagactcaactaagaccaccactcagatcgccatcatcttattcagatcgaaggaaatgaaaagggacggacgcaggcggagtcgacgatgacggagggagggcagccggacagaccagagatctagacctggccacagtcagcgaccttcacctccttggaggtggcgccgctgcgggagcccaccttctcgatggccttgacgacctccatgccctcgacgacctggccgaagacgacgtgcttgccatccagccagggggtcgccacggtgcagatgaagaactgggacccgttggtgttgggcccggcgttggccatggagagcacaccggggctggtgtgcttgcgcacgaacttctcgtcggggaacttctcgccgtagatggactcgccgccggtgccgttgccgcgggtgaagtcgccgccctggcacatgaactcggggatgacgcggtggaaggtggagcccttgtagtggagcggcttcccggacttgcccacgcccttctcgcccgtgcacagcgcccggaagttctccgcggtcttgggcacctcgttggcgtacagctcaatcacgatccggcccgccggggccccgccggcggtcatgtccaaccccacgatagagttaacccccccgatcgggagctagggtttggggatntatt

SEQ ID NO: 262164 - DNA, 640 bp, Zea mays
catctttccttgaggtcatcttcaaaaggttagctttttttttttggattttcagttctcattgctttatcatgaatctcagaacataacaggtgaaacacgaatcaagcagaggcgccatggggttcacagatccacacctaaaccgctaaattaaactgcgagcgattcatgaatgataaactaagaccaaccactcagatctccaccatcggattcaaatccaaaggaacggacgcagggggagtcgacgatgacggagggaggccggccgcacagaccagatcagagagatctaggagagctgtccgcagtcagcgaccttgaccaccttggaggtggagccgttgcgggtgcccaccttctcgatggccttgacgacgtccatgccctcgacgacctggccgaagacgacgtgcttgccgtcgagccaaggggtcgcgacggtgcagatgaagaactgggagccgttggtgttgggcccggcgttggccatggagagcacaccgggggcggtgtgcttgcgcacgaacttctcgtcggggaacttcccttcgtgtggtgatgtacataagggaagggtatacatttgtggactctttgaggaggaatggaaacctaatcctgatcccgatccttg

SEQ ID NO: 262165 - DNA, 1361 bp, Zea mays
tctttccaaccaatcgccgccgcgtcgcgtcgcgtggcctcctttttttttccccgccctcccggacggcggcctcgttcgccagaagaaacccaggctgcagccgaaatcctcaagtctccgtcgtctgaccccacctcgacggcccagatccactcgccctcgccgccctcgtgcccctcagtccctcactccctcgcctcctcagcggcgaagacagctgcgaacggggccatttttaggcgggagcgcgggcggcggtgctagcagattggttggtttgagtggttgggccggctcttcgaaacgccccgccgcggcgatgggatgcttccattccacggccaagcggcagcatcctggctacgaggaccccgtggacctcgcctcccagacctccttcagtgttagtgaggttgaggctctattcgagctgttcaagagcataagtggttcggtgattgatgatggcctgatcaacaaggaagaattccagctagcactatttaagaatcagaggaaagaaaatcttttcgccaatcggatatttgaccttttcgatgtcaagaaaaggggtgtcattgattttggtgactttgtccgagctctaaatgtgtttcatccaaatatcccaatggaagaaaaagttgatttctcgttcaagctatatgatatggatagcacagggtttattgaacggaaggaggttaagcagatgttaattgctctcctaggagaatcagaaatgaggctatctgatgagatcattgagacaatcctggataagacattctctgatgctgatgcaaatcaggatgggaaaatagatagaacagagtgggagaattttgtcacaagaaatccttccttgatgaagataatgactctgccatacctcaaggacatcacaacaacattccctagctttgtgtttaactctgaagtcgatgatctcgtcacgtgaccacgattttctctccgatgtatagttaacaaggagaacctgtcgagggttacgactggagatttctagcctctggcattatgaatggagggtatattcatgcggctaccaggaagggtgcgtcaaaattgtctgccacagatgtacttgacgagctgtagtttttactcggtgataatgttgatgcttttgtgttggtgatgattgggacttgagttagtatgcagagatgaacatttttcatttttaccagtgggaagtctctattttgtttgtgaaactgcgacgtgcgtgtctgtactgatcaaatatgattcttgtcaaagtagtactgcattctactattttagcgtaaaataaacccccaagtcccaaaacttgccccccatgtcattgt

SEQ ID NO: 262166 - DNA, 657 bp, Zea mays
cttgaatcagctgtttagagattcaatgtactatcatagtgtgttacatttatctgaaccagaattggccaacataaatttctgcattgtgctttgcatgaactttgatttgaagcaacaaaaatacttgccggtttaccttggtcaataattcagggacataacaacaacattccctagctttgtgtttaactcggaagtcgacgatctcgtcacgtgaccaccactctctccgatgtatagttaataaggagttttttctcccctcaaccgcaaaaaggagaacctgtcgagggttacgagtggagatttccagctttctctggcaatgaatggagggtgcgtcaaattggctgccacaaatgtacgagacgacctgtagttttcactcagggcttgtttgggagcaagtggaatgaagggtattgataggactataatcccttgctatctaaaattgaatagtggaggattatatgccctccaattcactccattacctttactcccaaacaagccctcaatggtaatgatgatgcttttgtgttggtgatgattgagactgagttagtatgcagatgtgaacagtttccatttttaccagtgggaaggctgttttgtttgtgttataaataatctaacattcttaaaattaat

SEQ ID NO: 262167 - DNA, 1732 bp, Zea mays
gtctgcccctctctccatttcgcggaggaagaaaaaggggaccaaaaaacggaaaaggggataggaggaacggatcagcggtggaagcttccagccctagcgcagcaatggcgggttggtgcgagcaggcggtggcgctgctacagcgccccgcggtggcggagatggccgtcgacgtgctgctctgcgcggtgccgatctgggccgccgtcatgatcggcctcgtcgtcggctggtcctggcgcccgcgctggacgggactgctcttcctcggcctccggagccgcctccgcatcctctggctgccgcccggccttggggcccggcggctctggttcgcctgcaccgcgctctccgcctgctccgtcgcgaccaagctcatcttctacgcattccgccgctgcagaggcaagcaacaggacaaggcctcccctgaggatactgctgctgtggctcgggacggcggaggttgcgccgatggcaggacaaattttgagggtgaacatgatactgtcactgagaaggacctagaacttctccttcaacttttagataataaggaaagcggggatacagcttggcagaatttgatggagcgtacaacctccaacatgacctacaaggcctggcggcgtgagcctgaggagggacctataatgtactgcagccgcactatttttgaggatgctacacctgaactggttagagatttcttctgggatggtgattttcgtctaaagtgggatcccatgcttgcatactccaaatctttggatgagttccctcagaatggagcaacaattgtccactggataaaaaagttcccattcttttgcagtgaccgtgaatacatctttggaggacgcatatgggaatctgggaagacttactattgtgttactaagggtgttccatatccatcattgcccaagaaagaaaaaccaaggcgtgtggagttgtacttctcaagttggcgtattagagctgttcaatcgcctaaacatgtgggtcagcaatctgcgtgcgaagtaactttggttcactatgaggacatgggcataccaaaagatgtagccagggttgctgttcgccacggcatgtggggtgctgtgaagaaacttcagtctgggttcagagcgtaccagcaaatgagagacacagaaaataccctgtcacacagcgccattatggctcgaatgaccaccagggtatccatcacggcttcgaatggtggcttagaccatgacctctccatcgccgataaaatcagtggcgagaatgacagctcccatgcagttcagcatggttttgactggaagtgggtggtgtttggtggtgcggtggctgcggtttgtgtgctcaacaccggactggtaggcaaggtcctgttgcttggagcagcgagaaggcaggcaaagaagtgatgtgaggagcaaccttccagcctctgcagaaaggcattcgtcaggctgtagctacaaccgtacaggcaaaaagtattgaggaaataggtggggttcgacagatataattgcaatgtgtaattttggattgtgcacttgtgcagtagatgtagcatgcttgctaccataacagattccgctgtatcaggaatcgctggctaatactccgtatatctgaagatctaagaggtcactgcatgtttgcagctttctatgttcgatatacgtataacggcactgcatgttataagagaaatccattctctgac

SEQ ID NO: 262168 - DNA, 464 bp, Zea mays
actagttctagaccgcgctctccgcctgctccgtcgcgaccaagctcatctcctccgcattccgccgctgcagaggcaagcaccaggacagggcctcccccgacgatgatgccgctgcgaccagagacggcggatgtcgcgccgacggcaggagggacctataatgtactgcagccgcactatttttgaggatgctactcgctggactggttagagatttcttctgggatggtgattttcgtctaaagtgggatcccatgcttgcatattgcaaatctttggatgagttccctcagaatggagcaacaattgtccactggataaaaaagttcccgttcttttgcagtgaccgttgaattcatctttggaggacgcatatcggaatctgtgaagacttacttctctctttcctatagttccatatcgtgggggggggggggggcttttctcttttctctattatt

SEQ ID NO: 262169 - DNA, 512 bp, Zea mays
tcatcatggctcgaatgaccaccaagatatccatcacagcttcaaatgatcccttggaccatgacctctcggttgccgataaaatcagtgacgagaatgacagctccaatgcagttcaacatggttttgattggaagtggttggtggttgggggtgcagtggctgcggtttgtgtgctcaacaccggtctggtaggcaaggccgtcttgcttggagcagcgagaaggcaagcaaagaagtgatatgaggagcagccttccagccagacattcatcagattgtagctacgatcgtacaggcaaaaaaatgttgagaaaataggtggggttcaacagagataactgctgtttgaggcgtatgcaatgggtctatcggatctagtttcacagtatagtctattttatttagagataaaaatcgcttgtttaagaataagtgaggctctttatttaagaacaggtgtttcagaattaagacggaatgaccgttttcttcaaaaaaaaaaataaaaa

SEQ ID NO: 262170 - DNA, 199 bp, Zea mays
aaaaataaaaataaaatggctttaataccgagatctatagttacaaatcgggagtagtagctttatatgctactatcgatatacaaaccgagagcacagtacatatggtcacactactacaggtgcacgcatgtattgccgcttataaatgtgggaaaaaaaaggataacccgtttctctagcaatggaaagaagaaat

SEQ ID NO: 262171 - DNA, 436 bp, Zea mays
actccagctaataatcttattcccttcaatgacgaattaggcatatcgacaagattattggtttctttgtgacaagaatcaaaacaatgggcgaaacaaaatgactttctcctccaatagaaggtcaccgcaccacctatccaatatattccgaaactaactaaactgttcagcttgctttttatccccccaacgttagcctacgccacggacccaaaaaaaaaggagactagatccctaccggagctaatccaagtagaagagtgtcacgatcttccgaaggttcatggcctcctggcatgtttccatcagcagtttgctgtcgtggaacgcgaagcagattacctgttggaccttagagatgatgtccatattgcataacctgctagcctcaattagtggcaaatgatcatactgtggtttctcgagtaaagtt

SEQ ID NO: 262172 - DNA, 537 bp, Zea mays
aagccatatcgccaaaacgatggtgctcttctctctattgggacactttgtgatatactgaagcatacagatccatataaatcagagcttgagacaatgctggtccgacatgtctttgctgaatttagcagtcgtgttggacacctgcgagcaaaggctgcatgggttgctgggcagtatgcccatatcaacttttcagacccgaacaattgtcgtcaggctatgcactgtatagtttcaggaatgcatgatccagatcttactgcgagggttgattaggtctttgcacttcgttcttttgttgaagcctgcaaagatttaaatgagattcgacctatacttcctcagctccttgatgaattttttaagctgatgaatgaggttgagaatgaggatcttgtgttcaccctagaaaccattgttgacaaatttggtgaagagatggcaccttatgcattaggtttgtgccagaatttggctgctgctttctggagatgtatggctagttcagaagctgatgatgaagctgatgattcc

SEQ ID NO: 262173 - DNA, 1092 bp, Zea mays
agacaaagctctggtgaagcggctctcatcatgtgaaacaatgggatcagctactacaatatgcagtgataagacaggaacccttacattgaataagatgacggtcgtggaagcatattttgctggaacaaagttggatccatgtgttgttgttagccagatgtcagacagtgcagcgtcacttattattgaaggaattgcgcagaacacaacaggaactgtatgtcggccagaggatgggggagcagctgaacttactggttcgcctactggaaaggccattctttcgtggggccttaagatagggatggatttcggcgatgtcaggacaaaatcttcagttattcatgtttttccatttaactcggagaagaaacgtggcgctgttgcagtacagtttgatgatggtgttcacatccactggttaggtgcagctgaaatagtgttatcatcttgcaaaagctggctttccgtcggtggctctgttcagtcaatgagtgctgagaagcacgatgaattcaagagatcaatcgaagacatgggagcgaattcattacgctgtgttgcttttgcatactgttcctttgacattgataagatcccaatggaagacataacaagctgggagttgcctgaggatgacctgactctgcttggcatcataggaataaaggacccctgtcgcccaggtgtaagggatgcggtacgcctgtgcactactgctggtgttaaggtgcgcatggttacaggagataatattgaaacagctaaagctatagctctggagtgtggaatactagatgcaaatagtgttatttcagagccagttgtaatcgagggaaaagtgttccgtgagatgtctgaaagtgcaagaggagaggccgccgacaagataattgtgatggggagatcctcgccaaatgataaacttttgcttgtccaagctttaaaacgaaaaggccatgttgtagctgttactggtgatggcacaaatgatgcccctgcattgcacgaggccgatataggtctttcaatgggcatttcagggacagatgttgctaaagaaagctctgacattataatcttggatga

SEQ ID NO: 262174 - DNA, 500 bp, Zea mays
ctttttatgtgacaaccttaattattccaaagcagaaatcgacatctgatacgtgtgaagctacaaatgaagaagaactatttgaagttcaggacacatactcattgttcacactcggacgcgttcgtacacatccaacacagtcctgcttcctttcgtccattgacgcccacaatcattattcttatcaggtcatgctacctgaagcaattgcaatagttatggcacctactgacacaagaaaacatggtatatttcatctcacggatccaggtggcatgggcgtgatccatgattgtcaagagagaggtttccatcctcacaaggcaccacttgatgggtcgccaatatatgagcagtgctcccatgtgtacatggacaccgatataaagttcgatatgattgatctgcgacaaagatgacgaagctcacctttgggtttattttgcaacctatacttctcgcagttaaatcaattgctgcccttattttttcttagc

SEQ ID NO: 262175 - DNA, 1423 bp, Zea mays
cctctccctacccctacgggtccagtggccactgcctcttgccgcaggagccctcttctctctcttccgccgtctcgcctcctcacgccattaaaccccacccgcgcgcgcggcggccggcggcgagccctcacccatccgagcaagccgaggaggaagcgagcgcgcgaaagtatcaggaggaggcatgggtaccctggggcgcgcgatcttcacggtgggcaagtggatccggggcacggggcaggccatggaccgcctcggatccaccatccagggcggcctccgcgtcgaggaacaggtttcaaggcatcgtacaatcatgaatatttttgagaaagagccaaggatccatagagatgtgtttgttgctcccagtgcagcagtcattggggatgttgagattggtcatggatcgtcaatctggtacggatccatattgagaggtgatgtcaacagcattcatattggatctggtactaatatacaagacaattcccttgtacatgtttcaaaagctaacattagcgggaaggtcctcccaaccataattggaagcaacgtgacagtgggtcacagtgctgtattacatgcatgtaccattgaggatgaagcttttgttggtatgggtgccactctgcttgatggagtggtggttgaaaagcacagcatggttggtgcaggatctcttgttaagcagaatacaaggattccttctggagaggtctgggtcggtaatcctgccaagttcctaaggaagcttacagaagaggagattgcgttcatcgctcaatcagcaaccaactatatcaacctagcccaggtccatgcagccgagaacgccaagagcttcgacgagattgagctcgagaagatgctgaggaagaagtacgcgcacaaagacgaggagtacgactcgatgcttggggtggtccgcgagatcccgccccagctcatccttcccgacaacatcctcccacacaatgctcagaaggcggttgcccgctgaaccttttctcaacccatgcttggcgttgttgcctgttgtcttggagcattttgacacgcgttcgttctctgtttttttatgaagcccaataagattgggtcgagcactgttttaggatcgaccgcacacaacaccacctctattttaaactgcaatggacaagaagctcagggtctcatttactcatctttgacttctctctgtggagcacttgtaatcgaagatcgtgccctgttttctgtactatttcaaactgcatgcagactcctgggttccgttgcttttgctttgcttcatagatattcctttggtccttcatacaaaactcgttttatgttcaaggccctattataatttaaggactagttttggaaaaacccccaaaaaaaaaaaaaaaaaaaaaaaaatgagaaa

SEQ ID NO: 262176 - DNA, 491 bp, Zea mays
tcccatctcgtccgtccacacgtgcgcccacagcgttcgcacacactttggatgtcaggtctttgctcccttaccaaggcggtcatgaactgcccaaatctgaccgagctatcactggacttccccaaacagaataacgattccaccgacctggctgctctaattgatagtctgggccgcacgtgcccaaacttgagaaacatgcacgtctcgtcgatccgcttatgcaacgaagccgtgtttgctctagaaagcgccaatctcaggggcctacgcatgctgtctttggttctatgttcaaaaataacagatgcagctgttgcatctattgttcgttcatactcaagcttggagctgcttgatttaagtggatctggcattaccgacaacgggcttgggatgatcagcaaagcattccctgacaccctatcacgcctgctcctggctgtgtgccctaacatcacgtcgtctggggtccacgtgtctgcagc

SEQ ID NO: 262177 - DNA, 1905 bp, Zea mays
tccggaatggaattcccgggtcgacccactcgtccggcaactccgcaagtccgcaacctcctccttcccaccccttctcacgcgattcaagcgtttcccattcggagccctaatcctctctttccatactcgcggaagccaccaccaccggcaggggaagcggaaggggagcacctcgggccaggcaagatggtgcttgcgcagctgggcgggagcatctcccgcgccctggcgcagatgagcaacgccacggtgatcgatgagaaggtgctcaacgactgcctcaacgagatctcgcgcgctctcctacaggccgatgtccagttcaagatggtccgcgacatgcaggccaacatcaagcgcatcgtcaaccctcaggcgcttgccgcaggcaccaacaagcgccgtatcatgcagcaagctgtcttcacggaactctgcaacatgttagatcccgggaagccttctccccccccccgtccgggcaagccaagcgtagtcatgttcgttggtctgcaaggttcgggtaaaactactacttgttcaaaatatgcttattatcatcagaagaaaggattcaaaccagcgctggtttgtgccgatacatttagggctggtgcttttgatcagttaaagcaaaatgcaacgaaggccaagattcccttttatggaagctacatggaatctgatccagtgaaaattgctgttgagggtgtggagaggttcaagaaagaaaactgtgatctcatcattgtggacacaagtggaaggcacaaacaagaagcagcactctttgaagaaatgcggcaagtttcggaagcaacaaaaccagacctggtgatttttgtgatggacagtagtattggtcaggctgcatttgatcaagcacaggcatttaaacaaagtgtttctgttggtgctgtgattattacaaaaatggatggtcacgcaaaaggcggtggtgcccttagcgcggtcgcagcaacaaaaagtcctgttatattcattggaactggcgagcacattgacgagtttgaagtttttgatgtgaagccatttgttagtcgcctgttaggaatgggagattgggcaggctttatggacaagattcatgaagtggtacctacggatcaacagcctgagcttctgcagaaactgtctgaaggaagctttactctcaggcttatgtatgagcagttccaaaacattctgaaaatgggtcctattggccaggtcttctctatgttgccagggtttagcgctgaactaatgccaaaaggacatgagaaggaaagccaggctaagattaagcgctacatgacaatgatggattccatgactgatgcagagcttgacagcacaaatcctaagctgatgactgaatcacggatcattcggattgcacgggggtctgggcggcctgtcagggatgtcatggacatgctggaagagtacaagcgacttgctaaaatctggggcaagatgaagggtctcaagctcccaaagaaaggggacatgagtgcactgacccgcaacatgaatgttcagcagatgagcaaggcccttcctccgcagatgcttaaacagattggtggcatgggcggtctgcagtctctgatgaaacagatgggatcgaaggagatgagcggaatgtttggaggcatgggtggttgacttgtttttggtggatcgtcgctgtgatgctaaattgagagcgtttaatgctgcggtctgatcaccatcagagcattccctgaagatcagcctgcgctatgttttggatcaggcttagcgtagctccccatgcctgcaaatttaacctatatgaacagtacgtttgtcctctgaaaaaacggataaggtatatattacaaagcgaatatgcttatgtagatggttactccc

SEQ ID NO: 262178 - DNA, 933 bp, Zea mays
caagattcatgaagtggtacctacggatcaacagcctgagcttctgcagaaactgtctgaaggaagctttactctcaggcttatgtatgagcagttccaaaacattctgaaaatgggtcctattggacaggttaactacttcagtccttgaaatttctttgaacatcttgtcaaaacgaacatgaatcatccattaacatcatgggtcaggattttagtccttgaaataaaaaatgattttggtttatttgcaggtcttctctatgttgcctgggtttagcgccgaactaatgccaaaaggacatgagaaggaaagccaggctaagattaagcgttacatgacaatgatggattccatgactgatgcaggtaatttgtggtgcaagaaccatcctatatataaatttatttacttgagtagtgtgctacaattgtatttttcacccttgagttttcgtcccagagcttgacagcacatatcctaagctgatgactgaatcacggatcattcggattgcacgggggtctggtcgtcctgtcagggatgtcgtcgacatgctggaagagtataagcggcttgctaaaatctggggcaagatgaagggtctcaagatcccaaagaaaggggagatgagtgcactgtcccgcaacatgaatgttcagcacatgagcaaggtccttcctccgcagatgcttaaacagattggtggcatgggcggtctgcagtctctgatgaaacagatgggatcgaaggagatgagcggaatgtttggaggcatgggtggcgagcggtaattttacgtcctgtttttggtggatcgtcgctgtgaacttgtgatgctaaattgagagggtttagtgctgcggtctgatcatcgtcagaggctcccaggtttccatgaagatcagcctgcgaacaggcttactgtagct

SEQ ID NO: 262179 - DNA, 468 bp, Zea mays
atcattcagattgcgcgggggtctggtcgtcctgtcagggatgtcatcgacatgctggaagagtataagaggcttgctaaaatctggggcaagatgaagggtctcaagatcccaaagaaaggggagatgagtgcactgtcccgcaacatgaatgttcagcacatgagcaaggtccttcctccgcagatgcttaaacagattggtggcatgggcggtctgcagtctctgatgaaacagatgggatcgaaggagatgagcggaatgtttggaggcatgggtggcgagcggtaattttacgtcctgtttttggtggatcgtcgctgtgaacttgtgatgctaaattgagagggtttagtgctgcggtctgatcatcgtcagaggtttccatgaagatcagcctgcgccatgttatggaacaggcttgctgtagctccccatgcctgaaatttaatttatatgattatgaac

SEQ ID NO: 262180 - DNA, 543 bp, Zea mays
gacgcgtgcgtgcgacggcagtatccgagctcgcactcgttcactccgtccatcgcatcgcatctgtcctcgcatgccctcagcgccaccgcaccgcaatcacacgcgcgccacccgcgatgacgccggcggcggcaatcttcggctacagcagccacgtcgtcgtgttcttggtcgggctgatgcagccgagcatgctccgtgcgctcaccgattggcccatcgccgccgtcatctatgacgagactctccacgactgcctcaacgagatctcgcgcgcgctcctacaggccgatgtccagttcaagatggtccgcgcacatgctggccaacatcaagcgcatcgtcaacctcgaggcgcttgccgcaggagccaacaagcgccgcatcatgcggcaagcgggcgccacgggaacccgggaccaggtagaacccgggaaggcctctttcactcccaaaaagggcaagccaagcgtagtcatgttcgttggtctgcaaggttctggtaaaactactacttgtacaaaatatgcttattatcat

SEQ ID NO: 262181 - DNA, 385 bp, Zea mays
cccctccccccctccgcccatcccccttctcacgcggctcgctcagggctcgagcgtctccccatcggaaccctaatcctctctttccctactcgcggaagccaactccaccggcaggggaagcggaagggaagcacctcggccccggcaagatggtgctcgcacagctgggcgggagcatctcccgcgccctggcgcagatgagcaacgccacggtgatcgatgagaaggtgctcaacgagtgcctcaacgagatctcgcgcgcgctcctacaggccgatgttcagttcaagatggttcttgacatgctggcctacatcatgcgtattgttaaccttttggttcttgttgacattcatcctcaagttttgtactttttcatctt

SEQ ID NO: 262182 - DNA, 1082 bp, Zea mays
tattcgtccaaccgcaattgctccatccaaccttgaagagatgtatgcttcagacatgggtatgtcgccaagattctccaatgatcaagttcactcagtctactcaccagcacacaaatcagcacttctaaacaagtttcatcatcagcaaaagggccttctgtcgcctgtcaatactaacaggatatactcgcctaggggtcttgatccatcagttctccattctccatttggtggtatgtgtcctcggtcccctcggactatggagccagcatctcccttaactgtctgtgtcggggctactgctacgcagcgtgatatgttggatcagttctcttccctgaacaagcatcaggtgccatctgcgggatcgccacggaatcttaatgtctcatggggcaacattggtaccccaaagagtaaggtggattggggtgttgacaaagatgaactagtccgcttgaggcaccctgtgcaacctggaaatacagaagaggagccagatgtgacttgggtgcagtcactggtgaaccatgctgagctgagtggcaagaggggtgaaatggcaggcatggcttctcgaccaactaataggcctgaactgagcagtcaagatgactcactggatcagagtgttattgcttcttggcttgagcagcaagatgcgcttggagccgaagtaactgtcaaagaggccttttgctgtcaaggtggatgaaaccatatttttgccgcgttagtttccgagaagaatagttatttgtcctagtaaataataatattcttttttttatttcttgaaattttttgttcgcaaagtcggagatggtgtggtcttcaggaaacatttgctcacaaattggtagctgaaagaagctgtcgagtattggtaaacagcctcgttaccttggaggtcctaactagtattcttttgattagttcagatgaggtgaaaattcatatggtcgaccgtgagagtcgatagtaattgtgttgatctctgtaacaagagaggttatagatttttttacccccatttgtcaatgacccatttcataaatacattgatgtttccagaatag

SEQ ID NO: 262183 - DNA, 402 bp, Zea mays
ggcttctcgagcaactaataggcctgaactgagcagtccggatgactcactggatgagagtgttatcgcttcttggcttgagcagcagatgcacttggcagccgaagtaactgtgaaagaggtcttttgctctcaaggtggatgagaccatctttttgccgggaaagcagtcgctcacagattggccagctgaaagcagctgtcaagaattggtaaacagcctcgttaccttggaggtcctaactagtattcttttgattagttcagatgaggtaaaattcatatattccaccgtgagagtcaatagtatctgtgttggtctctgtaacaagagaggttatagatatttttttttccatttatcattgaacgatttcatgaatacattgataattcccattt

SEQ ID NO: 262184 - DNA, 1948 bp, Zea mays
cctccttctacaaatacaactcagtctcagtcccccaccacatccgctccccgccttccgcttccctaccccccgcatcacctaccaacgccgacaccatgggggccttcgcgaaggaggagcaccagttcctcgccgagctcggcctcgcgcagcgcaacccgggcgcgttcgcatgcggtgcgtggggcggctcaggtcccaccgtcacctccacgagcccgaccaacaatcaggtcatcgcagaggtcgtggaggcgtccgtgcacgactacgaggagggcatgcgcgcctgcttcgacgccgccaagacatggatggcgattcctgctccaaagcgaggagagatcgttaggcaaatcggtgatgcactgagagcaaagctccatcaccttggcaggcttgtgtcacttgagatggggaaaattcttcctgaagggatcggtgaggttcaggaaatcatcgacatgtgtgattatgctgtggggctaagtcgccaactaaatggatccattataccatctgaacgaccaaaccatatgatgatggaggtgtggaatccccttggagttgtgggtgttataacggcatttaatttcccttgtgctgtgcttggttggaatgcttgcattgctttggtctgtggaaattgtgtcgtctggaaaggtgctccaacaactccactgatcactattgcaatgacaaaaatagtggctagtgtattggagaagaacaacttgccaggcgcaatttttacatctttttgtgggggcactgaaattggtcaagcaattgcccttgacattaggatacctttggtttcattcactggaagtacaagggctggtctaatggttcagcaacaagttagtgcaagatttggtaaatgccttcttgaacttagcggaaacaatgccatcattgttatggatgatgcagatatccagctagctgtgcgatctgtcttgttcgctgctgttggtacagcaggacaacgctgcactacatgtcgtaggctgattcttcatgagaacatatatcaaaccttccttgatcagcttgttgaggtatacaaacaagtccgaattggggatccgttggagaaaggcaccttactgggaccactgcacactcctgcttcaaaagagaactttttgaaaggcattcagactatcaaatctcagggagggaaaatcctttttggaggatctgccattgaatcagaaggaaactttgtgcaaccaacaattgtggaaattacaccttctgcaccagttgtgaaagaagaactctttggtcctgtcctttatgttatgaaatttcagaccttgaaggaagcaattgaaatcaataactctgttcctcaaggattgagcagttctatatttacaaagaggccagatattatttttaagtggctcgggccccatggtagtgattgtggtatagtgaatgtgaacatacctactaatggtgctgaaattggtggagcatttggtggagaaaaagcaactggtggtggacgagaagcagggagtgattcctggaagcagtacatgaggagggcgacttgtacaatcaactatgggagcgagctacctctagcccagggaatcaattttggttaatcctgcagaaatgttgcgcgtggatctcagtgttttctgcagacgtggatgccgtatggaaagaactgatgcaaccgcatttgagatctcagcagacttgagcagcatttattggcgtcagttgtgaaacttaaactgcaggagcatcttgtacataaataaaataagatgtttgttgctcgtgggccgtggcacgttttggtaccggtgtccagtctactaataaaatctaatgcaaaacggtcataactacattctcatgcagtatgattttccggccttttgatctggaattgaaatgagcgttgttcgttttgaac

SEQ ID NO: 262185 - DNA, 479 bp, Zea mays
  unsure (1)..(479): unsure at all n locations
cggacgcgtggnttaacattgtgtatgtccattgtactgtgctgatctttttaaatatgcgatactggtttcttaatgcaggctggtctaacggttcagcttcaagttagtgcaagatttggttaatgccggcttgaacttagcggaaacaatgccatcattgttatggatgatgcagatatccagcttgctgtgcgatctgtcttgttcgctgctgttggtacagcaggacatcgctgcaccacatgtcgtaggcttgattcttcattgagaacatatatcaaacctttcttgatcagcttgtttaggtatacaaacaattcctaattggggattcgttggaataaaggctccttatttgtgatcacttgacattttctgtattaaaaatgagaacctttttgtaaatgcatttaattactatttaaatttttataagtggtgaatatttctttttttgtagggattctgctcatttg

SEQ ID NO: 262186 - DNA, 478 bp, Zea mays
cccacgcgtccggttcacagtccccactccacctccttctacaaatacacctcagtggcagtcccccaccatatccgcttccctaccccccgcatcacctaccaacgagacgccggcgccatgggggccttcgcgaaggaggagcaccagttcctcgccgagctcggcctcgcgcagcgcaacccgggcgcgttcgcatgcggtgcgtggggcggctcaggtcccaccgtcacctccacgagcccgaccaacaatcaggtcatcgcagaggtcgtggtggcgtccgtgcacgactacgaggagggcatgcgcgcctgcttcgatgcctttatgacatggatggttatttctgctttcaatagcgagtagagaatttttggctaatcttgtttatactattattattactttttttttttttattgtttgttttaattatttttaatattttttttatttttttttataattttttata

SEQ ID NO: 262187 - DNA, 533 bp, Zea mays
aataactcggttgaagatttaactggaagaggtattgaggatctcaagaagggccttattgttactcctttacccgccaaagctaccttccttgatgacccacttagagttcttcgagcaataagattcgctgctagattcaactttacattagatgaagatttgaaggaagctgcatctgatgaaaaggtgaagtcagagcttggcacgaagattagtagagaacgtatcggtcacgagattgatctcatgatgtcagacaaacaccctgttaaagcaatgtgtgacatccgcgatttggggctattttatgttgtattttcttttcctgaaaaatccaaccctcctgtttttgacaagtgtgattggcagtgggtttcacatattggagccacttgggatcttgcataatctattggcaggtgggtggtcaacaatgggtcttaactcaagtcgcaagatgagccaagaaagctgtacttggatagtgcattattcaacccccttcgaagtatggtctacctggacaaaag

SEQ ID NO: 262188 - DNA, 1303 bp, Zea mays
gttgctgttggttctttcttgagttcaatggtgcttgtggttactaaagaatctaaaaagttctgccctgaagcaattggtttcctgcaatctcttttggtaacatcacttaaaggaaaagtggaaactcatctgcacaatcagatgaacgatcaatttatggagctcaagactttaaaaccgtggctcagtatccatggccatgtgcatgaggtgaatccagtgaatatcctagaaatagttggcatggatcctgacgccccttatttctcatctgataactttaaggctggtgtacttttatctgtggcagaatgtttaagaggttttgttattatacatgaagggctatcttctttcccggaaatcttccttccaatatcctctttgctgcaagaaattttggatagatctgagttgcctggatcgttacaagacattttccatgaagtcattgacttgatcaaaaagagaagtgatgaacactatgcttcaagggagcccctccgaatgcggaagaagaagcccgaaccaattaagcaattgaatccaaaatttgaagagaactacatcaagggtcttgattatgatcctgatcgagaaagggcacaaatgaagaagctgcggaagcgtgtcaagagtgagatgaagggggcgaagcgtgagctgcaaaaggataattatttcctgtctgctgtgaaggagaaagagaggaggaagcgagatgaagagagagctgagatgtatggaaaagccatggcgttccttcaagaacaggaaagtgctttcaaatctggacagctggggaaaggaaagggtaggaaaaggatgcggtgatactctattgcaggggggcagctcggccagtgtaaatatacgggattgtgtttgctcaccctcttcccgcggtactggagggtggatccagctgattactgtatcgtgagctgctcagagtttgtcgtgcctacaagagcagggtgggcctagtcttatgcaacatctccacctgcttactcctaaagctttgcctataaaattgtaacgccccaaacactttacaaggcttctccttggtgaactaccacacctgggaaaggctttatttcttttgtaccggggagtggcctgcatctatgttatatactggtgccatagtaattttcagaagcacagtgaagagtttttattattttcatttttgttgtactctgacatgtgagccctataagtatggcaattttggcacggttttgcagtagaaaaataaaaaaaaaaaaaaaaaaaaagagggtgggaaatg

SEQ ID NO: 262189 - DNA, 1216 bp, Zea mays
ccctaggccgctacgcccttggccccttctctctcttcgtcgcgccgccgtagcacgactccgactcggccatggcgacacccccagctctcctattcccttcgccctcttcggcatcttctccgccgtcatccgcgcaggtagaggcggtggtcctcttcaacgtctgcgacagctacgtgcggcgaccggaccaggcagaccgtgtcatcggcaccctccttggatccctcctccccgatggcaccgtccacgtccgcaactcctacgtggtcccccacagcgagtcggccgaccaggtcgccatcgacatcgactaccaccataacatgtacgcctcgcaccagaaggtgaaccccaaggaagtcatcgtcggatggttctcgactggatttggtgtttctggggggagtacgctcatccacgagttctattcaagggaagtacaaaaccccatccatcttacagtcgacactggcttcactaggggggaggcttccatcaaagcctacatctcatccaatctgtccctcagagatagtcaactcgctgcacaatttcaggaaatccctctggatctgaagatgattgaggcggaaaaggctggatttgagatcctgaaatctactatggtagagaagctccccaatgatctggaaggaatggagtcatcgatggggaagctttacattcttatcgatgagatctacaaatacgtcgatgatgttgtggaaggacgcgtggcacccgacaacagaattggaaggttcatctctgattcttttgcttcggtgccgaaattgtccccggctgctttcgataagcttttcaatgacaagattcaggataaccttgcgctggtatacctgtcaagcatcacaaggacacaaatcagcatcgccgagaagttgaacactgctgctcaagtgctgtaggtttggcggtgtggcatctggtttggacgtggatggcttgatgctatctgtgatgcttggcgtaagtgtgattggtgacagaaatgcatttttgtactcattattattattgctaaatgagagacctgatggaaagggttagccaacgatgagatcccataatgttgccagaatgccagtagagtggtggatggccagatgtttctgtttggatagtattctgggttttggttgaatatttttttgttttattatctattttttgagtttttaattttttt

SEQ ID NO: 262190 - DNA, 447 bp, Zea mays
  unsure (1)..(447): unsure at all n locations
aacaaaccctagcccgctacccctgccccttctctcttcgtcgcgcctccgcctccgccgtcgtagcatcctcctccgccacctcggccatggcgacatccccagcgctcctcttcccttctccctcctcggcatcctctgcgccttcgtcggcgcgggtggaggcagtggtgcttttcaacgtctgcgacagctacgtgcggcgcccggaccaggcggaccgcgtcatcggcaccctcctcggttccctcctctccgacggcaccgtccacgtccgcaactcctatgtcgtcccccacagcgagtcagcccgccaggtcggccatcgacatcgactaccaccataacatgtacgcctcgcaccagaaggtgaaccccaaggaggtcatcgtcggatggttctcgactggatttggtgtttctggngggagtacgctcatccacgag

SEQ ID NO: 262191 - DNA, 680 bp, Zea mays
ttttgatcctgaaatctacgatggtagagaagctgcgccattgatctggaaggaatggagtcctcaatggagaagctttacattcttattgatgagatctacaaatacgtcgatgatgttgtggacgcgtggcacctgataacagaatcggaaggttggtctctgaatctgttgcttcaatgccgaaattgtccccagctgctttcgataagcttttcaatgacaagattcaggataaccttgcgctggtatacctgtcaagcatcacaaggacacaaatcagcatcgccgagaagttgaacactgctgctcaggcgctgtgactttggttgtggcagatctatctggttgaaacgtggatgtttggcctacgtgaccaattggtgacagggatgcattttttgttatttgttattaaaaaatgggagagctggcaggaaagaaaagggttagtcaatgatgggatcccggtagagtggtggatgtttctgtttggatagcattatgtgctccaggctgaatatttgtaatgctccttggttgtgtagcgacacagttaacgacatggcaggcaaccgacgtcgtctgggtacatcgcaaataggctggtgccgaggtgacctcgacaggagtcgcagcaggctggcactaatgatgcgaataaagaataccttcaacac

SEQ ID NO: 262192 - DNA, 438 bp, Zea mays
atggtaaactttttcatacgtgttctcgcactgaaaatcatcaaggttggtcacatgtctgaagaatgattatgacaagtctttaccactttgatcataattatattaagcaaacatcaggactcatgatgacaatgaaggatgtgatgagtttgtgtctgttaaccatataaggttgcacgttaagcatgcccctgacttgccggacgagcagcaagactttgggacctagattggctaaggcactaagaatagaatagcttttcaagaaaagagagacaacaactaacactgtactatgtaggggtgaaatagctagattaagataataaaatttatatatagctaggatcataaatggattacgaaacatttttatcttaacaatataacacatgtttatatataagttattatagtattatatatttccgttgc

SEQ ID NO: 262193 - DNA, 345 bp, Zea mays
aagaatgattatgacaagtctttaccactttgatcataattatattaagcaaacatcaggactcatgatgacaatgaaggatgtgatgggtttgtatctgttagccatataaggttgcacgttaagcatgcccctgacttgccggacgagcagcaagacttcgggacctagattggctaaggcactaagaatagaatagcttatctaccgatatgtaaagtcttatttccacctttcgaattcttttcctcggtagctaagcttatttagttgcctaatggtcgatgttatcttttttattgtgtgattcattccactttcatggtatttccgctcttgttacct

SEQ ID NO: 262194 - DNA, 2056 bp, Zea mays
cgacctcacacgtcccccggatccgacggccaacagagcgcgtggcccctctccgccgccacctctgtacaaaatgcccgccccaccaggacaccaccacgccgaatccgccctctagtgactagttcacgtcagttgctgctccccccaccttctcctcctgctcctgccctcggtttctgatcagcgaacatgggaacccgcggcgtcgccctgctgctcctcgcggcggtgctgctcctccaggcgctcctcctcgcgtcgtcggagggcctggtgcgggtcgcgctgaagaagctgcccgtcgaccagaacggccgcgtcgccgcgcgcctctccgccgaggagaggcagcgcctcctcctccgcggcgccaacgccctgggctcaggcggcgacgacgactccgacgtcatcgcgctcaagaactacatgaacgcgcagtactttggggagatcggcgtcggctcgccgcagcagaagttcaccgtcatcttcgacaccggcagctccaacctctgggtgccgtcctccaagtgctacttctcgatcgcttgctacttccactcgcgctacaagtcagggcagtcaagcacttacaagaagaacggaaaacctgctgccatacgctatggaactggttccattgctggttttttcagtgaggatagcgttacattaggtgatctggttgtgaaggatcaggaatttattgaagctacaaaggagccagggcttaccttcatggttgcaaaatttgatggcattcttgggctaggctttcaagaaatctctgttgggaatgcaacaccagtgtggtataacatggtgaaacaaggtctcatcagcgaccctgttttctctttctggtttaaccgacatgctgatgaaggagaaggtggtgaaattgtgtttggtggaatggattctagccactacaagggtgatcacacgtttgtcccagtcactcggaagggatactggcagttcaacatgggtgatgtcctggttgatggaaagtccactgggttttgtgccggtggctgtgcagccatcgcagattctggaacttccttgcttgctggccccacagccataattactgaaatcaatgaaaagattggtgctgctggtgtagtcagccaggagtgcaagactgttgtttctcaatatggacagcagatcctagatcttctgctagctgagacgcaaccagcgaagatctgttctcaggttggcctgtgcacttttgatggcactcacggtgttagcactggaattcgtagcgtagtggatgacaaagctgggaaatcaaatggtggtctcaagagtgatccaatgtgcaatgcctgtgagatggctgtggtatggatgcagaaccaactggcccagaacaagacacaggagctcatcctgacctacattaatcagctttgtgagcgtcttccttctcccatgggagaatcagccgtggactgtgccagtcttgggtccatgcccgacattgcgttcaccattggaggcaagaagttcaagctgaaaccggagcagtacattctgaaggtcggtgaaggacaagctgcccagtgcatcagtggattcacagctatggacatcccaccacctcgtggccccctctggatcctgggcgatgttttcatgggagtctaccacaccgtcttcgattacggcaagctgagggttggcttcgcggagtcggcctaaggaacgtatggtttggcgcctcctccagaggaggcaaaacgcatgcgccgagagaaaagcttcgcttgtttttaacttgtgtatttatgcggccggcggtgtgtgtatatatgctacatgtttagtgatgctttccgagacctgagacaatgcccgtctgttttaacctggcccaaggaaatttctcgatgtgtttgccttcgtggttaagcccatcttgtacccaattgtcaccgtgcatcctggcaacgtgtactcaagtatttttccttgagttatgcgtgagaaaaaaaattgatttcgttttttatatttaaaatttttttttttt

SEQ ID NO: 262195 - DNA, 952 bp, Zea mays
atactcgtccgcccacgcgtccgcccacgcgtgcgccctcgcgtccgcccacgcgttcgctggtgtagtcagccaggagtgcaagactgttgtttctcaatatggacagcagatcctagatcttttgctagctgagacacaaccagcgaagatctgttctcaggttggtctgtgcacttttgatggcactcatggtgtcagcgctggaattcggagcgtagtggatgatgaagctgggaaatcaaatggtggtctcaagagtgatccaatgtgcaatgcttgtgagatggctgtggtatggatgcagaaccaacttgcccagaacaagacacaggagctcatcctgaactacattaatcagctttgcgagcgtcttccgagtccgatgggagaatcagccgtggactgtggcagtcttgcgtccatgcctgacattgcgttcaccattggaggcaagaagttcaagctgaaaccagagcagtacattctgaaggttggtgaaggacaggctgcccagtgcatcagcggattcacagctatggatatcccaccaccccgtggccctctctggatcttgggtgatgttttcatgggagtctaccacaccgtcttcgactatggcaagctgagggttggcttcgcagagtcggcctagggatatggtttggcagcaacccgtccagaggcaaacgcgtaatttgtgtgtttatgcggccggcgatgtgtgtatatatgctactacatgtttagtgatgctttccgagacctgagacaacgcccgtctgttttaacgtggcgcaagaataattctggttctgcatgtattctccgtacacaaaggcgtgtctgatactctgatgcaatggtgaccatcttgcggttgcgggtttgaaaaaaacaaaaagcaattgcggcgatcgtcttacaacaaacaaattcgggggtccgccga

SEQ ID NO: 262196 - DNA, 1773 bp, Zea mays
cgcgaggatgctggaggacgtcgtcgctgtcacgcttgacgttagggcctccgatgcttgacgttagggcctctcgcttgaagaggaacacaaacagagctcatgttttttattttgctctgcattatctactgcttctctgtgggggcgttatttacagtatgtggcctgtttgttgtgttgttcctgcggaagggcgggcgggccgaaggtgtttaagaaaatgttgttgtcaacatcaacctcctggaagggccagaacgcaggcagcgcctcaactcgtcaccccatcagcacggatgattatcacgagtacttcaagcgctcattttaggaagacatcgctgcgcaagtgcctcaaggagtggaatgtaccggtttttggttgatggtgtctggaggtgtgatgagacaaaaccctttgtacgtgatgaatatggactgatcagcaatgaagtgcttgtggaaaacaatgtactacccgttgtgcagccagagccttctatcagaggaactaatatggataagggtaccattttgaaaacaatgcccctggagccatcatctcagaacccaagcatgcaaatagcagttatccgccatgtggtctctggaatattattacacaataccatatatgacgttgttcccctttctagcaagggtcttgctctggttcctttttgggatgaccgtcagggaaccataacaggcatgctcactgcatcagattttgttttaatcttgagaaagttgcagagaaacattcaagttattggcaacgaagagcccatttctgcttggaaagaagcaaagctacagttctatggtgggcctgatggtgctgtcatgcagagaacgccattaatccatacaggcaacattgatctcagggccaagaaagaagctcaactcggcatgcttcctgtttgaagcaagggcaacaaacttaccccaccagatctctgtcgccaaagcagggctagtgaataagctgtgtttcctcccggattgtcactgcttttatatttgtgcatttattttgagggaaacattttgcccaaaaaaggcctgcagtgcacgttttaaacaagtcatttgaaccaactcttatgctgaaaactgtatgtgatactgcagaaggcaacacactagcttgataggaaagttggttggcaagcataggtggactctggtgccttcatatatctatatatatattttaagttgacgatcttcgtgatgctgaaactgatgaagacctccgatgaaaaaagagacatgctgcacatgcacgagggtacttgcagatcgatgtcggctctatggacgaacactcgaccaagtcagatgaggagtatgagggcctagccatgcgcgacgtgatggctactggtccgacgatgagcagcaagctgtgagttaaagatgaactcacctgccctggagagtaacatccataggagtgaggcaaaatggctggtaccaccacaacatggacccgttcctgaagatgtccaaggaggtggtagccgacaccataatgtcttgtgtcattgtgtcaccggtcggcaacacactgcgctggtaccggcgggtgttgtgtttcttaggcgtctgcttctgtgctttgagttgtgctatagagtggttgtgccaactactgattttaaaagaaaaaggtgagctgagaatcattgttgaaaccaaacatgtaattgttcgttctcaaaaacacaaaaaaaaaaaaaaaaaaaaagaaaaagagaaaaa

SEQ ID NO: 262197 - DNA, 1431 bp, Zea mays
atcggcgaaggatctgttgtgcgatctaactaagtccccttcgaatctccccacggtctagttgctacctttctcttctgctgctcgccctcggtttctgatcgcgaccatgggaccccgcggcgtcgccctagcgctcctcgcggcggcgctcctccaggccctcgcccccgcgtcggcggcggcggcggcggggggcctggtgcgggtcgcgctgaagaagcagcccgtcgaccagaacgcccgcgtcgccgcgcgcctctccgccgaggagaggcagcgcctcctcctccgcggcgccaacgccctgggctcggccggcggcgacgacgactccgacgtcatcgcgctcaagaactacatgaacgcgcagtactttggggagatcggcgtcgggaccgccgccgcagaagttcaccgtcatcttcgacaccggcagctccaacctctgggtgccgtcctccaagtgctatttctcgatcgcttgctacttccactcgcgctacaagtcagggcagtcaagtacttataagaagaacggaaaacctgctgccattcaatatggaaccggtgcaattgctggttttttcagtgaggatagcgttaaattaggtgatctggatgtgaatgatcaggaatttattgaagctacaaaggagccaggccttaccttcatggttgcaaaatttgatggcattcttgggctaggctttcaggaaatatctgttgggaatgcaacacctgtgtggtataacatggtaaaacaaggtctcatcagtgaccctgttttctctttctggtttaaccgacatgctggtgaaggagaaggtggtgaaattgtgtttggtggaatggattctagtcactacaagggtgatcacacctatgtcccagtcactcagaagggatactggcagtttaacatgggtgatgtcctggttgatggaaagtccactgggttttgtgctggtggttgtgcagcaatagcagattctggaacttccttgcttgctggccccacagccattattactgaaatcaacgaaaagattggtgctgctggtgtagtcagccaggagtgcaagactgttgtttctcaatacggacaacagatcctagatcttctgctagctgagacgcaaccagcgaagatctgttctcaggttggcctgtgcacttttgatggcactcacggtgttaggtgaagactgcaaaccatctctatagttagttacacactgtttgatgatgctgtgacatagcttgtcctgtgcccccatgataacgataaccatctgggcgtcctgtcattatggggtcattgtacctatttcttactttgttatatgtttatgcaaacacagcactggaattcgtagcgtagtggatgacaaagctgggaaatcaaatggtggtctcaagagtgatcca

SEQ ID NO: 262198 - DNA, 1221 bp, Zea mays
atcaaccatatgtgtgtttgatgttttttctatgcttagacctaaacaaaacattcttggtagccacatctaaaacattcatttcaagttctacattaattcatttatattccatcaacttttaaaatacaacacttagtttgtttgaaaagaaatagtttttgtgaaatcttcaaacaaggcttgacaatgatttattcatcgacaatgcatctgagccctctttgcattgtaagctcctacaatgaagttatacaaaagtcttatctattcattttggtttaagctggttgagcactttttacaatatctggtcaacacatctaggatgactcttcacatctgtcaattcaaattctcttcaaaacagctaatattgctccatattgtcttttgaagcttcctggaaaaaatgtcttttgaagctaatcttgctccatacagctaatcttcacatctttcaaagcatttgctagggcccttcggtgagcaatagaatacgacttgcgctaccaaagcgtccatagctgaatgcaaaccattgagatggtccaggttgaggacctccatgacacctatgttggtgtgggttgtgccgccccatcgtgaccgtcatcgatggggcctccgagtccaggagaagacctccgatgaagaaagagacatgctgcacatgcacgagggtacttgcagatagatgtcggctctatggacgaacactcgaccaagtcagatgaggagtatgagggcctagccatgcgagacatgatggctaccggtccaacaatgagcagcaagctgtgagttaaagatgaactcacctgtcctggagagcaacatccataggagtgaggcaaaatggcgggtaccaccacaacatggacccgttcctgaagatgtccaaggaggtggtagccgacaccataatgtcttgcgcgtcattgtgtcaccggccggcaacacgctgcgctggtaccggcgggtgttatgtttcttaggcgtatgtttctgtgctttgagctgtgctatagactggttgtgccaactactgattttaaaagaaaaaggtgagctgagaatcattgttgaaaacaaacatgtaattgttcgttctcatcagttgtgccaactaccaagcatttcattgatcagaatttatcgtggcccatgagaaccaaaagtaagacccttttcaataacattggatgcaaatttttgctt

SEQ ID NO: 262199 - DNA, 1066 bp, Zea mays
caagcatttaaaataatgcatgatgagggtcttgctctggttcctctttgggatgaccgtctgggaaccataacaggcatgctcactgcatcagattttgttttaatcttgagaaagttgcagagaaacattcaagttattggcaacgaagagcccatttctgcttggaaagaagcaaagctacagttctatggtgggcctgatggtgctgccatgcagagaaggccattaatccatgttaaggattcagataatttagtggatgtggcactgactataatcagaaatgaaatatcttcagttcctatctttaagtgcatggcagattcatcaggggtgcctttccttaatcttgcaaccttacaggggatcttgaaatttctttgctcgaagctacaagaagaggctgagggctgttcccttctgcacaatcagcttctcagtattcctattggtacatggtctccacatacggggaggtcaagtagcaggcaactcagaactttgctactgagttctcctctaaatacctgcctggatattctgcttcaagatagagtaagctcaattcctataggtggggacaatggatccctccgtgatgtctactcactcagtgatatcatggctctggcgaagaatgatgtttatgctcgcatcgaacttgaacaagtgaccgtacaaaatgctttggatgtgcaataccaggtgcatggccgaagacagtgtcatacttgtttacagacgagtaccttgctggaagttttggagggattgtccattccaggagtgcgacggcttgttgttattgaacaaagtaccagatttgtggaaggaatcatctcattgagagacgtatttacatttctccttggatagcatgtgtagccattccatacatgaaaaagcttgctgtacttggttcaaacgaaataaaaagcttacaaatgtgatagtcatcttcttgtttccatcttgttttggttgatattatgcctcagacactgcatatttaaactgtgccgaaaacaaaagaacagtggcaggtcctgcagcccttctaagc

SEQ ID NO: 262200 - DNA, 757 bp, Zea mays
caacatcaacctcctggaagggccagaacgcaggcagcgcctcaactcgtcaccccatcagcacgtaccggtttttggttgatggtgtctggaggtgtgatgagacaaaaccctttgtacgtgatgaatatggactgatcagcaatgaagtgcttgtggaaaacaatgtactacccgttgtgcagccagagccttctatcagaggaactaatatggataagggtaccattttgaaaacaatgcccctggagccatcatctcagaacccaagcatgcaaatagcagttatccgccatgtggtctctggaatattattacacaataccatatatgacgttgttcccctttctagcaagttaacagttttggacactcagcttcctgttaaacaagcatttaaaataatgcatgatgagggtcttgctctggttcctctttgggatgaccgtcagggaaccataacaggcatgctcactgcatcagattttgttttaatcttgagaaagttgcagagaaacattcaagttattggccacgaagagcccatttctgcttggaaagaaccaaagctacagttctatggtgggcctgatggtgctgccatgcagagaacgccattaatccatgtactgctccatatatttgctgattctttcatttgattcaatgtgttaaggattcagataatttagtggatgtggcactgactataatcagaaatgaaatatcttcagttcctatctttaagtgcatggca

SEQ ID NO: 262201 - DNA, 652 bp, Zea mays
aacacatcggaggtgtaagagttggtgaacaccacgattcggaaaagttccagtttggaaggccaagaagatttaagcacatggatatgattatcacgagtacatcaagcgctcatttgaggaaaacatcgctgcgcaagtgcctcaaagagtggaatggggtacaactaatgattgggggaaatcaggcagacgagggcatgttgacagaccaagtggcgaggcaaaattttctaatgactttgaagttcattatattggcagtaactgatgatcccttctgtgatggaccgagtaaaccaagcaattcgggatattcaactccactttgatgactgccataattactgaaatcaatgaaaagattggtgctgctggtgtagtcagccaggagtgcaagactgttgtttctcaatatggacagcagatcctagatcttttgctagctgagacacaaccaacgaagatctgttcccaggttggtctgtgcacttttgatttcccagcttcatcatccactacgctccgaattccagcgctgacaccatgagtgccatcaaaagtgcacagaccaacctgggaacagatcttcgtagtcttccctgcgcttgctcgctccttcttgcccccatggcgctgctacgcgtccagg

SEQ ID NO: 262202 - DNA, 446 bp, Zea mays
cgaatatttcgagcacatcggaggtgtaggagttggtgaacacccatgatctgtagatgtcgcagttggaagggtccaggaagatttatgcacagggagatgattatcacgagtacttcaagcgctcatttgaggaagacatcgctgcgcaagtgcctcaaggagtggaatggggttacaactattgattgggggaaatcaggcagaggagggcatgttgtcggaccaagtggcgaggcaaaattttctaatgattttgaagttcattatattggcagtaactgatgatcccttctgtgatggaccgagtaaaccaagcaattcgggatattcaactcccctttgatgactgtgtgtaccagcatgagatgttgattacaattcccgacatatttaatggtggttattttttatttttcaaattaaagtgatgtttggtgttccgt

SEQ ID NO: 262203 - DNA, 306 bp, Zea mays
gcccatttctgcttggaaagaagcaaagctacagttctatggtgggcctgatggtgctgtcatgcagagaacgccattaatccatgtacttctccatatatttgctgattctttcatttgattcaatgtgtaagcagttgcaagatcagcactttcataatataaatatattacttgtatgaaattctagatatggtctccaatacaacattaagcttaatgtcgtttgtgttaaaaaattacaaatcatcttatgtcttgaaataaggagaaattgtttgggtttctcctccccaactttcagaa

SEQ ID NO: 262204 - DNA, 264 bp, Zea mays
tatggtttggcagcaacccgtccataggcaaacgcgtaatttgtgggggtatgcgttgccgacgatgtgtgtatgtatgctactacatgtttagtgatgctttccgagacctcaggcaacgcccgtctgttttaacgtggcgcaacaataattctggttccgcatgtattctccgcactcaaaagcgtgtctgattctctgatgctaaaaaaataaattaaattttattattttattattttaatttataatattttatatctt

SEQ ID NO: 262205 - DNA, 1374 bp, Zea mays
  unsure (1)..(1374): unsure at all n locations
acaatcttgaacctgacaaagtcatcatgtttgtcgagaacagacctttcaatgaccagaggtatttcttggacgatgagaagctcaagagccttggatgggctgagcgcaccccatggccggaaggcttaaaaaaggcaatggagtggtatgtagcaaattctgattattggggtgatgtttctggggccttactgcctcatccaaggacattgatgatgccagggtgcgagggctcagaggagattaaaggaatactcagccggtttaataacattcaaacaaaggtcggttcaacatcagataatgctccagaaccgcatgccttcaagttcttgatatatggcaggacaggatggatcggcggacttcttgggaaaatatgtgagaagaaaggaattccatatgaatatggaaatggccgcttgcaagagcgttcttcactcgtcctagacatccaaactattaagccaacacatgtcttcaatgccgctggtgtgactggaaggcccaatgttgattggtgtgaatcgcacaagccggacaccatccgtaccaatgttgtgggcaccttgaatctagcagatgtatgtaggaagcatggcttattgatgatgaactatgccactgggtgcatatttgaatacgatgcacatcatcctgaagggtcaggtatcggcttcaaagaggaagatacaccaaattttactggttcgttctactcgaagacgaaggcaatggtcgaggagttattgaaggagtatgagaacgtctgcactctgcgagggcggatgccgatatcctctgacctcagcaacccgcggaacttcgtgacaaagatcagccgttacaacatgggtggtgaacatccccaacagcatgacgatattggacgaactcctgcccatctcagtggagatggcgaagaggaacctgcggggcatctattacttcaccaaccccggcgtcgtcagccacaacgagatcctagagatgtacaagcagtacatcgaccctagcttcaagtggacaaacttcaccctcgaggagcaggcgaaggtcatcgttgctccgcgaagcaacaacgaagatggacgcaaccaagctgaagaacgagttccccgagctgctgtcgatcaaggactcgttgatcaagtacgtctttgagcccaacagaaaggtgcccccagactgaagcccgaagggctggcacagctgataccgtacaacacagcaaccattagtgttagactatgtgtgtgggccagcactactttacttttgggctgtcggtctattagggttagagtcctgtgagtctatatattgtacctcatctcttatacaatacatttttgggctgtgagtcttnng

SEQ ID NO: 262206 - DNA, 1903 bp, Zea mays
ttgcctcactgccccacactttagcccaaggaggccggcctcgcctcgcctcgcctcgcttcatacgcccgcccgtccgtccttgccgatccatccacccaataaagcgcctgtacagatccaacccttaggatccggatcgccttacccccccgcgacgatttgcgcgattcgattcgattcgattcgattatcctccgattttccccgttttttgtaggtttcctctctttttcgatcggtgtgctagggtttgggcgcgcgcaggcgtcgcattccagggtaatcattggttcgacgggctagggtgctttctcacccggggaacggaagcgaatccagacgatggagaagaagaaggtggcgataccgctggtgtgccacggccactcgcggccggtggtggacctcttctacagccccgtcacacccgatggctacttcctcatcagcgccagcaaggatacaaatccaatgcttcgtaatggtgagactggcgactggattgggacttttcaaggtcataaaggagctgtttggagctgttgccttgacaggaatgctctgagggctgcatctgcttctgctgacttttcagctaaagtatgggatgcacttactggggatgagctacattcatttgaacacaagcatatagttcgggcatgtgccttctctgaggatacacaccttttactcactggaggcatggaaaagattttgcgtgtgtatgatatgaatcgtcctgatgcagctccaagagagcttgacaaatcacctggttctgtccgaactgctgcctggcttcatagtgaccaaactatattgagttcctgcactgacatgggtggagtaaggctgtgggatgtgagaactggtaaaattgtccaaactcttgaaaccaaggcttctgtcactagtgcagaagtaagccaggatggcaggttcatcactactgctgatggctcaagtgtaaaattctgggacgcgaatcactttggccttgttaaaagctatgatatgccatgcaatgtggaatcggcttcacttgaacctaagtctgggagtaaatttgtcgctggaggagaagatttatgggttcatgtatttgatttcttcactggtgaagaaatagcttgtaacaaaggacatcatggtccagtccactgtgtccggtttgcaccttgtggtgaatcatacgcatcgggttcagaagatggcaccattcggatctggcagcttagcccggctaatgctgatgacaatgaggtggccaatgcaaatggcaagacaactgctggggtaaacgaagttacaaccaagatcgaaggcttccacattcccaaggaggggcagaccgaggggtaggatctcatgtgttttgtggtgcttgtggttcttattgcgaggagattgccatcagagctgcagtggtcattcagtttccctctgcggagtcatcatgtctgcgatccaagggtatcctggcttcatgagtcatcatcagcactggggaaaaacaagcaagcaaatggtggtgggtttttggatggggccctcgctttgatagaacatagcaattgtagcgtcaaaaataaacaagagttgggtagtttaggtaccgtgtttgcgttcattaaagtgaagtattctgtatcaccacaggtaaccttgattgtggtgactatttttttttggtttgcctcaccgtgttccagtcccctaaaaaaatacttgaggccttcatcgttggaacaccgaccttcaaagctgtagaccacttcttgatcctgaggctagctctggagcgtcatgcccccccaatgatagatttctgttcagatggcttgagctctctagaaaaaaaaaaaaaaaaaaaaaaaaaagggcggccgctcgaaat

SEQ ID NO: 262207 - DNA, 694 bp, Zea mays
ggaacttatcgctcagcttagcatgccgggttatttttttcctggtcagcagtagctgcaatacaaaacgctttacaccatgattccatctgctaagaagtgtatgtatgaagataacacactttgctaccattgtaaatctcatcgttcttgctttctaattttattgggtaccaggtaagatccacatcctgggccagcatcgttgagcacattgaactcggccttctttcttgtcatcgtgatataccaaaaagcctcttttgtaggcctctttgcaggtggcgtacgtgaccttttctttgtagtacttcaacagcatcaagagacacaaccgatgaaaatctggaacactaagttttaggaaccaaacttttcaaaccagttgttttctcacatgcacagtgagctgcagcctccaagagagcttgacaaatcacctggttgtccgaactgctgcttggcttcatagtgaccaaactatattgagttcctgcacagcagaaaacatgtccacaggttgtggcagtaggattttgccggatgctgagacacaaggtgcatttgctcttgccattggaggtctctgaatgagaagctatatctgcagctttaccactgcggatgatactgactatatttccaccttcatttacaagatggatgctccgacctggtttaacattactaggac

SEQ ID NO: 262208 - DNA, 520 bp, Zea mays
acagtgtccggcatcttggccccttccccacccttcgccctctcaaggaggccggcctcgcctcacactcccgcccgcctccggcgattcatccacccaataaagtatccaaccctaacgatccggatcgccttaccccgcgtcatccacgcgaattgattcgattatcctcggattttccccgtttttttgtgggtttcctatcttcttcgatcggagtgctagggtttgggcgcgctcggtgggcggcgtactccagggtcatcgttagttggacgggctagggtgctttctcaccgggggaagggaagcgaatccaaacgatggagaagaagaaggtggcgatcccgctggtgtgccacggtcactcgcggccggtggtggatctcttctacagccccgtcacacccgatggttacttcctcatcagcgccagcaaggacacaaatccaatgcttcgtaatggtgagactggtgactggattgggacttttcaaggtcataaaggagctgtttggag

SEQ ID NO: 262209 - DNA, 438 bp, Zea mays
gttcttattgcgaggagattgcccatagggctgccacggtcattcagtttctccctgcagagccatcaacacctgtttgcgatccaagggtatcatggcttcaagagtcatcaccctggtaactggggaaaaaccatacccctcgtaagcatggtggtgggtttttggatggggccttcgctttgatagaacatagcaactgtagtgtcaaaaataaacaagagaatacaacttgggtaggtatcgtgtcttcggtcattaaagtgaagtattctgtatcgccgccagtaatttttgtggcttttgatgttggaacgccgattttcaaatcaaagctgacgaccacttcttgatcatgaggcaatatagatagcgtcatgcccatatcaaatgccagatttctctgctctactggaaaaaaaaaaaagaagaaaagga

SEQ ID NO: 262210 - DNA, 1442 bp, Zea mays
cagcaacttccctcagatcccatccacccctcgctattaaagcagcccaggccgccgcccgccgccgctcacccaccaatccacagcgacacccgaccccgccgtcgcgatgaggccggcgctgctcaagtccacggccgagctcctccgccgcagccgcggctacgcctcctcggccaacccggagcggaaggtggccatcctgggcgctgcgggcggcatcgggcagccgctctccctcctcatgaagctcaacccgctcgtctcctccctctccctctatgatatcgccgggacccccggcgtcgcggccgacgtctcccacatcaactcccccgccctggtgaaggggttcatgggggacgaccagctcggggaggcgctcgagggctccgacgtcgtcatcatccccgccggggtgcccaggaagcccggcatgactagggacgacctcttcaacatcaacgccggcatcgttaaggggctctgcactgccatcgccaagcactgccccaacgctcttgtcaatatgatcagcaaccctgttaactccactgtcccgattgcggcggaggttttcaagaaggctggtacttatgatgagaagaagctgtttggtgtgactactcttgatgttgttcgtgctaaaactttttatgctggaaaagcgggtgtgccagttactgaggtgaatgttcctgttgttggaggccatgcgggtattactattctgccactcttctcgcaggccactcctgcaagcaattcgttgtcccaagaagacattgaggccctcaccaagaggacacaagatggtgggacagaggtggttgaagcaaaggcgggaaaaggctctgcaacgttgtccatggcatatgctggtgctgtttttgcagatgcatgtttgaagggtctgaatggagttccagacattgtagagtgctcttttgtgcaatcaactgtgacagagttgccattctttgcctccaaggttcggctcggcaagaatggagtggaggaagtgcttggtctgggtgagctcaacgagttcgagaagaaggggctggaaaacctcaagggcgagctcaagtcttccatcgacaagggtatcaagttcgcccacgggaactaggcaactcgcccggcttctaacagttgatatcccttgcaaaatttttttttttgactgccttttcccccccgccccgttatggttggcgcaacgaggctttgtggtccataataaaacacagcggagtgtagaaaatgtgcaccaggagcagtttacaaacagcggttcttttttgtgctgaaccaccagtagttgagccgtgaaggaatggaaaaactttccccttgcccaaaaaaaaaaaaaaaaaaaaaaaaaaaaaaaaaaaaaaaaaaaaaaaaaaaaaaaaaaaaaaaaaaaaaagggcggccgc

SEQ ID NO: 262211 - DNA, 672 bp, Zea mays
  unsure (1)..(672): unsure at all n locations
cccacgcgtccgcccacgcgttcgcccacgcgtncgcccacgcgtccgacgagctcaagtcttccatcgacaagggtatcaagtttgcccacgggaactaggcaccttgcccggcttctaacaattgatgccccttgcatttttgtttgactgcctatttttcctgccccccgtatggttggggcaatgaggcgtagtggtcgataataaaacccagcggaacaaagaaaacgtgtaccagaaactgtttgcaaacaccggtgcctttttttttgtgttgaaccaccattagttgagccgtgagggaatggtgaacaagctttccacttgctcatttccgagcgcttctctttgattgtatgcatggtttggactcatgactggacgtcttggcagttggcttggcacccaggaatctaatcactggagttgctgctgttatcgagattttgcagcgttgcattctgatcggaactgttgagctggacaatttgatggttctaaatgcatcgtatggatgcttgttcgtatgcacccattgatgccactaaacgcaatgcatggatgcttgcttgtatgttgtatagttagaatttatattggctagtttatctaaggtcatatgcagaaattctaataaacctcaagcataatactaaggtcctttttggt

SEQ ID NO: 262212 - DNA, 576 bp, Zea mays
  unsure (1)..(576): unsure at all n locations
ctcgagcgctcgagccgcccaaaacccctcgcctttcactctctcncaccgccgtccgcagccaacaacttctcttcagatcccaatcccatccaacgtttggatcctctcctccagtgctcccctcacttctcgccgccgcccactgccgctcccccaccaatccacagcgagacacgcccgagcgagtgatccccgacccagccgccgccatgaggccgtcgctgctgaagtccacggccgagctcctccgccgcagccgcggctacgcgtccacggccaatccggagcggaaggtggccatcctgggcgcggcgggcggcatcgggcagccgctctcgctcctcatgaagctcaacccgctcgtttcctccctctccctctacgatatcgccggcacccccggcgtcgcggccgacgtctcccacatcaactcccccgccctggtgaaggggttcatgggggacgaccagctcggggaggcgctggagggctccgacatcgtcatcatccccgcaggagtgcccaggaagcccggcatgaccagggacgacctcttcaacatcaacgcccggc

SEQ ID NO: 262213 - DNA, 638 bp, Zea mays
ccacgcgtccggccctcaccaagaggacacaagatggtgggacagaggtggttgaaggaaaggcgggaaaaggctctgcaacgttgtccatggcatatgctggtgctgtttttgcagatgcatgtttgaagggtctgaatggagttccagacattgtagagtgctcttttgtgcaatcaactgtgacagagttgccattctttgcctccaaggttcggctcggcaagaatggagtggaggaagtgcttggtctgggtgagctcaacgagttcgagaagaaggggctggaaaacctcaagggcgagctcaagtcttccatcgacaagggtatcaagtttgcccacgggaactaggcaccttgcccggcttctaacaattgatgccccttgcatttttgtttgactgcctatttttcctgccccccgtatggttggggcaatgaggcgtagtggtcgataataaaacccagcggaacaaagaaaacgtgtaccagaaactgtttgcaaacaccggtgcctttttttttgtgttgaaccaccattagttgagccgtgagggaatggtgaacaagctttccacttgctcattttcgagcgcttctccttgattgtatgcatggtttggactcatgactggac

SEQ ID NO: 262214 - DNA, 398 bp, Zea mays
tcttccattgacaagggtatcaagttcgcccacgggagctaggcaactcgcccggcttctaacagttgatatcccttgcaaaatttttttttttgactgccttttcccccccgccccgttatggttggcgcaacgaggctttgtggtccataataaaacacagcggagtgtagaaaatgtgcaccaggagccagtttacaaacagcggttcttttttgtgctgaaccaccagtagttgagccgtgaaggaatggaaaaactttccacttgctcatttccgagcgccttctcattcattgtatgcatgttttggactcgaggctggacgtcttgcacacaggaatccaatcactggagttgcaaaaaaaaaaaacataatcaattaaatggtcgaactg

SEQ ID NO: 262215 - DNA, 983 bp, Zea mays
ttcgcgatcttgttctcagttctacggcggcgatacccccctccactccccaccctgtcacccccacaaaataagtcctcccgcgccggcggcgctctcctcctcccggccgaagcacctcctgcgccccatcctgcggggtttccacgcctcagcgcgggccctggcgcgggtggagccgcacgagttctccaagcccagcgagtacctgggcagctgggagcccgcggcggagcctcgggaggcgtgggcgcggctggaccggctgcgcaaggggtacgcgagcgaggtgcgggagctgcggcggcagtacgcctacgaggtgcagctgttgcaggccgagcggcagcggaaggccgacgccagagccgaggccgcccgcgccgccaaccaggagcgcaaggccgccaagctcgccgccgcccagacgcgcgccgccgagcgccgtgcgttcgaggaggacttccgccagaccctcatgaaagaaagagctgagaagccggagagctggcggtagaaggagaagcgcaaagaggagaagaaggcaattaagaaggagctcctgcgcaagaagagcagcatgtggctttctgaagataagattgaagaacaaatacaaactgctatcatgcaaaccactcctctatgaggttggttctgcgagtaaagctgataatagtagcttgcgaatcatgaggagggggggtggacatcacatggacgtgctcgtcgttacctgtgagaagctaataagaacggacctggtatttggcgtggaaaaggccgtgtgtttatttagttagacttgatcacaccaaaagctgtgcctggagagatggctgaatctgctgtgccttcctttttcacgatccatttgttgttctcgtctgcttaaactcttggcgtgatctggacggaacatatttttggcaattttcttacttggacgaaaaaaaaacaaaaaaaaaaaaaaggggggcccc

SEQ ID NO: 262216 - DNA, 1999 bp, Zea mays
cacgttaccctattctttctgctcaacttggcctcacgcacgatagccgccgccgtcgaccagagcactcccccctcgtcgccacgatgtcgtctgagcctccacccgcctcctctgccgccgccggagaggaactcgctgctgacctttccgccgctaccctcagcaagaagcagcagaagaaggacgcgaggaaggcggagaaggcagagcagcgccagcgtcagcagcagcagcagcagcagccggcggacgccgaggacccgttcgcggccaactacggcgaggtccccgtcgaggagatccagtcaaaggccatctccggccgctcgtggtcccatgtcggcgacctcgacgactccgctgcgggccgctccgtgcttatccgcggagccgcgcaggccatccgcccggtcagcaagaagatggctttcgtcgtgctgcgccagagcatgagcaccgtgcagtgcgtgctcgttgccagcgccgacgccggcgtcagcacgcaaatggtgcgcttcgccaccgccttaagcaaggagtccatcgtcgacgttgagggcgtcgtgtccctccccaaggagcccctcaaggccaccacgcagcaagttgagattcaagtcaggaagatctattgcatcaatagggctatcccgacccttccaattaaccttgaagatgcggctcggagtgaggcagattttgagaaggctgaactggctggagaaaagcttgttcgcgttggccaagatacccgcttgaactacagagctattgatctacgaacaccctcgaaccaagccatattccggatccagtgtcaagttgaaaacaaatttagagaatttctgttgtcaaaggactttgttgggatccacacgccaaaattgatttctggatctagtgaagggggtgcggctgtattcaagcttctgtacaatggtcaacctgcttgtttggcacaatcccctcagttgtacaagcaaatggctatctctggtggttttgagcgagtatttgaggtcggccctgtgtttagagcagaaaattcaaacacacacaggcatctatgtgagttcgttggtcttgatgctgaaatggagattaaggagcattattttgaggtctgtgacattatagatggcttattcgtatcaatatttaaacacttgtctgaaaactgcaagaaagaactcgaatcaataaacaggcagtatccatttgaacctctgaagtatctagacaaaaccttgaagctcacttatgaagaaggaattcaaatgttgaaggaagccggaacagaaatcgagcctatgggtgacctcaataccgaagctgagaaaaaacttggtcggcttgtcagggaaaagtatgacacagattttttcatcctgtatcggtatcctttggctgtacgtccgttctacaccatgccttgttatgacaacccagcgtacaccaattcttttgatgtcttcattcgaggcgaggagataatatctggagcacaaaggatacacactcctgagctgctggccaagcgcgcgacagagtgtggaatcgacgtgagcactatctcggcctacattgaatccttcagctatggcgtgccgccacatggcggtttcggggtgggtttggagagggtggtgatgctgttctgtgccctgaacaacatcaggaagacctccctgttcccgcgcgacccgcagaggctcgtgccgtaagtttctgattccaagcctgagtcttcgagtggtctacggagcagatccgatgttgttaccatcagagttgacttgcaatcttagctctgaacctggcgattaccgtggatcagagttcctgttgaatttcacaaaagcctacttgttcctaatagattgctgcaaccaacaatattacgaccctttcgggcttttcttcccgcctcacgtgttattctggtctatacttgtttttaagtgcaagtattgctcagttaaaacccacgcgtccg

SEQ ID NO: 262217 - DNA, 1189 bp, Zea mays
  unsure (1)..(1189): unsure at all n locations
atcgtcaccaacacgcacgcggcctctgcctccgcgtctccatcctgaggctccgaatcgatctcccttccccaccaaaccggagcacttcggaggccggacccggcgagaagcgaccgaccgcagccagctcacgtctccctcttcatccaccatgctgagggtcgcgggcaggcgcctctcgtccgctctcgcctggcgccccgccgccgccgcctcaggctcccggggccctctcgccggtacactacccggccgcgacgacgacgacacacgcgactgcagggcgcgtttcgccatcgaatctcccttcttcgccgctgccagagggttttctgcagagactcttgctccaagaaaccaggatgtgggcttatccgagctcccagcaactgtggcagctgtgaagaatccaagtggaaaaatcgtgtatgatgagtataaccatgagcgctacccacctggagaccccagcaagcgtgcatttgcctactttgtgctgagtggtgggaggttcatttacgcatctttgctgcgacttctcgtcttaaaatttgtcctaagcatgtcagcaagtaaggatgttctcgcgcttgcctcacttgaggttgacctctcaagcattgagcctggaaccacggtgacggtgaagtggcgtggcaagccggtcttcataaggcggaggacagaggatgatatcaagttggccaacagtgttgacgtcgcatccctccgccacccagagcaagatgcagagcgcgtcaagaaccccgaatggctggtcgtcattggggtctgcactcacctgggctgcatcccgctccctaatgcaggagactttggtggctggttctgcccgtgccacggctcgcactacgacatttctggtaggatccgcaagggcccggcacccttcaacctggaagtgccgacatacagcttcttggaagagaacaagcttctcatcggctgagattgctgttagtgttgttcgtgtcatcgtgtggccctgtcgtttttgtttgatcaacaacttcaccttttctcttgcctgggttagggcatacctttgtgggttgtttctgagtgcagtgttgttgctagcacctgacagtaatgaataacctgctgctacataaaggatactgttaattgttgtcaaatttggttctgtttttttcctgncagc

SEQ ID NO: 262218 - DNA, 1488 bp, Zea mays
ggaccatgcgccgtccgtggaggcactcgggcccagggtccgccgtcgcggcgcgccacggcggcgcggagctatgcctccgcggggtcggggacctcctgccgcgacgcttcgcccgccgcgcggccggttccgaggaccttgtaatgcggctccagattcaccggaagcttgacaggcacacgggctgcgtcaacacaatgggcttcaatgaggtcggtgacaccctcatatcggggtctgatgatcagaaagtgatgctgatggactgggacactggcaccgtcaaattagagtttcattcaagacatggcggcaatgtgttccaggcacggttcatgccctgctcagacgatcggaccattgtcacttgtgctgctgatggcgaggtgaggcttgccaagatacacgatgctcgagacgtgtccacaacattgcttggtgaacatgagggaagggctcacaatttggctatagagcctggtagtccttacattttctacagctgtggtgaggaaggctttgttcaacattttgatctcagaacaaacacagcctcaaaactatttctttgcagaaactccactaaatcagtatactcatctcttgttcacctaaatgcgcttgcaatagatccgaggaacccaaatctttttgttgttggaggaagcgatgcatatgctcgtgtgtatgacatgcgcaagtgcaagtgggatggatcatctgattttagtcacgcatctgactgctattgcccaccacatcttgttgacaataagagtgttggaataacagggattgcattctctcacctgagtgagttgcttgtatcttacaatgaagagaatatttacctattctctaaggatggagggctgggacctgaccccaaaaaatctgttaggattggagcaattgaagggtgcaaatcaacaatgctagcatctggacatgatgtctctcaacctgcacctcagacatacgtcggtcatgttaatcgtgaaacggtgaagcgcgtgtctttcattgggccaaatgatgaatatgttgccagtgcgtcagactgtggccggatctttatttggagaaagggagatgggaagtttctacgagccatggagggtgatgagtgcattgtgaattgcattgagcctcatcctcatgctatggcaatcgcgagctgtggaattgataatgatgtaaaagtttggactccctctgcgattgagcgggcacctatgatacatgttgatgagctccagttgagacctcgcaagagaagagccaagctctggcgctttggcatacgagacctgttgatccaacagatactggtatcggaaaatacgcgacagtcagctgaagaaggctcatcagtagaccatgatgacaacatagaattactggatctagtgctacaggctgcagttcaaggtgtatcatcatcatcagacgagtaggatgccgacgacgactacggcgataatg

SEQ ID NO: 262219 - DNA, 655 bp, Zea mays
atcgttgaatcatgatttcgggtctctggtgagaggaggggggatctacaggctgcggcggcagaataacatagcggagcattgggtgtacttctcctgtaatgttttggagtgggatgcctatgacccctaccgcaagcgttggatctcggtgcccaagatgccgcctgacgagtgcttcatgtgctcggacaaggagtctttggctgtgggcaccgaactacttgtgtttgggatggcacatattgtcttcagatacagtatactgacaaactcttggtcacgaggtgaggtgatgaactctcctcggtgtttatttgggtcggcaagcgttggtgagaaggcatatgttgctggtggcactgattctcttggcaggatccttagctcagcagagctatacaactctgagacacatacttggacacctcttcctagcatgaataaggcacggaaaaattgctctgggttgttcatggatggcaagttttatgtaattggcggtgtgacaaacaacaacatggtattgacctgcggtgaagtgtacgatgtgcagagcaagacttggagggtgatcgaaaacatgtctggtggtctaaatggagtgagcggtgcacccccactttgcgcagtggtcaagaatgagctttatgct

SEQ ID NO: 262220 - DNA, 1057 bp, Zea mays
ccttttcgtccggccttccatctcatcgattcaggggaattcttttctttgttcagagttctgcatcattgcattacaatggaaatatgaaaccttggcttgagttgggcataccagattataggaagtactggaagaggtttcttacacgagacgagagattcatggacgagtgcaatgtaagtccatagtgcgcttgagcttgggagccggatcatttttgacagtagatttcagtctactgctgtactatatactaagaggaccaacacttgagaaaagacctgggaactgggaagcagtcactagccatcaattttgacagagtagatccagcaccatctgttcattgaacttgtgagctcgatggatgggtttttctgcagttagcggggtttagttaagttcgaaggataatgcagtagacaacgttggtcacgtgtggtggtgaggttccaagtaagagagagcatcacactcacgtaacaggaatgatcattgatggattgaggcgccttaattgaaattggtgccttccacctcatggatgcaggttaattcttttcttcgttgattttttgacccctcttgctttgtccttctgtcaataaggacatacacaggttaaaattcaaattctttgctcttagttgttgcacattgattgtcctatcactattatgttgatgcaaagtatattatgatgtcagagactcatctgttacaaaaacgagattaacaactattctatttggatgccttctgagcactcaaaaattatctcatgaaacagcaaatttgtatcgtgactgggtgtaactgcccccataggttttctctatgtgctccactgcggcctaggaagaattaagaagtgccctgcggttcatagcaatacatatgcttgatatcccagcataaaaaacatgctccaggcacttggtgaatgatctttgtcactgtaaattggctcgtaaaccatggtgtgatgcaataatcatgtaaaaactgcaaaacatgcaaatttgccaagcagcaataagcttcagactcgagg

SEQ ID NO: 262221 - DNA, 515 bp, Zea mays
cccacgcgtccgcccacgcgtccgcccacgcgtccgccagataccaaggcacggagggccatgaccatagcagcaatgacatggctgtggtgatggggctccggcgagcaattcccattacccagccacatctcccgttgaattgagagttgttgaactacaacatgcgctcaaaaacctcttagccccttcccctgagcccgaacaacgccgagggcgtgatacattggcggcgacaacctctctttctctcactacctctgacctatctgcatgcatcaagcgggatgctcatgggtttcatcaggtgaccatggtttgagggcaatggatggaggggcctcgagttttatactcccagaccacgtggatcaggatttaaccggtgatcgatctccgatgattgagggacgcttaggtgcgattcggatcgagatcgacttcaggtagaggaaggtcctggcggctggggcccaatagcagatgcgtgcgtgacgcgtgtgagggcagtctga

SEQ ID NO: 262222 - DNA, 2432 bp, Zea mays
ctcgctcgtaactcgccgcgcggcggaaacgccacgcccggggtgagatccgcgcgggccctcgcctgcctcgtcaccgtcccgcggcctccgatctccacagggcggccggaggagtcggaggggcagagtgagatggcggcggaggagggggccatgtcgccgacgaggatgcttgcggaggggcacctgcgggtggccaccggcgggggcgcgccggcggacggcgggatcgccgtcagacacctcccgcaccatcaccccactaagaaagacaatgttggtgggaaaactgaaaaagacaatcatgaaggtgtaaattctttactatctgaggagttggaaaaactagctaatgggaatagcaagattcctggtacattagatgagtatagaaagcttgtcgttccaataattgaggagtattttagtacaggagatgtggaattggcagcttctgagctgaagtgtcttggatctgatcagtttcatcattactttgtgaagaagcttatatctatggcaatggatcgccatgacaaagaaaaagaaatggcatcgattctgttatcatctttgtatgctgatctactgagctcctacaggatcagtgaaggttttatgatgcttctggagtctacagaagatctaactgttgatataccggatgctactgatgtattggcagtttttattgcacgggctattgttgatgaaattttgcctcctgttttcctcactcgagctagggcactacttccagaattttccaagggcattcaagttctgcaggttgttgaaaagagctatttgtcagctccccaccatgcagaattagttgaacgcaaatggggtggaagcacacactctactgtagaagaagcaaaaagtaagattaagaatattctaagagaatatattgagaatgaagacatagatgaagcctttaggtgtataagagagctcagccttccatttttccatcatgaggttgtgaagcgtgctctcacctttggtatagagaacatatcctcgcaaccatcaatccttaagttattgaaggaggcagctgcaagttgcttgatcagtcctaatcaaatctcaaagggtttttctagactagctgagggtgttgatgacttgagtcttgatattccttctgctaaagctctttttgacaagctggtttcaacagctatatctgaaggatggcttgatgcttcttttggtaaatcagctgcccctgacgaagagatacaaagtacaagcgttgtaaaggtgaagcgttttaaagaagaatgtggccacataattcatgagtattttctctcagatgatgtcccagaacttattcgaagccttgaagagctttctgctccagaattcaatcccattttcctcaagaagcttgtgacgcttgctatggatagaaagagcagagagaaggagatggcctcagtactcctttcttcattgagattagaattgttttcaactgatgacatcattgagggttttgtaatgctcttgcagtcagcagaagacactgcactcgacattgtggatgctcctagtgaacttgctctcttcctagctagggcagtgattgatgaagtattaattccgctcaatttggatgaaatcagcattaagcttcggccgaacagcagtggcagccaaactgtccagatggcgcgtgctctactgtcagctcgccattctggtgagcggatactgcggtgctggggcggtggcactggatgggctgtggaagatactaaggacaagatcactaagctattggaggaatacaacactggtggtgacctaggagaagcctgcagatgcatccgtgatcttgggatgcccttcttcaaccatgaggtggtaaagaaggcactggtcatggcgatggagaagcagaatgacaccagcatcttggtcctgctgcaggagtgtttcggcgaggggctcataaccatcaaccagatgaccaaaggctttgcccgtgtcaaggaaggccttgatgatctgatcctcgacatcccaaatgcccaggagaagtttggagagtatgtggagctggcaacagagcgcggctggctgctgccgaccttcgcctccgttccctgagcatccaccactggcgataccttccttatgtgtacatttgtgcccatgatgtcattagctccgtaccaaagttttcctattcctagtttacttatgttaccgtatactggaggattgtaggatggatgtggtgtcggttgttgagatagtgtcctattggtctagtctgggagggtacttttgagagttaaaagaataaagccatttcgtttcaggttatgagatgtacgctgcaacctttgtccctggatggacctggtggtaccatattcttaatatgatttattgccgatctgggg

SEQ ID NO: 262223 - DNA, 1372 bp, Zea mays
atcgaggccccgtacagatggttcttccagtgaaggatctcctagccccggtaccagtgagggatgtgctagccccggtaccagcgctccgaacgaagagagcaaccctgcgactgcgagcaagaggccgtatctcgagaggaactactccgtgctggaaccttcagaagggagccagctcgccgacgacgtggaaggggaaagctctctcgagaacgtgaagaaacagcttgagatcaacaagaaggcgatggccgctctttacaaggagcttgaggaagaacggagcgcttcggcggtcgcggctagccagacgatggccatgatcaataggctgcaggaggagaaggctgcaatgcagatggaggctctgcagtacctgaggatgatggaacagcaggctgaccacgaccacctggcgattcaggacctgcacgatttgcttacggagagggagaaagagttgcttgacttggacgctgagctcgcgcactgcaggaggctcctgcagaacgatccgttcaacggcgacggacgtaataatggcgctgacacagtgaacacaacgattgacggcagaaatccggcgatcgaatgcttggatggcgcggaccttgtggggagcgccatgtcgcttttcgaagacgagaaggcgttcattttggagtccttgagcagactggaggaaaaccttggcattttcacaaacaggcttgcttccggtgacgccagaggtagtcaagaagacgtgctgtttgaagagcatgagcatacaacagctgatgggtcaccttccaacggtgacaagttgagcggcgtagcgaatcttaaggctgggatttctctgctcaatataagactgagggcacttgaagatgaccaggagtttctcaagcaggtgttgagttccctccaatgcggtagtgatggactgcagtgtatacaggagataagcggccatctagcagagttgcgaagagttgtgactcgctaaggaaaatggttttgccccgagtccaaattgttaggtcatcatgaggtcttctcatgcagcagactaacgagggtgcttccactgagtgcccacaatcccatctatctgaagatggatgccgttgcaggaaatacccatgctcttcgcttctgatcgggctcaacagcagaccaaaattttccatctcttgcactttgagttcctcatcgacatttgcagactactgaagcagatggaactctaaaagaagtgctgaaagagacgaaccatctcttgtatgtgatatggtggttgttgagaaagtaggagcaagcctgtaactgtagatgtaaccaaccttgatggttcctgcccaagagttaaattgtacatgatata

SEQ ID NO: 262224 - DNA, 1386 bp, Zea mays
gcgcagaagcattctgaagcagccaatgctgtggagtgttgggatagcagtgtacctgcagatcatccaaatgagaagacttttgtggtgggtattgaggaagtccatgaatcagatggttcgccaggctcgcatggacaatctacaaaggacagcgccccttctgcgaacggtggtggggcagcaaagagcaactacatatcgcccgcaccaacacgcatcgctgtcgaccgcaacggcagtgtgaagaatgcttccgtcgctagggccaacttgacatctcctcggccatcagagatcatctctgccagggacagcaattccacgacccagcaagaagtgaaggcgctcctctctcagatgtcatctgtgcggggcctcgatggttcttccagtgaaggatctcctagccccggtaccagcgctccgaacgaagagagcaaccctgcggcagcgagcaagaggccgtatctcgagaggaactactccgtgctggaaccttcagaagggagccagctcgccgacgacgtggaaggggaaagctctctcgagaacgtgaagaaacagctcgagctcaacaagaaggcaatggccgctctttacaaggagcttgaggaagaacggagcgcttcggcggtcgcggctagccagacgatggccatgatcaataggctgcaggaggagaaggctgcaatgcagatggaggctctgcagcacctgaggatgatggaacagcaggctgaccacgaccacctagcgatacaggatctgcatgatttgctcacagagagggagaaagaattgctcgacttggacgctgaacttgcacactgcaggaggctcctgcagaacgacgatccgttcaatggcgacagatttgatggcactgattatacaacgaacaacaacacggattttgtggggagcgccatgtcccattttgaagacgactcggcatacattttggaatccttgagcagactggaggaaaatcttggcatttccacaatcagacttgcttctggtgacgccagaaattgtcaagaagacatactgtttgaagatcaggcaagagctgatgcatcgccttccagctgtgacgagtcgagtggtgtagcaagccttaaaattcagatttctctgttgaatataagactgagggcacttgaagaggatcaggagttcctcaatcaggtattgagttcgctccaatgtggtagtgatgggctgcagtgtatacaggagataagcaggcacttagcagagttgcgaagagttgtggctcactaaaatgaaaatggttttgccccgagttcacactttttggccgtcatgaggttctcctttgtaacggcaaacctatttgcagtcatctagatagcaggc

SEQ ID NO: 262225 - DNA, 726 bp, Zea mays
  unsure (1)..(726): unsure at all n locations
cgggnnaggaagggggggtcgacccaaacnaacgctttttttggttttttcctccacaagccgaccgcccgccgctctcgatgcgccgtcgcgtcaggttcatggaggggaagggtgatcagatcgccgtgattgtgggcaccgtgaccgacgacaagaggatcagcgaggtgccggcgatgaaggtctgcgcgctcaggttcactgagacagcgagggccaggatcatcaatgctggcggagagtgcctcaccttcgaccagctcgcgctccgtgccccacttgggcaaaacacggttctgctgaggggtcctaagaacgctagggaagctgtcaggcacttcgggcctgcaccaggagtgcctcacagccacaccaagccttatgttcgctcgaagggtaggaagtttgagaaggcgagaggaaggaggaacagcaggggcttcaaggtctaagtggccactgccttgccaatctagtgccgttttgctcgtgtcagctcaatattaccgttttggtgtcatagttgtaatgttttagttgtcggaatctcgtgtcattatcggatatcgaaccaatcaaatttcgctccttttttgtttttgccatgagacttgcccgtcacgaagatgctcacatatcattgtgggccgtaactatgtgaaagtctagctgcccttttgctttgctgaaaaaaacaaaaaaaaaaaaaaaaaaaaataaaaa

SEQ ID NO: 262226 - DNA, 327 bp, Zea mays
agagcgcacggcgccaagtccgacgatgtctacctcaagctcctcgtcaagctctaccgcttccttgtgcgcaggacaaagagcaacttcaacgccgtgatcctcaagcgcctcttcacgagcaagaccaaccgcccgccgctctcgatgcgccgcctcgtcaggttcatggaggggaagggtgatcagatcgccgtgattgtgggcaccgtgaccgacgacaagaggatcagcgaggtgccggcgatgaaggtctgcgcgctcaggttcactgagacagcgagggccaggatcatcaatgctggcggagagtgcctcaccttcgac

SEQ ID NO: 262227 - DNA, 2596 bp, Zea mays
cgagaccaaggcgggggcggacgcgagatgcgacgcgagggcgagaagtggaggcggtgctgcggtggcatgccatggttatataaagtaacggagcgcgacgagggtagaaagcggaaggcccgccgcttccccttcttcattcccgtcccacacacgccgccgccgccggtgcggctcgcttccgtcccccccggtccgcgcgggctgcctgcgggagcagggtggcagggcactccggcaaccacgtgggtggggaggcgacgacaccaccctatgctctgtcctcgcccgcagagtaagattgcagcagcagtgaatttgggagcttgaagcattcatctgagacatggaaaaagtgatctgctgggcatatctccttcaacgcaagcagttctcgaaagaaactcttgattgctgtgtcttagctcgtgggaacactcctctctcctctctcgtgaactacacatagtggttatatgttcctctatgctcaacaacaagcaggctgatgcgatattttgctgaagttattatatttcagtctatgccagacatctacatgtagatggtgctcatataagtgggggttgatatatttgctgtgttcagcttacatctgttgcggccctagttagctatttgtcttttgtgtactatctgaggcaagagattgatcagctaggacttggcgaacacttgcctgtgttggctgttcatctgaaggggaaaatttgcacgagacacctcggatattacaacaatggatagattcaagttgattaaggaagttggcgatgggactttcgggagtgtatggcgtgctataaataaacagaatggtgaagttgttgctgttaagaaaatgaagaaaaagtattattcttttgaggaatgtatgggtttgcgtgaagtaaagtctttgcggcgcatgaatcatcctaacattgtgaagctcaaagaggttatccgagaaaatgatatattatacttcataatggaatacatggagtgtaatctctaccaacttatgaaggataaggtcaagcctttctcggagtctgaagtccgcaactggtgctttcagatatttcaggctcttgcttacatgcatcagaggggctactttcatcgtgacctcaaacctgagaatctgttggttagcaaagatgtcataaagctagcagactttggtcttgcaagggaagtttcatcattgccgccatatacagaatatgtctcaactcgctggtatcgggcaccagaagtattgctccagtcatctgcttatgattctgcagttgatatgtgggcaatgggtgccataatggctgagttgttgacactccatcctctctttcctggaaccagtgaagctgatgagattcacaagatatgcaatgtcatcggtagtccagatgagcaatcttggcctcaaggattgtcacttgcagaagcaatgaagtatcagttcccacagatcaaaggcagtcaactggccgaggtgatgacaacagccagtagcgaggcaattgacctcatctcatcactatgctcatgggatcctagcaagagaccaaaggccgcagaagtcctccagcataccttttttcagggttgtacatgtgttccacttcctgtccgtccaaaagcttcatcacttcctagaacacctccatgtgttggatcaaaaggaaattcagagaacagtgtggctagaagattctcaactggaactctatctacaatgaaatctcatagcaatgcatccgcaaaattaaatggtttatctaagactggtgtacaaagaaaacttaatttggatcgtcagccatcccaaaagggtatgaagccaaccgagactagcaataaactaactacgaatcgggtaccagctcggaatagcccagggaatcctgtacttaggcattcacggagcttgcctgaaactggccgaggagcaatacagaaggtctcatcaattacagagaaactatcccaaatgtctgtgacctctagaacacggagcgctgtgaagcctgctgcccccatgatgaaggccggacatggcaagtcggactttcttgggaagtctgacgatatccctccggcaaagaggctgacaagaaaattggtcagctaaatgagggtatgtggagtgaaaattcgatcagctgcaggaggggtgttgtgtatagtgtgcagaaaccagtgtgcccgaagaggatagtcagcctgagcgtttgcccatcgatggttgtgcggatttgccatcaccacagtttcgctgcgtcgagacatattagaatgggtttgcaaattcctttgtgaagtgctagagcctgcatcaagccttccccacttccgggcggttgatctgcttttttcctgcgaaaagcttgcccccatgttttaataaacatgattgtgctattaatttggtttggtttgccttgcaatgttatcttgcaccaatatcgctgtcacaaactgtatgcacatttaacagcttgtaaatccttgagcccaccaagggatggacatttcccatttggtttgaatgcccatttaacccagtgaggtgccaatttggcgc

SEQ ID NO: 262228 - DNA, 779 bp, Zea mays
cccacgcgtccggcagcagtgaatttgggagcttgaagctttcatccgagacatggaaaaagtgatctgccgggcatatctccttcaatgcaagcgattcttttcgaaagaaactcttgattggtgtgtcttagcccgtgggaacacccatctctcctctctggtgaactacacatagtggttatatgctcctctatgctccacaacaagcaggctgatgcgatattttcctgaagttattatattccagtctatgccagacatctacattttcttttcaggtagatgatgctcatataagggggggttaatatatttgccatcttcagcctacatctgttgctgccctaattagttgatttgtcttctgtgtactatctgaggcaagatattgatcagctagaacttggcaaacccttgcctttcgtgtctgttcatatttctcgtggcttggttattctgaagggtaaaacttgcacaaggcagctttgatattacaacaatggatagattcaagttgattaaggaagttggcgatgggacttttgggagtgtatggcgtgctatgaataaacagaatggcgaagtttgctgttaagaaaatgaagaaaaaatattattcttttgaggaatgtatgagtctacgtgaagtaaagtctctgcggcgcatgaatcatcctaacattgtgaagctcaaagaggtcatcagggaaaatgatatatcatactttataatggaatacatggagtgtaatctttatcaacttatgaaagaaagg

SEQ ID NO: 262229 - DNA, 945 bp, Zea mays
cccacgcgtccgcccacgcgtccgtccacgtttccggttccgcttcctgtccgtcggaaaggttcatcgcttcctaaaacacctccatgtgttggatcaaagagaatttccgagaacagtgttgctagaagattctcgaccgggactctatctacgatgaaatctcatagcaatgcacctgcgaaatcaaacggtttatctaggactggtgtacaaagaaaacttcacttggatcgtcagccaccgcagaagagtacaaaaccgaccgagaacagcaataagctagctacaaatcgggtcccagcccggaacagcccaggcaagcccgctctttggcattcacgcagcttgcctgaaactggtcgacgagcagtacagaaggtctcatcaatcacagagaaactgtcgcaaatgtcggtgacctccagaacacggagcgctgtgaagcctgctgcccccatgatgaaggccggacctcttgtcgtcttggtgcgcgcgctcggtttcccttcctttttccctcgcgcgcggccaacctagaaagcgacggcggagccggagagggaaggggaggcgggccggctggtcaagggcggacgatgtgctgcggcggcgacggggagtgccggccgctcgggtggctcctgggcctgcccttcgcgctgctcgccgtcctcgtctccttcgtcggcgccgtcatctggatcatcgggctgcccatctcgtgcatctgcccctgctgcctctgcgtgacggtgctgctggaggtggccgtggagctcgtcaaggcgccgctccatgtcatgacctggtttacctccaagatcccctgctagctgtcccctgctttctgctgtgcggatcatacatacatcttgctttacccggagaggttgctgtactgtactgtactgttgtttcgtttcgtcgtcgcttggtccaaag

SEQ ID NO: 262230 - DNA, 409 bp, Zea mays
  unsure (1)..(409): unsure at all n locations
aaaaaaggctaccccatcctaagggtttccctgtcaatggtcgcccggttttcccatccccccagtttttttgcatcaagtcatcttaggaatggctttgcaaactcctttgtggagtgctagagcctgcttcgagccttaaccctcttcctggccttcgatctgccttttgcctgcgtcaactttgcccccatgttttaataaacatgatgtgtgctattatttttgtcttgttcatatcctgctgggatggacgtttcatgtttggtttgaatgtacaggtacagtgcacaggtgagaccaccgtaaaatgccaatttcacgtactgtatgtacatggcttgtcactctccaatatggataaaaaattatcccaagtggcgctataaaataaaaaaaaaaggnaaaa

SEQ ID NO: 262231 - DNA, 856 bp, Zea mays
cggacgcgtgggtctcaaggacatcaatcgtggtctgcgcacagagattaggcaaaggatgggcgaggatctggacagtctggacttcgacgagctgcgcggcctcgagcaaaacgtcgacgcggctctcaaggaggttcgccataggaagtaccatgtgatcagcacgcagaccgatacctacaagaaaaaggtgaagcactcgcacgaggcgtacaagaacctgcagcaggagctaggcatgcgggaggacccggcgttcgggtacgtggacaacacgggcgccggcgtcgcctgggacggcgcggcggcggcgctgggcggcgccccgccggacatgtacgccttccgcgtggtgcccagccagcccaacctgcacggcatggcctacggcttccacgacctccgcctgggctagcgcatccatcaccatgctgggtggtgctgctcgatcctactgcatggcaatgcaagctggttggttagttcgctcatgcatcgtccgtcaacaaagcaagtaagcaatgcaatgcaaccgaggtactgtaatagccaataaaatctactgcatactgcaaacccaattactggtagcttagctaccgcgtgtgtacgaatcaaccgattaattaccgcgcccttagcttgcatgtcgtcgtcgtctgtgcttttggcgttcgtagacatgtgtgtattgtatgcatgggtcctgttcatctgcatccatgcatgttgtttatgattgtaattgttgtgtgaaatggctgtactttgttatgatcacgtgaaattatatctacattcgtgagaaaaactatatattaataatactaatattatattaataatattctct

SEQ ID NO: 262232 - DNA, 623 bp, Zea mays
aagtaacaaatgatatcagcgctgagttttcaccaatctccacagcctggaaagttcaagccacaacattattaacagaaaagtcgtgtcctacaccaaaccgcaagaaacgaggttacaacttatggtaagaaaatgcagtatcaggcaacaaccaagataggatgaagtccaagcttttaacttcaaaaaaatgtcgctcaaaataagtctccatatgcaggcagcgagaggcatcatctcagccagaggcagtcttcttctgctggaatatgactgcatacacagggactccaacaccgatgccaaccgctcccagcacggagagtgtcaccttcaaaccctgatgcttcatcctgtgcaagttatacatgtgcttggcatggatgtagtatggctcatcatggccatgccctcccattctcttcacgccggtggcatggaatccacgagaagctggcttggacgcctcggcgccggcggcgaggaggcggagcccggagcggagcccgcggttcagcgctgtcgccatcgccttcgtgttctcgactgggtcgccgccgccgccggtggtgtggtgtggtggtgggcgagagcggacgcgtgggcggacgcgtgggcga

SEQ ID NO: 262233 - DNA, 1638 bp, Zea mays
ccctctcgccgtcgtcgccaccgccactttgccccgcctcgtcgcctcctccgacgaccaccgtccaccggcgacaaggacagcgacgatgcagtcggcggcgtggaggcgtcacctcctcgaccaccacctctccccttccacctcggctgccatcgccgccttcagatccgcctcccagcccgggctcgctccccaagggttgtttggagcggatggcgcaagatgcatgtctgcgagggcgccggcggtcaaggggtccgggcatctcgtccgcaagggcaccggagggaggtcttctgtgagtggaattgtagccacggtgtttggagctactgggtttcttgggcgctatcttgtgcaacaacttgccaagatggggtctcaagtgcttgtcccattcagaggttgtgaggattctcctcgccacctgaagattatgggtgacttgggtcagattgtgcccatgaaataccatccgagagatgttgattcaattaaggctgttatggccaagtcaaatgtggttattaacctcataggacgagagtatgaaacaaggaactacagcttcgaagaagtaaaccaccatatgcctgaacagcttgcaacaattgctaaggagcatgggggtatcataagatttattcaggtttcttgcctaggggcgtcaccgtcttctgaatctagaatgttgaggacaaaagctgcaggagagcaatcagtcttcaaagaattccctgaggctacaatcatgaggcctgctaccatgattggcacagaagatcgaatcctgaacagatgggcacaatttgcaaagaattggggtttcctcccgcttgttggtggtggatctactaagattcagcctgtgtatgtaatcgatgttgctgctgctattgtgaactccctgaaggatgacggcactagcatgggaaagatatatgaacttgggggccctgaaatttacactgtccatgagctggctgagctgatgtacgagacaatccgcgaatggccaagatatgtcaatgtccctcttcctgttgcaagggctattgcttccccaagggagatgctgctcaataaagtgccgttcccgcttccaacaccatccattttcaacctagaccaaatcaacgcatttgctgtggacaacctcgtctcggaagatgctctgactttcgaagacctcagcatcatgcctcagaagctgaaagggtacccggtggagtacctggtgtcttacaggaagggcgggccgtcgttcggctcgaccgtgagcgagaagatgaggagctcggagatgtagggagcctcgtaccacctccgaagatactgtagattcctatgatcatttggctgcattgttccggccacccgtcgccgtctcgccggttggagcagcaggaccaaattcccttgcgtggctcctgctctttgccttgtttgtttgtacgccaataaggacccaaatttccgtgcatgtgaagagaagaaagaatcgttccacagttttacactgagggtttttttcgtacacagcatgatacaatataacccttgtttctggattcaaaaaaaaaaaaaaaaaaaaaaaaaaaaaaaaaaaaaaaaaaaaaaaggggggggcccccc

SEQ ID NO: 262234 - DNA, 1543 bp, Zea mays
tttgtattagtcaaaggtgtactgactgagctggaggggttgcttgtgcacgaacaagttccatatccagtgtactttgctttgcatggcgacaattttggtaacctgctggcagatatccataaaattgcctcttcaggccaaccagcctctgcaacaacaggaggttacaaacttgtcgtgtcctcagcagagcctagaaaagtgtcatctccaaccatttctaatatccagggatggttacctggatttaaaggagagggtgatagcgaacagcttccgactattgccatagttgcaaactatgacaccttcggtgctgtacctgcactttctgtgggaagcgacagcaatggaagtggagttgtggctcttctagagattgcgagactattttcacgtctgtattcaaatcctaagacaaggggcaagtacaatattctctttgggttaacatctggtggaccctacaattacaatggaactagcaagtggcttaggggttttgatcagcgtgtacgcgagagcattgactatgcaatttgcttgaacagtgttggttcctggagcaatgacctctggatgcatgtatcaaagcctccagaaaatccctatatcaagcaaatctttgaagaattttcggatgtctctaaagaaatgggtgtttcagttggaatcaagcacaagaagattaatgtctcaaatcctagagtagcatgggaacacgaacagttctcgaggtttagagtgaccgcacttactctttcagaaatgtctacccctcctgaatttttggaaagcactggtggtcttcatgacactagagaatctacagatgttgagtcagtaatccgaactgtcagattagtttctgagagtcttgcgagacacatctatggattgagaggaaggaacatagatgtttttgcagagaatagcagcttagccattaatcctcactatatccggtcctggttggatctgttgtcacggacaccacgagtcgcaccttttctacagaagaatgatcccttcatagcagcgctgaaaaaggaactgtccgagcacacgtctgatgtgcatgttcaaagtgatgcgcttgaaggcatgttcactttctatgatacaactaaagcgactctaaatgtgtaccaggttgcaagtgttacctttgatctgctgttccttctggtgctgggttcctacctgatcgttctcttctgtttcctagtaatcagtacacggggtgtcgacgacctcatataacatattccggcggcctccgtcacgcaaactcaagggggcataggctaggttgtgttttgtgttctagaagaagagatagacatgaggatgacaggcaagctagcttcccacagcacatagacttgtacttgcaaaattttactgttccttcccccgctccgtccaaatgtgagtggccttcaatttgttcccattttttttatgtgcgaggaacttcgaatgtaatttagctgtattttggttacagttttggcttaattattcgggtggactggtg

SEQ ID NO: 262235 - DNA, 862 bp, Zea mays
ataatattagctatgttgcatgaagggccctagaataaactacttttgtattgatcagcagccgcaacttggatagggtacgtaagttaaaaagcgggatgacaagattgaccgcaagggttcagaaggtgagagatgagcttgaacaattattggatgacgacgatgacatggctgatctttatttgtctagaaagttggctggggcatcttcccctgtcagtggttctggtggaccaaattggttccctgcctccccaactattggttcaaaaatatcaagagcaagcagagccagtgcagctactgtgcatggaaatgagaatgatgttgaagagctagagatgttgctggaggcatatttcatgcaagttgatggcacattaaacaaattgacaacgttgagagagtacatcgatgacacggaagattacatcaatatccagcttgataaccaccgtaatcagttgattcagctagagttattcttgagttctggtaccgtctgtctgtcgctgtactcattagttgctggagtctttggtatgaatattccgtatacctggaatgacggccacggatacatcttcaaatgggtggttcttgtatcagggcttttttgtgcctttatatttgtctccattgttgcttacgcacgacacaaggggctcgtcggatcctgaatagctgaaataaccgcgtacttgcttccctcaactgtaaatttgagccagtgagcatcgactttgcggggtgattcatctgttgtaccaaattcggtagtatcaaattggggatgttgaataggaactgtaataggaaaaagttaatgcaaaagaaatatgttaaaaaaaaaaaaaaa

SEQ ID NO: 262236 - DNA, 838 bp, Zea mays
atttatcactccttcctcgtcgaaaatcttctgtcgtaataaaggggtcatccgtccaccgtccacgtgggcggcggttgcggctacggcggcggcggcggcggcgtcagcgggcgccggagatgtgagagcctccgtgccgttggagatggctgcggcgggggcagggaccgggagcgaggggaagaagcggggcgcgtcgcggagctggatcctgctcgacgcggccggggaggagcagctgctggacgccgataagtacgccatcatgcgccgcgtcgacatcaacgcgcgcgacctccgcatcctcgacccgctgctatcctacccctccacaatcctcgggcgcgagcgtgccatcgtcctcaatctcgagcatataaaggcgatcatcacttccaacgaggttctgcttagggatccttctgatgagaatgtaatccctgtagtagaggagctccataggcggttagcaccatcgagtgctactcagcatgatggaaaagagaacttaagtggccagcatgatgtagaaggggcagaagaagatgaatctccttttgagttccgtgcattggaggttactctggaagcaatctgcagtttccttgatgcacgcactactgagcttgagcaccgtatagctatacccagactattggatagagttgaacatccaagatacagcagccgcaacttggatagggtacgtaagttaaaaagcgggatgacaagattgaccgcaagggttcagaaggtgagagatgagcttgaacaattattggatgacgacgatgacatggctgatctttatttgtctagaaaggtggctggggca

SEQ ID NO: 262237 - DNA, 961 bp, Zea mays
ccctcgagccgaatcggctcgagggctcgagactcagagcagccgcatccacaacctgcctctctcgtcccctggcggcgtccgcggcaggatggcggaatctacggcgaggacggtgaaggatgtcaacccgcacgagttcgtcaaggcctactccgcccacctcaagcgctccggcaagatggagctccctgagtgggttgacattgtgaagactgcgaggttcaaggagcttcctccttatgatcctgactggtactacatcagggctgcatccattgcaaggaagatctacctaaggcaaggcatcggtgtgggtggctttcagaagatctacggtggccgccagaggaatggctcccgcccaccacacttctgcaagagcagtggtgctgttgcacgcaacatcctgcagcagctgcagaatatgggcatcattgatgtcgatcccaagggtggacggcgcatcacctcccagggaaggcgtgatctggaccaggtggctggaagggttgctgttgaagcttgagcaatctcatatttggtttctatgatgtcatgtttgattgttgagatggctacactttatttgcactttggattaggatttttgtgttaagagaactcaaggcattctagctatggttcacactgtattttccctgagtacctatttatcaaaacctattcgtatgtttgggaagtgtctgagctgatattcatgacatgtatttggtataggtctatctatgtgacgtgataatatcattggatagattacgatctagatgaatttctatctcttgagtttcctaaactgtgcttgtttcgcttgcagtcagttagtctgctgtgattgaaccataggttcaacttagactggctgggctcgtcagcaacattattattacaatacgagagaatgctcatgtctctgttcaataatatggtgcattcattt

SEQ ID NO: 262238 - DNA, 544 bp, Zea mays
cccacgcgtccgcccacgcgtccgcggactcttgggctgactggtactacatcagggcttgatgcattgcaaggaagatctacctaaggcaaggcatcggtgtgggtggctttcagaagatctacggtggccgccagaggaatggctcccgcccaccacacttctgcaagagcagtggtgctgttgcacgcaacatcctgcagcagctgcagattatgggcatcatcgatgtcgatcccaagggtggacgcctcatcaccaaccagggaaggcgtgatctggaccaagtggctggaagggtcgctgttgaagcgtgagcagtgtcatctttggtttcaatggtgtcatgtttgatggttgagaaggctgcgctctatttgctcttttgggttaggattttcgagttcagaggactttaaggtttattgcatctagctatggcgccacactatgttccccgagtacctaatgtgatatcaagactcaattctcgaatctaagatatatgtttgcaaaaaaaaaaaaaaaaaaaaagggcggccgc

SEQ ID NO: 262239 - DNA, 300 bp, Zea mays
cctcgagccgaatcggctcgagcggctcgagagaggagccgcatcggcctctacctgcctttccctcggccctggcggcggcagcgcaggatggcggcttctactgcgaggacggtgaaggatgtgaacccccacgagtttgtcaaggcctactccgcccatctcaaacgctccggcaagatggagcttcctgagtgggttgacattgtgaagactgcgaggttcaaggagctccctccttatgaccctgactggtactacatcagggctgcatctgtagcaaggaagatctacttgaga

SEQ ID NO: 262240 - DNA, 660 bp, Zea mays
cccacgcgtccgcccacgcgtccgcccacgcttccgcccacgcgtccgcggacgcgtgggctcgtccctggcggcggcggcaggatggcggcttctactgcgaggacggtgaaggatgtgaacccccacgagtttgtcaaggcctactccgcccatctcaaacgctccggcaagatggagcttcctgagtgggttgacattgtgaagactgcgaggttcaaggagctccctccttatgaccctgactggtactacatcagggctgcatctgtagcaaggaagatctacttgagacaaggcattggtgttggtggcttccagaagatttatggtggccgccagaggaatggctcacgcccacctcacttctgcaagagcagtggtgccatttcacgcaacatccttcagcagctgcaggagatgggcatcattgatgtcgatcccaagggtggacggcgcatcacctcccagggaaggcgtgatctggaccaggtggctggaagggttgctgttgaagcttgagcaatctcatatttggtttctatgatgtcatgtttgattgttgagatggctacactttatttgcactttggattaggatttttgtgttaagagaactcaaggcattctagctatggttcacactgtattttccctgag

SEQ ID NO: 262241 - DNA, 1830 bp, Zea mays
gcgatgcacaaggccaactacgctagtagaatctgccactcctgcaacccaaactgcgaagcaaaagtgacagcagtgaatggtaaataccagattggagtttacacacttcgaccaattgcagaaggcgaggaaatcacttttgattacaattctgtaactgagagcaaagaagagcatgaagcatcagtctgcctctgtggaagtcaagtatgccgtggcagctatttgaatttttctggtgaaggagcctttgagaaggtattaatggaatttcatggtgtgctcgataggcatagcctgctgctacaggcttgtgaaacagactctgtctctcaacaagacttaattgacttgggtagagctggtcttggtacctgtttgcttgctggtttgcctggatggcttgttgcttacacagctcacctggtgcggtttatataccttgagaggcagaagctccctgatgagatcttaaggcacaatgtggatgagaagcgacagttccttatagaaataaacatggattctgagaagaatgatgctgaggttcaggcagagggagtactaaattcaagattacagcaaatagtgcatacacttgacaaggtgagatatgttatgagatgcatatttggagacccaaagaatgctcctcctcctctggtaaggttgtctgggaaaagtctggtatctgccatctggaaaggggacagttcaatagttgctgaactcattcagtcgatggaacctcatgttgaagaagaggtacttagtgatctgaaggccaaaatccgtgctcatgatccgtcagagtctgaagatattgagggaggcatccggaattctctcttgtggctgcgtgatgaattgcgaactctttcatgcacttacaagtgccgtcatgatgctgctgcagatttgattcatttgtatgcttatacaaagtgcttcttccgagtccgggattataagacagtaaaatctccaccagttcatatcagtccgcttgacttaggccccaaatatgctgataaactgggaccaggctttcaggagtactgcaagacatacccagaaaattactgcttagcccagcttatctattggtatagccagaattcagaacctgaatctagattaacaagagctagaaaaggttgcatgtcgttgccagatgtctcatccttctatgtgaagtctgcaaaaccatcacaagagcgagcttatggaaacagaactgtgagattcatgttatcgcgcatggaaaaacaggcacaaagaccatggccaaaggataggatatgggtgttcaagagtgatccgagattctttggcagtccaatgatggatgccgtgttgaataattccccccttgacaaggagatggtgcattggctcaagacgagaccaaacgttttcctaggctagaaaaaaaggtttgtaggcagataaggtggtatttggttctttctcctttttggagattttagtctacatgattctttttccgactcacaccttggctacctgatcatggggagtttagcttttagatagcagggtagtctcaccacccccatctgtacattcctctctccctactttccttgtagagatgtatctggttaataactgatagattcgtcattgatttgatgtagtgaattttccccataggaacgctccctcttctgtttcatgtaaatgcagaacaatttcaatcttgaattcagtaatgtgttacaggcatgttgaaaaaaaaaaaaaaaaaaaaaaaaaaaaaaaaaaaaaaaaaaaaaaaaaaaaaaaaaaaaaaagggggggcgg

SEQ ID NO: 262242 - DNA, 426 bp, Zea mays
catatacatcctcgctctccttctcgccgtcgccactctctttgcgcgcgccacgccgaaaggtgagctgccgggcgtcgtctatagacgtcgagcggggcagggccgtgagctttgggagaggaggagataattaatggcggctaaggagagtagtaggacgatggcggcggcgcgctctgcgggaaggatcggggtcgtggcctctgtggcgatgaacctcgcgtggcttgcgatgcccatccgccagcgctacggggagatcaccacggtggaggcgtcccgaggcaagccgccggtcactcaggactccgtcgtcatcctcgatcacggcgacccggtcatgtacgaggagttctggcgccgcgagggagacagcgcctcgatcctcgatccccgcgtggcagacgatgagctacttctcca

SEQ ID NO: 262243 - DNA, 457 bp, Zea mays
ccggccggaattcccgggtcgacccagcgtccgggctgagatggtgcagctacctgacgatatgcttgtggaaatcctgagccgcctcccgcccagcagcctagcggcgtcacgctgcgtctccacgcacttgtgctccatcgtggacgcccgacgtctcctgcgcaccggccacctccttcctctccgcctcgacgccttctactgcatcagcctggcctcggtcgatcgcgagacatatcttttcgcacggccatcggtagcgcgtcggatccccggcgcctgccttgacttcagggtagatcttgaggttgtggatcactgcaacggtctactgttgctgtgtgacatggttttcaggttgctgaaccctgccacacggcaatcggcagccctgcctaaagccccggatccatccattgagaacatgcttggggtcgccacagtttgggccggg

SEQ ID NO: 262244 - DNA, 668 bp, Zea mays
ttctttagacgcgcagtcgcgcagagtcctggctggttgcccttttccggctttgccccccttccccccaaaccacaccgatcccaatcccgtatccggcgaacgcgcgccgcggccatgtgcagctgctgagagaaggagcgagcgcaacgacgccactggccatggacgagggctattccaacctccccaccagccacctcctcggctccgtccccgctgtgacacaagatgacaggagattgggcccccccgccgcccaagttgcagatgcagctgccacctctcggttgcaggagttcccgcctggaggtggtaatggtggagggtatcggccaccaggtggccctgcagatggagatgttgaaaaccaagcagattggaaaggatacttcaatgttgcatcttatgctccatacttcaatgttgatactgatgttgtagttgacaggctcattagttcagtttatccaatggatggtttttacaggaaaattgatgctaatcctgacatgtatgggcctttgtggatcaccactactctgattttcatgcctgctgtgtttggtaactatgccacttatctggtgcatactaaaacggatgtggacatatggaactttgatgttggttatttcagttgggcagcatcagtcatgtatagttat

SEQ ID NO: 262245 - DNA, 633 bp, Zea mays
cccaactccccggcccaatccgtgggagagaacagggctttcgcccccggcctcacaaggtcgggaagggtttcctcgagctcaccctctccactcgtgcacccgccgccacttcctttctctcgcgcacccgacgtcgcatcctctctcgtgcagttggggccagctgttgggccgaggtcgacgacggggtcgacctctccgtggagacagccaaggcggccgtgagccacgccgccacgagccaccacgagcacgacggcgagctcagcgatctggagtcggatctggtggggcggcagaagactggctgctcgtcgtcgccggcggcaacaacgccggctgcagagctgatcgtgccgccagcacagcagatctagcaattccaggtggtacaaaagggtttttcatcaacaagtggtcaccaaaagaagaactgaaacatcaagatggtgtttgcttctacgttttaccattgaggatatgatgctaaactgaagtcatgtattatgctatgcattcagaagatgatgctaaactgaataagcacatcaatcggatttttctatgcactgtgactatgtttgtattattgttatgcaatgcaatctatgcactaaaacgttcaactct

SEQ ID NO: 262246 - DNA, 471 bp, Zea mays
actgctcctgctgggactcgtgcgcgcccccagccggcgctcttaggaccttgagcgcggctgccggcatgcgctcgcgcgggcatgcgccgtgcggacggtacctgagcgcaacgacggatgggcagcgacggcggatgcagactgctagccgcgtccgccgtcgaacgccgccgctcgtccgctccttcgctcggccagaagggaggaagacagaagggatactaggggttctactccggcggtaggtggggcagctgccccaccgtgccgcatggggagctccgcctctgctggcggatgaaatgatcctgcggccttctcttctggccgtcgcccgccctctcagcaccgtagccgtcgcggcggccgtccgccgcggtgacctcgccggcgcggaggaagccttcgcgtcgacgcagctcaagaccacgaccacctacaactgccttctcgcgggatacgcgaagg

SEQ ID NO: 262247 - DNA, 848 bp, Zea mays
acccacacgtcagcgaagaatatgatggcaagattgctgacgtttggtcatgtggtgtaaccctctatgtaatggttgttggcgcatatccttttgaagatccagaagagcctaagaacttccgcaagacaattcagcgtatcttgaatgttcagtacgcaattccagacaacgtgaacatatctccagagtgcaggcatctaatttcgaggatttttgttggcgatcctgctacgcgaataacaatccctgaaatccggaatcatagttggttcctgaagaaccttcctgctgatctgatggatgatgatagcatgagcaaccaatatgaggagcctgaccagccaatgcagaccatggatcagatcatgcagattttaacagaggccaccataccacctgcctgttctcgcagtataaatgtcctagctgatggactggacatggacgacgacatggatgatcttgattccgactcagatcttgatgttgacagcagcggtgagattgtgtacgcaatgtgagtaacatctcagcagccatctcagcagtcaaccaaggaaccaatcaggcatgggatgccctgttgtatactctggcaaagggcatgcttccttttgtgaaaaacatccatgtagttttctcaaggaatcgcaatgtgttctgtggaacacatatgttgtagtcaaactcgggttactcagcttgtaaaactagcctcctcttgcttcctggttactgggctttggatactctcaggcttcgacttgtgtgttgctgttaaatatgtataagaaacttctactcaggttgatctgtgaatctggattccggtagtggttttgctc

SEQ ID NO: 262248 - DNA, 1111 bp, Zea mays
acgcatccgcaaaaccctactacataacccgccattcccactcccctctcccaccgccgcctgcgtccacctccgctcgccgctctccccgcgtctccctctcatacgcagatcgtccaggtaagatgtcgtccgaggcgtcgaaggtggcggtgccggagtcggtgctccgcaagcggaagcgcgaggagcagtgggccgccgagaagaaggagaaggccctggccgagaggaagaagtccatcgagagccgcaagctcatcttcacccgcgccaagcagtacgccgaggagtacgatgcccaggagaaggaactggtgcagcttaagcgtgaggcccgtttgaagggtggtttctatgtcagccctgaggcaaagctgctctttgtggtccgcatccgtggtatcaatgccatgcaccctaagaccaggaagatcttgcagcttctgcgattgaggcagatcttcaatggtgtgttcctcaaagtcaacaaggcaaccattaacatgctacgcagggttgagccatatgttgcatatgggtacccaaacttgaagagtgtcagggagttgatctacaagaggggctacggaaagctgaacaagcagaggatccctctgtccaacaaccaagtcatcgaggagggcttgggcaagcacaacatcatctgcattgaggatcttgttcacgagatcatgactgttggcccacacttcaaggaggcgaacaacttcctttggccattcaagctgaaggcgccgctgggaggcctgaagaagaagaggaaccactatgtggagggtggtgatgccggtaaccgtgagaattacatcaacgagctcatcaaaaggatgaattaggttcacgatcaagctctattgtgttctaagaaactttctgtgctctcccaattttacattattaggaagtggatgaatatgcatgcagttttgttgtttggaactagatgtgtatggaagaaacatgatcttttttcccaaaaaaaaaaaaaaaaaaaaaaaaaaaaaaaagggcaaaaaaaaaaaatataggacaaaattatttaaaagataaaaatattaaaactatatatataaatattaatagatat

SEQ ID NO: 262249 - DNA, 1015 bp, Zea mays
cctacgcgtccgcggacgcgtgggcggacgcctcggcggccggcctcctcttctcttcacccacacgctggtcatagagatgtcggctgcagaggcgaaggcggcggcggtcccggagtctgtgctgcggaagcgcaagcgggaggagcaatgggcagcggacaagaaggagaaggcgctcgcggacaggaagaaggcgctcgagagccgcaagatcatcttcgcccgcgccaagcagtacgccgaggagtaccacgcccaggagaaggagcttgtgcagctcaagcgtgaggcccggttgaagggtgggttctatgtgagcccagaggccaagcttctgtttgtggttcgcatccgtggtatcaatgccatgcaccccaagacccgcaagatcttgcagctcctgcgattgaggcagatcttcaacggtgtcttcctcaaggttaacaaggcaaccattaacatgctgcgcagggtggagccatatgttgcgtacgggtaccccaacctgaagagcgtcagggagttgatctacatgaggggctacgggaagctgaacaagcagaggatccctctgtccaacaaccaagtcatcgaggagggcttgggcaagcacaacatcatctgcattgaggatcttgttcacgagatcatgactgttggcccacacttcaaggaggcgaacaacttcctgtggccattcaagttgaaggcgccgctgggaggcctgaagaagaagaggaaccactatgtggagggcggtgatgccggtaaccgcgagaactacatcaatgagctcatcaaaaggatgaattaggttcacgatcaagctcattgatagtaccctgtgctctaagtgacttcttgtgctatccttattttatattagaaagttggatcgtggatgaatatgcatgcagttttgatgtttcgaactagatgtgtatggaagaaatctgatcttctttccggaggtttggtattattatttaaagcatttcgtaagcatcagtca

SEQ ID NO: 262250 - DNA, 604 bp, Zea mays
  unsure (1)..(604): unsure at all n locations
accggnattgaattcccgggcggacgcacgcgtccggctgctcatggtgtatccatatgttgcgttcggataccccaacctgaagagcgtgagggggttgatctacaagagaggttacgggaagctgaacaagcagaggattccacttagcaacaacagtgtcatcgaggagggcctcgggaagcacaatatcatctgcattgaggaccttgtccacgagatcatgacggtcggcccgcacttcaaggaggccaacaacttcctctggccgttcaagctgaaggcacccctcggcggcctcaagaagaagaggaaccactacgtggagggcggtgacgccggaaaccgtgagaactacatcaacgagctcatcaagaggatgaactaggctctctcttgtatcctgtgagaatgcttttctgtgtcagcgtggttgtttttgctctagtaagttgacggataatgatggatatgcaatttttttttggtgttccatggctctaatacagccagacttcactaggaactgtgtcgctgtttatgttggcagttggttctggaaaaaaaaaaaaaaaaaaaaaaaaaaaaaaaaaaagggcggccg

SEQ ID NO: 262251 - DNA, 525 bp, Zea mays
cccacgcgtccgcccacgcgtccgcccacgcgtccgagctgaacaagcagagtgttcgtcttatcaacaacaatgtcatcgaggagggccttgggaagcataatatcatctgcatcgaggaccttgttcacgagatcatgacggttggcccacacttcaaagaggccaacaacttcctctggccattcaagctgaaagcgccccttggtggcctcaagaagaagaggaaccactatgtggagggtggcgacgctggcaaccgtgagaactacatcaacgagctcatcaagaggatgaactaggctctcttgtatcctgtgagaatgcattcgatgtcggcatggatatgcaattttgttccatggctgtcatacgtcacgacttcaactaggaaatgggtcctgtttatgtttgcagttgcctctgtaggttttaatacatcaagacataaaccaacacgtgccccaagtgtcactcgctagggctaccaagattgttgcaaaaaagatagcactttttcccgtc

SEQ ID NO: 262252 - DNA, 727 bp, Zea mays
cccacgcgtccgcccacgcgtccgcaaggctaccattaacatgcttcgcagggttgagccttatgttgcatatgggtacccgaacttgaagagtgtcagggagttgatctacaagaggggctacggaaaactgaacaagcagaggatccctctgtctaacaaccaagtcatcgaggaaggcttgggcaagcacaacatcatttgcattggagatcttggtcattaaaaccttaattgtcggccaaaatttaaaggaggcgaacaacttccttgggccttttaagctgaaggccccgctgggaggcctgaagaaggagagggacccctttgtggagggtggtgatgccggtaaccgtgagaattacatcaacgagctcatcaaaaggatgaattaggttcacgaccaagctctattgtgttctaagaaactttctgtgctctcccaattttacattattaggaagtggatgaatatgcatgcagttttgttgtttggaactagatgtgtatggaagaaatatgatcttttttcccggaggtttagaattatatatttagggctagtttggaaacttcattttccaagggatttctattttgcctaggaaaaatgaactgggcttcccaaactagcccatgatgcatttcccatcctgtgtatcgggcctttttctctgtccaagacgctctacctgaagtacgatcttgatttaaatccatgatggat

SEQ ID NO: 262253 - DNA, 336 bp, Zea mays
ccgcccacgcgtccgcataccctttttctcccaaaaactactcacgtctcgccgccccgccgtatcaccctttctcggcggccggcctcttctcttcacggactcgcaggtcatcgagatgtcgtcggccgaggccaaggccgcggcgaaggccgtcccgcagtctgtgctgcgcaagcgcaagcccgaggagcagtgggcagcggacaagaaggagaacgccctcgcagacaggaaggaggcgcttgacagccgcaagatcatatttgctcgcgccaagcaagacgcccaggagtacgacgcccacgagaaagagcttgtgcagctcaagcgtga

SEQ ID NO: 262254 - DNA, 717 bp, Zea mays
gggacagtatcaagaaggctgctaatatgcttgagagggtgcaggggctatgcctcaaggatcgctataatttttgctgggctccggtaaatataagggatccaaaagccatgtaccatcttttaagatttgccaccaactattctcatagccgtcgtgttggcatcgcaatgggaataccaaggggttctgcaaaaaatgacgctgagcttctggaccttgagacaaaacatcaggtcctatcaatgtatctatggttgtcacatcattttgaggaagataactttcctcatgtgcagcaggctgaaaacatggcaataaatattgctgatttacttggcaagtcgcttgcgaaagcatgctggaagcctgaatcaagacagcaagttagggggcgacgagaaggaaaggatgagtacaatgaggaacaagcatcaaacgaaagtgcaaatgatgttcctacaaatggttatgaacggccaagggcacttgataaaacactaaggaaatggcaagataaggtcagccagaactgtcctccgtccttgaactttgtggcctgaaactctcatggagtgattaaacccaaatggatgctatgaaaataccctcttgcaccaagttggacaactagatcaaactgcaaacgcctcgaaagtttgtgttaatgctatggcatgttctggccattttctcatatttgacttaagctagttt

SEQ ID NO: 262255 - DNA, 1175 bp, Zea mays
gtcctgctcttgtgatcggcaatcttggcaccaccacggcctttcgctcaaggagccagccgtgtgcctgccgaccagcccagaggcgtcaaggccgcggctattgacagttaggtcggggtcggagccagccgtcgaggcccgatgggcagcaggacgacgctgcccctattaataaagccgccatgcgtgtgcccggcactgcacaacatccatcgtccatcgacccacccaacccccccctccgccccgcgcttcgcctgggtaccggcgtccgccgcgccccgtcccgtccaggaacaggaagagcagtaacccatccatcggggatcaccaggggagcaagatgtcgactgccgccgccccaagattgcccgctcccagatccggggcaagctatcactatcagacgaccgcggctccggtggccaacaccctctccttcgccggccacgcgaggcaggcggcccgcgcgtccgggccacggctgtccagcaggttcgtggcgtccgcggcggccgtgctgcacaaggtgaagctggtcggcccggacgggacggagcacgagttcgaggcccccgacgacacctacatcctcgaggcggccgagaccgccggggtggagctgcccttctcctgccgcgccgggtcctgctccacctgcgccgggaggatgtcggccggcgaggtcgaccagtcggaggggtccttcctcgacgacggccagatggccgaggggtacctcctcacctgcatctcctaccccaaggcagactgcgtcatccacacccacaaggaggaggacctgtactagagattgggttgctttatgcatatgcagtggttgctccaagggtggtggtgcgttcgttgctgttccgtgccaccagcggaaggggggtttcgttgttgagatgggctagttcttgtcatcaatttcggtcattcgatgagatcatggcatatgagttgtggcaataatgctggcaatatggttttgcaattcaaactgcaaatgtgaccagcaatgtcaaaaactgcacactgtgtctctgtgcgaacttgtgaaattggcattgagttcaattggctagttggctcgagatttcagttttcaaaaaaaagggcgaccgctcgcgatctagaactagcccacgcgtccgcccacgcgtccg

SEQ ID NO: 262256 - DNA, 435 bp, Zea mays
acgtcctcctcttgtgatcggcaatcttggcaccaccacggcctttcgctcaaggagccagccgtgtgccggccgaccagcccagaggcgtcgaggccgcggctattgacagttaggtccgggtcggagccagccgtcgaggcccgatgggcagcaggacgacgctgcccctatttataaagccgccatgcgtgtgcccggcactgcacaacatccatcgtccatcgacccacccaacctcctcctccggcccgcgcttcgcctgggtaccggcgtccgccgcgccccgtaccgtctcgtccaggaacaggaagagcactaacccatccacccattcatcggggatcaccagcggtcaggggagcaagatgtcgactgccaccgtcccaagattgcccgctcccagatccggggcaagctatcactatcagacga

SEQ ID NO: 262257 - DNA, 580 bp, Zea mays
  unsure (1)..(580): unsure at all n locations
ccaaaatcgccattctcttctctccttttcttatcctctctcctgagctcgctcgtagatcctctctggacgaacagaaaggttaccagcagcaccacggcgagatctccccttggcgggccaaaaccgacggcgagcttcaccggcgttggtcggctcccatctcttcgccgttttattttcctcccaggttaaggttgcaggcttttagcttgggattctgaaagatggggacctcttctggcgcgaatttccatcagcaacctcctccgacccaggggatgttgcctccaaggcatggtccacgcccctcagggttgcagacctcgctctcgctggcctcttcggagcaggttggctcgcctgacatgcaggagcctggttcaaactcggagccagggcatgattccgccactgagagcgccagttccaaagacacatggccagctgagccgaaccagagcaacggtggagtggctgccagtgatgttgtgagtaaggcggcggaaaaggaggtggcaaatggtgtatcccagccgcaggttatccatgggaccctctnccgtatgagtgggatgct

SEQ ID NO: 262258 - DNA, 742 bp, Zea mays
cctgagcgctctcgttctctctcacgcgagcagtgcatccttgagccaccgccgccgtgaggagctccgcccgtccgccgtcatccgtcaaatcaggtgaatctgccaccacctcttctccttccaggccccctcttctcttcccccaccggcccctttcctcctccactatttgtgcttctgccaccgccaccttcctccacgccgtcagcagatctgctctgtcttctcctcccttcaccagatctgctgggtgcagggagcttcacagtgatggatctgaagagaagtgggaaatggcagaaaagacccggcagctaggtattgtgcacgtctctgtgtccgtccgtcgccggatctggtcgtagtggagacgtagtgtctgatcaggcagcaacagcagcgacgcgtcgatagatactagttgacgatagggttgttgtggcaggggcagctgcgtgttggacgacaacgcggtgcccatgccgttggcaagcgtcgcggccgtggcggcaccgcccaaggcgttggcggccaccacagacacggttggccttgtacgaaaacactaataaattcttgtttattagtgttgtcttgtctcttggtttaataccatccaaagaagtactgtcctgtcaggaaaacactaataattcttgtttggacgaatcttcactccacgtggatggtccacatgctcagttgtgataacaagacagatccaagctgggttacaacg

SEQ ID NO: 262259 - DNA, 657 bp, Zea mays
agtgttggttgggtgtcctgactcctgactccttctgagggtgtaggtggccatttggtacaggcgtcggactcccaggaggatgaccggtggcaagaggttcggcggcgggcgggtgccgacggggaccccgtccctcgcgtggtcgtccgtcgtcatcgtcgcctccctcctcgttggcgcctccatcgtccacaacatctacaagcctgacatgaccattccacctgtggagggtgccgccgccggcggcggcggccaagaaagctgagctacgaatggctggacactgcatgcaagagaggaggctgggcatgggagtagtgaggggccggccatctgcacctttttttttgttctagaacaaaaaacgacattatgttgttcttttctgttttgctaccaaaagatgtgaggctgcatagtatttgcttccttaggcgctactggtcacgcgtaaccatggggttattcacaaccatgtcagcaacagaaagtatatgtacgttcattttgtgtttttttttctaatggctaactaggtgtgtgcccgtgcgttgcaacggaaatatataataccatgacaacttatgtacaaatgtgtgttttaatgttacgagaaaatgtttgtaatcaaaaaaaaaaaaaaaaaaaaga

SEQ ID NO: 262260 - DNA, 347 bp, Zea mays
agctgatatccggaatgagcccgctcggccaaatggaccggacctgagcgctctcgttcgctcgcacgcgagcagtgcatccttgagccaccgccgccgcgaggagctccgcccgtccgccgtcatccgtcaaatcagggagcttcacagcgatggatctgaacagaagtgggaaatggcagaaaagacccggcagctaggtattgtgcacgtctctgtgtccgtccgtcgccggatctggtcgcactggagacgtagtgtctgatcaggcagcacagcagccacccgtcgatagatactagttgacgatagggttgtacggcaggggcagctgcgtgttggacgac

SEQ ID NO: 262261 - DNA, 342 bp, Zea mays
aacagatcctctctggacgaacagaaaggttaccagcagcaccacggcgagatctccccttggcgggccaagaccgacggcgagcttcaccggcgttggtcggctccaatctcttcgccgttttattttcctcccaggtcggtctcctccactatccccacagaggttccccttctccttccttcgctttctttttttcccctgtcgccggcggcgatagggtcctgtttttcttgcttcggcgggctgtaaatgcttccggccctctccggcggtccagatccggcggtgaccgtgctcctgttcgttcttctggtcttgattcgattgggaggggaaggg

SEQ ID NO: 262262 - DNA, 1490 bp, Zea mays
cccacgcgtctctttctcctccgcatccccccggccggttcctccttgccgccgccgtcgctgtgccaagccttgcgaataaccgttgtccgggctgtggggggcagacatggcgctccggaggctgctgcaggggagtgtcctgccgcgggtaaccggcagggtttcggcaccggccgtggcgccgttttcaacggagtccggagagaccatccgtgccacgctctttccgggcgacggcatcgggccagagattgccgagtctgtcaagcaggtattcaatgttgcaggggtaccaattgaatgggaagaacactatgttggtacagaagttgatcccagaacagagagttttttgacttgggaaagcctggagtcagtgcgtagaaacaaagttggcttgaaaggtcctatggctacacctattggaaagggtcatcgatctttgaatcttacattaaggaaagaacttgggctctatgccaatgtcaggccttgcaacagcctcccaggctacaagaccagatacgatgatgttaaccttgtgacaattcgtgaaaatactgaaggagaatatagtggtcttgagcatcaggttgtgagaggtgttgtagaaagtttgaaaattattacccgccaagcaagtttgagagtggcagaatatgcttttcattatgccaaggccaatggccgggaaagggtctctgcgattcacaaggccaatattatgaggaagacagatggtcttttcctcaagtgttgccgtgaagtggctgagacgtaccctgaaattcaatacgaggaggtcatcattgacaattgttgtatgacgcttgtgaagaatcctggtctttttgatgtattagtgatgccaaacctctatggtgacattattagcgatctatgtgctggtttgattgggggcttgggcctaacacccagttgcaatattggtgaaggtggcatttgtctagcagaagctgttcatggttctgctcctgatattgctggcaagaaccttgcgaacccgactgctcttatgctgagtgctgtcatgatgttgcgccacttgcaattcaacgacaaagcagaccggatccacaacgccatcctccagaccatcgccgaggggaagtacaggactgctgatcttggtggaaaggcatcgacatcagagtttacaaacgcagtctgtgatcacatctgagaaacggatgtgattcttccttctgattgttttgtcatcctaatatttttttgtcacatatgagaggagctttagctttaagaggttaactggcagcacctcgaacttctttggggtgtttaacacggtttgagaccgtcaaataattttgtcacatttcttgcggttcagaaattctttcaacattggaatggagccaagaattgtctgtaataatcaacatcagcattataacagtatgtagggtttatctcattcaaaaaaaaaaaagggcggccgctct

SEQ ID NO: 262263 - DNA, 446 bp, Zea mays
ccctttaccattgtctcccccctcgtccgacctcctcgccgccgcagacgaccgccgccgccgctgccgctgccgctgcgaaccctttgtgaatcttcgttgtccgggctgtgtggggcaggcatggcgctccggaggctgctgcaggggagcgtcctgccgcggataatcggcagggatttggcaccggccgtggcgccgttttcaacggagtccggggagaccattcgtgccacgctctttcccggcgatggcatcgggccagagatcgctgagtctgtcaagcaggtattcaatgttgcaggggtaccaattgaatgggaagaacactatgtcggtactgaagttgatcccagaacagagagttttttgacttgggaaagcctggagtcagtgcgtagaaacaaagttggcttgaaaggacctatggctacacctattggaaa

SEQ ID NO: 262264 - DNA, 677 bp, Zea mays
ctagttctagatcgcgagcggccgccctttttttttttttttaatctggaattttgggggggaacgcattcatgttctggaaatttagcagacataattaggtccctgaaactattccaaggaggagcatgattacacaccagtggggaaaaacacacacacacacacatagaaaatggatcaaatttgcgcgcgacaccaacaagcctgagatcactgcttctctatcctaccagagatctaaagaacagcatgacattatacagataggttcatgacaaagtaacaagacaggcagttgggagttgcatggacagggtaagtagtaatacactgggtaatactccagttacgacagggcacaggcaaacccccttacactctgttaagcatggcatgagccatgaccatcacacaagcctccctcttgattacgaaaccagaaacgagatgcggcgatggaacgccatcttaagagttattggttggcaagggcaacaacaacaagaacgtgggtaccaataccaacagggcagatcggttactgcggctggacgtagtattaacccatggtggtggggtcggccgcggcggggtgcttcgggatcccgggcgctgctgcccccatggcggcggcggcggggtcggcgtccctgggctcgtcccgcggcacgatg

SEQ ID NO: 262265 - DNA, 559 bp, Zea mays
tcgcgggtcgatacacgcgtctaaagtcagtcatgctcaggaggaggctctctctcctgtcctacctgttcgctcccggctcccctccatctctttcgccacacgcgcgagaggggggagaggaaacagctagcagcgagcgaggaacgaagagggtgcttcgcacgtgcatgtgagatcgggcgatcccgatcgtcggccggcgcgaattgaactaacgacgacgtacgtgcgaccgggccgggcgttggattattccggcctgagcaatgggcaagatcgagtacggcgtggtggcgcgcggcgcggtggtgctggcggagcactacggcgcggcggcggcgggcggcaacgcgggcgccgtggcgcggcaggtcctggagcgtctccctggcggcggcgacgacgactgcaacgtgtcgtacacgcaggacctccacgtgttccacgtcaagcgcaccgacggcctcacggcgctctgcatggccgacgacgccgccgggcggcgtgtccccttcgcgttcctggaggacatccacgggaggttcgtcaaggcgta

SEQ ID NO: 262266 - DNA, 974 bp, Zea mays
gcctggtccaccttagagcctcaagaaaaccctaatccctgtgtccatcggcatatatccacacctgagtcccctccgccgcctgccgcactctcctgcgacgccacaaccacacgttcacggtagcgagagcttatcgtcgtcggcggcgaagatggtgtcgctgaagctgcagaagcggctcgccgcgagcgtcctcaagtgtgggaaaggcaaagtctggcttgaccccaatgaagtcagcgagatctccatggctaactcccgccagaacatccggaagttggttaaggatgggtttatcatcaggaagcctcagaaggttcactctaggtcccgtgcaagaagggcacatgaggccaagcagaagggaaggcactctggatatggcaagcgcaggggtaccagggaggctaggctccccaccaagattctgtggatgaggaggatgcgtgttctgaggcgcctgctccgcaagtaccgtgaggccaagaagattgacaagcacatgtatcatgacatgtacatgaaggtcaaaggtaacgccttcaagaacaagagggtgcttatggagagtatccacaagtccaaggctgagaaggccagagagaagacactttctgaccagtttgaggccaagcgcgccaagagcaaggcgagccgtgagaggaagatcgctaggagggaggagaggttggcccagggtccacgagaaataacaccacctgtctcatccacagctccagctactggggcaccgaagaaagcaaagaagtgaagtattgaaataaagctgtagctttctagtccagtactgcactttcttttataagctctagtcaaattttggagcgcctgaactgttttgctgttatataacttagtgtattgataaattcgactatcacatctggattattctgctggataatgtccgtgtctttgatgtttgtgttaaattcctattctggatg

SEQ ID NO: 262267 - DNA, 1164 bp, Zea mays
gccgcctcgcatctcctcctccgccccacgcagctgaggagctgatcctcaccggcgtcgccatcgtaatcgccttggacagcggcaccagaacctctgcctccgcagggtgcttgctggtatcattacaatctggtagttttagtggttgggcttgacttcctactattcagaaacacagtaccgagaagtctttaggtggggtcaaagatggtgtcgctgaagttgcaaaagcgccttgccgcgagctacctcaagtgtgggaaaggcaaggtgtggcttgacccaaatgaagttagtgagatctccatggcaaactcccgccagaatatccggaagttggttaaggatgggtttatcatcaagaagcctcataagatccactctagatcccgtgcaagaagggcacatgacgccaagcaaaagggacgccactcaggatatggtaagcgtaggggtaccagggaggctaggctacccaccaaggttctgtggatgaggaggatgcgtgtgctgaggcgccttctccgcaagtatcgtgaggccaagaagattgacaagcacatgtatcatgacatgtacatgaaggtcaagggtaatatgtttaagaacaagagggtacttatggagagtatccacaagtccaaggctgagaaggccagagagaagacactttctgatcagtttgaggccaagcgtgcaaagagcaaggcaagccgtgagaggaagattgctaggagggaggagaggctggcccagggcccaagagaaccaacagcacctgtcgcagccccagctccatctactggggtgccaaagaaagcaaagaagtgaagtatggaaacaaagctgtagctttttggtactatataagcatgactttggagcacctgaagtattttgctgttatatagttcgtgtctcaatattctgagtcttgtatctcgaccgttctgttggataatgcatgccgtaatagttgtttatggagcttttgttgttacaggacccctaaaaatgtttgtttgtcggatgtttggaattgtggtcatgtttatgaaaattagtgttgtgggtcttcgtgatcttcagccaactgaagcttgtttggaaactgaatgtttcgcctttaaatttaagatttggctacatgttccttcattg

SEQ ID NO: 262268 - DNA, 703 bp, Zea mays
aaaaaaaaaagcaaatttgccgtctgcaaaacccctcccacagccgtcgccgcccgccagcccgccagcgagagaagtccgcttcatccgttcgccgcctcaaggacgagatggacacatcaagccctgcagcacttgtcaatgcacagatgctgaacatgtttgttgggcgaagagtgcgcacggttgttcaagtccaacacaatgaaggtggagtgcttgtcgggcagtccaccgatgggcaccagttgtgtgtcaaaagtgccatggacgtccccgtatcacattttatggaggtttatggaattgctgaaaacagccagaccatccgtgctgaagtttgcacagattttggtcccaactttgatcccaaggtttttgatgagttgtgcaagctggcgagtggcaggttcaagcaccctgttcctgtagagataatcatcgcatggaggatcttcagccaactgaagcttgtttgaaactgaatggttcgccttttaatttaagatttggctacatgttcccttcattgcatggaggaccttcagtaccctgttactcgtcagtattggacttctattagcatgtataagcaacataggactgcgaatacaagcaaaatatatcatgtagttgaagaacctatggtctttttctacctttaggcaatccaaccctaagctttttatgttgctgtcgcttg

SEQ ID NO: 262269 - DNA, 1039 bp, Zea mays
gatcggctcgaaaccgcctcgctttctcctcttccgccccaccccggtgaggcgctgatccatcgcctcggacagcggctccagaacctccgcgttgcagaaacacagtagcgagaactattcggtggggccgaagatggtgtcgctgaaggtgccaaagcgcctcgccgcaagcgttctcaagtgtgggaaaggcaaagtgtggcttgaccccaatgaagttagtgagatctccatggcgaactcccgccataacatccggaagttggttaaggatgggtttatcatcaagaagcctcagaaaatccactctagatctcgtgcaagaagggcgcacgaggctaagcagaagggacggcactcaggatatgggaagcgtagaggtaccagggaggctaggctccccaccaaggtactgtggatgaggaggatgcgcgtgctgaggcgcctgctccgcaggccccgcgaggccaagaagatcgacaagcacatgtaccacgatatgtacatgaaggtcaaaggtaactcgttcaagaacaagagggtgcttatggagagcatccacaagtccaaggctgagaaggccagggagaagacgctctccgatcagttcgaggccaggcgcgccaagagcaaggcgagtcgcgagaggaagaatgctaggagggaagagaggctggcccagggcccaagagaaataccaccaccagtctcagccacagctcccactaccggggcaccgaagaaagcaaagaagtgaagtattgcaacaaagctgcagctttctagtccagtacttcgtaattttggagcgccctgatcaattttgctgttatacagcttcgtgtcttttattttccaaaagctaccgtacctggattgttagagatgtttacgcagagtttctttggaagaggatccgctcaaaaatgtttatttggatcagatggtctcaggaaatgtggttatgtttatgggaaattaacatgatacatgaagttcatagaaaaaaaaaaaaagggggggcgccccctttttt

SEQ ID NO: 262270 - DNA, 487 bp, Zea mays
ccggtcttgaattcccgggtcgaccgcacgccgcctcgctttctcctcttccgccccaccccggtgaggcgctgatccatcgcctcggacagcggctccagaacctccgcgttgcagtggttggggttggcttcgtgctattcagaaacacagtagcgagaactattcggtggggccgaagatggtgtcgctgaaggtgccaaagcgcctcgccgcaagcgttctcaagtgtgggaaaggcaaagtgtggcttgaccccaatgaagttagtgagatctccatggcgaactcccgccataacatccggaagttggttaaggatgggtttatcatcaagaagcctcagaaaatccactctagatctcgtgcaagaagggcgcacgaggctaagcagaagggacggcactcaggatatgggaagcgtagaggtaccagggaggctaggcttttcccccaccaaggtactgtggatgaagaggatgcgcgt

SEQ ID NO: 262271 - DNA, 382 bp, Zea mays
ctcttcctctcggttaagtccagcccactccgccgccgccgaccgcgagaggagttctcttcgccgcctcaaggacgagatggacacatcaagccctgcagcacttgtcaatgcaaagattatgaacatgtttgttgggcaaagagtgcgcacagttgttcaagtccaacacaatgatggtggaatgcttgtcgggcagtcccctgatgggcatcaattgagtatcaaaagcgccatggatgtccctgtatcacactttatggaagtttatggaattgctgaaaacagccagaccatccgcgctgaagtttgcacagattttggtcctgactttgatccccagacttttaatcatttgtgcaacctgtcgagtaacaagttc

SEQ ID NO: 262272 - DNA, 439 bp, Zea mays
  unsure (1)..(439): unsure at all n locations
gatcctcaccggcgtcgccatcgtaatcgccttgagaagcacgctcatctagttcgactttcgctgtggaatacctatggaacctactgctagtagatttagtggttgggcttgacttcctactatttcagaaacacagttccgaggagtctttaggttggggccaaggttggtgtcgctgaagttgcaaaagcgccttgccgcgagctacctcaagtgttgggaaaggcaaggtgtggcttgacccaaatgaagttagtgagatctccatggcaaacatccgccagaatatccggaagtcggttagggatgggtctatcatcaagaagcctcataagatccatctagatccgtgcagaagggacatgacgccagcanagggcgcactcaggtatgtagcgtagggtactaggagctagtccacaagtctgtgatagag

SEQ ID NO: 262273 - DNA, 1254 bp, Zea mays
cccacgcgtccgccgcgtctttccctctttttccaagcggtcaaagccaaatcagtcgcgagcggcggcggtaacgagaacgagacgcgcgcgctagctgaatcaggagcagggcccagggaggagagtggagagccgccggcgagcagcaatgccttactgcgaggtgggcaggtacgcggacggcgacaagtgggagggcgtccgcctcttctaccgccgctacggcagcggcgccaccaaggtgctcctcgtcatcggattggcggggacgcacgactcgtggggcccgcagataaaggggctgaccgggtcgctggagccctccgacgacgaggccctgcggccggacgaggaggccggcgtcggcgcggcggaggccgcgccggcggaagcggacgacggcatcgaggtctgctgcttcgacaaccgcggtgtcggccgcagctccgtgctccccaacaaatcctactactcgacggcaatcatggccacggatgccttggccttgatggatcatttggggtggaagaaggctcacgtcttcggccactccatgggtgccatgattgcttgcaagctagctgcgatggcacctcacaggctatgttcgctggcattgcttaatgtcaccggaggtggctttcagtgcttcccaaaggtagacgcgcagatgctatctcttgcattccgtttcttaagggcaaaaactccagaggaaagagcccttgtggacttggaaacgcattatacgaaggaataccttgaggagactgttgggtcgtgtaccagaagaatggtcctctatcaagaatatgtgaagggcatatcgtcgacagggatgcaatctaattgtggttttgaagggcaaatcaatgcatgctggactcacaacatgactactaaggagctagatacaatacgatctgccggctttctagtttcagttattcatggaaggtacgatatcattgcacaattgtgccatgcaaaacgtctagcagaaaggcttcttcctgttgcaagaatggtagtacctcatggtgcacatctagtaagccatgaaagaccagacgaggtgaacaatgcacttatggatttgataaaggccaccaaatctgcgataaaacctgaagagtggtcagcccagcccgagaacacgtcggaaaccggggcgctcatttctgcgagacccatcgccgtcacggtgcgaacagatgcaggcgtagacgtcaccgcagcggtctataactt

SEQ ID NO: 262274 - DNA, 347 bp, Zea mays
ccctcgtttttcctctgcgcactttttctcgtttccagccttccaggcagccacgcctcgcccgttctcggatcccctccaaaacggtcaaagccaaaccagccaaatcgcgcgcggcggcggcggcgacgagaacgagacggacgcgcgcgcgctagctgaatcaggtcaggaaggaggagagccgccggcgagcacagcagcaatgccttactgcgaggtgggcaggtacgcggacggcgacaagtgggagggcgtccgcgtctactaccgccgctacggccgcggcgccaccaaggtgctcctcatcatcgggttggcggggacgcacgactcgtggggcccgc

SEQ ID NO: 262275 - DNA, 537 bp, Zea mays
cttctccaccaccaacactagtcagctcaccaccaccagcacctaagtcattacctccacctactcccgtgagctcgccgcctccagaagtgaagtcctctcctccaccaaccccaggtggctcaccaccaccagcgccgaagtcgtcacctccacctactccagtgagctcgccacctccagaactgaagtcctctccaccaccagccccagttagctcaccaccatcagcgccaaagtcgtcacctccacctgctcctgtaagcttgccacctcctgaagtaaagtcttccccaccaccagcaccgattagctctccaccacctccggccaagtcaccacctccaccggcccctatgagctcacctcctacccctgtgaagtctacacctccaccagcgccggtcagttctgcaccacctacaatgaagtccccaccgtcggcagcaccaattatctctccgccaccagcaccagtgaagccaccatcgctaccaccaccagccccagtaagctcacctgctactgcggtcacct

SEQ ID NO: 262276 - DNA, 1047 bp, Zea mays
gatgagtggaacttttggtgcaaactctggtttcatcagtaactccaatgggaggcaaatgggttcatacttcaatggaagttcgaatagattgagtagttctattgggtatcttggttatgactcaggatcgatgttgagttccatgtctaggaattttaatgcaggtgtaaactacccgatcaatcctacaaacatgagtgcttttgctgcccttggaaatgggggtggcgtcaattatatgggtctcccttctattgcccctgagttggcccagttgggcaacatttcaagccttgggtcagggaactttagccgtggagctggagttaataacttaagcttaccttctggctcctatgggaggagcaattcaactggtacaattggtgagcctttttctgcatcaggcaatgcatatgaagtgaacaacccagatacatatgggaacaactctatttatggtggaacatcctggaggttcccttcatctgaagttgacgtgccttctttcagtcatgatcttggaaatgttgatccgaatatgaaatcagacatatcagcaaattacatgggaaattattctgttagcaacaatcagccaagcagaggtatcacttcatagtgggagtattactacacattcatatatgacttgggatagatgaagcacccattcagtcaggcagccaggtgcgtgcatggcaactgtgaatgggtgatatgtcaggttagttttgtctagctgaccagcggtgtggtttacaacaccaacatgctagaggaggaggaagcggatacagaaacattttctgaggggcttcttttctttgagtcatgtttttagttttgattcctgcgcgtggctagctccttttggtttttgaatgagatgtgtagtggtgattattgcggcgcatattttagagatcgtggttcttccaacataagctggaaaaagaagtctgtatacggatgaacatgtataccaaccaaagggatgctgcattatcttgcccatttgtcactacattagcctgtgttttt

SEQ ID NO: 262277 - DNA, 796 bp, Zea mays
ctgcgaccgaccgcggccggctgttttacacggattcacacagaaccaactaagggggtggtagtacccatcaatggttaagatggctgaactcagtggccatacctctcgtgtccttttcatggctcagagccctgatggttgcacagtagcatcagccgctgcggatgagacccttcgcttctggaacgtatttggagaccctgaagtggccaagcctgcagccaaggctttccacactgggatgttcaacagcttcaaccatattcgataggaacaagtcatgagaacgatcccttctgttggaaatggccgtgcatcatatgtgaggtcgattcctattgatgagatctatccacattgagtaagcacacaacatcagcgagcattgccatcatatgcatcattcagcgatgctaatcagaaatccaggatcagggccgtaaaagggttggactatatgtatctgcaacatcgcaagcaacagggaggctgtctcttcagaaattttcaagaggacgtgtcagaaacatactcaggaggccgtctcttcattcaaagagtatcttttacacgacttcttgagtataaaaaactcatttgtacaatcctacctgtctattgaattgtctttagaaaaaaaaaagagactttattgtatgtactttttttatcttttatgtctgaagaactgttttccccttttcttttagaagtaggagccggtaaagctactctttcaatttgtcacaagcattatttatttttataatttgtcctctgtttccttgatttc

SEQ ID NO: 262278 - DNA, 1959 bp, Zea mays
  unsure (1)..(1959): unsure at all n locations
caaataaccattcacggccgatccctaaaccccacaaagcaaagcggccgctctctctctgtctctctctctcgcctccctctcgcctccctctcgacgacgatctcaggcgctcgcggggagtcgagtcgagaccagcttcgttccttcataaaaagctcacttagttgttgtccccgcctctttttttcgctgttcttgtttgattacatcatcttattttgtgcttgaatctaacctgccattaagtttttatcgcttcgttatttctctgttgtgcttgtcttgttcttttgttgctctaaccatggacgcaggctcccgctcgatctcctcggcgaagaaccgcgccgccgccgtcgccgccgcgccccggccaccgctgcaggaggcgggctcccgcccctacatgccatcgctgagctcgggaccccgcaacccgtcggccaagtgctacggcgacaggttcatcccggacaggtcggcgatggacatggacttggcgcactacttgcttactgagcccaggagggacaaggagaacgcggctggcagcgtccccatccaaggaggcgtaccggaagctgctcgccgagaagttgctcaacaaccggacacgcatccttgccttcaggaacaagccgcctgtgtctgagaacgtctcggcagccatcgcagcttcctcccaccatgccaagctggtcaagcagcgtcgacatattccccagtctgcagagaggactctggacgcaccagagcttgttgacgactactacctcaacctgcttgactgggggagcaacaacgtgctatccattgctctgggcgacacggtatacctgtgggatgcctccagaggatccacgtctgagcttgtgaccattcacgaggacagtggtcccatcaccagcgtcaactgggctccagatggccaccatatcgctattgggctcaactcatccgatttccagctctgggacaccagctccaaccgactgttgagaactttcagaggtgtgcatgaggaaagagttggctcactggcatggaacaacaacatcctcaccactggcagtatggatggcaagatcgtgaacaacgacgtgagaattaggaaccatgttgtacagacatacgaggggcacagccaggaggtgtgtgggctcaagtggtctggatcagggcagcagctggctagtgggggtaatgacaaccttctgcacatttgggatgtgtcgatggcatcccccatgtcaaccgctggccgcaaccagtggctgcacaggctcgaggaccacatgtccgctgtgaaggcactcgcgtggtgtcctttccagagcaacttgctggcaactggtggtggcggcagtgatagatgcatcaagttctggaacacacacactggagcatgtctgaactctgttaacactggatcacaggtctgtgcccttctatggaacaaaaatgagagagagctgctgagctcacacggattcacacagaaccaactaaccttgtggaagtacccatcaatggtaaagatggctgaactcagtggccatacctctcgtgtccttttcatggctcagagccctgatggttgcacagtagcatcagccgctgcggatgagacccttcgcttctggaacgtatttggagaccctgaagtggccaagcctgcagccaaggcttcccacactgggatgttcaacagcttcaaccatattcgataggaacaagtcatgagaacgatcccttctgttggaaatggtcgtgcatcatatgtgaagtctattcctattggtatgttttagaaacatacacnttggttgtttcctagcgtgatcaatgttgaggatcaaattgtcttgggttgttcttactatacctgttgactattattttagatgagatctaatcacattgagttagcacacaacattagcgagcattgccatt

SEQ ID NO: 262279 - DNA, 735 bp, Zea mays
  unsure (1)..(735): unsure at all n locations
accttccctctccctgcttccctcctgctacaaataaaaattcgtggggcggccaaaccctaaaacgccccacagcgcaagcgagcagatcctcctccctttctgcttcctggcctcctctctgcctccccgcgccgatctcgagcacctggggagaccgcgagacgtgcgcctgatttttctcatcgcagcagccctcaagttccccacctcttttttcttgcagctttcaattaatctggttatttagctacatctttattttactttcattttacctttaatctgtttagttccattgcatcttctgcggttgcggttagtattgctgtttcttgctccttgtttcttgttcttttgcttctaaccatggacgcaggaacctactccatctcatcagagaagagccacacggcggcagcggcgcggccccctcttcaggaggccggcactcggccctacatgccgtcgctgagcacaggatcgcgcaacccgtcggccaagtgctacggcgataggttcatcccggacaggtcggcgatggatatggacatggcgcactacctgctcacggagcccaggagggacaaggagaacgcggtggcagcgtccccatccaaggaggcgtaccggaggctgctcgcggagaagttgctcaacaaccggacacgcatccttgccttcaggaacaagccgcctgtgtctgagnaaccgtctcggcagccatcacagctt

SEQ ID NO: 262280 - DNA, 181 bp, Zea mays
atcttttacacgacttcttgagtataaaaaatactctttgaatgaagagacggcctcctgagtatgttactgacacgtcctcaggaggccgtctcttcattcaaagagtatcttttacacgacttcttgagtataaaaaactcatttgtacaatcctacctgtctattgaattgtctttag

SEQ ID NO: 262281 - DNA, 1729 bp, Zea mays
cccacgcgtccgcgtgattacttcccctccccttctcccctctccactccatcgtcaaggaaggaacacggccctaactaaaccctagctaagggaagggaaacaagaccatggatgcctccaagctccgcgagcttcgcgacttcgtcgaggcgtgcaagaagaatccttcgctcctcgccgaccccaacctctccttcttccgggattacctccagagtttgggtgccaaaattcccgccgccgccccctctttcgaaagtcccaagagatcttccatggacgacattgatgacgacggtgatgacgacgacgatttggatatgagggatcccactcctgagcgagacgagctcgatgaagagattgttgagtctgatcttgagctcgaaggagaaattgtacagtctgaccatgatgacccaccacagaagatgggaaatccttcagtggaggtgactgaggaaaaccgtgatgcttcccaagaagcaaaaggcaaggctatggaagcaatttctgaaggaaaacttgaagatgctattgaacaccttaccaacgcaatagtgctgaatccactctcagcaatcatgtatggtactagagcatctgtgtttataaaaatgaagaaaccagctgctgccattcgtgatgccaatgctgctctagagatcaacccagactctgcaaaaggctataaaactcgtggaatggcatatgccatgcttggcaaatgggaggaagctgctcatgatctgcacacagcatctaacatggattacgacgaggagatcaatgctgtgctcaagaaggtggagcctaatgctcacaagatagtggaacatcgcaggaagtatgagaggttgagaaaagagagggaggaaaagagagcgcagcgtgatcggcttcgtcaacgtgcagaggcgcaggctgcttacgacaaggccaagaggaaggagcaatcgtcaagtcgctcatcaggaggtgcatctcccagaggctttcctggagggatgcctggtggtggtttccctagagggatgcccggtggaggtttccccgggggtggcatgcctgggggtttccctgggggtggcatgcctggaggtttccctggtggtgttcccggtaatgttgatatgagtaaaatcctgaatgaccctgacctgatggcagcattcagtgacccagaggtcatggcggctttacaagatgtgatgaacaatcctgccaactttgctaagcaccaagcgaatcctaaggtgggccctatcatcgcaaagatgatggccaagttcaatgggtcccagtgatggttatgtcgcagtcaggttttgtgagcagcaagcaaaggtttgttggacagtgaacaggtgttcttttcgtgcatctggtctgggagtgtgtttagcttgtgatgaagaacatgagtgtgtgtgttggtcgtggtgcatctggaggtgcgatgagcatgtgatgaaaaaaaaaccaaacggctctatggtgatgtatgcaaaaagttgctttcgaacttgatttctcaattcacagatggtttgacagtttcttgaattataaaatgattgtgtgctgctagtttccctacctgttatgctgtattatcggagctttgtttttcgtgcatttatatgcttggagagaacatggttgtcgatgcgcatgcaggttcggtgagtgagatgtgattgtaatggatggtgttatgtgtggt

SEQ ID NO: 262282 - DNA, 537 bp, Zea mays
tagatgctatgttacacattcgtagacaatgccaagaggcattcttagacatgtcattttgtttgtttctgcccccagatcaacccagactctgcaaaaggctataaaactcgtggaatggcatatgccatgcttggcaaatgggaggaagctgctcatgatctgcacacagcatctaacatggattacgacgaggagatcaatgctgtgctcaagaaggtgggagcctaatgctcacaagatagtggaacatcgcaggaagtatgacaggttgagaaaagagatggatgaaaacatatcccatcgtgatccgcttcgtcaacgttcacatgcgcaggctgcttacgacaaggccaatacgaatgaacaatcgtcaagtcgctcatcaggaggtgcatcttccataagctttcctggacggatgcctcctggcggttttcctagaaggattcccagttgaggtttcccctggggttgcatgccttgaggtttccctggtggtgttcccggtaatgttcatatgagtaaaatgctgaa

SEQ ID NO: 262283 - DNA, 982 bp, Zea mays
gcattttgcactctaccagtcgctgaagatttccctttataagcctgcggcatttaacaagggaattttgctaccactctgtcgggaaaggaattgcaccctacgcgaagcagtgattattgggagtggtatccagaaagttgccattccatttctccatgcaagtgtagctctagtaaaactagcagagatggagtactgtggcactacaagttacttcatcaagctatttctagacaagaaatatgctttgccataccgtgcacttgatgcagtgcttgcccatttcatgcgttttgttgatgatgagaggatcatgcctgttatatggcatcaatcactgcttgcatttgtggaaagatacaagaacgagttagagaaaaaggataaggagaaacttgcacgtttgttggatcaccagaaacactatttagttactccagaaattcgaagggagcttcgagggagctgcaacaggggtgaaaaagatacaaatttgcatactttgtcacctatctccgtcattaccaagcctatcgaggaagacaaatgggacgtaccacaagtgccaatggaggaagattagccagattctccaacatcgatttttacacttcatttgtttttgaagcaaatttctaaagatattgctgtattttattgggcgtgaacttttagtgccaatattggggtaaaataggttcccagtagattgggcccccaatgttctgagggcattttgcagtcggaatgtgattcacacacagaaaagtttgttttgatcatttggagcattccaagggggcattcagcatggacatgtagcgtactgtctttcgcagaagtgggtaagaaatggttgatcatgttactttgtacctgcgacaactaaaggtgtaccatacttgaaccacaaatgaaaatgaataccccggagttcgtttggtttgtactaaaaaaaaaaaaaaaaaaaaaaaaggaa

SEQ ID NO: 262284 - DNA, 3059 bp, Zea mays
ggcggccggccttcattctcaactcccgggcagaggcagaggcagaggcggagggcggggcgagagagccgtgcggctgtccaactccccttccctatccggtagcagctgctcctatatgacccccgcaccccagcaaaaaccttcccctttatcgcgtgcgcagccccgtactactatccccgctaccgctagccgccgcgctgctcatctggtggcggctcgcctccctccccccatccgccgccgccggctcctcctctagctccctccttaccccgagctttaagctcgtgctacctgcctacctatccgtagggagagagagagagaggggagaaggttcggtcggtcggtcgggggctctcggatctcgccgctgcctccccgtttcttcgttgggatctcgctcgcttcgcgccatggccgccgtcgcgacgccaccggcccccgcgcccgccgcgccggcaccggcaccggcaccggctgctgctccggctcccgtcaccgtcgcccctgccgcggaccaaaccacggatctgctgcagaagttgtcgctggattcgcagcccaaggcggcgggtgcgacagagcctgctgctgctgccgctgccgccaaggagggtgctgtgacaaaccagccgctgagtgtggccatcccgccagagcggtctatcacgccggtgcttcaggactttatggatcccaacctgttctatctaccagcgtattactatggaggctacgacagttccatgagcgagtgggatgattatccaagatatctaaattcagatggagtggagattgccccagcagtgtatggagatatttatggatatgggtatgctccttacggggcatactctccggccacttccccagttccaacggttgatggtcagatgtttggcgcacagcattaccagtatccaaccacgtattttcagcctcctacaccaattccttctaccactcaaagcaacctccagtcttccaacaatcctgaaaagccagcagctaaagcagatcctgccaaggcaaccgctaatggtgttccaaatggtactggtcacactcacagttacagtggaactgtaccaagccaacaaagttcagcactgacgcctgatggaacttatagggcgcccttgctaggtggagttccttctgctggttacctagacacgacatattatgggtatgacagcacaggggcacaatttgcatggtatgatggctctgcttatgcaaatggacagcaaagaacaaccacaactaatcgttttccatcctcgtcattcagtggtaatggttcatctgcaatatatcagaacaagagctccaccacgcagcagatgggtatgcagaatagaagacctacaactacatcagcagctcctacctatcccaataggatgtaccctagcccccgaccgtacacccagtatgggaattcagtaaaaactggtcttccctacgggagtaacggttatgattccaggatatatggtcgatgtggtcttggtaatggtatggataacaggtacaggcccagggcatgtagtggatactatggttatggcaatgagagtcaggatggaacaattgagttaaacagaggtcctagatctggccggttcaagaaccagaaattgtacggtcatactgtcactattgctgtgaaagggcagtctctcccttctagtgaaagcaagaatgatagtgctgtgcctgatagagcacagtacaatagagatgacttccctgttcagtacgatgctgcaaagttctttgtcattaaatcgtacagcgaggatgacatccacaagagcgtaaaatacaatgtgtgggcaagcacaaccaacggaaacaagaagcttgatgctgcttaccaagaagctcagtcaaagggatctgcatgccctatattcttgttcttctcagtgaatacaagtgggcagtttgttggtgttgctgaaatgactggcgccgttgattttgagaaaaccctagagtattggcaacaggacaagtggaacggctccttctctgttaagtggcacattgtcaaggacgtgcccaacaatattctcaagcacatcatcctggagaacaatgagaacaagcctgtcacaaacagccgtgacactcaggagatacgcctcgaacaaggccttcagatgctcaagatattcaaggatcatgtcagcaagacttccatcctcgacgactttgccttctatgagagccgccagaagttgatgcaggataagaggtcgaaacagcagcagctccaaaagcaggtctgggacactaggacccccgtttctgtcaccggtgagcgaccgcaggaacctgctaatgggaagcccaatccgtccgtaccagatggtgtcacggcagaggtgaaggcggtgaaggctcccgcagagaacggcatcactgctcctgttgtttcctatgcagcaaaggtggcccagacagcaccagagaaacccgtcctctccaacggagtcgccaagaccggttaactcgatcgtgcaaccagagctccatagccaggatgcggtgcaagggaactggtgaccaaccaaggcaggctgtggaactggcagcatggccccataagcgttgctcgatctcctcatcgctactggatggagagcagttggctagttgttagcggtttccctagtttctcttcctcttgtgttccccgtttcagtttgcttatagccccgaagactcttttctcccgtagtgtcggaatgccagggtctgtccctgtgggtgtgttgcgtaactgggatccgagtataccctgctgtgttcgtcgttacattgaatggatctgaatgaaagtgggttagattggagcttttccaaaaaaaaaaaaaaaaaaaaaaaaaaaaaaaaaaaaaaaaaaaaaaaaaaaggggggccccccaaaaaaaggccccccccgcccggagaatttttcgggggggtacgcgtgggtggagacattttccccaaaaggggggttttaaaaggggtggggaaaaagggggaagagg

SEQ ID NO: 262285 - DNA, 1263 bp, Zea mays
cccattcgtccgcccacgcgtccgcagcagcccctcttgtaccagtaaaccgtgctgctatcccccgctagccgccgcgctgctgcggctcgcctccctcctccccagtccccacgccccgccgccgccgccgccgcctcctctcgctccctccttttaccccgagcttaagctcgcgcgtacctgcctacctatccgtaggagaggaagaggggacaaggcccggtcggtcggtcggtcggggggctctcggatctcgccgctgcctccccgttcgttcgttcgttcgttgggatctcgcgccatggccgccgtcgcgccgcccccggcccccgcgccggcaccggttccggctcctgctcctgccaccgtccctgtcgcggatcaaaccacggatctgctgcagaagctgtcgctcgactcgcagcccaaggcggcggacgcaacacagcctgctgctgccaccgccaaaaagggcgccgcggcgagccagccgctgagcgtggcgatcccgccggagccgtccatcacgccggtgatccaagactttacggatcccaacctgttttatctaccagcgtattactacggaggctacgacagttccatgagcgagtgggatgattatccgaggtatctaaattcagatggagtggagattgccccagcggtatacggagatatttatggatatgggtatgctccttacggggcatactctgctgccacttccccagttccaacagttgatggtcagatgtttggtgcacagtattaccagtatccaactgcgtatttccagcctcctacaccagttccttctaccactcaaagtgacctacagtcttctaaaaatcctgaaaagccagcagctaaagcagatccagccaagactactaacggtgttcccaatggtactgctcacagtaacagtggaactgtaccccttgcgtcgagccaacaaaattcatcactgacgcctgatggaacttatagggcgcccttgctaggtggagttccttctgctggttacctggacacgacatatgggtatgacagcacacgggcacactttgcatggtatgatggctcttcttatgccaatggacaaccaagagcaactgcaactaagaattgaccatccgcaacagagggcaaatagctccacagcacactgagtcccagactggtcgaagcaatagagacagttcagaggcgtccgtgtccatggaggcaacgtgacgtagagggctctccgattgg

SEQ ID NO: 262286 - DNA, 879 bp, Zea mays
ggatgacttcgccttctatgagagtcgccagaagctgatgcaggataagaggtcgaggcagcagcaggtccaaaagcaggtctgggacagtaggacccccatttctgtcactggaagcgtgcaacagcaggaagctgccaatgggaagcccaatccgtctgtaccaaacggtgtccctgcagaggtgaaggcggcgaaggcttctgcagagaacggcaccgccactccagctatttcctacgcggcaaaggtggcccaagcagcaacagagaaacctgtgctcgccaacggagtcgctaagaccggttagctggaccgcccaaccgatgctccatagctagccgcgagcgacggtcgacgtccccaagagctcgaccgaatcgctgtacaagggaactggtgaccaaccaaggcaggctgtggaactgggcaggcatggcgccctagagcgttgcggctccatctcgtcgctgctggagagcagctggctagctgttagcgttttccctagtttctctctctctctctgtcgctgtgttccccgtttcagtttacttatagcccgaagacttttctgtagtattggaatgccagagacctttggccggacaagaggaatttgcgaaggccgtctggctgggtgtgttgcgtcgtcattggggtctagtatggccagttgtgttcgtcgttatattgagtggatccgaatgaatgtgggttagattggagctttccaagaaaaaaaaagaaaaaaagaaaaaataagaaaagggcgggcccgcaaccatttgataaccgcaccccggggaacaagtccggggcagaggaagcgaggagagcaggtttccacagagcagacagggtctggcttggcccaaa

SEQ ID NO: 262287 - DNA, 840 bp, Zea mays
tcgcccacgcgttcgtgcacgcgtccgttcacgcgtccgcccacgcgttcgagaacaatgagaacaagcctgtcacaaacagccgtgacactcaggagatacgcctcgaacaaggccttcagatgctcaagatattcaaggatcatgtcagcaaaacttacatcctcgacgactttgccttctatgagagccgccagaagttgatgcaggataagaggtccaaacagcagcagctccaaaagcaggtctgggacacgtggacccccgtttctgtcaccggtgaacgaccacaggaacctgctaatgggaagcccaatccgtccgtaccagatggtgtcacggcagaggtgaaggcggtgaaggctcccgcagagaacggcatcactgctcctgttgtttcctatgcagcaaaggtggcccagacagcaccagagaaacccgtcctctccaacggagtcgccaagaccggttaactcgaccgtgcaaccagagctccatagccagggtggggtgggtgtcctgaagactcagatgcggtgcaagggaactggtgaccaaccaaggcaggctgtggaactggcagcatggccccataagcgttgctcgatctcctcatcgctactggatggagagcagttggctagttgttagcggtttccctagtttctcttcctcctgtgttccccggttcagtttgcttatagccccgaagactcttttctcccgtagtgtcggaatgccagggtctgtccctgtgggtctgttgcgaactgggatccgaatgtaccctgctgtgttcatcgttacattgaatggatctgaatgaaagtgggttagatt

SEQ ID NO: 262288 - DNA, 579 bp, Zea mays
ccaaaagcaggtctgggacactaggacccccgtttctgtcaccggtgaacgaccacaggaacctgctaatgggaagcccaatccgtccgtaccagatggtgtcacggcagaggtgaaggcggtgaaggctcccgcagagaacggcatcactgctcctgttgtttcctatgcagcaaaggtggcccagacagcaccagagaaacccgtcctctccaacggagtcgccaagaccggttaactcgaccgtgcaaccagagctccatagccagggtggggtgggtgtcctgaagactcagatgtggtgcaaggcaggctgtggaactggcagcatggccccataagcgttgctcgatctcctcatcgctactggatggagagcagttggctagttgttagcggtttccctagtttctcttcctcctgtgttccccgtttcagtttgcttatagccccgaagactcttttctcccgtagtgtcggaatgccagggtctgttgcgtaactgggatccgaatgtaccctgctgtgttcatcgttacattgaatggatctgaatgaaagtgggttagattggagctg

SEQ ID NO: 262289 - DNA, 374 bp, Zea mays
  unsure (1)..(374): unsure at all n locations
gtcctctccaacggagtcgccaagaccggttaactcgaccgtgcaaccagagctccatagccagggtggggtgggtgtcctgaagactcagatgcggtgcaagggaactggtgaccaaccaaggcatgtgttgctcgatcttctcatcgctactggatggagagcagttggctagttgttagcggtttccctagtttctcttcctcttgtgttcctcgtttcagtttgcttatagccccgaagactcttttctcccgtagtgtcggaatgccagggtctgtccctgtgggtgtgttgcgtaactgggatccgagtataccctgctgtgttcgtcgttacattgaatggatctgaatgaaagtgggttanaaaaa

SEQ ID NO: 262290 - DNA, 324 bp, Zea mays
caagggaaactggtgaccaaccaaggcaggctgtgaactgggcaggcatggcgccctagagcgttgcggctccatctcgtcgctgcctggagagcagctggctagctgttagcgttttccctagtctctctctctgttccccgtttcagtttgcttatagcccgaagacttttctgctgtagtattggaatgccagagacctttggccggacaagaggaatttgcgaaggccgtctggctgggtgtgttgcgtcgtcattggggtcgagtatggccggttgtgttcgtcgttatattgagtggatccgaatgaatgtgggttag

SEQ ID NO: 262291 - DNA, 1642 bp, Zea mays
caaatctagaagcaaggaacaaggacgcggcgaggtccacctccagctctacctgcccggctggcggctgcccccgtcttcgtcttccttaatctcaaattcccaatcctcctccgacgccttgtttctggatcatccagcggggggacgccggtgtattgctcggtcctcctccctggttgcccgaggcagccgtgacggaggcggaggtagcgggggggaccatgtacagatcggcgggggtcgcgatggcgtggaacgtgttccggttctgcacggctctccgtgggctgggttccatcatgatcctactcgtcctcgccatcgtcggcgttacctactacgctgtcgtcctctgcaactacggccccgccctcctcaccggcggcggcaccactctcgccgcgctcgctgtcctgctcctcttccactttctgcttgctatgcttttatggagttatttttctgtggtgctcactgaccctggttctgttccaccaaattggaatcttgattttgatgcgcagaggggagaaactgctcctctcactagctcagagttcagtagccagatgaattcacagcaatctgtggctcttggcaatacggcaaatccaagggctaggtactgtaggaaatgcaaccagttgaagccacctcggtgccaccattgctctgtttgtggaagatgtgttcttaagatggatcatcattgtgtgtgggtggttaattgtgttggggcgctgaactacaaatactttcttctcttcctgttttacaccttcctcgagacaactcttgtcactctctctctattgcctcacttcattgccttcttcagtgatgccgagatcccaggaagtcctgcagcacttgcaaccacatttctcacctttgtgttgaatctggccttttctttgagcgttcttggttttatgattatgcatatttcacttgtttctgctaatacaacaacaattgaggcatatgagaagaagacaactccacattggatatatgatcttggccggaagaggaattttgctcaggtttttggaaatgacagaaaatattggttcatccctgcatattcagaagaggatctgagaagaattccagctctacagggtcttgattatcctgtcagtgagaccagattttgatggccaggaattgtaatggggcaattctaacagtgtcctcgtcagatacctcagtgttggacatctactcatacaactgtcagcattgctgattgccctatgcaaggcatctagtgaaatgtgcacaagatgattgtagtaatagtaaccatgagttattcatctgttgcacttcatgtatgtgacgaaggggaagtcctcctacctttgccagaggaagtttgttgtgatgtaaattagttttagcgcctggttagatggaccaaatcttggcgatgcgccaggattttggacttaattctttatccatccacgtgaattgggcaggatttcatccatgcaaactgggcattagtgtggtttgaaacagtcttgtacttcagtttagttatatcatgccatgcaatacatttaccatttgagatatttgtgccgctgttatacactatcaatagtaaatggataagcgctgcgtaatt

SEQ ID NO: 262292 - DNA, 578 bp, Zea mays
  unsure (1)..(578): unsure at all n locations
acgcttacagcattcaacaagagttggaaataacagttcatggtttttggaaatgggagagggtattggttcatccctgcatactcagaagaggatttgagaagaactccagctctacagggtctggattatcctgtgagaccagattttgatggtcaggaactgtaacacagcaatttttgccagtgtcctcgtcagatacctcagtgttggacatctactgatacaactgacagcattgctgattgcgctatgcaaggcatcaaatgaaatgttcacaagattttagtaaccatgagtaattcatctgttgcacgtcatgtatgtgacgaagtgaaatttctcctagctgggccagaggaagtttgttgggatgtaaattagttttatcgacaacgtggattggtttcattccatccaaactggtagtgtgcttcaaatagtgctgtactttagtttagttattattatgtgatataaatatcatttctgataattgtgcctctgttatgcactatccagagtaaatgcataaaagccgcctaattctttcgaaaaaaaaaaaaatngatggaaaa

SEQ ID NO: 262293 - DNA, 344 bp, Zea mays
gctcggtcgcccgtgtcttcgtcttccttaatctcgaattccgaatcctcctccaacacctcgttttcctggattatccagcgagggacgccggtttgttgctcgtcctcctccctggttgcccgaggcggcggtggcggggcgaccatgtacagatcggcgggggtcgcgatggcgtggaacgtgttccggttctgcacggctctgcgtgggctaggttccatcatgatcctgctcgtcctcgcgatcgtcggcgtcacctactacgctgtcgtcctctgcaactacggccccgccctgttcaccggcggcggcaccactctcgccgcgctcgccgtcctgct

SEQ ID NO: 262294 - DNA, 1091 bp, Zea mays
gctcttcgcccagatcaaaatcgaatcgatcccccaacccgatcgcctcgtcgtcaaaaaatccccattcgttccccttctcgcctccacgagccttcacaaattgccctctcagctcttctcctaatctcactctagccctagccaaatcccagacccatcccagccctagcgacaccaaccagctcgccagcgaccatggggaacccggagaagctgatgaatcagatcttcgacctcaagttcacctccaagtcgctgcagcggcaggcgcgcaagtgcgagaaggaggagaaggagcagaagctcaaggtcaagaaggcgatcgagaagggcaacatggacggcgcccgcatctacgccgagaacgccatccgcaagcgcaccgagcacatgaactacctccgcctcgcctctcgcctcgacgccgtcgtggcccgcctcgacacgcaggccaagatgcaggtcatcggcaagtccatgcagtccatcgtcaagtcgctcgactcctcgctcgccaccgggaacctccagaagatgtccgagaccatggacaatttcgagcgccagttcgtcaacatggaggtccaggccgagttcatggagggcgccatggccggctccacctccctctccacgccggagaccgaggtcaacagcctcatgcagcaggtcgcggacgactacgggctcgaggtctccgtcggtctgccgcaggcagccgcccacgccatccctgccgccaaggataaggagaaagtcgacgaggatgacctttctcgccgcctcgccgagcttaaggcccgcggctgagaggttgtttcaggctttatcagatgcgattcaggcttatgctgttgagccgcaatgacccattgtcctgtggactgctactcatgtttggtagattcgtaaatactactgttatatgcttgaaggcgtgtgttggcattgccatgtggggtttgtgtgactcgatggaaactttgctgtcttattgtactttaaaatccaataatttgcgcgattgcggacaaaaaaaaaaaaaaaaaaaagggcggccgcccgggaattcggacggtacgtgcggc

SEQ ID NO: 262295 - DNA, 550 bp, Zea mays
cggctcaaattcatacttcctgagcaaattctgttaactctgttctgtttatggcagttgataaatcctctgcaaatgttctccagcttatctgtttggtaaactattggtggccggataacctcttcctcagatttcttgaactcagcttctatatgctgtgaaatacttatgatttatggaacctaacttgggtatgctaacatgggtgtctgctcctttgcagatgcgattcaggcttatgctgttgagccgcaatgacccattgtcctgtggactgctactcatgtttggtagattcgtaaatactactgttatatgcttgaaggcgtgtgttggcattgccatgtggggtttgtgtgactcgatggaaactttgctgtcttattgtactttaaaatccaataatttgcgcgattgcggacatctgtaatacagagtttctgtctgggtcgcccacatctggtatgaacaatgttgaagctgatgcttggcatcagtttgccataccgttgattctgttgccttagatgatcgagctgtcatcacc

SEQ ID NO: 262296 - DNA, 697 bp, Zea mays
cagaagcggtctctcaagctaggtcgacgtagagctggaatgtgggctccacaattgttggggtggtaatgatatcggattgcttggagctgtaatgcattttgtatgtttaattattgcttagccatcatttgaacttttcccgctgttttcatacgcagctagacttaaatacattggcctctaccttcttaacattttcaatttgattttgacagaactgtcggcactcattccacacctgttatctcattcgcaatgcaagggttcaccttcttattaatgtgtcttcttgccttcatcttttctgtaggtttaattgactatatgattggaaatgggcagcatcccgaagtttttcatttggtacaaaattttaatttggaggacaagtatcctccattttctcttctgaagggatacattcagaaggccaagcagacttttgtggagatgtttaaaaagagtcaaacacacgagtccttgaactgggctataccaaaggaactatggattgcacattatctagctgagcagaaactcactgattctaagcaacgcagtgctatcatggcagaaattaaatatttgatgagtggatatgaaaagaaacaaaggtcagaaaatctctcatcatgggcttcacagcatccgccaatcgtatctaaaaggaggaacaggaagcgcagggaggagg

SEQ ID NO: 262297 - DNA, 761 bp, Zea mays
ggtgctacacggtctgggtgcaatgtatcacactatttcgttggctgtctatgaaatctgccaaacattctgcagacacaacagagcaggccaagctggtggccaacgattggaagaaaatgattgacaacacagtgtgtcgtagggaacttgacacgctgtctaggggtcttctccaattccttatcgcatataacattgtgtctgaattcaatatccatgatatcatcagtatatttgctatggttcgcaaaggttacaagaataacaacattgccaagctttgcgaggatcttgggcttgcagacagggccacaggtttaattgactatatgattggaaatgggcagcatcccgaagtttttcatttggtacaaaattttaatttggaggacaagtatcctccattttctcttctgaagggatacattcagaaggccaagcatgacttttcgtggaagatgtttaaaaagagtcaaacacacgagtccttgaactgggctataccaaaggaactatggattgcacattatctagctgagcagaaactcactgattctaagcaacgcagtgctatcatggcagaaattaaatatttgatgagtggatatgaaaagaaacataggtcagaaaatctctcaacatgggcttcacagcatccgccaacggtatctaataggaggaacacgaagcgcagtgaggaggagcaggagcaccatgaagcacaatacaaccaggagcagcaggaacaggatgaaaac

SEQ ID NO: 262298 - DNA, 1076 bp, Zea mays
  unsure (1)..(1076): unsure at all n locations
ccacgcgtncggatccaccgccaccaccaccaccaagcactccagtcccgcagcagcatggccggcagcgcgtcccgcctcgccatcctcttggtgctcctggcggcgtcaccgctgcttggcgcgacgcagaaggccgcgccagggccggcgtcgtcgtcgggctcgggcgcgggcgcggcggacgcggcgccgccgacggacgtgaacaaggcgctgaaggacgagcagttcagcgagttccggcagctgctgcacgacacgcgcgtggacacgcagatcaacgcgcagctgacggacagctacaacgggctgaccatcatggcgcccaccaacgccgccttcgacaagatgaaggccggcgtgctcaacgggctgtcgccgcaggaccagatccagctcgtcctctactgcgtgctgccccgcttctacagcctctccatgctcggcaccctcgacggcaaggtcaacacgcagggctccggccacgacgggccctacaggtacgacatcaagcggtcgggcaacaacgtcaacgtgtccacgggcgtcaactggatgctgctgggcagccccgtcagcaaggacttcccgctcgccatctaccccgtcgacaaggtgccgctcccctacgagctgttcgggcccaagccgcccaccccggcgcccgcgccggccccggcacccgccaagtccaagaccaagaagaagaagaaggccgccggcatcgccgagccgcccacggccgacgacgacacctccgcctccgacgaccagaaggcggccgccacgcccggcgccgtcggcagctgggccgacgtcgtgctctcggcgctcgccgctgctgccctcggcgctcgcctcttttgatggggagagggaggatagagtcaggcaccatcgttcagatttgagatcacacggcgcggtgcttctgcggtggcgatcgatcgatcctgcgccgtgcgccgtgcattgccatacaatggtccacggtcgatacaatcatagagttggtgtggcccattcatccatgtaccccaccatgcattgggggtctataaattctttctttc

SEQ ID NO: 262299 - DNA, 446 bp, Zea mays
ccgcagtgtaggctccatcagatccaacgccaccagctagcagcagcagcagcagcatggccaccaccagcacgcctcgcctcgccaccctcctggtgctcctggcggcggcgtcaccgctgctgagcgcagctcaaaaggccgccccgaaggctccggcggcggcgaaggcggcgccagggccggcggcgtcgtcgtcgtccggcgcgggcgcggcggacgcggcccctcccacagacgtgaacaaggcgctcaaggacgaccagttcagcgagttcaagcagctgctgcacgacacgcgcgtggacacgcagatcaacgcgcagctgacggacagctacaacgggctgaccatcatggcgcccaccaacgccggctttgacaagatgaaggccggcgtgctaaacgggcttgtgcctaggaccagaaacagtttgtcctctact

SEQ ID NO: 262300 - DNA, 853 bp, Zea mays
acagcgggacaggcccacagcagaccgctgcgcggctgcgccaccgccggccgaccggcgaccgcaagaccagcagccagcgccctcctcctccctccgcaagaccagcagccagcgcccaagatcatagtaccagccagcgcccattgttttaggccctatttgttgattttgcttatagtgaatcaatctctatttgctcacagtaaatttcaatggcaacaaatagtgaggcattgtgtggttgaacttgtgttgttgaacttgatctgtttctttttgtgctatttggtttgtgaactcaagtactcaacttatgtatgaacatattttatatttgaacttctatgtcaaatctgaaaagacgtttcaacgttcgtttaaacgtttaaatgttgaaaagttggctcataacgttttaacgttttaccgctttaataaccacgttggatgtattatgtcaatattcatagcataggctcgtggaaatattacacttgtggtgctagaaccctggtccttatatttatgtatagcctctggtcgttagataagaggagacaggagacagtatgtgcatgtatttctaatttgcaggagcattcagatttttaagtttccagtgaacacttctgcagagcaatcacattaatttgcatttcttaaactgtaaataagcagaggataaagaaaagctctttataattggaacttaaaacactggttttccatagcacttgcagcgtcaattaattggaaaatatcattgttagccttacaaaataaaactaacgccccatggaatgatggaaaagtaaatatttgcttacctatgggagatgatttattccct

SEQ ID NO: 262301 - DNA, 732 bp, Zea mays
cagccggccgccgccctcttcttctgcgccggccgctgctctgctctgctctgctctcctctcctcagcgacaatcagccaccgctctcctctctcctctcctcagccaggcagccagccgctgctctctggcgcccacagcagcccagccagcagccagccagcagaccatattggtgagtactgattttgtgcaaccatattgcccaacagtgaatcaatcattcaagctctatttgctcaaccaagttgatgaagctattggtgcatctgcacatctcagaggtcgtaattttcctaggagagctgctggtgggtgtgtgagaaggaatgaagaccttgaggaagaggagactaatttagcaaatgaagatgacgaggatgaggaatatattcttgatgatcttgatgtggaagatgaaattgaaggaagcaatagtggaaagatggtgatgatcaaggcgtgtggatgctcatggtcttcatgttgctgagttcgatgatggttgctaatcatgcataaaagttgtaacctgtgttgtgtggttgaacttgtgctgttgaacttgatctgtttctttttattgtaatgctatttggtttgtgaactcaacttatgtatgaacttattctatatttgaatttctatgtcaagtctgaaaagacgtttcaacgttcgtttaaacgtttaaacgttgaaaagttggttcataacgttttaacgttttaccg

SEQ ID NO: 262302 - DNA, 1282 bp, Zea mays
tcgttgacgcgtgggcggacgcgtgggcggacgcgtgggcggacgcgtgactgaggaggcatgtgaccctcttcactcgcttcaccctgttcatcactcgcttgtacaagaagtcacgcaccaaacgggcaagggcaaacaccaccaaagaaggcgagaacgcactccgtccctctcctccaggaccgcccgctcttatcccgtttctcccttctctgggctcggagaatcggagatggcgtccagcgcctctcggttcatcaagtgcgtcacggtcggcgacggtgccgtgggcaagacatgtatgctcatctgctacaccagcaacaagttccccactgattacatacccacggtgttcgacaatttcagtgcaaatgtcgttgtggatggcaccacggtgaatttgggcctgtgggataccgcagggcaggaagattacaaccgactgaggcctctaagctaccgtggtgcagatgttttcgtgcttgcattctcacttgtgagccgagctagctatgagaatatcatgaagaagtggataccagagcttcaacattatgcacctggggtgcccgttgttttggcaggcacaaaattggatcttcgtgaagacaagcactacttgatggaccatcctggattggtgcctgttaccactgcacagggggaggaacttcgtagacaaattggtgctatgtattacattgaatgcagctcaaagacacagcagaatgtcaaagctgtgttcgatgctgccatcaaggtagtaatccagcctccaactaaaataagagaaaagaagaagaaaaaatcacgcaaaggatgttctatgatgaacatcttcggtggaagaaaaatgctatgcttcaagtcctgaatggttcaagggggtcttacatggactgataccacgagtgtgaccccaagttcgcgaagcttgaaatcttgatgtgctcgttgcgcatgtgtatatttgcacctttggttattaatgactagaggtaggtaattgaaactaatctgcttaaccaatgtgcactgctgggcgctggcgtggttagctatatcagttaggcagttcgacagaggtcaaagagattgagattttgttctttcttggcaatgtcacagcttttgtgaatctggtctcatcatactgtccgctagtttatcccccacgattccatggtggaatcaatccatagcaacattgtgttgaatgatcctttgcttttgcgctaagcatataacattccagttttggtgaaagctggaagtg

SEQ ID NO: 262303 - DNA, 489 bp, Zea mays
ctcccagaagtcacgcaccaaacaccaccaccaaagaaggcgagaacgctccccttcccctccaggctccaggaccgtctcctcgcctgctcatctaccgctgctccccttctctgggctcggagaatcggagagaagcgcgcgcggccatggcgtccagcgcctctcggttcatcaagtgcgtcacggtcggcgacggtgccgtgggcaagacatgtatgctcatctgctacaccagcaacaagttccccactgactacatacctacggtgttcgacaatttcagtgcaaatgtagttgtggatggcaccactgtgaatttgggcctttgagataccgctgggcatgaagaccacaaccgcctgaggcctttaagctaccgaggtgcaaatgttttcgtgcctgcattctcagacttccgaatacatagtagtttaggaccatatgtctaaaggctgtccgtactgtggaccacatgaaagggggggg

SEQ ID NO: 262304 - DNA, 475 bp, Zea mays
aggacagcgagataaaaagtgcgggagggacggcctctcaacctgcgcggacgcgtgggggacgggagagcgacctcagcagacaagagccagacgagactcagagagcgagcaccgtgacctctctgtttctctctcttcccttctcgtcttctgcaagaagccacaacaaatgtgaccgtctctgtttctctcatccccttcatcactctgctggtctccctcttccacctctggtcttggccatggcctccagcgcctcccggttcatcaagtgcgtcacagtgggggacggcgccgtgggaaagacctgcatgctcatctgctacaccagcaacaagttccccactgattacatacccactgtcttcgataacttcagtgcaaacgtggtagtcgacggtaccacggtgaatttgggcctttgggatactgcagggcaggaagattacaacagactgaggccactgagcta

SEQ ID NO: 262305 - DNA, 569 bp, Zea mays
ctcgggagttgagaggcatgtgaccctcttcactcgcttgaccctcctcttcactcgctggtcccagaagtcacgcaccaaacaccaccaccaaagaaggcgagaacgtactccgtccctcccctcccctcccctccccttcccctcgaggctccaggaccgtctcctcgcctgctcatccgccgctgctccccttctctgggctcggagaaccggagagaagcgcgcgcggccatggcgtccagcgcctctcggttcatcaagtgcgtcacggtcggcgacggtgccgtgggcaagacatgtatgctcatctgctacaccagcaacaagttccccactgactacatacctacggtgttcgacaatttcagtgcaaatgtagttgtggatggcaccactgtgaatttgggcctttgggataccgctgggcaggaagattacaaccgcctgaggcctctaagctaccgaggtgcagatgttttcgtgcttgcattctcacttgtgagccgagctagctatgagaatatcatgaagaagtggataccagagcttcacattatgcacctggg

SEQ ID NO: 262306 - DNA, 1476 bp, Zea mays
  unsure (1)..(1476): unsure at all n locations
ttctgccacgcgtccgggaaatccaaaaggaactcgagtttttggcgcggttgccgaagaattaagagaattgaatttgactaaaatagtttcattagctcctgaagtattataaatactagtagacgagatatagatcaaagaaaaaattagtagattttgtctcacgtatatgcttaaaaatcctaaatttaaagaaaagggaaaacatgttgattatagaaaaattaggaggaacctagaattagagtcttatgggcaaggacactattgctgatttactaacctctataagaaacgcagacatgaataaaaaaggaactgttcgagtagtatccacaaatattaccgaaaacattgttaaaatacttctacgagagggttttattgaaagtgttcggaaacatcaggaaagtaacagatatttcttggtttcaactttgcgacatcaaaggagaaagactagaaagggaatatatagaactagaacctttttaaagcgtatcagccgacctggcttacgaatttatgccaactatcaaggaattcctaaggttttgggcggaatgggaattgctattctttctacttctcgaggtataatgacagatcgagaagctcgactaaacagaattgggggagaagttttatgttatatatggtaatggccccacctatagtacccaaattctatctcgaacttcctattttgaaaataaaaatagaaaaataggagaaaaatatatgacagaaaaaaaaactagtagagaaaaaaaaaacccgagagaagcaaaagtcactttcgaaggtttagttacggaagccctacccaacggaatgttccgcgttcgcctagagaatgacacgatcatcctgggctatatttcaggaaagatccggtctagttctatacgaatactgatgggggatagggtcaaaattgaaataagtcgttatgattccagcaaaggtcgtataatttatagacttccccataaggattcgaagcgtaccgaagactcgaaggatactgaagatttgaaggataccaaagattcaaaggattaggtttttctggggtaataacttccaagtttcaaaatttaagtgaagagacttattttttccaaaagaatagattcatagtttaagaaaggaatacccatatatgaaaataagagcttccgttcgtaaaatttgtacaaaatgtcgactgattcgcaggcgtgggcgaattagagtcatttgttccaatccgaagcataaacaaagacaggggtaatctttcgaaaaagaagcttttctttctaatagcttttctttctaattaaagtaaaaagtacccacggaaatgcccaaattgcanataaaaaaaatgaaagtaaaggatatattttaacctgaaacggatatctttgtatcttttttctttttgttatttctaactcaatattatgagataataaaatatgacaa

SEQ ID NO: 262307 - DNA, 375 bp, Zea mays
acgaagactctcgcggcgaggagcgctgtgcggaccacacacgcgcgcagaaacctgcgcgagtacgcacctgactccacgacttgttgtgctactgcgctagtttgctcgagcgcggcgcggagcacggggacatgaaatggcacgtgcggcggagatcggtggtttcatggctgcgagagtggcggtggcaacgctcatggcgactgtgcagccagctgcggaggcagccgtggcaccggaggctacgacggcggctacgacgcaggcggtggagacgaccgtgaacgaggcgctgaccgaggatctgagccggacgatcaacggcgctgtgcatgctccgatgaatagtaaggctactagtgaagatacttg

SEQ ID NO: 262308 - DNA, 664 bp, Zea mays
ggcagtgactcagctcagggcctcgggccagcacaccaaccctccagtagtatctctgacgtgcgggctccgccagacaacgagctcacgagtcacgatccaaatcccttttccactccgccggacgtcgagagaggcggtgggtgcgggacgcgaaggcgaagccctagccccctccctgccgcggacgccgatggacccacctcgcgccgtcgccgttcttctcatactcctgcccgtgctcgccccggtggcctccggtgtacctttcgtcgtcctacacgggattggcgacgagtgcgggaacgatgggctgtcatccttcaccaagatgcttggggagtggtcaggctccaagggttactgcattgaaattggaagaggagcatgggactcttggttaatgccacttcaagagcaggcaaatacggtttgtaagaaggtcaagaaaatgaaagagctcagtgaaggttacaatatagttggcctgtctcaggggaacttaattggcagggctgtaatcgagtactgtgattgtggacctccggtcaagaatttcatatcaattgggggttctcatgctggtacagcttcagtgccactttgtggttctgggattcttgtattcttatggatgatctgattaatcagagattattcagac

SEQ ID NO: 262309 - DNA, 258 bp, Zea mays
cagggattggcgacgagtgcgtgtaactatgggctgtcatccttcaccatgatgcttggtgtgtggtcaggctccaagggttactgcataaggaagaaccaaattagaaggatgtgacacacaacaagaggtatgggaattggcttctgaaaaccaggtgcattaggcgaagggtacttcggatccgacgcgctacagtctccgcttgactcgcttccataggggagagaaggcgagggcccgtggcagacgagaagg

SEQ ID NO: 262310 - DNA, 1225 bp, Zea mays
ttgattgtcacccccaccccatcgcaaatcctcgctcgggcaagaagagccaactgaaaagtattcatccaagaacaccaccccacccgctccaagcacaagtttcgtcttgaagagagccgccaccaccaatggcttgttacaacactgcatctttagcggcgactctgctggcgttcgcgctgacgtttcaggcctgcctcgccgggaggaggctcaccgcgctggtgcaggagccggccataaccatgaggtaccacaagggcgcgctcctgtcgggccccatcgccgtcaacttcatctggtacggcgacttctcggcgccgcagcgggcggcgatcaccgacttcgtctcgtcgctgacggcggcggccccggccgcggcgcagccggagccgtccgtggccacgtggttcaagacggcgcgcaagtactacgccagctccaaggtgccgttcccggcgctgcgcctcggctcccacgccgtcgaccggaactgctccctcggcaggcgcctgacggagagggacctcctcaggctcgccgccaggggagccccgagccgcgccatcaacctggtgctcacggccgccgacgtggccgtggacgggttctgcgagtcccggtgcggcacgcacggtcgcgtccccgcggtcccgctccggccggttcgcgtacgcgtgggtcggcaacccggcgtcgcagtgccccgggcagtgcgcgtggccgttccaccagcccgtgtacggcccgctggcggcgccgctcaccccgcccaacggcgacgttggggtcgacggcatggtcatctcgctggcgtccatgctcgtcggcacggtcaccaacccgttcggcaacgggttctactaccaggagggctcggccgacgcgccgctcgaggccgccccggcgtgcgccggcgtgtacggcaagggcgcggtaccccggctacgcgggcgcgctgctggtggacccggccagcggcgccagcttcaatgccaacggggcccacgggaggaagtacctggtcccggcgctcgtggatccggacacgtcgtcgtgtgccaccttggggtagatttcgcggatcgtaaattagtgtttgcgatgtggcggtggtagtgctgtggagagtgttccacgcggctaaaagtttgtgctaaagtagtactgaccaggttgcattatttcatttgttcaatgaaaatgaagtattttcacgcag

SEQ ID NO: 262311 - DNA, 680 bp, Zea mays
cggacgcgcgagcaagaagccaggaaccagctcaaagttattcgtccaagaaccccaccccacccccacgacacatagaaatttcgtcttggagagccaccaatggcttgttccactgcatctttagcggcgacgctgctggcgttcgcgctgatgttccaggcctgcgtcgcggggaggaggaggctcaccgcgctcgtgcaggagccggccatcaccatgaagtaccacaagggcgcgctcctgtcgggccccatcgccgtcaacttcatctggtacggcgacttcacggcgccacagcgggcggtgatcaccgacttcgtctcgtcgctgtccgcggccccgcgggcggcggcgcagtcgcagccggagccgtccgtgtccacgtgggtcaagacggcgcgcatgtactacgacacctccaaggcgcgtttcccggcgctgcgcctcggctcccacgccgtcgaccggaactgctgcctctgcaggcggctcacggagcgggacctccttaggctcaccgccaggggggcaccgagccgcgccatcaacctggtgctcacggccggcgacgtggctcgtggaccgattctgagcgtacaggtgcgggacgcacggtgcgttcacacggtcccgtgccggccggttcacgtacgtgtgggtaggcaacccggtgtaac

SEQ ID NO: 262312 - DNA, 436 bp, Zea mays
gcaacgggttctactaccagagggctcggccgacgcgccgctggaggccgccacggcgtgcgccggcgtgtacggcaagggcgcgtaccccggctacgcgggctcgctgctggtagaccaggccagcggggccagcttcaatgccaacggggcccacgggaggaagtacctggtcccggcgctcgtcgacctggacacgtcgtcgtgcgccaccttggtttagatttcgctggtcgtaatcagtgttttgtggtggcgggtgctgtgcgtggagagtgttccacgcggctgacgattctagtagtgtagtgacctgtgaccatggtggattctttcatctgttcaatgaaaaaaaagaaatattttcacgcacacaccccggtcgattttgccaacaatatactctgttcccccaaagattttgccaggtttgagc

SEQ ID NO: 262313 - DNA, 745 bp, Zea mays
gtgatcttcttgaagaagtttcagacagcgcagatagcgcaaaacacccgtcggcaagtaacattaacaaaaccgaagccgtagaaaagtactcagcagtggacaacagtcaagtgcagaacgcttccaccagttcggctgctaagccagcgacaggcagcgcgagcatgatacagatacacccactgagacccgcggaagaagacagcactaccgaatgcgacagtggtctcgacaacgccagcactagcagcttcgagttccacggagtggagaaggcgacggcggcgacgcagaatccagcagccgggtacttgtccaggcagacttgcatttcctacaagtggaatgacgcatagaaatggatcgtgagccgccagaatgtcagtcagaagaacaacgtcgccaagggcgcgttgcagaaccagacagtaaaccagatgagctccgccgcagccaggggcgccgttgtgcccaaaatctctgctcgtcccgtgcagaaaatgaagagagtgaatccagctttgtctgctccgcgcagtatactggagatgttgtccttcgcttcgtatcagcctaagttggttaggcatgcagatgtctgtccagttagtaacgctggtgctaactcagagcatcacaaggctactgatactggttcatcgattgaagtgaagccctgcaacgatacgagtgatgttgcaacagtccagtcgtcggtgtccgatgagtatgtgggcacaga
